United States Patent Application Publication US 2026/0103690 A1 - sequence listing, part 4

SEQ ID NO: 5160 - DNA, 1325 bp, unidentified
  source 1..1325: mol_type = unassigned DNA; note = element_7ea8d9c
  misc_feature 1: note = core
  misc_feature 2..220: note = LE
  misc_feature 221..1186: note = CDS
  misc_feature 1187..1325: note = RE
  misc_feature 43..212: note = bridgeRNA
tcttaagtttagattttattaaaagtaggtaattttaatatgaatcagaaagaacaaaagagaggagcaaggtcatcttgtatattgagacattgatctcgtttttcttgaggaccccctctcttttactacacttatttcgaacagttctgtgagacttccgatctcgtttttaagttgttgaaactactgtagtgttgttctttcataaactaataatatgaataaaattacaaattattttgggatagacattagcaaagatgtctttgatgttgtagactcttgcgatgttcattatcagtttaccaattgtcagaaaggtttcgatgattttcttgatattcttgacgagtcatcacactgcgtaatggaatctactgccttttatcacgtgcagttggcaaacgcattggttcagtctggcatcaaggtaagcgttgagaatccacttgctgttaagcgttacattcagatgcacctctcaaggattaagacagataagagtgatgcaaagatgatctgtcagtatgcccagcaggcagacttacgtctttgggaagaacgtacaaaagaccaggtaggctgtttacagttgatgagccttattaatcaatatacaaagcagatcgtaatgactaagactaaactcgaaggtgaggctgctcttggaaatcctgtgaagcttgttgtgcgatcattagaaaaaaacctgagaagattaaagaaagaggtcgactttctagaactggaacttctgaggattgtcaaacgagaacatcaggatcttttaactcggatagagagtattgttggtattggtagaaaaacagccgtaacactcattgtccttactgaaggttttgagaagtttgagagcgccaagcaattatgctcctatgctggattaacaccaattattcgtcagtctggatccagtctacacgtaaaagcacggatcagtaagatgggtaatagaagattacgttcaatgctcttcctttgtagtttttcggccaaaaaacataacaaagcttgtattgccctatttaatagaatggttgccaagggaaaaccacgtaaagtagcgctgattgcagtatgtaacaaattattgaagcaggcttttgctattgcaaaatctggagtgccgtatgatagagagtatcgctccgtattacattaaattataagaatgtagttatgctgttaggcttgttggattggaaataaatcgacgtagaagaattattccacttcaacaatgccccaaaaagtatgtgcttaaattaatgaggaaaaagcttggaattctacacagttct

SEQ ID NO: 5161 - DNA, 1236 bp, unidentified
  source 1..1236: mol_type = unassigned DNA; note = element_7eba8a0
  misc_feature 1..2: note = core
  misc_feature 3..227: note = LE
  misc_feature 228..1187: note = CDS
  misc_feature 1188..1236: note = RE
  misc_feature 30..187: note = bridgeRNA
cttgtatctccgttttcgggctcagaccttcatagtgtaggtgaggagggcgttccgggaaggccgggtcacctagaagccatgagcttgttcgttagattggccccccgccctcttcgcctatgccgtggagtatccaaggccaggagcctgcatccacaagagcggtaggcgcaaggtgcagggtcggggggcccggagcgcaagactaggattggagggggcggatgcgcaaggagacggaggcagggatcgatgtgagcaaggacgtgctcgacgtggccgcgcgccgcgatgagcggcagctcgagacggcacgcttcggcaacgacgccgccgggcatcagaagctggtgcgttggctcacgcggggtgggcggacggcgcgcgtcgtcctcgagtcgacggggacctatagcctggacgtcgcgctcgccttgcatcgaacgcgaggcgtagcggtcacggtggctaatccccgggccatcaagcagttcacgggggcgctgatgcagcgctcgaagaccgacctgacggccgccatcgcgctgcgggagttcgcgatccgcatgcccttcgtggcctggcagccgcccgccgcgcacgttctggagctgcgaggaatcgcgcgtcggatcgccacgctcgtcgtcgagcgcacccgcgagcgcaatcgcctccacgccttgtgcgctacggccgagcggtcggcggtggtctgcaacgacatcgaggtgaacgtccgccatctcgaccgacgcatcgagctcctcaccgaacaggccatcgccctgatcgccgaccatgccgacctgcgcgaagcgttcgagcgcttggtctcggtcccgggcattgcggcgcacagcgccgtgcagctgctgcccgagctgctggtcctgccccccggcatgaccgtgcgccaatgggttgcccatgccggtctcgatcctcgtgcgcatcagtcgggcacgtccgtcgacaagcccgcgcgaatctcgaaggtcggcaaccgcccacatccggcgggtcctctacatgcccgcgctcgtcgcggtgcagcacaatcggcacgtgcgggcgttcttcgacaagctcgtggcgcgcggcaagactcccctccaagcgtacgtcgccgtcatgcggaagctccttcacgcgatctatggaatgctctcgacacgcactaacttcgtgggggcgaagttccacgcggccgcttgacgacggagagagtat

SEQ ID NO: 5162 - DNA, 1145 bp, unidentified
  source 1..1145: mol_type = unassigned DNA; note = element_7eba924
  misc_feature 1..2: note = core
  misc_feature 3..179: note = LE
  misc_feature 180..1130: note = CDS
  misc_feature 1131..1145: note = RE
  misc_feature 12..178: note = bridgeRNA
cttgtatcttggaattgtggtacatgagacgctcggaatgtgacagatcgatacgcctccggtccgatgagaccgtggccgagccaggtcgtcacattccccagtccacaagcccgaacagttgccagggctagccagcccgtatgacgacaaggacgggcttcacgaaggaggaggcgatgcaaccctcgtcggtctgtgtggggattgatatttcgaaagcccagctggacctcgtggtggagccgggaggtgaatcgttcaccgtgccctatgatgatcaggggctcgcgacgctgatcctgcggctcagcccgatggtaccgagacggattgtcgtcgaagccacgggcggtctggaacggagactgctgcgcgccttggtggaggccgccttgccggtcatcgcggtcaatccgcgccaagtgcgggactttgccaaggcgaccggccagttggcgaagaccgacgcgctggatgcggccgtcttggcgcgctttgcggtggtgatccaaccaccggagcgggcgctccccgatccgcagacgcaagaattggcggccgtgctggcgcggcgtcggcaagtcctggcgatgcagcgagccgagcagaaccgcttggaccgcgcgtcgacacgggtgcagaaccgaatcgaagcccatctgcagtggctgaacacggagctggctcgcctggatgaggacctggatgacatgattgcccagagtcccgtgtggcgcgaccgggacaatctgttgcagagcgtgccaggcatcgggcccgtgatgagccgcaccgtgttggctgagctgccggagttggggctgctgaatcgcaagcaagtcgcagccttggtaggcgtggcgccctttaatcgcgatagcggccgactgcgtgggcaccggaccatttggggtgggcgcgccccggtgcgcacggctctctacatggcgacgttggtggcgacgcgctggaatccggttatccgagcgttctaccagcgtctgcggaccgccggcaagccaccgaaggtcgcgctggtcgccgccatgcgcaagttgctcaccattctcaatgcgatggtgcatcatggaactccgtggcgatccgcagtggtgcagggggcttgacatttaagacagttg

SEQ ID NO: 5163 - DNA, 1490 bp, unidentified
  source 1..1490: mol_type = unassigned DNA; note = element_7ebaeef
  misc_feature 1..3: note = core
  misc_feature 4..242: note = LE
  misc_feature 243..1439: note = CDS
  misc_feature 1440..1490: note = RE
  misc_feature 10..215: note = bridgeRNA
attcttaatatatgagtagaggcttttaaagtctctgctctttttttatgatgaaggtgattggctaacgaaatctgcaattgggacaccacgcccgacgataaatgtgttagctgcccttcatcatcttacattcgattcagcaagttgggacagatgctgctcccgtttaactaaagaatatgggtggatcttgaagagcggaaaccaatcatattaaaacgaaaggagatcttttccaaatgattgctgttggtattgacgtttctaaatccaaaagcacagttgccattctcaatggggatggcagcatacgtgccaagccctttaatgtgcgacacaccgctgacgaactactggcgctggtcaactacatcaaagggacttcggaggttcccacaatcctgatggaaccaaccagccactatcattatccgcttctgaaagcgttccaggatgctaatctgcctgtctgtctgattaatccctaccagatgaaaaaatatggagatactgcgcttcgtaaggcaaaaacagacaaacgggattctatccggattgcgcagtatgctcttgaaaaatcctactcgctaattccgtatacgccttccgaccagaagtatgaagaccttagatttctgtccagacagtacagccaaaggctttcaacactcacggtcaataaggtccagttattagctcttttggatcaaacaatgcctggtataacatcactgcttcctcttaaaagcagagatccggataattgtgtgcttttaaggttcatcaagcgttttaagtccttcgatataattcgaaaaatgggtaaaacacgcttcttggaaagctttcaaattttggtcagaaaaacaaaaggccggcctgcgagcaccaagggtttgcgtatctatgagttggcgcttaacagtgttaccacgcgcggagacaatcctctaacggctatgacgcaggaacaatgcgtagctcttatctctacgtctcagaaagctgcggatgaaataaacctgcaaatgagaaccatagccgaaaccttgcctgaatataaagtgcttcgctccatggcaggggttggggaccgtctcggaccggttatccttgcagaaattggcgatattcgtcgctttcatagcgggaaagcacttaacgcctatgcaggcaatgatgcgcctccgtaccagtccggacagtttgagagccggaatcgtcacatctccaaacgtggcaacccggctctcagaaaagcttgttttgaggttatgcaggcgctcaaactaacaaaacctcaagatgatcctgtttacctttttatggccaaaaaggaacaggaaggaaaaccttataacgtagccaagatggctgccgtaaataagttccaatggcctgcaatagcaggtctggttaaggtcgcctttatttagttttccaaagcttcaatttttcttaaaaaactcttgacaaacattagcaag

SEQ ID NO: 5164 - DNA, 1504 bp, unidentified
  source 1..1504: mol_type = unassigned DNA; note = element_7ec2151
  misc_feature 1..2: note = core
  misc_feature 3..201: note = LE
  misc_feature 202..1470: note = CDS
  misc_feature 1471..1504: note = RE
  misc_feature 6..203: note = bridgeRNA
ctgatggctctaccctcccttccgggggccgaccccggggaacgcttgcgtcgcttgtcccttgaggactgagatgagacggcgtccccgggcgccggcctcggaggcccgaagcccaagagggtgtcgtcccgtgaggactggtccatcagcacggctctgcgcctccgctcccgtccactttggcttcaggaggtgtcgatgctgtcggtaggaattgactgggcggaagacttccaccgccttgccctgggccgtcccggcgagggcctcctcgaggagttcaacctccctcaccagcccggcgccgtggaacggctggtggcccgaatcgcccaactcgagtccgacccggccgaggttcgcgttctcatcgagacccgccatggcctgctggtggaggcgctcctggacgccggcttcacggtggtgccagtcaaccccgacctggtcgcccgccggcgcgggccggcccgcaagaaggacgacggggaggacgcgcgcatcctctgccggatggggctggaccagttccttgacctccgcaagctggtcccccacggcgagctggccagcgagctgcgtgccatcgcccgcgatgacgcccgctcggctcaggaccagcgccggcttctgaaccggctccggatggacctcctcaacaccttcccggccgccctccaaatcgctggcgaggacctggcggctcccactcagttgcgactgctcgagcgctggccgactcaccaggccctggccgcggccacccctgaagagctggtcgccttcgcccgcgcccaccaccacggctggccagagcgcttcgccgaaggagtcgcccaagcgctcaccggcaaccacttcacagctcgcctgggactggtccgggccaaggccgacagcatccggctggccgcccagcagctgctcctcatcggtcagcaacgcagggcctgggagcgccggatgggcgcgctcctgctgggcgctcccagagtcggccgcgctcgccagcccaaggccgacgagctgggggagaagttccctgacggcgagatctacctgagctttccgggccttggtgatcgcctcgccgccagggttgccgctgagatcggcgaccacttccagcagttcgagtcgccgaactcgctccaatgctatgccggtaaggcaccggtcacccgccgctccggcaagtcggagttcgtggtcgcccatcgcctggcctgcaaccgccacctcgccaacgccgtccagcagtgggccttctgctcgctcaaggagtcgggctgggcgcgcgagttctacgacgccaaggtcgcccgcggcctcggccaccacgcagccctccgcagcctcggcaaccgttggctggaggtgctctggcactgcctcaagaagcgcgtcgcctatgacgaggccacccatgtcgccaaccgcaatcgagccctcggcaaggccgcctagggccgaactaatgtttgtggttgacaaagggtgt

SEQ ID NO: 5165 - DNA, 1180 bp, unidentified
  source 1..1180: mol_type = unassigned DNA; note = element_7ec263c
  misc_feature 1..2: note = core
  misc_feature 3..199: note = LE
  misc_feature 200..1165: note = CDS
  misc_feature 1166..1180: note = RE
  misc_feature 6..204: note = bridgeRNA
cttgtatgtttaagcctgaccagtacggtaaagtctgaacgtagccagactagaccgtgcagtttgtcgcgcgcttgggcgttggagcccgtgactgagtacagaacgcacggtcgccgtgctggtcttcccgaaacccgaacggttacgcgcgccggccctgccgagtgcgcatgtacaagcatgggatccgaagatcatgtctgctccttcattagtaacggtcggcattgacgtggcaaaagaccatgtcgatgtttccgtgctgggtgcccatctggacgcccagcgattcgataacgatgcggagggccattcggccctggccgtcgccctgcagccgctggacgtggcgttggtcgtgatggaagcgaccggcggctacgaggcggaaatggcttgcgctttgcagagcgccggtttgccggtcgcggtcgtcaatcctcgacaggcgcgcgattttgcccgctcgatggggcgtctggccaagaccgatcgcatcgatgcccgcatgctcgccgaactggcttcggtcctggtgcgtcgcgaagatctgtcccgcttgctgcgccccgttccggatgagcgccagcagtggctggctgctctgttgacccgccgtcgccagttgctcaccatgctcctctcggaacgacagcggctgcagattacgccggtcggtctgcatcccagcctgttggctatcattgctgccgttcaggctcagctcgacgacatcgacgcacagatggtcggacacgtacgcgagcacttcagtgaactcgaccgcctgctgcaatcgactcacggcatcggtccggtatccagtgcttgcctgatcgcagaactgcccgaattgggtaagctcagccgtcgccagattgcggctctcgtcggcgtcgcgcctattgcttgcgattccggctcccgcaatggcagacgacgcgttcagggtggtcgctttgaaatccgtcgcgtgctttacatggccacccttaccgccacccgccacaatcccgccatcaaaaccttctatcaacgcctgaaggccgccggcaaactgcccaaggtcgcgttggttgcctgcatgcgcaagcttctgaccatacttaatgccatggtcagatccaacacaccttgggacgattcgctccataaggcttgacttggtagacggtta

SEQ ID NO: 5166 - DNA, 1373 bp, unidentified
  source 1..1373: mol_type = unassigned DNA; note = element_7ec6a50
  misc_feature 1: note = core
  misc_feature 2..81: note = LE
  misc_feature 82..1098: note = CDS
  misc_feature 1099..1373: note = RE
  misc_feature 1149..1368: note = bridgeRNA
ataatgaaatggacgctccaacttttacggcatcaaagtgcctaaatgtgagtgttaaaactcagaagaaggagcatccacatgaaagtatctactcttggtatcgacttggcaaaaaatgttttccagcttcatggtgtcggctgcaacggtcaaactgttcttaagaagaaactcacccgcgataaattcctcccttttctcatgcaacttgaaccttgcctgattggcatggaggcctgtgcttccagtcatcattttgcgcgtgttttacggcagtatgggcatgaggttaaactcattccccctcagtatgtgaaaccttatgtcaaaacgaataagacagatgccgctgatgcagaagccatttgtgaagctgttgcacggcctaatatgcgttttgttcagattaaaacggcagagcaacacgctattctggtgctgcataccgagcgaaacatccttatccgcgaacgcactgcttgtgctaatagtatgcgggccattttggccgaatttggcatcatcatgcctcgcacattaagtcagctgtataagaaaatccctgaaatattggaagaatatgataacgagttatcacctttgtccgttgtagtgtcgcgcgtcaactgtacacctttcaggatgtgtaagatcagatcacgtgcatcgaacagaactagccgttgggcaaaaacacaacccgcctgccagcgggtcatgaaagtccccggcgtgggattgatgacggcgacctaccttgtggcgtcagtggggaatgggcaacaatttcattcagcgaaacaatttgccgcctggttgggattggtgccgagagagttctcaagtggcggtaagcagagattgggccaaatcagcaaaagaggtgaccgctatttccgttatcttctggtccatggtgcgcgggcagttgcagccgttattgagagacacaaagacaatatgccgtggctttacaggctgttgaataaaaaggcctataacgtagccgttgtggcacaggccaataaaacggcacgtattttgtggtcgatgctggttcatcatacggaatatcgaaccttatccgtggtttgagataatctcaaacacggataaggctcaagaacaaaagtgaatacgtttcaggtaattgcaagtgtaattattgagatggcaaaacaggtaagaccgcaagtgagagactccgtgagccgccggggcatttggcccgtagggatgataggaactcacttggcggatttcatcatggttcgggcgcaatcgcgcccataaagaaaccggatatatggctgcaatacctgagcgctattttcaagaaaaaacacttggtttattgggagcgtccatat

SEQ ID NO: 5167 - DNA, 1634 bp, unidentified
  source 1..1634: mol_type = unassigned DNA; note = element_7eced79
  misc_feature 1..2: note = core
  misc_feature 3..290: note = LE
  misc_feature 291..1466: note = CDS
  misc_feature 1467..1634: note = RE
  misc_feature 51..266: note = bridgeRNA
ctcgtattatatagtagtagtttttagagaccctctccaaggtctttattacttaagtcatagtcttttctttaccttttctataggttcgactatgatatttaagatgctgtggattggttaatttctcctaccacttgatggtttacgaaaggctccaaccacagtctctttgtttatttgttaatcagttagataccgcatgacggtttatttagaacgaggttacaatcgcaaggagttccctgtggttctaaaacagcattaatacatttcaaaggagatttattatgatttacgtaggaattgatgttgctaaggataagcatgactgctttatcaccaactctgatggagaagtgttatttaaagcatttaccatcgctaacaacctgaatggtttcaatgatctttatcaaaagattgaatccgttatggaagatataacaaaagtaaaagtaggactggaagccaccggacactatagttacaatcttttaggatatctcattgataaaggtttggccgcctatgttatcaatccgttacatacaaatctgtacagaaaaagtctaagccttagacagacgaaaacggataaagtagatgcccgcacgattgcttctatgctaatgtctgacgtgaatctaaagtcctactcagacacatcttaccacaatgaagagctaaagtcattaactcgttatcgttttgataaggtacaggaacgagcaaagctcaaaacttctgtatctaggcttgtttgtattcttttccctgaattagagaagcttgttccaacgctccatatggcatctgtttatgctttgttatctgaatttccatctgctcacgcagttgcatctgcacatcttaccagacttgccaatctactttctgaaaattcacatggcagatataataaagataccgctatcctgtttcgtgaaactgccaggaactcgatcggttcaaatatgcctgcaaaatcattggaactgaaacacactattaagttaattcacgaattgacttctgagattgatgaaatcgaggcggaaatcaaatccattatggataccatcaattctccaatccttacaattcctggtatcagttatcgcatgggtgcaatgattattgcagaaatcggagatttcagccgttttgattctcctgataagatacttgcttatgctggtgcttcaccctctacatatcaatcaggacaacttgatggggcatactctcacatggaaaaacgcggctccagatatttacgctatgctttatataatgctgccaaatatgtctgccactgggatcctacatttgctgaatatctagccaagaaacgatctgaaggcaagcattacaatgttgccatatctcatgccgtcaaaaaactggttcgagttatttaccatcttgagaaaaccaaccagcaatatatcaaagctgcttaagttttttaattcaatactccttttttgagcacctgtaacgatgctctttttgtcatgcagttttcaaggttcaaagaactctaactgagttctcaacatatctaaaatacatttctgtactttattcaaaaaaaatatcattttaggtcttgacttttaatagttagt

SEQ ID NO: 5168 - DNA, 1362 bp, unidentified
  source 1..1362: mol_type = unassigned DNA; note = element_7ed910d
  misc_feature 1..3: note = core
  misc_feature 4..88: note = LE
  misc_feature 89..1102: note = CDS
  misc_feature 1103..1362: note = RE
  misc_feature 1103..1348: note = bridgeRNA
tgatggggtggacggcccctgcaccgctgcatcggcatgtcatagtggcagccgatgttgtcagccctagcagataggagtcatccccatgcagatcaggatcgtcggtttggacatcgcaaagcacgtttttcaggtgcatgctgctgacgcagagggtcgtgcggtcgctcaggtgcggcttcggcgtgcgcagttggtcgagtactttcagaagttgccgccctgcttagtgggcatggaggcatgtgcgacggcgcaccactgggcgcgcgagttaattgccctcggccacgaggtgcggctgatgccgccgacgtacgtgaagccctacgtcaagcgcaacaagactgacgccgctgatgcggaagcgattgccgaagctgtgacgcgaccgacaatgcggttcgtcgctgtgaagtccgccgaccagcaagcggcacttatgctgcaccgagcgcgtgagcttctggttcgccagcgcaccatgctggcaacaggcctgcgggcccatctcgccgagtttggaatcatcgcaccccaaggcatccaccgcgtcgagaagctcgcagccgaggttcataacccggcggtaccaccgttggcgcgtgaggtgcttatgcttctcgtcgccgagctcgccagcgtctggcgacgcgtggagacaatcgaggcgcggctgatagctcttcaccgcaccaatgacgtcagtcgccgccttgcctcgatcccaggcgtcggcccaatcacggcgatggcgattgccaacacggtccccgatcccgcgatgttcaagtcgggtcgtgagtttgcggcttggctcggtttgacgcccaagagccactcgagcggtggcaaggacaagctcggacggatctcgaagcgcggagaccgctatatccgtcacctgctctacgtcggcgcgggaaacgccgtgcgcttcgccaaggccagagccgcgacaggccaggcgtggatcgagggtctgcaacaacgccgaccgccgaaggtcgtcatcatcgcagtagccaataagatggcacggatcgcctgggcgctgatgatgcggggcggcacgttccaatcgccggctaccgcttagcataaggagaggcgtaccccacggattgcgagggcgaaagtgagatgatggcacgaccggtcggaccggggatcgacaaagcccgcagagctttaggcgcactcgagcgcgacccgttgatgaggcgtcgatccgcgaactccatcagggccagcggtcatgacatgggccgcacaaacaggccgcatacatgaacgcatccgacccgagcgttgccccactctcacagaaaaccttgcaacgcaggggccgtccataca

SEQ ID NO: 5169 - DNA, 1627 bp, unidentified
  source 1..1627: mol_type = unassigned DNA; note = element_7ed970e
  misc_feature 1..3: note = core
  misc_feature 4..259: note = LE
  misc_feature 260..1495: note = CDS
  misc_feature 1496..1627: note = RE
  misc_feature 8..233: note = bridgeRNA
gttcgtattataaggttagccagataagaaaaaatttctggttgaccttattttatatggtcttattataacagtagccagggtagaacgtaactgctcgtggggcattgaccccgtcagctaaacagttcgccccctacttgttgaaacatgattgaggctggttgggacctagatctcgtataacaagcgaagctgtgatactgcatggagggttaggggttactggcaaatcaatagtttaggagggagattataaatgaatccagtcataggtctggatgtttcaaagggagaaagtcaggttcaagcatttcttgataaggggaaaccatttcgtaagagttttaaaataagtcataccttggaggggcttgcttctcttaaagaatttcttgaggaagtgaaagaacaatcaggtgtaaaaccaccaattattttagagtcaacggggcattatcaaacaccagtggttcattacttagaggaacgtgggtacttgttaattatcattaacccattgatttcctataaggcgaaaagttcgagtttaaggaaggttaagaccgatgcggttgatgcttatcacctctgcgagctattttacaaagaagagttagaaccctataaaaagcgtggagttcaactcttaaaccttcgtaatctaacaagacaacatgaaaatattacaggtacgctgaatcaaactaaattacaattccaagccattcttgaccaagtgtttcctgaatatagaggcgtttttggtgatctatattcagtggtgtcgctcttaactttattagagtttccatcttctgaagatattctaaacgtaaatgaagagacactaactgaaaagataaatgagctttgtaagagtcgttcaataagatgggcaaatgaaaaagcgaatgaacttatagctgcggcaaaacgtaatccattcgaaaagaccgtttaccagagccatattttaagccttggaatgttcatcaacattattcttcaatataaagagcacctatcaaagttggaatcagagatagatgcccttgccaaagaggttgaagaatataatattatcaaatctattcctggtattggagaaaaaatcgctgcaacgattatctcggaaattggtgaaatagatcgatttgataaccctaagaaacttgtagctttcgctggtgttgatcctagtgtattcgagtctggtaagtttacagctaccaaaaatcgtattacgaagcgaggttcaagtaggctgcgtcatgccttatatatggcagttcgatgtgccattcgtgattgtcgcaaaaagaaaacgagcgatgaaatcattcctcgtaataagaaattacgtgagttttatgataaaaagcgtgaggaaggaaaaccttttaaagtagctgttattgcttgtgttaataagatcttacactggatttacgccctattaaaaagcaagagtgctttccaagatttagcctaaactctatatctaactaaataaaacaaaaccttccaataaaatcataaaggaaggttatttggtatgtctatttttagtatagcatgtggtttttatgatttttatagaaaaatattgacaaactattagctg

SEQ ID NO: 5170 - DNA, 1399 bp, unidentified
  source 1..1399: mol_type = unassigned DNA; note = element_7edc94d
  misc_feature 1: note = core
  misc_feature 2..91: note = LE
  misc_feature 92..1123: note = CDS
  misc_feature 1124..1399: note = RE
  misc_feature 1173..1394: note = bridgeRNA
caatgggatggactcctcctcacctatcggcatcgatgtgccaaactggtaattgcaccaccagttaacggtgaaaacggaggagtccactatgaagattagtcgagtaggtgttgatttggcaaaaaatgtttttcaactgcacggtgtcgatcgccacggtaaaaccgtattgaagcgtcgattgtcgcgcgataaatggataagcgctttgataaagtctgctgaacctgactgtgagatcggcatggaggcctgcggcggtgcgcatcactgggcacgcgtgctaacgacgaagggttttcgggtcaaactgattccgcctcagtttgtaaccccctacgtcaagagcaacaagaacgatgcaaaagacgctgaagcgatttgcgaagccatgagtcggcccaatatgcgttttgtaaaggcaaagacggtggagcaacaggacattcaggcgacacaccggattcgtagtgagctgatgtgtcatcgcacggcgaaggccaaccaaattcgtggcttagtgacggagtatggcctggtagcgccattgcaaatggcttctctgcgagcagccatcccccgctggcttgaggatgccgagaatggattgaccgatcggttccgcaccctgctacacggactttgggaagacctgcttacattggaccagcgtattgaaaccctcaacggggaaatcgagtccattgcaaagagcgatccggtcgcccaacgccttcaacaactacgcggtgtgggtcccctggtcgcgacggcattgattgccaccgttggaaacggtgaccagtttagtaaaggtcgccagatggccgcgtccgtgggtctcacaccgaggcaacacagttcggggggcaaggatcgattgctgggtatcagcaaacgcggtgatacctatttgcgtagcatcttaatccatggagctcgctctgtggtcgccaacgccaagcataaagatgatcgcttgagtcgttgggtgacagaattggcacagcggcgtcatcccaatgttgcggcggtagccttggccaacaagaccgtgcgtatggcctgggcaatgatgaatcatgatgcagactatgatccggaatttgcggcgagctgatgtaggtaagccacaagtatgagaagtaagtagagagaggaaccttaaccacgattgcgaagtaagctgaatgatggcgaactggtcgaaccggcgtcggtaaaacctgataatgtccatgtgcaccaagcacgacaaagcgattaggaactgacgcgcgaatagcccattatggcccggcatcaacgtatgccaactttagaggccggatatacgtatgcagtcgagccaactgtcatcaagcaggttacttgcaaacgaggaggagtccatata

SEQ ID NO: 5171 - DNA, 1617 bp, unidentified
  source 1..1617: mol_type = unassigned DNA; note = element_7ee04d0
  misc_feature 1..2: note = core
  misc_feature 3..248: note = LE
  misc_feature 249..1484: note = CDS
  misc_feature 1485..1617: note = RE
  misc_feature 7..222: note = bridgeRNA
ttcgtaatataaggttagccagaatttactggtaaacttgttctataagatcttattataacggtagtcggggtagaacttcacatcagtgggacttgacctcgttagctaactgttcactccctaattgtataaacatgtttcaggctggttgggacaatgtgatcccgtttaacaagcgaacctatgacattacaagaagccttaggggttaccgactaatttaatattttaggaggagatcgtgtatgaatccagtcatcggtctggatgtttcaaaaggggaaagtcagattcaagcctttttagataaaggtaaaccttatcgaaagaactttagtattaagcatgacataaaagggttgggaaatttactagaattccttcatgaagttgaaaaatcagctaacaaccaacctacggtcgttttggaatcaactggtcactatcattatccagttattcaatttttggaggagcaaaagtatgtctatattattgtcaatcctcttatctcacatcgtgccaagagttcaagtctacgtaaagttaaaacagatgcagtagatgcctatcacctttgtgagctgttttataaagaagagttggaaccttataaaaagcgaggtgttcaacttttaaaccttcgcaaccttactagacaacaagaaagtattgcagaaatatcagcaaaaactaaaatacagttacactccttgttagatcaggtattccctgaatatagaggtgtgtttgggagtttatattcaagggtatctttgcttactttactagcatttccaacatctgaggcggtattaagtgcgagtgaaagtgaattatcagagaagataagttcattatgtaaaagtcgttccgacctttgggcacaagaaagggcaaaaaagctaaaaaaagcagcccttcgtaacccgttccagaataacctgtatcagagcaatattttcaatcttgaaatgttagttaatcttgttcttcaataccaagagcatctatcaaagattgcgaatgaaatagattccctcgctaaggaaattgaagaatatcatattctccaatcgattcctggaatcggagaaaaaatcgctgcaacgattatttccgagattggagagattgatcgatttaataatgccaaaaagctcgttgcattcgcaggagttgatccgagtgtttactcttctggtaagtttacagcatcagtaaatcgaatcaccaaacgaggatctaatagactacggcacgctttatatatggctgttcaaagtggtattcgtgatgctcgtaaaaagaagacgaccgatgagataatagcacgcaataagagactaagagagttttatgataaaaaacgtgaagaaggaaaatcctttagagtagcagttattgcatgtgtgaataagctcttacactggatttacgccctactaaaaagcagaactactttccaagatatagcataaaaactatatctaactaaatataacaaaaccttccaatcactgaatagtggagggttatttggcatgcgtatttttagtatatcatgagaaatttaatttttttagtgaaaaatattgacaactattagctggt

SEQ ID NO: 5172 - DNA, 1433 bp, unidentified
  source 1..1433: mol_type = unassigned DNA; note = element_7ee443a
  misc_feature 1..2: note = core
  misc_feature 3..258: note = LE
  misc_feature 259..1413: note = CDS
  misc_feature 1414..1433: note = RE
  misc_feature 6..241: note = bridgeRNA
ctaatgggacctaccaagccagccaggttcggcagacttggttgctggtagccgccggtgggtgagcactctctccacctggacttcgagtcctgggatcagatcgtgcccccgccggtgcgccaggaggccgtgatcgctgatgggatgtcgtgcccgctcagtgtggcgtgagcactcgatccattaggtcgcgagcgaggtcttctgcaggctgccgaaccaacgcccggctgtcgatcaggggaggtaacagaggtgttgttgttcattggggatgactgggccgaggaccatcacgacgtggaggtccaggatgcccagggccgggtcctgcgccgagttcgattgccggagggtatcgctgggatcaccgggttcggtgagctggtgggcaggttcgccgacgacgacaccgaaccctcggatgtggtggtgtgcatcgagaccgaccgtgggccatgggtcggcgcgctggtggcggccggctatcgggtgttcggtgtcgacccgaaacaggctgcacgtcatagggagatcctcggcagctccggggcgaagagcgacaagggcgacgcgcatgccctcgccgacatggcccgcacccgtgctcatcaacttcgacaggtggccgcggactccgacgcagcgcaagggttgaaggtcgtcacccgcgctcatcagacgctgatctgggaacggacccggcacatgctgcggttgcggacggcgctgcgggagtacttccccgccgcgttggaggcgtatcagccgttcgatctgaccagtcgggccgcgttgacgctgctggccaaggccccgagcccggaggcggccgccaagctcacggccgggcagatcatggcggcactgaagggacatcgcaacaaagacggcaaagcagcggcgatacaacagatccttcggtccgagcagcttggtcaacccgagatcgccaacctcgagaaggaggtgaaggaccattttggccggcacccggacgctgagatcttgctcagccagcccggcctgggacagatcctcggtgcttgggtgctcgccgagttcggggacgcaccccaccgctacgccagcgccaaggcacgcaagaactacgccgggaccagccccatcacccgccagtcggggaagatgcgggtcgtgaccgcacgccacgtacacaacgatcggctcgtcgacgccctgcacgggcaggcctcctgcgcgctcctgcacgacgatcaggtccgcgcctactacgaccagctccgcgcgcgcgacgtcgacgacaacgccgccctgcggcagatcggcaaccgactcgtcggcatcctcgatggctgcctcaaacaccgcacgacctacgaccaagcaaccgcctggtcacaccgcctcagcagtatcgctgcttgacactcaacctccagggatgt

SEQ ID NO: 5173 - DNA, 1654 bp, unidentified
  source 1..1654: mol_type = unassigned DNA; note = element_7ee820b
  misc_feature 1: note = core
  misc_feature 2..310: note = LE
  misc_feature 311..1486: note = CDS
  misc_feature 1487..1654: note = RE
tggtatatacaaattaggctcatccagccaagcataacttgtatgcgtctcctttctctaccgggtttagtatcggtccggtaaccgtgtagaattgagatcgtgaatgcgtacctgtacttttcattgttgtagctttgactacgtggaggattatctggccgcttcgttgtataggtaactgtgattagttagatgagcccttctcttttcttgaagtgagttcacattttgaaccatactctctgatactttttgaggcggtggcacaggtattcgtcacattcaatctttaaaaggagttattactatgatttgcattggcattgatgtcggtaagttcaagcactgtgctgcagtgatggatgacaaaaccggcgaagttcttatcaagtctttctttttcacgaatgatcagaaagggcttgatctgttttattccaaaacaaagcagtttcttcatcgtaaacatgctgtaggcatggaagataccgggcactatatgatcaatctgacgaaatttcttctggagaagaagttcaccgtcaaatatatcaatccaagatccactgctctgcgtcgcaaagagcttggtatgtcggccaagaatgaccgtaaggatgctctgcttatagctgaaatgctcagcgagaagaagttctggcgttctgtctccgctgtgaccatgcaaacagataagctgcgtgagctgactcgtctttatcaccagctgaaggagcagcagaatcaggatatgaaccgccttcaacgtgctctcgatattgtcttcccagaagtaaatactctctcctggacaagatattctcagtcctatatgcagttcctgtccgaatatccaagtgctgcttctatcgcttctgaagatatcagaaaccttcgtaaagcccttgaggtaaacggacgcggcagacgctctaaggtgactgccgaagagatcaaagaagctgcacgtaattcagtgggtgatgacaacacagccgttgcgcttgaagttcagtctatgattgctctgatcaatactagagctgaacagattgacactctggataagaaaatagaagaattcagtcaccagctaaactctcctataacttccattcccggcatctcttacataacaggaatgactattcttgcggagatcggcgatatcaacgactttcctgaagcagcgaagttgatatcctatgccggtatggagcctcttgtgcaccagtcaggcaaatatgacgctgcacacatgcctatttccaaacatggatccaggtatctgcgcaaggccctgtatcaagctgtcttcacagtctgtaaatactgccaggtcttcaatgattattatactaagaaacgagatcagggaaagacttaccgttgtgctcaaggacactgcgtccgcaagctcctgagagtgatatacaagcttctctccaccgatacagtctacgattctgccttagtacactaaccattgattcattctgataaacataatccacatcatagtcaaagctacaaatgtagttgttttaactgtactttattcacgatttcaaagatcacttgtgagattctgctggatttcgtcttaaatctcactttctgtcaatttctacttgacttccttatagttaaa

SEQ ID NO: 5174 - DNA, 1484 bp, unidentified
  source 1..1484: mol_type = unassigned DNA; note = element_7eea941
  misc_feature 1..2: note = core
  misc_feature 3..177: note = LE
  misc_feature 178..1164: note = CDS
  misc_feature 1165..1484: note = RE
  misc_feature 1..201: note = bridgeRNA
cttgtaatagcaaaatgtgtttatgttggagcgttccgagaggaacgcccgaccgagggtggcgacccccggtcgggtggctggcgatcggatcgcgcccaccctcagccgtcgtggctgcgagcgtagcaggatcgcgtcagcctcttcaccggacccggatggttgccggaacacatggttcgcttttacaaggcagggtcgacgaagatgacacagactaccacactcacggctggaatcgatacgtccaaagacaagctcgacatcgcgattgatgacggcacggcgtgctggcatgacaaaaacacggcggcaggttggcggcgtgttgccgcgcgcctggccgaaaccggcgtcaggcgggtcggcatcgagccgaccggaggctatgaacgcggcgtcgtcaagcatctgcgggagaggggcttcaccgtcctggtcctgcaaccgacgcaggtcaaggcctatgcgaaaatgcatctgcgccgggccaagaacgatgagatcgatgcgggtctcatcgcgggctgcgccgccggcctcaagccgccggcgattccgcccgacgcccgcctcgaagcgcttgccggacagctgaccttcgtcgagcaaatcgaggaagatatggctcgcctcaagacccggctcgaacatgtcgacgatgcgcggctgcgcggtatcatcaaggccgacatcgccgcgctcaagatgcggcgcgccgccgagatgcttcggattatcaaggctttgcgcgcccataccgatctcgcccggcgctatcatctggtcctcagcgtcccgggcatcggcgagcgcaccgcgatcgcgatcatcatccgattgccggagctcggacgcatcagccgcgaggaggccgccgcgctcgccggtcttgctccctacgacgccgacagcggcaagcacaaaggccagcggcatatcgccggtggccgggcgcgcttgcgccgctcgctgtacgccgccgcgctgcccgcagcgttccggtggaacaaggcacttatcgaactctacgcccgtctgatcgcgcgcggaaaatgtcataaagctgcgcttgtcgcatgcgccagaaagcttctcatctatgccaatacggtcgtccagcgcgggacgccgtgggttgaaagcccggccgccgcctaacggtgtcggcagctgttcaagttgtccgcttcgcctgacgatcgatgcgggccggttcgaaactgacggacgccccggcgtgaggccagggcgacggcggagctatgccttcaatcctctttccggacagtttctttgttcgacctgaggaccgtttcttcgtcccgacctgccctcgcccagtgacgccgcgcgcagacgccgtcaaggatggccgtcactccgcgctcgaccccggcgccgccctcgacaggccactccttgacggcggcgagcacggcgtcatgctgcggctggttgggaccgaaaaataatggttg

SEQ ID NO: 5175 - DNA, 1663 bp, unidentified
  source 1..1663: mol_type = unassigned DNA; note = element_7eec9c3
  misc_feature 1..3: note = core
  misc_feature 4..148: note = LE
  misc_feature 149..1426: note = CDS
  misc_feature 1427..1663: note = RE
cgtagcacatcgggaagatggctcgacggttctggggcggcgcgcgaagccatgctgagcgcagcgcgccgccctggggcggtcatggccgaccggcaggtctctagagtgacggtgttcgaagcctcattccggagacggatcgaccatgaccagaccacagcttacgccgccggccggcgttctcgtagccatcgacatcgccaaggcccgcaacgaggtcctcatcgaggtgcccggctccggccgacgacgccggttgagcgtcctcaacacccgcgccgagcacgatcgtctgatcgcgctgctgtcgaaccttggtcagccggtgacttgcggcttcgaggccaccggcaactatcaccgcccgatcgcctggcgcctgctccaggccggctttgccgtgcgcctgatctcctccgtggcgctcgcccgcacccgcgaggccctgcacaacggctgggacaagaacgacccgaaggacgcccaggtcatgctgcacatgatccgcatcggcgcctcgcaggtgtatcacgacccgctcgccgccggcatcaacgacgtgcaggagctgtccaagacacacgatgccgtttcgcgggccaagaccgaggttctgcatcggatcctgacccactacctgccgctatactttccggaggtcgaccgcttccgccacaacagccgctcggactggttcttcgccttcctcgatcgcttccccacgcccgcctgcatcaccgcgctgagcaaggaggccttcatcgcttccgcctgggatgtcgtcgggcgcaaggtcgccaaggcgcaactgctcggcgacatctacgagacggcccgcagctcgatcggcctgccggtgccgcctgacgctcctgcggtgagcatgttccggctcgtcatcggcgaggcgcgcgggctgatccagcagcgcgacgccatcgaggccacggccgacgccctcctgacggactgctccgactacaagctgctgcgctgcatccccggcatcggcccgatcaacgccctgaccatcctggctgaggccggcgacctgcgccgcttcggccatcaccggcagttcctgaagttctgcgggctcgatctggccacccagcaatccggcaccttccgcggccagaccaagctgtcgaagtacggcaacgcccggctccggcgtacgctctggctggctgggcaggtggccatccggcagcgggagaacggcttccgcgacaaatttgagcgctacatcgcccgcgatcggcacaatgccgacctgcggcgcaaggcgctgaccgcgatcaccgccaagatggcgcgcgtggtgcacgccgtcatcaagaccggtgccgactaccggcccttcgtcgagggaccggtgccaggtgggagaacccctctcagcagagccgtgagggcgtgagaaccacgaccctgtagataatgctcgggtctcctgcctggatcgacatctcgtgttgaggacggtgaggaccacggtgccgcatgcatcggctggatcctgtgttcgctatggccgagagttcttccggatcggcaggagccgcctggatcgacattgacgacaaacacaccgcgggcgcatgttcgcggacggagacttgttgcctggccagccgtccttcctcgctacgtagga

SEQ ID NO: 5176 - DNA, 1360 bp, unidentified
  source 1..1360: mol_type = unassigned DNA; note = element_7eed0a2
  misc_feature 1..2: note = core
  misc_feature 3..86: note = LE
  misc_feature 87..1103: note = CDS
  misc_feature 1104..1360: note = RE
  misc_feature 1099..1349: note = bridgeRNA
tgatgatgtggacgcctccaccaccggcgtcggcaaccatggtatggctttgctggtgcctcacgggaaagcaaggagcgtccgcaatgcaaattaccacgatcgggctcgatctggccaagaacgtttttcaggttcatggcattgaccatgaaggcaaggttggcgtccgccggagcctacgccgctcggaggttgtcgattatttcggcaaacttccatcttgcctcgttggcatcgaagcctgtgcaacggcgcatcactgggcgcgcgagatcggtcgatttggacacacggttcgtctgatgccgcccgcttatgtgaagccctatgtgaagcgcaacaaaaatgacatggctgatgccgaagccatctgcggagcggtgacgaggccgaacatgcgcttcgttgccgtgaagacagcagcccaacaatcggttctgatgctgcatcgctgccgagctcttctggtccggcaacgaactatgctggccaatgcaattcgcgcgcatctggctgaattcggcatcgccatgccgcaagggattcggaccttgctgatggccctgaacgcgccgaaagatgcagtaaacaatcttcccgagctcgtccggattgcactcactcccatgacagcaagcctcatcgaactgggtcagcgcattaaagcgctggaaatcgagattgcgcgcgagcatcgcggcaacgagaccagtcgtcgattggaaactattcccggatttggcgtcatgacatcaacagcgatggcagcaacagttacagacccgacagccttcaaatctggccgtgaattcgccgcctggctcggccttacgccaagagagagttcatcgggcggcaagcaaaggctcggaggcatcaccaagatgggcgacgggtatcttcgaacattgcttgttgtcggagcaacggcggtgatccgcttcgcccgcgaggaagggtccgccaagacggcgtggatccgcaagctcatggagagaaaacctgcgaaagtcgtggcagttgcgctcgccaacaagatggcgcgcatagcctgggcgctcatggcgagaggagaggtttaccgtgtcatccccgcttgatctcgcgtgggcctgaacgcgacaacgaattggtgagggcgaaaaacacttgacgagaaccggtcagcgaccgggggttggaaagcccgaggggtgcagcgacttagagcgcgctggagtgtttagggatccaatccgcggagattcatcagggccagcggctcaagataccgcatcgaaaaaggccgaacatatgactgcaaccgaccgatctgagaatggtgccaccttcgtcttgccaaggaggcgtccacata

SEQ ID NO: 5177 - DNA, 1591 bp, unidentified
  source 1..1591: mol_type = unassigned DNA; note = element_7ef0f8c
  misc_feature 1: note = core
  misc_feature 2..78: note = LE
  misc_feature 79..1143: note = CDS
  misc_feature 1144..1591: note = RE
  misc_feature 1357..1582: note = bridgeRNA
taatgggatggtccggccgtgctcctgccctgccagcggctgacgctggactggggctgcatcatcaggagcacgcccatgcccaagacagcaagcgcccagattgccgtgatcggtatcgacatcggcaagaactcattccacgtggtcggccacaacaagcagggcgcgatcgttctgcgccagaagtggtcgcgcggtcagattgaggctcggctctccaacatgccgccctgcctgatcggcatggaggcctgtgtcggggcgcatcatctctctcgcaagctcgcgatgttcggccacgatgcccggctgatgcctgcaaagtatgtgcggccgtacgcaaagggccagaagaacgacttcaacgatgccgaggcgatcgcagaagccgtgcaacggccgacgatgaagttcgtcgccaccaagacggccgatcagctcgacctacaggctctgcatcgggtgcgcgagcggctcgtctcgcagcgcaccggcatcatcaatcagatccgtgccttcatgctggaacgcggcattgccgtgcgccagggcatccggtttctccgcaccgagctgccgatcatcctggcttcgcgcacggacgtgctgtcgccgcgcatgctgcgcgtcatcgaagacctcgccggcgactggcggcgcctcgatgagcgcatcgagaccctctcgcgcgagatcgaaacgattgcccgacaggatgccggttgcgaccgcctcatgagcgtgccggggatcggccctatcatctcgagcggggttgttgctgcgatcgggtctggcgacgtgttctcgaaggggcgcgacttcgcggcctggctcgggctggtgccaaagcagatctccaccggcgatcgcacgatcctgggcaagatctcgaagcggggaaatcgctatctgcgcgtgctgttcgtgcaagcagcgtgggtcgttctcgtcaagccgatgagctgggaacgtcacgggctcaagccgtggatcgaggccgccaaaaagcgattgcaccacaacgtgctggcgatcgcactcgccaacaagctcgcgcgtgtcgcctgggcagttctggcgaaggggcgcgacttcgaggtgacaaagaaaagcgaggtgtcgccccaacccgcgtgagcctggcagcgtgctcgatctcgtcaaggcgtggcctcaatcaaggcgccgaaccaggattgagctcaccatgacggccagccctgacgagctctccgctcgccgccgtcgagcaagcacaggtcgggacgagggaaaggccgccagtcgaaccagggaaatgacctgagggcagtgaaggaaattctgatgtagccgccgagatccgcgattacccaccgaggtctgcgagaagaaacgaagagatggaggtcggtcttcccggcgtgatcgaacactggtgacccaaatggccctcttgaggcctgtccgctaatcagatcgaacgcgcgctgatatccatggtggcccggagcaatgaaccgctccaatcagaggccggatacattgatgcaagaccgcaaaccagatcgacgaaacttcttgcgacgcacggccggaccataca

SEQ ID NO: 5178 - DNA, 1387 bp, unidentified
  source 1..1387: mol_type = unassigned DNA; note = element_7ef45fe
  misc_feature 1..3: note = core
  misc_feature 4..88: note = LE
  misc_feature 89..1117: note = CDS
  misc_feature 1118..1387: note = RE
  misc_feature 1088..1374: note = bridgeRNA
agatggggtggttgccgccctctcctgacggcatcgcgacgtgcgacgatgccgatgtggttggaccactaggcggaggatgcggaagatgaaggatgtgatgatcggcgttgaccttgccaagagcgtgttccaggtccacggcgccacaatgaccggcgaagtcctgtttcgcaggcgactgtctcgcgggcagttcctgcggttcatgggtggccagccgccggctgttgtcgtgctggaggcctgcggcagtgctcaccattgggcgcgagaactggcagcacagggtcatgaggtgaagctgatcgcgccgcagtacgtgcgccccttcgtcaagcgtcagaagaacgacgccgccgatgccgaagcgattgtcgtggccgcgcagcgccccgagatgcgctttgtcaaaccgaagacgcaggaccagcaagcccgggccgtcctgttccgggcccgcgaacgcctagtgcatcaacggacggagctggtgaacgcgctgcgcgcggtgctctatgagtatggccaggccgtcccggccggggtcgcgcagctcaggcgcatcgagtccatcatagacgatccggatgtcgccctgcccgatctcgtgcgggacgagtgccgcgacctgctcgcgcaggtcgccgagaagtcggcccggatcgaggccaagacaaagacgagagcggcgctggcagaggagagcgacaccgcgcggcggctccagaccatgccgggcgtcggcccgatgacggccttggccgttgaggccttcgcgccggccatgacgacgttccgctgcgggcgcgacttcgcggcctggctggggcttgtgccgcggcagttttcgtcgggcggcaaggagcggctcggccgggtgtcgaaggccggccaagtcgatatccgacggctgctgatcatcggcgccatggcgcgcgtaagttgggcacgccggcgaccgcccgcgccgggctcctggctcgatcgaatgctggcgcgcaagccgcgaatgctggtggcgatcgcgatggccaacaagatggcgcgtcggatctgggccatgctgacgaagggggaggactaccgggatccggtgctggccttggcggcctgaggtgccgccgagaacaggcggccagcgccggtaaggaggtgtgagaagtcgacgacccgaatgggcgcatgatcgagccgatccggatcgggagaaccagcgacagttcatgggctcgcagcccggaaagtagatgtggacccgacccgcagatcaccgtcccggccaccggcttctggagcgccgcgcagcaaggcctgacagaagaccgcactcgatcacacgaccaaggggctggaggcgacttgcacgacgagcggcaaccacaga

SEQ ID NO: 5179 - DNA, 1400 bp, unidentified
  source 1..1400: mol_type = unassigned DNA; note = element_7ef603f
  misc_feature 1: note = core
  misc_feature 2..225: note = LE
  misc_feature 226..1362: note = CDS
  misc_feature 1363..1400: note = RE
  misc_feature 13..240: note = bridgeRNA
ctacttatctactggtggtacgaccgcagcccggccaggcttggtcgaggtgaccggtggggtcgctctttcagcggctgcccaccgcggtttggtgtggctctcatctggcatgcgtcctgccggtcaccgtggcgcggagaggctcaagagaggtctgcccagctcgaagtagcgctgccctcctcgccggattcagccccggtctgattgaggaggacgagcgtgggacaggtcatcatcggtatggatccgcataagcggtccgcgaccatcgagatcatcaacgaccgcgagaaggtcctcgcgcagggccggttcggcaccgaccgcgacggctaccagacgatgctgaagctcggccggcagcacaaggaccggatctgggcggtggagggctgcaacggcatcggccggcacatcgctcagcgcctcgtcgcggacggcgaaacggtggtggacgtgccggcgaagctgtccgcccgggcccgggtgttcgacaccggccagggccgcaaaaccgacccggtcgacgcccacagcgtcgccgtcgcagccctacgcagcaagggtctacggcaggtcaccgtcgacgacacgaccgttgcactgcggctgctcgtcgaccgccgcgacggtctcggccacgcccgcaccgacctgctcaaccgcatccacaagcttctgctggaactgctgcccggtggggcgaagaagttcctgtccgccccgcaggcccgcgccctgctcaacacgatccggccgcgtgatctggtcgggcgcacccgccgccggctcgcctccgagctgatcaccgaactggtccaggtcgacaagaagatcaaggccgcggacaaggaactgaccgagctcgtcgagaccaccggcagcagcctgcaggacctcaacggcaccggcccctccggcgccgcccgcctgatcggcgacgtcgcggacatcagccgcttcgccacccgcgggcacttcgcgtcctggaacggcaccgcacccctggacgcctcatccggcgaccagcaacgccaccgcctgtcccgggccgggaaccggcgcatcaaccgggccctgcacatcatggccgtcgtccagttacgccacgacaccgaaggccgcgcctactaccggcgcaaactcgccgccggcaaaacaccgatggaggccatgcgcactcaagcgccggctgtccgacatcgtctacaagcaaatgatcaaagacgccaagaaagccgggacgggcccgggaggacacgtgggggcgactcttcaatccagcgcggccgacccgatccccatgatcgacacttcggaacagtcacttcccggacccgccgaaccccagcctagaacaccactcctcgccgcctcttgacacagaggggtgc

SEQ ID NO: 5180 - DNA, 1533 bp, unidentified
  source 1..1533: mol_type = unassigned DNA; note = element_7ef73af
  misc_feature 1..3: note = core
  misc_feature 4..270: note = LE
  misc_feature 271..1440: note = CDS
  misc_feature 1441..1533: note = RE
  misc_feature 13..250: note = bridgeRNA
cttgtataatgtatttaggttaataaaggcaacctataatcctttttaatctttatacacttggtgtataatatatttaattagatagagtgacaccgtttcctccttgagatttaatctcgtacttgaaagagtggtgcctctttctgtttaactgtttacgaatgagttagatgttgaccagtttctggtacttcgtatttttcacaaggtagtaacgtttctcagataagaggtctttatctttgatttattccttgaggtgattttatgttttatttaggtattgacattggtaaaaatactcatgtcgcttctcttattgatgataagaaaaaggttatttttaaagctttttctttttcaaattctattgatggagccaactcgcttcttgaaaaattatctccctttattcaatctttagaaatcggtatggaagctactggacattactggctttctatttattcttttctcgttgaaaaaaacctttctgtccatgttatcaatcctattcagactgatggttggcgtaacggtatcgaaattcgtaaaagaaaaactgatatcattgattctattctaattgctgacctcctaagatatggagattttcttgaaactagtctttctaatgaagactacttatctttaagaaatcttactcgctttagaagttatcttatctcttctgtcagtgatttaaagcgaaaaacaattgctgtattagaccaagtttttccagaatatgcgagctcttttagtaatatctttggaaaatcttctaaagaaattcttatgtctatctctactccacaagattttgaaaatattacagctgataaacttgaaaaagttttagaaaatattactatgaaaaaatttgctaaaagaaaaattgatgaactttcttctaaggcaacaaattcttttggtgtaaaattttgtctcgattctttttcacttcagattaaacttttgattgaacaaattagtttcattgaaagtcaagttattacagtagaacaagaaatatcaatattaatggaaaaaattaattctccaatcacttctattcctggtattggtccaattacaggagctgtaattcttggagaaataggagatatttctagattttctaatccatcaaaacttgttgcatatgctggtcttgatgcggtaatctcacaatcaggagaatttgaatctacttcaaaccgcatgagtaaaagaggttctccttatttaagaaaagccttgtttcaatcagctttaagagctgaattttgtgactctgtttttagtaattattatcaaaagaaaatttttcaaggaaaacatcatttagaggctacaaatgctgtagcaagaaaactatgtcatattatttttgcaatacttaacaaaaacgaatcttacctatctcaaatgtaaacttttaaaaaaactgatatttcagtttttttgttatgcaaattttttgctaatttatttttttattatttttcttgacttttaatagttagt

SEQ ID NO: 5181 - DNA, 1298 bp, unidentified
  source 1..1298: mol_type = unassigned DNA; note = element_7f01215
  misc_feature 1: note = core
  misc_feature 2..66: note = LE
  misc_feature 67..1095: note = CDS
  misc_feature 1096..1298: note = RE
  misc_feature 1087..1293: note = bridgeRNA
taatgatatggacacttccacccaccgtctaaacttatagtcggtaacataaatgaggaagagaccatgaccattgcaactttaggtatcgacttagctaaatcttcttttgctcttcacggagtagattcatcaggcaaagttcttttgaagaaaaatatcagcagaaagaagttgtccgaaacgttgaccaatatgcccccttgtcttgttggtatggaagcttgctccagtgctcattattgggcaagagtattcaagcaatttggtcatgacgttaaacttatgcctccgcagtttgttaagccctatgtgaaatcaaataagaacgataccgctgatgctgaagcaatctgtgaagcggtaactcgccctaacatgcgtttcgtacctataaaatcgattgaacagcaatcaatcctttctgttcacaaagctagagaaaggttagtttcaatgaaaactggccaaactaatcaattacgtgggttgctggctgagtttggtcttgtctttcctaaaggaagtgcatcacttaacaagcagctccctctggttttagaggatgctgaaaataatttgacgccaccgattcgctgcgtggttactcatttaaaagaactaattgatgagctttcttcacgaattagtgcgttaacaaaagaaattgaacaatggcacagtacgaatgttgattctaaaagaatcgcagagatccctggaattggccctataactgccaccgcacttgttgcaagtataggtgaccccgcatcttttaataatggacggcaggtatctgcatggattggacttgtacctaagcagttttcaacgggtggcaaacaagtattgcttggtataagcaagcggggggatggctatttacgaagactactagtgcatggtgcaagagctgttcttgggcacttaaagcaacagccaaccacttatactcaccgctggttgaatgacttactgaaacgaaaacacaagaatgttgcaatagtcgcactagctaatcggaatgctcgaattgcatgggctttattggctaatcagcaacactataatcctgaattactatctatctaaaattgcgcatgaagtggaaatgagaaaacaggtaagaccgtgagtatggaactctgatttgatcttaggactttcaagttcgtgttgttgataagagcatgctcagcggaaatcattaagagtccttgaactcggatatatgtctgcaatcttttacctaaaactttcagatttactacttgccaataggaagtgtccatata

SEQ ID NO: 5182 - DNA, 1392 bp, unidentified
  source 1..1392: mol_type = unassigned DNA; note = element_7f15471
  misc_feature 1..2: note = core
  misc_feature 3..87: note = LE
  misc_feature 88..1128: note = CDS
  misc_feature 1129..1392: note = RE
  misc_feature 1159..1378: note = bridgeRNA
gatgaggtggatggctcccgctcacggcatcaatgtgccaagatgtgaaggccgtcaggcgttcacgagcaaaaggagccacccgtcatggagattagcacaatcggcctcgatttggccaagaacatttttcaggttcacggtattaattcgctgggcgaaccagtcgtccgcaaggcgctgcgacgatcgcagatgctgccgttctttgcgaagatccagccttgccttgttggcattgaagcatgcggcacttcgcatcactgggctcgcgagttgatcaagcttggtcatgatgttcggctgatgccaccagcgtacgtcaagccttatgtgaagcgcggcaagaatgatgctgccgatgccgaggcgatctgcgaggcagtgacccgacagacgatgcggttcgtgcccatcaagtcgcgcgagcagcaggccgcgctatcactccaccgcgtgcgtagcctgctgatcaggcagcgcacgcagctgattaacatgatgcgcagtatgcttgccgagctcggcattgcgatcccggtcggaatcgagaaggcactgcagatggcgcggcggatcgttgacggcgagactgagctggacctgcccaccgaagcgaagaacgtcgttgctctgctggcggatcatgtgcttcagcttcacgccaagttgcggaagatggatctacgcctcgccgccctgcagcggagcgatgagacggcgcgccgtctggcgactatccccggcattggtccaatcggcgcgaccgcgctcgccgcgtcggtgaccgacccaagccagttcacctccgggcgccagttcgccgcctggcttgggctgactccgcgacagaactcgagcggcggcaaggaacgcctggggcggatcaccaagatgggtgacaagtatctgcggcagcttctgatcgtcggcgcaaccgcgctggtccgatacgcaagggagaagcccgatacggtcgatccgcgcttcatcgccttgttggcgagaaagcctgcgcgcgtcgcctcggtcgcaatcgccaacaagatggcgcgcatcgcgtgggcggtcatggcgcgcggcggcgtcttcgaacgcgggcatgcgccaatgctgggggccgcatagatcaagagtttagctgaggagatcagcttaccgatgttgtgagagcgaagtgatgtgatggcaaaaccggtcggaccgggaacaaggacaatccaacgacagtctcaggcatcatagcctgcaaagccgatcggaaccttgttcgcgaaccccatcagggccagcagtctaaaccgactgcacaaacaggccggacagacgactgcacccgaccaaaggccagttcatcattttatgcttgcaacgcgggagccatccacagag

SEQ ID NO: 5183 - DNA, 1370 bp, unidentified
  source 1..1370: mol_type = unassigned DNA; note = element_7f15561
  misc_feature 1..2: note = core
  misc_feature 3..82: note = LE
  misc_feature 83..1102: note = CDS
  misc_feature 1103..1370: note = RE
  misc_feature 1113..1356: note = bridgeRNA
tgatgtggtggacggcccttccaccttcttgaaacggtggcaagctgaggtcgtcgaagaaaccagctcagaggggccgtccatgggagaggtggtgacgatcggtctggacttggcgaagaacgttttccaagtccatgggattgccgcggatggaaaggttctggcctgtcggcaactgcgtcgaggcgaggttctgaagttcttccagagcgtgccgccgtgtctggtcggattggaggcctgcggcacagcgcattactgggcgcgggaaatcgcggccctggggcatagggtgaagctgatgccgcccgcctatgtcaaaccctatgtaaagcggggcaagaccgacgccgccgatgccgaggccatctgcgaagcggtcacccgtccgaccatgcgtttcgtcgccatcaagacggtggaccagcaggccgcgctgatgctgcacaagacccgcgacctgctggtgcggcagcgaacgatgctgatcaacgggttgcgcgggcaccttgcagagttcgggattattgcggtcaagggacctgggggcgtgagggcggcgaccgaggcgctccatgaggcgcgggatcagctgcccgaactggcacgcttggcgctgcacggtatcgtcgatcaactccggcaactcgaggctgagatcgaagggctggagaagcgcatcctcgcttggcaccgggccagcgaggtcagccggcgcttggcgaccattcccggcattggaccgatcaccgcgagtgctatcgcagcggctgtgccggacggcacgctgttccggtccggccgacagttcgccgcatggctcggcctgacaccgaaggcccacagcagcggcggcaaggagcgccaggtcggcatcagcaagcagggcgacggctatcttcggcgattgctcgtcgtcggcgccacggcggtgatgcggctggcccgcaaggacaacgcaagtcgcagttgggcgaccaaactgctggagcgtaagccagccaagctggctgccgtggctctggctaacaagaccgcgcgcatcgcctgggcggtgatgacacgaggggtgacctacgcagcaccgagcgccgcgtagacggcattcgcctcgtcggcgtcggaaggctcggcggggtggatgggcaagggtggtgagacgtgatgacgaaccggcagggccggggatcgaccaaacccacggggaccaagcgccaccgagcgcgatgagctgatttgggcgtcgatccgcggaattcatcaaggccagcagccagcggctgcgacaacaggccggacacatggatgcatccttctcggccagtccacacggatttccctcttgcgccgaaggggccatccacaca

SEQ ID NO: 5184 - DNA, 1475 bp, unidentified
  source 1..1475: mol_type = unassigned DNA; note = element_7f28e67
  misc_feature 1..2: note = core
  misc_feature 3..233: note = LE
  misc_feature 234..1454: note = CDS
  misc_feature 1455..1475: note = RE
  misc_feature 7..229: note = bridgeRNA
ctaatggggatcgaccacgtcgctctgtcagtaagtgaggctggtcaagctgagcctccggcaggtgagcactgtgaatcccagggcctcgagccctaggactagaacgtgcccctgctggggtgaggtcccgttgacggctggtgggatgtcgtgcctagagcacttgtccattaggtggctgctggggccctcgggctcggtgttggtgccagtcgacagaggaggaaccagtgatatttgtgggtgtggactgggctgaagcccaccacgatgtgctcgtgcaagacgaggcgggcaaacgcctcggtggtggtcgcctgcccgagggagtggagggcatcgcccgtttccatgagctcgtggggaaccacgtcgatgaaccaagcgatgtgatcgtcggcatcgagaccgaccggggcttgtttgtttctgccctcgtcggcgctggctaccaggtcttcgccgtgaacccgatgtcgacgtcgcgctatagggaccggcactcgacctcgggggccaagtctgacccaggcgacgccaaggtcctggccgatatggtgcgcaccgaccgccacaaccaccgggtagtcgcagctgatagtgggacagtccaggcggtcaaggtcttggcccgggcgcaccagtcgatgacatggtcaaaggtgcgccaaaccaacctgttgcgctccacactgcgcgagttctacccggccgccctggtcgcctttgacgacctggccagcgcagatgccctcgaggtgctgcgggtggctcccacccccgagctcggccgtaccctgtcgcgctccaagatcgcctccgctttgcgccgaggcggccgccagcgccgggtcgacgaacgcgcagaggaggtccaagcagcgttgcgtgccgaccagctcaccgcccccgggatggtctcagcggccatgggcgcctcggtggcagccagcgtggcagtgatcaccacaatgagcgcccagatagccgagctggccagagagctggaagcgggttttgagctgcacccggacgcccaggtggtccgttccctgccaggactggggaccattctcggcgcccgggtgctcggcgagttcggcgatgagccggaccgctatagcaccgccaagtctcgcaaaaactatgcgggtacgtcgcccattacacgggcctcgggcaccaagaaggctgtgctcgcccgtcacgtccgcaaccgtcgcttggctgatgccatctacctttgggcctttgccgccctcaatgcttcgcccggcgcccgtgcgctttacgaccagcaccgagccaccggtggtagccaccacgcggcactacgagccctcggcaaccgcctcgtgggtattttgcacggctgcctacaccaccacacgctctacgacgagacggtcgcgtgggggcatcgcaaaggtagatttccccaagcggcttgacaagttacggtcgtgggatgt

SEQ ID NO: 5185 - DNA, 1610 bp, unidentified
  source 1..1610: mol_type = unassigned DNA; note = element_7f2fef0
  misc_feature 1..3: note = core
  misc_feature 4..269: note = LE
  misc_feature 270..1490: note = CDS
  misc_feature 1491..1610: note = RE
  misc_feature 13..289: note = bridgeRNA
tctgatacaatatatttgaccgagaaagtgcagtatttggaattgcacttttcaagttccgttacctaagctataatggaagggtaattaaggtctgacgttctcctttttgtgctaagcgtacgtaaattagactgtcagccgcccttccgttatagcgttcggtttttgcaggttgggcttcgcgtccgtgtaaccaatcagattgaatcggtaatggataaggtcggtcgcctttattacaaattcattttctcggaggtcaccttatgaacgctgtcggtatcgatgtttccaaaggtaaatctaccgttgccgtcctgcgcccgttcggagaaattgttgtttccccgttcgatgtatcgcacaatccaaaggaactttcggagctggtcactctccttaaaactttggacggccatacgaaggttgttatggaatacacaggcaattactatcttcccatagccctcttcctccgtaacaacggcttatttgtttccgtagtcaatcccatcctcgtgaaagattacggtaccaaatctttatctgttcgcaagtgtaagaccgataaaaaggattctcttaaacttgccgcttttgctttagatcggtggtcggatttgcccgagtttaactctcaatcccaatcgagattattgttgaagtcatacagtaggcaatacaaccaatacataaagctcaaagtcatgctgaagaataatctcatttctcttttagaccaaacctttcctgcggcgaatactttgttctctactcccacaagaaaggctgacggccacgaaaaatgggttgatttcgtccttaaacaccctcattccgagtgcatttcaaagaaatctttttcttcattctcgaagtcttatctttcttggtgcagaaaatatggctataacttctccgaaagtaaggctcgttccatttacgatttcgcttgcaaccgctctccgtccttgccgtttaacgagagttcttcgcttttgatctctaatgctgtctctcaattaaaccgcattaacgaaaccattgcttccctcgcaaaagagatgaacgctcttgccgcgacactgcccgaatacgacgttgtgatgtcgttcttcggcgttggctccgttctcggttctcaacttattgctgagattggcgatgtttcccgtttttccaacaagaaagctctcgttggcttcgcaggattagacgctccgccgtttcaatccggctcattcaattctcaatcccgtaaaatttccaagcgcggttcttccgacttgcgcaaaactttatttcaggtaatgtccgtcattctgcaaaatgctcccgccgacaattccgtttttcaattcatggacaagaaacgtgccgagggtaaacatttttacgtttacatgactgctgccgccaataagtttttgagaatttactatgctcgtgtgacggagcttttgaactctctcaaccctgtcgcttaaccgttttcctgctcgtttcaagtctgcgtcttttgacggaggcttttttctgttacgcttttcctacctcgaaagtttttccgaattttttcattttaacccttgacttttatttgcagg

SEQ ID NO: 5186 - DNA, 1405 bp, unidentified
  source 1..1405: mol_type = unassigned DNA; note = element_7f360a8
  misc_feature 1: note = core
  misc_feature 2..69: note = LE
  misc_feature 70..1122: note = CDS
  misc_feature 1123..1405: note = RE
  misc_feature 1183..1399: note = bridgeRNA
taatgggatggtccgcggcttttatcctgcgagagcagggtttataagagaggcacggaggaggcgcccatggaactgcacacaatcggcatcgatcttggtaagacgatatttcatctggttgggcttaatagagtcggcgaggtggtcgtgcacaagaagctgtctcggcctcagttgcttcgcttcacagcgaacctgcacgtcgagctgatcggtatggaagcctgtggcggagcgcattttctggggcgtgctctgagagaacagggacatgaagtgcggctgatcccggcccagtatgtaaaaccctacgtaaaaaccaacaagagtgactacatcgacgcagaagcgattgcggaagcggtagggagaccgaccatgcgatttgtaccgatcaagaccgaccagcaattggatctgcagtcgctgcatcgggtacgggagcgttgggtcatgcggcgcacggcagtgatcaaccagacccgcagcttgctgctggagcgcggtatcaccttgcgcaagggacgatgtcatctcgaaacagcattgccagggatcgttgaagacgccacggccaagctgtccagcgcgccgcgcattctgctgacccagatgaagcgcgaactcgaccagctggtccgccgcatcgaggaagcagatgcagggatcaaggaagtcgcacagcagaacgaagcctgccggcgcctggctacgattccgggagttggcccgattacggcgactgctctgattgcagcaatcggcaacggggctgccttccacaagggtcgggagtttgcggcctggatcggggtggttcctcgggaatattccacgggaggcaagcaaaagctcctgggcatcagcaagcgtggcaacgcgtacctgcgaagactctttgtgcagggagcacgatccgtgatgatgcacaggcacaagcagtcttccggcctcagccaatggctggaaaagctctcggtgcacaagcatcacaacattgccctcgttgccttggccaataagctggctcgtatggcatgggccgtactcgctacggggcaagtgtatcgacctcctctggtgactcatacaggatcccccagactggtctccatttgaaccttgcctaaccacgcaaatcttcagcctcagctacgacgatcatgttttagtttcctgccaggtctgctggtaaatcgtaaagatggcacaacggtcgaacccggcgctctctcagcctgatacgccaaacagtctttgagactgaattatttaataggaagagagcgcagcgcattccatcatggccaggagtcgcacactccaatcaaggccgcatacattggcgcagaccataccgtcaccttcactttttgcttgcaacaaggccgcggaccataca

SEQ ID NO: 5187 - DNA, 1356 bp, unidentified
  source 1..1356: mol_type = unassigned DNA; note = element_7f380a3
  misc_feature 1..4: note = core
  misc_feature 5..80: note = LE
  misc_feature 81..1109: note = CDS
  misc_feature 1110..1356: note = RE
  misc_feature 1127..1316: note = bridgeRNA
aagcatgcgtaatcgggcggtcccacaagaggcaagctcctagtacaatcccggtgcaaccgagatgaagggagatgacgatgttctatgctgctttggacgtgtcactgcgctcagtggcaatctgcattatcgacgaggctgggaaagtcaggctcgagcgctcagtcccatcggacgtgcctgatattgtgcgctgcttcaatgagttcggccaacctatccatcaagtggggctcgaagctggtacgctcacacaacacctgacctacggtctggcggaggcaggcttcgatgtcgtgtgcatggaagcgcggcaggtcaatgctgctctttcggccatgcggaataagacggacaagaacgatgcgcgtggcatcgcccaactgcttcgatcggggtggtacagccgggtgcatgtgaagagcgtcgaaagccactacaccagagcacttctcacaagccggaaggtgatgcagcgaaagtgcctcgacctcgaaaatgaaattcgtggactgctcaaggtcttcggggtcaagctgcccatacgcctcaggggcggtgcgttcgaagaggcggttcgcggcacgatcgaaaacgacccagcgctgagccatgcgcttttgccgatgctagaggccaggcagatgctcctggagacgttcctcgagcttgatcgacgggtgcgaagggccgccaaccaagacgccataaccacccgcttcatgagtgttccaggcgtcggatatgttacggccctgagcttcaaggcagcagtcgacgaccctacccgtttcaaaagctcgcgaactgttggagcccacttcggattgacgccacgacgcttccaatccggcgagaaggacaatccaggccgcatctcacacgctggtgacgccgatgtccgggcaacgctcgacgcggccgccaatgcgatgctcatgcgctcgatcgcctggagcagcctaaaggcatggggtgtgcgactgatgaagaccaagggacggcgacgagccatcgtcgctgttgcacgcaagattgctgtcttgctccatcgcatgtggatcgatggcacagagttccggttcggatcggaggctgcagcatgaactaagtcagccaaagataccgatcctagccggatcgtcccatgcggacgacgggatggatgaagccgattatgtccgctgcgcttcgagcgcgtcccaaagcaaggcttccagaccctgatcccatgcacgcgtgcagcggctctaaacgaaacggagccaatagactgcgaagagaagcgtgacccgcgtgaacgatcaggccaaagacgatcagaaagagcttgacccaaatgcccgattagag

SEQ ID NO: 5188 - DNA, 1427 bp, unidentified
  source 1..1427: mol_type = unassigned DNA; note = element_7f40ceb
  misc_feature 1: note = core
  misc_feature 2..219: note = LE
  misc_feature 220..1239: note = CDS
  misc_feature 1240..1427: note = RE
  misc_feature 15..231: note = bridgeRNA
ctgattgatacttgtgacgggtgtttcgttgtttcgtagcatctaggggtaccggctggtcgtctctctatgtgcctgccacctttgggttggctttctatcgagctgtctggccagccggtgtccttgctgggatgtggctcgaaagaggcgagaacactatcgacccgaatcaggagtgcccatctcggttccactgtcaacgagaaaggcattgctatgacgatgattgggatcgatccgcataaggcaacccacacggcggttgctgtcgatgatgacgaaaacgtgatcggcgagttcacgttggaagcgtcgagtaaccaagccgagcgtctcacagattgggcttcagtgttcgtcaagcgtgagtgggctgtcgagtccgcgaacggtctcggctacctgatttcccagcagcttgttgctggcggtgagaccgtgtttgatgtcccgccagtgttggcttcgagggtgaggctgatgggttcggggaagtcgcagaagaatgatccgaatgatgcccgttcgatagcgattgcggcgttgcgttcagaccgcctggccgtcgtggtacctgatgatcatgtctccgtgttgcgtttgttggtgaaacggcatcgtgacatggcgaggcttcgcaatagacattgcagccggctccacgccctcctcggcgagctcgaggcaggtggaattggtgtgaagatcagtgttaccaacgcttccgagctcctcgaccgtatcgatgtcaccgatgaggcgtccaggtatcgggtcctggtcgctcgcgaggtcgttgacgacattgccagactcgacacaacgctgaaagcttccaagaaccggatcgcagacgctgtcacagcatcgggaacgtcactgacggacattgttggggtcggaccgatcggtgcagcaacgatcattggatacaccaaggatgtgacccggttcccaaccaagggtcacttcgcgacgtacaacgcaacggcaccgatcgaagcgtcatcaggaggcaacaagcggcaccggttgaacctgcgaggtaaccggatcttgaaccacgccatccatattgctgctgtcacccagctgcgacacgacaccaacggccgcatctattacgacaagaagatcgccgaaggcaaaacatcgaaggaagcgatccgggcattgaagcgacggatctcagacgccgtctaccgacgactcatcgccgacaccaacaaccagtagaaaaagggggtccgggaggacaaccaggaacgtctcatgagttccacgcggccagcccaaatcctgtacagctagctctttggatcggtcactcccgaaccctgaccacaacgctacgacccatcgcggcacaacaccagcgattccaaaccacgcgcccaaaacatccacttgacacaaagaggctt

SEQ ID NO: 5189 - DNA, 1397 bp, unidentified
  source 1..1397: mol_type = unassigned DNA; note = element_7f44241
  misc_feature 1: note = core
  misc_feature 2..297: note = LE
  misc_feature 298..1116: note = CDS
  misc_feature 1117..1397: note = RE
  misc_feature 1130..1385: note = bridgeRNA
atgttggagtggacggccccgaacggcatcaaaatgtgccagaatgagctgttgagatctcaatcggaggggccgcccatggacaagattattcgtattggcatggatacgtcaaagcatgtttttcagttgcatggcgtgaatggtgaagagaagccggtcttgcgtaagaaaatgcgacgaaaggagatgatcgatttcttcacgacctgcccgccaactttggtcgcgatcgaggcctgtggtggttcgcatcattgggcgcggctgctcgcctcattcgggcattaggtaaaaatgatcgcgccacaacttgctaagccctacgtcaaacggaacaagaacgacgcggccgatgctcaagggctctgcgaggcaatgagccgcccaacgatgcggtttgttccggttaagacagttgctgaacaagcggcactcatgctgatcagcgtccatactcgcctcatagccaaccgcacccaactcgccaacgctatccggggttacgccaatgagttcggtgtctccgcagccaaggggctggcacatatccctttgctgcttgaaaggatacaagccgatggaactgtgccagagcttgcacaggaactgttcatgagccaggccgaggaatacgctgaactggaaaggaagattgcagacgttgaggccaaggtaaaggcctggcagcgtaacaacgaacgcagcatgcgtctcaacatcattcccggcattggcccaatcggttcggctcttctaatcatgaagacaccggctccggagctgttccaatctggccgccagttcgcagcctggatcgggttgacgccaaaagatcactcgaccggcggcaagctgcggctcggtggtatcacgcgggccggtgatgaagctctgcgggccgtcttggtggctggagcaacgcctgtcattcatcacgcgcggcgatccggtaaggcttctccatggttggcggaactgctcacgcgaaagccgcccaaattggcagctgtcgcactcgctaacaagatggcgcgcatagcctggaagctcatggtctcgggagagacatacgccgcacaatcaggatcaaccttgaccggatgcgccgcatgaatttttgggagcaaaagcccggggcaccctgatcttcgccacgtctttgtgttactacaacttgcaagataatagcagatagtgtgatcgatcgatccgagacacaggatgcaccgtatatccctttggcccttcaaggccgccttgatgtttgggacctgtgttgcggaaaccatcttggccagcgttcatgtgcgaacgcaacaacaggccggacaaatggacgcaagcgatcagatcaaattatctcaaatatcttgcgagtcaggggccgtccacat

SEQ ID NO: 5190 - DNA, 1348 bp, unidentified
  source 1..1348: mol_type = unassigned DNA; note = element_7f47e8f
  misc_feature 1..2: note = core
  misc_feature 3..83: note = LE
  misc_feature 84..1103: note = CDS
  misc_feature 1104..1348: note = RE
  misc_feature 1118..1334: note = bridgeRNA
gatggggtggatggctcccggtcccggcgtcgcaatgcgccatactgcaggtgtcagaatctgcgaacaagaggagccaccccatgcaagtgaccaccgtcggcctcgatctggccaaaaacatctttcaagtccacggagtgaccgaaaccggagaggttgccttcaaccgaccgttgaggcgggcgcaggtgctggcgttcgacgagcgactgtcgcgctgcctcatcggcattgaggcctgcgcatcgagccaccattgggcgcgggagctctcgatgctcggccataccgtccggctgatgccgccgatgtacgtcaacccctacgtgaagcgcagcaagtcggatgcggtcgatgccgaggcgatctgcgaggcggtgacacggccgacgatgcgctttgtcgagatcaagtccgaggagcagcaggcgctgctatcgttgcatcgcgcgcgggacttcgtggtcggtcagtgcacgcagctgatcaatatgatccggagccttgctgcggagttcgggatcaccatcgccagaggcgtccagcgggccatcgagttcgccaagacagtcatcgacggcaagcagcccgggctgcccgagcttgcccaagacgttctgcgtgtcctcagccgtcagttgctctaccttcacaaccggctgggctggtatgaagccatgttgcgcattcaggcgcgcctcagccgccaggctcaactcctgcagaccattccgggagttggacctgtgacggcttcggccgtcgcggccacgattggctccggtcgacaggtcaggagcggtcgggagtttgcggcgtggttggggctcacgccgcgcaaccactccagcggcggcaagggacggttgggaaagatcagaaaaatgggtgagcgatacctccgccagcttatcgttgtcggcatgacatcgcgagtccggaaagttgcgacccaccccgagcgcgccgacccctggctgacgaagctgttgcagagaaagccggcacggcttgcgactgtcgccatggcgaacaatacggcccggatcatgtgggctgtcctgaccggagacgagccctacaaagcgcacgcagcataagtcggcgcacgcctacgagatgatccgcgaccaacgatgtgatggtgtaccattcagtcgcaaagatcaggacgctccgacgaatgtcccgggcactattgcccgcgaagcagataggaacctgatctgcggatcccatcagggccagcggcgatgaccgcgtcaacaggccggacacaagaccgcttctgacaaggtacacgcaatctcatttaagccttgctatgcgggagccatccacacaa

SEQ ID NO: 5191 - DNA, 1621 bp, unidentified
  source 1..1621: mol_type = unassigned DNA; note = element_7f4c66e
  misc_feature 1: note = core
  misc_feature 2..274: note = LE
  misc_feature 275..1513: note = CDS
  misc_feature 1514..1621: note = RE
  misc_feature 12..294: note = bridgeRNA
cctgttactatatatttggttgaggacatggcatccagccatgtctttttccatcttgttgcctaagctgttagaatgagaggacaatgggtctgacgggcatctccaaggactttgcgtccgtaaataagtcagtcagccatcctcttgttcgcagcgttcgatttgtgcaggtagagccgccgtccggcgcgttcgtgtcatcaaacagatagaatcggcagcaagaaaaggatggtttgccaattgtaaatctgtaataggagcgtgggttatgaacgcggtcggaattgatgtttccaaaggaaaaagtatggtatcggtgattcgtccctttggcgaattggtggtaaagccctacgaggtgcgacacacaaccagtgaactcagtgatttggcaaactcgctgaaaagtctggagggtgaaacacgcgtgatcttggaacatactggacggtactatgagcctgtggcacagatacttcacgatgccgggattttcgtctgcgcggtcaacccgctgctcattaaggagtatggcaacaattccctgcgcaaggtcaagacagacaaggcagattccttgaaaattgctcggtacggtcttgacaattgggtcgacctgcgagaacatacttctatggatacgattcgttaccaactcaaaaccatgaaccggcagtatggtctgtatactaagaataaggttgcttttaagaacaatctcattgcgcttcttgaccagacctatcccggtgtgaacgctctctttgacagccctgtccgcgcggacggaagccagaagtgggtggattttgctgcatccttttggcatgtggattgcgtgcgcagcatgagccagaccgcgtttaccgagcgttaccgcaagtggtgcaagcggcacggatacaacttcaacactgctaaggccgctgaaatctatgcagaatctaaagaacagattgctatgcttcctaaaaattcactgtccgaagtaatggtgcaggaagcgcttacccaactcaacaccgtttccaaaacggttgaggtatttcgtgctgagatgaatcggcttgcagagcagcttcctgaatacgatgttgtgatgaacttgtacggtgtgggcaattctcttggaccgcagctcatggctgagattggagatgtgcgccggtttgcccacaagggttctctgaccgcttttgcaggagtggacccaggtgcaaaccagtctggtacttatgaggccacaagcactcgctcctcgaagcgaggctcaccggagttaagaaaaacgctctttgtggtgatgacggtactgctgcaaaaggctccgcctgacgaccctgtatttcaattcttggacaagaaacgtgtagagggaaagccgtactatgtctacatgaccgccggctgcaacaagttcctgcgtatttactacggaagagtcaaggaatacctcgacaccatgaacgagcctgtggatttagattcaaccggcctttctcggtagcgcattttctgctaacttcaggtcagcgcttcggcggtggccattttctcgtacctaaatttcggttccctcttttgacaaattagagcttgactttttatttgcagg

SEQ ID NO: 5192 - DNA, 1432 bp, unidentified
  source 1..1432: mol_type = unassigned DNA; note = element_7f4e286
  misc_feature 1..2: note = core
  misc_feature 3..135: note = LE
  misc_feature 136..1155: note = CDS
  misc_feature 1156..1432: note = RE
  misc_feature 1192..1429: note = bridgeRNA
aaatggtatggacgcctcccacttcaaagttgaagtaagaggtgagcttgagacgagagtggaccctccgggccgacggcatcaaagtgcccaaggtggaagggttcaatcttcacaggcaccggagggtccgacatgaaggctatcgtagttggagtggatatcgcaaagcgggtgtttcagctgcattgggtcgagccgcagacgggcgagattgtggcgctgcagcttaagcgggagaagtttttggagcattttgcaaaccgatccaagtgcttgattggcatggaagcgtgcggcggatcgcagcactgggcgcgatcgctgcagaagctcggtcacgaggtcaaattgatgtccgggcggatggtcaagccgtttgtggtcggcaacaagaacgatgcggcggatgcgcgcgggatctggatggcggtacagcagccggggatcaaggcggtggcagtcaagagcgaggagcagcaagcggtgttggcacttcatcggatgcgagagcagctggtgaagtttcgcacggcgcagagcaacggcctgaggggactgctcacggagtacggcgaggtgatgccgcaaggaagagccgggatcaagcgagatatccccggtgccttgggacgattatcggatcggttaccggcgatcgtgatcgacaccttgcgcgaacagtacgcacgcctgagtgagattgacggacaaattagccagatcgagcggcgattacgccaatggcagcgtgaggactcggcgacacagagaattgcggcgatcccaggagttgggctgctgagtgcgacggcggcggtagcgacgatgggcgatgcgaaagccttcaagtcgggccgcgagtttgcggcgtggctcgggttagtgccgcggcaaaccggcaccggcggacgagtccgattacttggcatcagcaagcgcggcgatagatatctgcgcatgctgctgatccacggcgctcgcgcagtgctgacgcacagcaaagcgccgccggagtggttaaccgaattagtgaagcgccggccgaagaatgtggccgtcgtcgcgatggcgaacaagatggcacgcacgatctgggcgctgatggcccacgaacgggcgtatcaatttgggtacgtgagtcgacccgcctagggttgcacacacggtcgattaaccgtcaacaaaggaaggtacgcaaaaaggttgcgcaaggactacaaggtgtgatggtagacaggtcagaccgtgatccgccaaacctgattaacggacagcgcttcgagctcgctttggaactggaggtgcggatcagcggaatccatcagggcccgcaggttttggcctgcaaaacaggccggatataaacctgcagcctaatctgtcggctatcacaccgagaagttcttgcacatcgggaggcgtccatata

SEQ ID NO: 5193 - DNA, 1365 bp, unidentified
  source 1..1365: mol_type = unassigned DNA; note = element_7f5b075
  misc_feature 1..2: note = core
  misc_feature 3..77: note = LE
  misc_feature 78..1106: note = CDS
  misc_feature 1107..1365: note = RE
  misc_feature 1106..1352: note = bridgeRNA
tgatggtgtggacggccccctacggcatcagtgtgccagaatgaggttgttgtaaatctcagacaaggagaccgtccgtgagagagattatccgtactgggatggatacgtcgaagcatatttttgtgctgcatggagttgacgcggcggaacagccggtgttgcgcaagaagctgtcgcgcaagcaggtgcttgagttttttgccaagcttccgccgaccgtgatcgggatggaggcctgcggggcggctcattactgggggcgcgagcttggcaagcttggccatgaggtgaagctgatagcgccgcagttggtgaagccttatgtgctgcggaacaagaacgacgggcgagatgcggatggggtgtgcgaagcgatgggccgaccgcggatgcggtttgtgccggtgaagagcgccgaacagcaggccgcgctgatgcttgcaggtgtccgcgatgggctgatcggccgccgtacccagctcagcaatgcgatccgcggctacgcggcggagtttggcctgatcgcgccgaaggggttggacaagatcgagccgctgttggcccggatcacgcaggacgagagcgttcccgctatggcgcgcgagctgttcgccatgcagggccgtgactatgcgcagttgcagggtgagctgaaggcggtcgaggccaggctgctggcctggcaccaggccaacgccacaagccgtcgtctggcccagatcccctcggtcggtccgatcatcgcgacctcgcttgtgatgaagacgccggacccgcacgccttccgctccggccgcttgttcgcggcctggctcggcctgacgcccaaggaccattccaccgccggcaaaaccaggctcggcaagatcacccgcgctggcgacgagaccctgcgtcgcctgctcgtggccggggcgaccgcggtgatccggcaggcaaggctcgggcgcggccacccctcgcgctggctcgtggcgttgctcaggcgcaagccgccgaagcttgcggccgtggcgctcgccaacaaggtggcccgcatcgcctggaagctgatggcgaccggcgagagctatgatgccgcacgcatgaacgctgtcacctaacaggtcggccggccggacgtagcgctcgccggacgaaccggagctgcaagagcagatggaatgatcgatcgatccagaacgcgagacaagccgcgggacccattggccttcacaaggtcgccaggttgtttggcactcgcgtcgcggaaaccatcttggcccagcgatcaacacgatcgcatcaaacaggccggacatatggatgacagcgatccgaccaatcccagaaagctcttgtgccacgggggccgtccacata

SEQ ID NO: 5194 - DNA, 1596 bp, unidentified
  source 1..1596: mol_type = unassigned DNA; note = element_7f5c867
  misc_feature 1..2: note = core
  misc_feature 3..262: note = LE
  misc_feature 263..1474: note = CDS
  misc_feature 1475..1596: note = RE
  misc_feature 11..282: note = bridgeRNA
ctattacaataaatttggttggaagcccggcaagccagccgggcttttttccatctcatgcctaagctacaataagaggagcaactggctggccgacacctccttgggctttcatgtccgacacaaagactgtcagccatcctcttgttgcagcgttcggtttaagcaggttgagccttcgtgttcgtgtcacccaatagattgaatcggcaatgagaaaagatggattccggttgcacaattctgtattggaggaatgacaatgaacgcagttggcatcgatgtctcaaaggggaagagcatgattgcggtaatgcggccctttggcgaggtcgttctctctcccttcgaggtgtctcacaccgataaggatctgaccgaactggcaaagaagctcaaatccttaccgggtgaaacccgtgtggtcatggagtatacgggctattaccacgcaccggtcgccgtcgcgctccatgaagccggtatttatgtctcagcagtcaatgcaatgttggtacatgactacggaaacaactccttgcgcagagccaagaccgacaagaaagacgctatcaaactagcaaactatgccttggatcattggctctcacttcctcgatatctccctgccggagacaccaggctcatgttgaaaacctgttaccgccagtatgagcaattcagcaaaatgaggacaatgcagaaaaacaatctcatctctctgcttgatgtcacctttcctgacgctaacaagctgttttccagcccacccagagctgacggcagcgaaaaatgggtagatttcatcagtcaatactggcattgtgagtgtgtttgtgggttgagcgtaaatgcctttactaggaactatgagaaatggtgccgaaagcacggctactacttcagcgaggataaagctcttgacatttattcctctgcctgtggacacatctgtatcatgccgaagtgtgacagtacacagctcatgatccagcaggccattatccaacttaaggcatcctctgcggcactggctgctttgaagaagcagatgcaggacttagcttccaccttacccgagtattctgtcgtcatgcagatgtacggcgttgggccatctctcgggccgcagctcatggcagagatcggtgacgtgcgtcgctttcattccaagtccgcgcttgtggctttcgcaggcattgacgctcctccgtaccagtccggccagatggacgtccatagccgcagcatctccaagcgcggttctgccaaactccgcagaactctcttcctagtcatgtcttcgattcttcagaattcacctcttgacgagccaatctaccagtacatgtataagaaacgggccgagggaaagccttacaaggtttatatgatggcctctgccaacaagttccttcgccgttactatgcaattgtcaaggctcatttagacgagatggactataatatctaacgctctgcttcaacataaggctggccgtcgcttcaaaatgtaggcgctcaacggtctgagtcggcgtacccttttggcctcctcaaaaatcgaattttagggcttgacttttgttagcaggt

SEQ ID NO: 5195 - DNA, 1436 bp, unidentified
  source 1..1436: mol_type = unassigned DNA; note = element_7f5dd58
  misc_feature 1: note = core
  misc_feature 2..293: note = LE
  misc_feature 294..1319: note = CDS
  misc_feature 1320..1436: note = RE
  misc_feature 100..259: note = bridgeRNA
cctttagatttgcattttaattaaattgatcatattaagattattattatgtattactatagggggtctgggggatgttgaaaagtgttaattttgtggaaaagttgagacaaagtgtggcaaattaagcaaactgcaaagtaaaacttattcgtcgtttcaatccacactttgctcaaaaggttaaaaagatagatagaaaattagggtaaaacccattaacaaggtaatcgtccttcacctttaacctcaactattcttattatttcttaattcttaaagccattattatcatgttaaagttcaccatcggtgctgacatttctaaagacaaaatcaactttacgcttcgttttcttaatgattatcttttagagaaagaagttgaaaatgcaacttcagctctcaacaaatttattaaagaagttcagtcattagttaaaagtattgttaaagaaaaaaaggctgaatattccgttgagtttatcatggaacacacgggtatttatggcaatttacttattgaatgcttagctggtcaaaagatgacaatgtttgttgtcgcaggcctcgaaattaaaaacagtactggaatcagccgtggcaaaaatgacaaaatcgatgcaaagcgtatagccgattatggggtaaggtttgccgacaaattgaaaccttatacgctctgtgatcagacattatctgaactcaaaggcttaaatacgttaagaactcaaatggtaaggatcaaagctcaactcactcaagctaatgatgatattaaaaaattccaaagtaaggaactacaaaaaaagtctgataaacttaaaaagccagtagtgaatgaattagaccaagctattgagataattgaagcccaaatgttggagctgattaagagcgatgagtccatatatgaaaattataagattgctcagtcagttccaggtgtgggcaaaatagtagcagtagcattcatttgtgctactaacaatttcacaaaatttgaatcagcaaaagccttgggtagctattgtggagtagtaccctttggcaaggaatccgggagatataaaggaaaagacaaagtatctcccattgctaataaggctttaaaaacactactacatctcggagccgtggcaagtatcggcggcaacaatccatttgcagtttattataaaagaaaagttacagaagataagaaaaataaaatgcttgctcttaacaatgttcgaaataaaatagtaaaaacaatgttcgcatgtatcaagaacaaaaccaaatataaagcagattattcatttccatttgcagcataatgtccaagatgtggataactctgtgaatggtctttattaatctaattttatcaacataaaaaaaatcagttatgtattaaaaaaatatcaattaatgcttggttaaaccatagaaaa

SEQ ID NO: 5196 - DNA, 1332 bp, unidentified
  source 1..1332: mol_type = unassigned DNA; note = element_7f5e7f5
  misc_feature 1..2: note = core
  misc_feature 3..78: note = LE
  misc_feature 79..1113: note = CDS
  misc_feature 1114..1332: note = RE
  misc_feature 1088..1317: note = bridgeRNA
agataattggactccctcacccttaacgagtgaggtaatataaaagttaccacacaaatatattaaaagagtcctgttatgtatcgtactagagttggcgttgatttagcaaaaaaagttattcaaatttgtattcacagaaacaaaaaggtgcaatcaaacagtgaactgacaccggaagcatttctttcttggctttttaacaacaaaccagcaacgataatatttgaagcctgtagtagctctaactactggaaacaaaaagcgactgaagcaggtcatgatgctcgtttaatttcagccaaattagtctctgttgttagacaaaaccaaaagaccgataaaaatgatgccctggcaattgtgcaaaccaccttcatgcctgatgtcacttttattggcggaaaaactgttgaacaacagcaattacaatccattaaacgcttaagagagttagcggtaaaacaacgagatgcgtctcaaaagcagctcattgccttgctagctgagttgaatatcaaaatagctaatcgtcgaggtgggatcatctcatcaattgaagccgtattagaagatgcaaccaatgaactctcaacggagtgtaggcgtgccatttacctagcaaaagaacatttgaaagtattgtttgaagcaattcggcattatgatgactgcatggaaaaatcggtggcggctcatcctgaatgtaaaaaactcatgcgactggaaggcgttggtgcgatgaacgccatcaatctttatattgcgcttggttgttcagaaataggaacgtttagcaaaggaaaagatgcggctgcctgtattggagtaacgcctatccagcattcttctggaggaacagtggcattaggctccataggaaaatcaaaaaacagcatcctaagaagtcagttaatctgtggtgccacagccgtcgttcagcatgcagttaaaagaaaggccaaaaccaaaaaagacctttggatacaagggttggtcgagcgtcgaggaaaaaaatgtgccgcggtagcactcgccaataaaacggttagaacggcgttttccatgttaacaaaaggcacagaatacaaagctgaattactcgcagcctaaaaagagttcaaacaacaaaaatgcactaacgaagataaaaatcaactggtttagtcagtagccaactaagagcttttagctcgctttatagatttgacaaccagttcgcgtaaatatcaaagagccagagatagcttctcagtttagagctcgtacataagtatgcatttatttctttgtgttaaaagtttttgttgttgacaagagggagtccacata

SEQ ID NO: 5197 - DNA, 1551 bp, unidentified
  source 1..1551: mol_type = unassigned DNA; note = element_7f6c78a
  misc_feature 1: note = core
  misc_feature 2..279: note = LE
  misc_feature 280..1545: note = CDS
  misc_feature 1546..1551: note = RE
  misc_feature 27..278: note = bridgeRNA
cgttgataatggttataccggtttcctatcagtgataatggtatatgacggccggggcggtgacccccgatttgactgacgccatcggtttcggtgactgtccttattttgatttgtcccgccgcggccgccgacccgtgggccatggatgcatgacctcataggagcgtggccgctcccatcgaatcccgcaagagtcatggtagcgtgtcccgtcaacgtcctgtctgcgccgcaggccccgggaggcatccgaacgcatggaaaggaacgacgacgatgacgcctccgaacggaatggtgtgggctgggatcgatacccacacggacacgcacaccatcgcattgcttgacgaaaggggaaggccgttgggctccgaaacgttcgcggcgaacccggacggatacgacagactgatcgacatgctgcccgggccgggcgcggtcgcggccgtgggtgtggagggcacgaactcgttcggcgcggccctggcccgcaggctcgcggccgccggatacgaggtgcgcgaggtgctgcgtcccaagcgcaacgtgcgccgcaggaacggcaagtccgatcccatcgacgcggtcgccgccgcccgcagcgtcatggccggcgacgacgccggcccgccgaaaaactcggacggctgggtcgaggcattgcgccacctcaacgcccaacgcgcccaattggtgtcgtcgatgacggcgatttccaactcgaccaacggcttgctcgtcaccgctccggagcccgtcagggaacggtaccggggattgaagggcggggcccgtatgaacagactcgccgagtgcaggcccgccggcggcctggtcgagcatagcgcgctggtcgcgctgaaatccgccgccaaggcatggaaggcgctcaaacggcagtcgggcctcttggaggagcgcatgcgcgcgatcctcgaggagcacgcgagaccgttgctcgacatgtactgcgtgggcaccgtcaccgccgcggccctggccatcgtcgccggcgacaaccccgaacgcatccggagcgaagccgcgttcgccaaactctgcggcgcgtgcccgctgcccgcatccagcggcaggaccagcaggcacaggctcaacaagggcggcaaccggcagggcaacgtggcgctgcaccgcatcgccatcgtccgcctgcgataccaccaacccaccagggactacgccgccaggaagacccgcgagggcaaaggcaagctcgagatcatccgctgcgtcaaacggttcatcgcccgcgaggcgtaccgggcgctcatcgccatacgcaacggcgggaacggacgcgggacctcgggcgaacgcggcgccaggctgcgcgaactgcgcatgaaccatggcatcacccaacagcaggtcggcgaggcgctatgcgtgccgtccagccgcatcagcgaaatcgaacgaggtagacgagacctgcccgaactcgaacaacgggccatccaatggattcactccatcaccgacccaaaacaacacgcccaaacacttgacaatgtataggagcat

SEQ ID NO: 5198 - DNA, 1621 bp, unidentified
  source 1..1621: mol_type = unassigned DNA; note = element_7f735f0
  misc_feature 1: note = core
  misc_feature 2..503: note = LE
  misc_feature 504..1487: note = CDS
  misc_feature 1488..1621: note = RE
  misc_feature 6..221: note = bridgeRNA
tcgtaatataagtttaaccagtttttactggttgaattttttttatttagttttattatagcggtagtcggagtagaacgtagcgcccgtgggacttgatcccgtcagcaaaactgttcattccctacttgtataagcatgtttcaggctggttgggacaatgatcccgtttaacaagcgaacctatgatagtacaagcagatctagggacaaccgactaatcttaatttctaaggaggagatgatgatgaatccagtagtaggtcttgatgtttctaaaggggaaagtcgggtacaagcattcttggataagggtcaaccttttcgtaaaagttttagtgtaaaacatacagtcgagggctttgagaatttattagggcttcttaaaagagattgaaagagtagctgatggtaagcaaccttcggttatcttagaatcaacaggacattaccactctcctgttattcaatttttagaggaacagcaatatgtttatattattgtgaatccccttatctatcatcgagcaaggagcacaagtttaagaaaggtaaaaacagacgctgtcgatgcctatcttctttgtgaactatactacaaagaagaaattgaaccgtataagaaaagaggtattcaactcttaaaccttcgtaatcttacaaggcaacaagagacaatttcaagtatctctacacaaaccaaggtacagcttctaacagtgttagatcaggtatttcctgaatatagaggtgtctttggtaatttatattcaaaagtctctttacagactctctccttatttcctacttctgaacatgtactaaatactactgaatccgtattaactgacaagattgtatcgttatgtaccagacgttcagaaaagtgggcaaaagaaaaagcacaaaagcttattgaggttgcactacgaaatccttttcaaaccaatttgtatgaaagccatatttttaacctaaagatgttaattactatcgttcttcaatatcaagagcatctatcaaaactagaaacagaaatagatgccctcgctaaagaaattgaagaatataagattatccagtctatccctggtatcggagaaaagattgcggcaacaatcatttacgaagttggagaaatagatcggtttaatcaccctaaaaagttagttgcctttgcaggaatagatcctagtgtttactcttctggaaggttcacagcgacaaacaatcgcataacgaaaagaggatctagaaggttaaggcaagctttatatatggctgtgtactgtggaattcgagatgcccgtaaacaaaaaacgagcgataccgttattcctcgaaacaaaaaattaagagagttttacgataaaaaacgcgatgaaggtaaaccctatagagtagcgataattgcttgtgttaataagcttttacacttgatttatacacttttaaagaacaaaaccatcttccaagagttagcttaaaaactatatttaacaacataaaacaaaaccttccaataatgaaaatcaggaaggttatttggcatactcatctttagtatatcatctaatttttcatttttttattgaaaaatgttgacaactattggctggtt

SEQ ID NO: 5199 - DNA, 1245 bp, unidentified
  source 1..1245: mol_type = unassigned DNA; note = element_7f8452f
  misc_feature 1..2: note = core
  misc_feature 3..270: note = LE
  misc_feature 271..1230: note = CDS
  misc_feature 1231..1245: note = RE
  misc_feature 49..217: note = bridgeRNA
cttgtatgttgctcagacaccctgagggagcagctaagcttgcaggtgttgtaatcaaagagatgtgtttctgggggaggccggtcgctccttaaggcaggatttgctcctgaccttgtttgtagagaggctcccccgcctcattgcccaccacgaagagtatcgagaagccgacaagtcggacttcgcattacaaggttgcagcggcatgaagttcgaggtcaggggaaccaggagacatcttcacctagtttgcctggagtgaaaagcatgagcgttcatgtcggactggatgttggttctcgcactaccgcgatggggtggcgtgataaaggtcgctcggcgggggcatgggaaattgctcaaacccccaagggccgtaaggctgcagtgaaaaagctgttagcgctcaagccgctttctgtggttatggaagcaaccggaatttattatctggatctggccatggaattgagcgccgcgggccttccggtctcggtgatcaacccgaaaagttctcgaaacttcgccaagctgatgcttcaacacagcaagacggatgccattgatgcccagttgctggctgaatatggtgagcgtatgacacctcgcctgtggagccctccaagccttgcccagcttgagctaagggccattggccgacatataaaccgtctgacttgccatcgcaccagagcgaagaacgaactgcatgcccttcaagcgactgaaacaacttcggcgatgttgattgaggacgaagaggacgcgattgaaatgttcggcaagcgcattgaacgctttaggctggcgggacgagtcatcatcgccaactctccaacattacaaagtcagttcaatcacatggtggctgcgccggggatgggggacgtctcgacatttgcagtgttggctgagctcacgactctacccgtcacactcaagtcatcacaagtcagtcgtacaagtatcgacaagccgggtcggctgagcaaatgcggcaacgcttatttgcgatctgccatgttcatgcctgccatgtgtgcggtccgctgcgacccttatgtgaaagctttttatgaggcgttggtcggtcgagggaaaagaaaaatacaggccatctgtgctgtcatgcgtaaatatctgacgggtttgtgggcgtgcatgcacgctggagaagattttgacacagccaagcttttcagcgaaaagcacctgataaaagcttgaccgtgaacagagtat

SEQ ID NO: 5200 - DNA, 1473 bp, unidentified
  source 1..1473: mol_type = unassigned DNA; note = element_7f84cac
  misc_feature 1..2: note = core
  misc_feature 3..250: note = LE
  misc_feature 251..1456: note = CDS
  misc_feature 1457..1473: note = RE
tctaccattgaattttgtacggagacggagcgccctcgttgatgtagactgacctcgacgggggtgtggctcctggggtccgcggtccttgaccgctcggctctgaaatgccgcccccgtctcttgtatcgtccaggagcgtctgccgggatgatgctgaactgttcatgcgtctgtgtgaacaacctgtggctctgcgcagtagacgagaccgcctgggcgtgaactcacgctgcaaggaggcacatcaatgaaacctcacctctgtgtcggcatcgacgttggctgcaaagcacatcgtgttgggattgctcgcccggacggctcgatcctggaggagttcgacatctcacacagtgatgtcggcttccaggagttcttccgccgtgtggaagagcagaaagagaggttgtcccttccggtggccgtagcgatggaggggttcaatggctatgcccgtcctttcgatcgtctggttcaggagaagggctaccgattgttcaacgtcaacaacatgaagctcgcacagttcaagaagatcttccctggcccagcgaagaccgatgcgatcgatgcacgcaagatcgttgagctattcatccttcaagaccacctgccgatggcgaagaatgctcttcaggaagtagttgctgctcccgcagtgaacgagaagctcaaacggctcagtcgtcgcagacggggattggtgatcgagaagacgcgagtactcaatcggatgcagtccgacctacaggctgtatgtcccgaactgctcgcagcaacgccggatgcagacaacctgtggttcctacgattcatcacatcacgagaggacctccagcaactagcacggttgcgtcggacaacagtacttcagattcgcggcatcggtcagaagtacgcagggataatccaggagtggcaagtcagagcgaagttctcgtccgaagttgagtacgtggggccgatgatcatcgaggatgcaagacgaattcttgagcttcatgatcggatccatgcactggatcaagcgatggaagggctgatagacggttcagagattgcacgtcgcttggcaacgctccctgggttcggtaagacatcgattgccgagttagcaggagagattgggacacagagacgctttgtgtccgaggggagcctggcgctgtacctaggaatgagtcctctgacgcatcagtcagggaagatctcaagcacccgtagtcctcgccaagtcaatcgacgagccaaagcagcgatgatgacggcggtcgcccaccatgcacgctgtgttcctcaatccgcggcgtactacgatcgcaaacgatctgagggcaagacccacaaccaggcgatccgctctctgggacggcacttagtacgtgtcatctgggcgatgttgagagatggacgagactacgagatccgggaggatgtccacccgatgacttgaaaatccaagagggatgt

SEQ ID NO: 5201 - DNA, 1314 bp, unidentified
  source 1..1314: mol_type = unassigned DNA; note = element_7f864aa
  misc_feature 1..2: note = core
  misc_feature 3..70: note = LE
  misc_feature 71..1105: note = CDS
  misc_feature 1106..1314: note = RE
  misc_feature 1091..1308: note = bridgeRNA
ttaattagatggtccgcctcacctctgagcttctacgcttagagttaggcaaacaaagaggcgaaccatcatgtcttctattaaagtccttggtattgatttaggcaaatcatcgtttcacgtcataggccgtgactactctgataatcaggtaatccgtaagaagttttctcgttctgcattaattcactatcttcatcagttatctccatgcacaattgcgtttgaagcatgtggcggcgcacactggcttggcagacaatgcgagtcgatgggccataaggtcaagcttatccctccacaatacgtaaagccgtttgttaaaagtaataagaacgattttattgatgcggatgcgatatgcgaagcatcaacaaggccgaacatgcgcttcgtcagcgtaaagtcagagcaggcacaaatcatctctgctattcataaaaccaggcacggatatatcaaagaccgaacagcctgcatgtctcgcatcggtgctttgctactggagtttggcgttgcccttccaacaggtcatagtgtgatgaaacaactgtttagctggctggcgcagcagcggcagccccttccgccgttattaatgcaagagctcgtggagttgcacgagcattacctgcttctcaacgcaaatattgagaaacaggacaaaaagcttaagcaattggtggagggtgatccggttgctcagttgctgaagacgatcccgggcattggcgatatgacggccagcctttgtgttgccaatattagcagtgcaacggactttaagaacggtaggaatatggcagcttggttaggattagtgcctgcgcaatattcaacaggcggtaagcccaaattactgggcataagtaagcgaggtaacaaggagcttcgaaccttgtttatccatgcggccagggcggtaatgtcgaggcctgagaagacgggaaaaatctacggagagtggctaatgaatctgcgagcaaccaagccgttcaatgtcgctacagtcgcattggccaacaagttagctcgcatagcatgggcagtcatgaaaacaaaacaagcatttagcgacaaagcgttagcaccgggtttgcaatgataaaagagatgacgaaaacggtagaaccactggattaaaacctgacacaaaaaacagctcacagaagctttcggttttttgaggataatccagcgcggatctcatcgtggagcgggttgcgaaagcgcctaatcagactccgaatacattagcgcaaaaccagccccgttatcgaaattaatcattgcaataacgaggcggaccataca

SEQ ID NO: 5202 - DNA, 1376 bp, unidentified
  source 1..1376: mol_type = unassigned DNA; note = element_7f8719c
  misc_feature 1: note = core
  misc_feature 2..89: note = LE
  misc_feature 90..1115: note = CDS
  misc_feature 1116..1376: note = RE
  misc_feature 1142..1370: note = bridgeRNA
gaatgatatggactccccctgctcccacggcatccattgtgccacattgaaggtgtcgtaagtcttcaattgaaagagggggagtccagatgaatgttacaaccatcggcatcgacctggcgaagaatgtgttcagtattcatggcgttaatcatcacggcaaggtcgtggttcgcaaacggctcacccgagccaaactcttgcccttcatcgcacagcttccaccctgcctgatcggcatggaagcctgttccggcgcacaccattgggctcgggaaatgacaactctcggccatcaggtccgcattatcgcaccccgtttcgtcgccccttatcgcaagagcagcaagaacgacgacaacgatgccgaagccatctgcgaggcagtcggtcgccccaacatgcgctttgtacccatcaagaccgccgagcagcaggctgtgctgtgcctgcatcgcattcgccgtggtctcatcaaagaacgcaccgcgcaaataaatcagatccgcgggctgctcgccgagttcggactcatcatgccgcaaggtcgctatgccgctcgccaccacatcccggaaatcctggaagacggcgagaacgggttacccatgctcacccggcgcttacttcacgatatcaatgcacgcattcgccaactcgacaacgagatcctgacctacgaccgcgagatcgaagccatggctcgacgcgacgatcaagcaaaacgcctgatggccgtgccaggtatcggcccgcagaccgccacagccatccttgccagtgcgccagatcccactcagttcaaaagcggtcgtcacttcgccgcctggcttggcctggtgccgcgacaatattccaccggtggcaaggttcgactggggcgcatcaccaagcgaggcgacaagtacctgcgaacgttattaatccacggcacccgcgccgtgatcgcgggactggccgataaaaacgacgcgcttagcaactgggcacgagacctggtggaacgacgcggctacaagcgcgcggccgtggcgttggccgccaagaatgcccgcatcatatgggcgctgctaatgcatcaaaccgactttagaaaccaacccgtggaggtctaaacgagcaacagcgacgggcgaaccccgcccgcctaccgagtcttgcaacggcaagcgatgaggaaacggtcagaccgagagtgatgaagcctgtttagctctgcggctcgcgaaagccgactaacgaataaggccatcactcacacgcatcatcatcctggcccgggcaaaagtgcccacacagaggccgaatgtagaactgcagtcttaaaccgcttccaaatcaaatgacgttgcttgaccgcagagggagtccatgta

SEQ ID NO: 5203 - DNA, 1398 bp, unidentified
  source 1..1398: mol_type = unassigned DNA; note = element_7f8a1d6
  misc_feature 1: note = core
  misc_feature 2..224: note = LE
  misc_feature 225..1385: note = CDS
  misc_feature 1386..1398: note = RE
  misc_feature 13..236: note = bridgeRNA
ctacttaagactgggtggcaggaccggggccggccagactctggtccaggtgctcggtgagtcgctcccacaatcggctgcctgctggtgtcattggtgtggctctctcatggcatgcgtctcgccgggcaccgcgcgaggagtggctggaaaggggtttgttctgctcgaagtagcggtgccctccttgctgacattgtcgtgttaagggcaaggagaactggatgcccgtgatcatcgggatggatccacgcaagcgttcggccacgatcgaggtgatcaccgaactcggtgacgtggtcacgatcgggaagttcggtactgaccagtccggctatgcggaaatgctgtcgttcgggcgccggttccccgagcgtacctgggcggtggagggctgtaacggcgtcggtcggaatgtcgcccaccgcctggtccacgacggggaggccgtgctggacgtgccggcgaagttgtctgcgcaggtgcgggtgttcgccacgggcaacggccgcaagaccgaccctgtcgacgcgcactccgtcgccttggccgtgttgcgcgcaccgaacctggtccgagtccaggttgaccctgagttggtcgtgctgggcatgctcgtcgaccgacgtgatgaactcggccggtccggaacccagaccgtcaaccgtctccaccggttgctgctggagctctttcctggcggagcaaagaagttcctatccgctacccaggcacgcgcgctcatcgcgacgatcaaaccgcgggacatcgtgggcaagacccgccgcagactgacggtcgagttgatcgctgaactcgagaccatcgacaagaagatcaagaccgcggaaaaggatctccgtgagctggtgatcgcccgcggatccacgctgctggacctgcatggcatcgggctgtccggtgccgcacggctgctggccgatgtcgccgacatccaccggttcgccagccgggatcggttcgcgtcctggaacggcaccgcgccgttggacgcatcttccggtgagcagcaacggcatcgcctgtcgcgtgccggcaatcgcaggatcaaccggacgctgcacatcatgggggtagtccagctccgtaattcaactgctggccgcgtctacttcgatgggcggaaggcggctggaaagacctcgatggaggcgatgcgcgcccttaaacggcgcttatcgaacgtcgtctacgcccgcatgctggccgatcagagacgacgtgaggcggcaggtccgggagggcactcggggacgactctgcaatccagcgtgaccggcctgaccccggacaccggcccttcggacaagccacaacccgaacctgccaaccgccagcctacccccgccagggccatcccttgacataaaggggagc

SEQ ID NO: 5204 - DNA, 1289 bp, unidentified
  source 1..1289: mol_type = unassigned DNA; note = element_7f8a692
  misc_feature 1: note = core
  misc_feature 2..230: note = LE
  misc_feature 231..1274: note = CDS
  misc_feature 1275..1289: note = RE
ctgtgagtgtcatactgcagcctgatggcctgacccatgctttgagtgaccacgtgtcttttgtttgatctgtcgaccatccgttggtcggcagtcgatccacaggatcgatgagaggcaggttgcccggcggcgggcgagatgtgacctgataggagcctgacggtacgtaccctcacttcctgtcctcttcgtcctagcgcctgggccttttcagcaagggagcatccatggaccagatcatcatcggcgttgacacccacaaatccaaccacgttggtgtcgcgatcagtcgtcagggcgctcgcttgggcaccattacaatccccacgacccgccaaggatatcgcgatctggaaacatgggcatcagagttaggcacaatcaaagcctttggcatcgagggtaccggttcctatggcgcggccctgtctcgagacttgctggtgaagggccacactgtgctggacgttatgcgccccaatcgccagctgcgctatctgcatggcaaatccgacagtctcgatgcggaaagcgccgctagatcggttttgaatggtcagaccagtgccctggccaagacgcaaaccggatcatctgaaatgatacggcacattaagatcgcccgcgacagcgcggtgaaagccaagtcgcaagcgatgatcaccataaaaacactgatcatcaacgcacccgccgaattgcgcgatacgcttgaccagatcaagggtccgatcagcctgatccggcacatcgcggccttgaggccgggggaaatcacatcttcaaccgcatcggccaaggcatcaatgcgggcaattgcgcgccgctggctgagcttgcgtgaagaaatccaagcccatgaggtggaactcgaacgcatggcctgcgaaaaagcgcctgagctgatgaaatcacatggcatctcgacgcagaccgtggccgagatgctgatcctcgttggagataatcctgagcgtatcaaatccgaggccgcgctggccaaactgtgtggcgtttgtccgattccggcttctagcggcaagacaaaccgcatgcgcttgaatcgtggagggaaccgccaggcgaatgcagcgctctatcgggttgccatcgttcgtatgcgagacgacgaagaaacgaagacctatgccgccagaagaaccgcagaaggcaaaacacggcgcgagatagtgcgctgcatcaaacgctacatcgtgcgcgaaatttatcgccatctttgcgtctcgccatccgcgtcatccagtccttgacagatataggagctt

SEQ ID NO: 5205 - DNA, 1419 bp, unidentified
  source 1..1419: mol_type = unassigned DNA; note = element_7f93d63
  misc_feature 1: note = core
  misc_feature 2..122: note = LE
  misc_feature 123..1139: note = CDS
  misc_feature 1140..1419: note = RE
  misc_feature 1158..1412: note = bridgeRNA
gaatgaaagggacttccccgtcccgagcaagccgcacgcccagagggttgcggtttacggcaactcagtgccacgatggagaggtcaaacttttcatcaacttgttctgagaggggaagcccatgtctatcgtagcggttggaattgatctcgccaagaacgtctttgccgtccacggcgtgggcgcctcaggtaagcctgagcttgtgaagcctgatgtaaaacgcaaaaagctactcgagctcattgccagcttgccgccgtgcctgattggcatggaagcctgctctggcgctcactactgggcgcgggagtttcagaagttcggacacacggtacgcatcatggcgcccaagttcgtcgcgccctatcgcctgggtggtaaacacgcaaagaacgatgcagccgacgcggcagcgatctgcgaggcggtgacgcgcccccagatgcgtttcgtgccaatcaagaccctcgatcaacaaagccacttgttcatccaccgcgcccatcagggttatgtcgccgagcgaaccgcactgatcaaccgggcgcgtggcctactgagcgaactcggcatcgtcctgcctcaggcgtataaggcgttcaagcaaggcgtgcatcaggtgctggaagatttgccaggctactgcaaccaagtcatcggcgacatgctcagcgagatagcgcatctggatgagcgtattgaccaagacgcaaagctgattgccaagctggccaaggacgatgcgcaatcgcggcggctgatgcaactgtgcggcgtaggcccgacaacagctaccgccatcgtggccagcataggcaacgggcatgacttcaagaacgggcgccagttcagtgcctggttgggcttggtgccttgccagaacagctctggcggcaagaccaagctggggcgcatcaccaaggcgggagatagttatttgcgatcgttgctggtgctgggcgcgcgctccttgttgctcaaggcgccaaacaagacggaccccgtgagtcgatgggcattgcagctcaaggagcgtacaggttatggcaaggcagtggtggcgattgccgccaagaatgcccgcatgtgctgggctgcgttaaaccttggcgaaggttttagagtgccagcctgagagttgatcagtaaagaaattaccaccgcgtgattggcatccgttgatgagaaaaggtttggacctgcgccatggcgtactcgacatcccccgtggggacccggcagtccattggactgcatccccgacgtttgattggagtccatggcgcgcgtctttcatcagggtccgctgtacaagcagcagcaataatgaccgtttataggctcgctgtccgcaacctttatctcgtaactggtaaaaacacgcaggtccttgctttattgtggaagtccttata

SEQ ID NO: 5206 - DNA, 1387 bp, unidentified
  source 1..1387: mol_type = unassigned DNA; note = element_7f9808d
  misc_feature 1: note = core
  misc_feature 2..80: note = LE
  misc_feature 81..1112: note = CDS
  misc_feature 1113..1387: note = RE
  misc_feature 1156..1378: note = bridgeRNA
taatgagatggtccgccgcttgattcccctgcctgagcaggaggatcgtgaaggcagcttctaaaaggaggatcatcgttatgcagatacattcggttggcatcgacctgggcaagaccacttgtcacctcgtcgcacttggcgcggccggcaaggtgctggtgaagaagaagttcacacagaagcagcttctggtattcaccgcgaacatgcagacttcgctgatcggtttggaagcctgttcaggagcacactttctcggtcgggcgttgcggaagcaaggccacgatgtgcggttgatcccagcccagttcgtgaagcctttcgtgaagtccaacaagaacgacttcgtggatgcggaagcgatcgccgaagctgtcgaacgcaagaacatgcgctttgttccgatcaagacggacgaccagctagacctccaagcgatccaccgggtgcgcgaccggcttatctcgcggcgcacggccgtcatcaaccagctaagggcatttcttctcgaacgagggatggtatttgcgcagacgccagcgaagctcaaggccgccatggctgacatcctcgagaacgcggaggcggatctgacaccgcagatgcgcaacctcatcgacatgttgtggagcgagtggaagacggttgaacaacagatcgaagaactcaccacgcagttggagcggatcgccgctgcagacgcgggctgcactcgtatccgtcagatcccaggcattggaccgatcgtggcaacagccatcgtcgcggctatcggcaacggagctgcatttcgcaagggacgagactttgcagcctggctaggcgtcgtgccgcggcagtattccactggaggcaaggcgaagctgctcggcatcagcaagcgaggcaacgtctacctgcgcaaggttttgatccacggtgcacgagctgccgtattgcgcattaagcgagatcgagcggccatcggaccctggttggatcgactcgatgccagagctcctaagaacgtcgtcgtggttgccatggctaacaagctggcacgcatcgcatgggccgtcctatcgagtggacaagactacaagccatcaccgatcgtcgcggcagcctgaactaaagcccttgtaacggcaccatagaaacggatttgagcttacccaccgaagtctgcacaggaacagcaacgacgaaagaacagtcacaacggcgtgccttcaacctgataccgataatggtctacaacgaccgaccgacttgtaaggacaggcacgcagcggaactcatcatggccaggagagacgttctccacctaaaggccgaatacattgccgcagacttgtctatcgctcccaagcttttcccttgcagtccggcggcggaccataca

SEQ ID NO: 5207 - DNA, 1360 bp, unidentified
  source 1..1360: mol_type = unassigned DNA; note = element_7fa25e5
  misc_feature 1..2: note = core
  misc_feature 3..73: note = LE
  misc_feature 74..1102: note = CDS
  misc_feature 1103..1360: note = RE
  misc_feature 1104..1350: note = bridgeRNA
ttatggaatggcccgccccaactctcccgacatcggttacaatgccggtgcttgaatagaggaggaacgagccatgactattgtgatgatcggaatcgatttaggcaagaacagctgcagccttgccggactggatgagagcggcgcggtggttttgcggcgtcggatgcagccggcgacgattgtaagttttgcggcaaagcaaccccattgtacgatcgcgatggaggcatgctgcggagcgcactatctcggccggctgctgtcgtctcagggccacacggtcaagctgatggcgccggagtatgtgcgcccctacgtgaaagcgcagaaaaatgacgatcgagacgctgaagcgatagcggaagcggcgacgcgtccgacgatgcgctttgtcgacctcaagacgcaggagcagcttgatattcaatcgctgcaccgggtgcgctcccgtctcgtgggcgctcgcacaagcctgatcaaccagctccgggctgtgctgctcgaacggggcatgactgcgcctcaagggcgacgcaagttcgaacaggctattgaagggctgctcaacgatcctgagcgtttgcccgaaggacgtgtgcggcagctcgtggtcgacatgcgcgaagaatggttaggtctggacgcccggataggcaatctcgacacagagtttgttgcacttgctcgtgccgacgaaactgcgcgacgactgacctcgatcccggggattggcgcgcttaacgcgacggcgctactggccgcggccggaaacgccgaaggcttcgaccacgcgagagattttggcgcctggctaggtctggtgcccaggcagcacaccaccggtggcagacccaggttgcttggtatcagcaagcgtgggaacacgtatttgcggacgctattgatccacggcgcgagagccgcgctgcccactctggagaaaaccgactcagcattggggcaatggttacgtgatctgctcgcaaggcgacatcgcaacgcggtcgttgtggcgctggccaacaaaatggctcggatcgtctgggcgctgatcaggcacaaggccgtgttttctcttaaaccggcgatagtcgcttgatgcaatcgatcaccggcagacgacctgtttggtgatccacggaatgtctgcgggaggaattttgaagatggcctgacggttcaccgacgtcccaacagcctgaccaaaaaaatggcacttgatgccgtgacttttatgaggccagggacgtgcggctctccatcttggcaacggcccagccgttatgccgtatacgttgatgcagaccagtcagttgccagtcgaataaaaactcttgcggacggggcgggccatacg

SEQ ID NO: 5208 - DNA, 1349 bp, unidentified
  source 1..1349: mol_type = unassigned DNA; note = element_7fb0567
  misc_feature 1: note = core
  misc_feature 2..59: note = LE
  misc_feature 60..1091: note = CDS
  misc_feature 1092..1349: note = RE
  misc_feature 1094..1339: note = bridgeRNA
tatggaatggcccgcccctctcctttatcgtgtccgggtggcaaccggaggatgaggcgatggatattcaggttctcgggatcgatttgggcaagaacagctgcagcatcgtcgggctggacgcaactgggagcgtggtgatgcgccggcggatgcggcgacagagcattgtggagctcgcggcgaagatgccggggtgcgtagtggcgatggaggcgtgctgtggcgcgcatcacctcgggcgcttgctggccgcccaggggcacaaggtgcgactgatgtcgccggagtatgttcgaccctatgtcaaggcgcagaagaacgacgaccgcgacgccgaggcgattgccgaggctgcaacccgaccgacgatgcggttcgtggcgctcaagacagcggcgcagctcgacgtccaggtgctgcaccgtgtgcgcgacaggctggtcagccaacgaacggcgctgacgaaccagatccgtagcatcctgctcgagcgcgggatcgtcgtgccgcagggtcgacgcagtctgctcgaggcgctggaggcggtgtcgtctgggccggacggtgccggcgtgggacctcgggtgcggctgctgcttgacgacatgctcgatcagtggcgcaccctcgaccggcggatcgtggctctagatgacgagttcgccgacatggcgcgcaacgatccggcggcgcgccggctggcgaccatcccgggcatcggcgtgctgaatgcgaccgcactggtggccgcaatcggcgacgggcgcacgttcagccgcggacgtgatctctcggcctggctgggactcgtgccgtgtcaggcaaccacgggcggtaagccgaagctgctcgggatcaccaagcgcggcagcaaatatctgtgcaaactcctcatccagggcgcgcgagcagccctgccgtcgttggcgagaacaccgacgccgctcggcacctggctacgcggactgctgagccgtgcacatggcaacaaggtcgtcgtcgcgctggcgagcaagctggcgcggatcgcatgggcgatgctgcgcaacgagaccgactttgccgcgaaccggctcgtggcggtgtaaccgggatcggctcgcggcgattacccggcatcgcgagccgtaaagggtctgcgggtggtggaagcgagatggcctgacagtcaccggtgtcccgacagcctatggcgcaaaatggcactcgatgccggcccctttatgaggctcgggacgcgcggatctccatcttggccagggcgacatgccctgagaccggatacgttgatgcggactgctcagatcactcagccgaaagcacttgcagatggggcgggccatacg

SEQ ID NO: 5209 - DNA, 1282 bp, unidentified
  source 1..1282: mol_type = unassigned DNA; note = element_7fb2274
  misc_feature 1..2: note = core
  misc_feature 3..76: note = LE
  misc_feature 77..1033: note = CDS
  misc_feature 1034..1282: note = RE
  misc_feature 1049..1280: note = bridgeRNA
atgagatggctacccccgccgccccctgtgaacgcccgctaagctttcacagggggatctatcggagaccgccgtcatgaacaaagtagctattgtcgccatcgaccttggaaagctcacctttcacgtacatgagcaagatgatcacgggcatccgcttctgcgcaaaaaatttaagcgagtggaactcctccagcacctagcaaatctcgaaccgtgcatcgtcgtgatggaagcttgtggcggggcccatttcatggcgcaagaagtcgccaagttaggccattcgcccaaactgatagcacctcatctcgtacgtccctatgtgaaaagcaacaaaaacgattttgccgatgccgaggcgatctgcgaagcagccagtcgtccaacgatgcgttttgtccccgttaaaaaccagactcagcaggcgctggcaatgctcaactcggtccgcgactcgctcatcaaggatcgcacggcgaccgtcaatcggattcatgccgcgtttctggaagtcggcatcagcctgaccccgggctataagtcgctcaaggacataccggccctgttggaagcaagttcctttcacggactcatccgcaaacttgtggcggacttgtacgagcattacctctacctcaatctgcgtatcaaggtgttggacaaggaggtcgattgccaggccgccgaagtgggcgacggtaagcaattcaaatgtggtcgagactactcagcctcgattgggctggtccccaaacaacactcaacgggcgggcggacggtacttttgggcatcagcaaacgaggcgatcgaaatcagagacgcctgttcgtccagtgtgcccagacatatgtgaacaggctggatcgacaggaagggaagctggctgattgggctcgcaagctcctggccagccaccgtcactgcaatcttgtggtctgcgcactggccaacaagttcgcgaggatcgcctggtcgattgcggcaaaccacacggtattcgatgcagggccaagcgcgatgaacgcttgaccctgctgctacccgagcaccacccacctggttttgcgatgctgaataacagatgacatgaacggctaaccggcctgacgaaaaccctgggctcccacacggctgcaaggccgtcacactaatcaggatcgtcgggcatcgaattctcatcgaggcgcagggacacaactccccactcagacgccggatagatgaaagcaagccaaacacgcatcaaagacagtattgcagaaaagggggtaaccatag

SEQ ID NO: 5210 - DNA, 1369 bp, unidentified
  source 1..1369: mol_type = unassigned DNA; note = element_7fb4b8c
  misc_feature 1..2: note = core
  misc_feature 3..255: note = LE
  misc_feature 256..1299: note = CDS
  misc_feature 1300..1369: note = RE
  misc_feature 26..209: note = bridgeRNA
cttgtatcttgcttgcaactgcccgatcttgcgatcccgtgctagttgggggatcagatcgggtttcggcgggaggccgttcatctccttaggcgcagtgaaccgagcagcctggattatagataggccccccgccctcctctcccacgccgtggagaatcctaggccgtttgagcctgcattcacaaggtcggcgcgagaggttgcacagggtcggggagccggaactcagtctaatcccatcgtgaggatagtatgaagaaaactgagacaactaagcttggggtccaagacttcgccgggatcgatgttagcgcgcacgagttggacgtggttgtacgacgcagtatcgatgaccagcttacgattgcacccttcgccaacactacggccggacacaaagcgctgctgaggcttttgctgcatggcaaggctcaggtccgcgtatgcgtggaagccagtggaaactatactctggatctagcattgacgctgcaagcacacccgcaggtggagatcagcgtcgtaaacccgcgtcgtgcgcggcgctttgccgagtcgttgggtaagcgcaacaagacagatcgggtcgatgcacaagtgctgggcgaatacgcgtggcgcatgccgtgggttccttggcagccacccagtgcagttgccctacacttgcgcgccattacgcgtgctatcgcagacctgagtagtattcacacgcaacagaaaaatcgtgcccatgctgtggcagctagccaggccttaccggcattggtggtcagggaaatggagcaccatcagaagtatcttgaacaacgcatgacacagttgcgtcgacaagccctgcgcctaatcactcaagattccgaactgggccgccgtttccgcctcatgctaacggcaactggcatcgctgaaaccagtgctctacagatcctgggcgaactcgccgttctgcccgatacgctggatgcgcgtcaatgggtcgcattcagtggactggatcctcgccttttcaagtcggggaaatcagtcgaaaagcgccccagaatcagtcgcggcggaagtcgtcatttgcgtcgtgctctttacatgccagcgctcgttgcgctacgtcgtgatccctatctggggcgcttctatcaaaccttggtgcttcgcggcaaagctcgtctgcaagccatcgtcgcagttatgcgaaagctgctgcacgcattgtgtgcgatattccgcactaatcaaccatacgacgggtcgaagctttgtcctctaagcccgatcggcatcgccgcctgcgcttagacgttcaaaaaaagagagaggttctcctgcacctctccagagagaaaaaaattgaattccaagagagaat

SEQ ID NO: 5211 - DNA, 1584 bp, unidentified
  source 1..1584: mol_type = unassigned DNA; note = element_7fc6108
  misc_feature 1..2: note = core
  misc_feature 3..246: note = LE
  misc_feature 247..1416: note = CDS
  misc_feature 1417..1584: note = RE
  misc_feature 6..225: note = bridgeRNA
ctcgtattatatagtcataccccttctttaccttttctcaaggttagggtatgctgttgaagatgctgtggcttggtatcattctcctaccgcacggacggttaaggaaaggctccaaccacagcctctttgttacattgttaatcagttagataccgcacgacggtttatgtggaacgaggttacggaggcaaagagccctgtggatccaagacggcatcaaatacgcaaaggaggatttcccaaatgatctacgtaggcattgacgttgccaaggacaagcacgactgctgtatcctggatgcgaacgccgagaagctttttccgaccttcaccatccaaaacaatcagaccggcttcggcgaactgtacgaaaggctgaattccatgacgggggacaattccgaaataaaagtaggacttgaagccaccggccactattcactcaacattctgggttcgctcattgataaaggtctgaccaccttcgttatcaacccgttacacactaatctttacagaaaaggtctaagccttagaaagacgaaaacggataaagtcgacgccagttcgattgcaatgatgttagtcaccgataagaccctcaagccctactcggatacatcataccacagcgaggatttaaagtcactaacccgttatcgttttgacaaggttcaggaacgtgcaaggctgaaaagctccgtctcccgtctcgtaaacatcctgtttcccgagctggagcacctggttcccacccttcacatggcctccgtctacgccctgcttaaggagcttcccggagcgtcccacgttgccgcgtgtcacctgacccgccttaagaaccttttggagactgcctccaggggccgttacgggcgcgagaaggccattgaactgcgcaatgaggcgcaggcatccattggctccgtaatgccttccaaatctttggaactgcggcacacgatcagcctgatcgaagtcctgacggaagagatagacgagatcgagcagtccatcagggagatcatggacaaatgcaattcccccatcatgaccattccgggaatcagctaccgcatgggtgcaatgatactcgccgaaatcggtgacttttcccgttttgaggatgctgacaagatactggcttacgcaggcatgtcaccatcaacctatcagtcaggacagctgcagtccagccattcccacatggaaaaacgcggctccagataccttcgctacgcactgtttaacgcaacaaagtttgtctgcaagtgggatgagcgatttgcggtttaccttgcaaaaaagatgcgtgaaggcaagcattacaacgttgccgtctcacacgccgcaaagaagttggttcgcaccatctactgcatggagctgactggcgagccttatcggaaataactttaccttttccatatctttttctctgagcacctaaaacgatgctctgtttgtcatgcgattttcaaggaactgattgaagcttatgcctgctcccgggctatctaaaacgcatttctgcgctttattcaaaaaatctctttttctgcttgacttttaatagttagt

SEQ ID NO: 5212 - DNA, 1403 bp, unidentified
  source 1..1403: mol_type = unassigned DNA; note = element_7fd4688
  misc_feature 1: note = core
  misc_feature 2..88: note = LE
  misc_feature 89..1123: note = CDS
  misc_feature 1124..1403: note = RE
  misc_feature 1174..1395: note = bridgeRNA
caatgggatggacgcccccactcgtacggcatcaatgtgtcaaagtagaggtgttaagccaccacttcaaccgagagaggcgtccaccatgaagattaaaaccgttggtattgacctggcaaagaatgtgttccaagttcacggtgtagacgagcgcggcaagactgtactcaggaaacagataaagcgtgaccagatggcgagtttcttcataaatttgccgacctgcctgatcggaatggaggcatgcggcagcgctcactactgggctcgtaagttgcaggcaatgggtcacacagtgcacttgatggcaccgcaattcgtcaagccatatgtcaagagcaacaagaacgatgcggccgacgctgaagccatttgcgaagcagttgggcgaccttcaatgcgattcgttccgatcaaaaacattgaacagcagtccgttctatcgctacatcgcgtccgccagggatttgtgaaggctcgcactgcgcaggccaaccaaatccgtggcttgttgggcgagtttgggctggtggtcccgcaaggtatcgcatacgtcactcagcgcgtgcccgagctgatcgaggatgccctcatcgagctcccaggttcgtttcgtatcctgattactcgactgctggagcatctacaattgttgcatcgtcagatcgatgagatcgaagcgcaaattaaggcttggcaccgcagcaacgaagcaagtcagcgcttgacgcaagtgccaggggtcggtccgataacagctacggccttggtagccaccatcggcgacgcaaagaacttcgataacgggcgtcagcttgcagcttggcttggtctcgtgccgcgacaacactcctccggtggtaaacggaacctcttgggaatgagcaaacgaggtgatgcctacctgcggaccttattgattcacggagcaagatccgtcatctatcgtgcgatgcagaaagccgacccgagcaactgggtcttcaacgtggcaagtcgtcgcaataagaatattgccgccgttgcgctagccaataaaaccgctcgcacgatctgggcgctgctcatccatgacagacagttccggctcgactaccgggccgcgaatgcggccgcttagtcaagccggttcatcgcagtaaccgaggttcacacgaaggagcacagaccaccgattgctcaggcgatcagcacgttgatggcacgacaggttagaccgtggttggcacagccctcgccggacgaggcactgagagtgcgtgtaagcgattggggcgccgaccagcaaaacccatcagggacagcaagtttatcttgcaagcaaagtccgaatgtacgggtgcaatcttcctaccttgctacgacgaactggaagcttgacaaacgggggcgtccatgta

SEQ ID NO: 5213 - DNA, 1341 bp, unidentified
  source 1..1341: mol_type = unassigned DNA; note = element_7fd4b3c
  misc_feature 1..2: note = core
  misc_feature 3..81: note = LE
  misc_feature 82..1116: note = CDS
  misc_feature 1117..1341: note = RE
  misc_feature 1143..1336: note = bridgeRNA
tgatgtgatggacgtcccctttttcagcagcaaatagtgccatctttttttccgatgcactgaatttcgggagaacatctcatgaatgcgattaaagtcattggcattgacctcgccaaaaacgtttttcaagtctgtgtctggatggaggacggttctgtcgcctcgaaccgaaaaatttcacggcaaaaattgcttgatactgtgcgcactttttcgccaggaaccctcattgctatggaggcctgtgcaacttctcactattggggcagaacccttcaggcgatgggatttatcatcaggcttgtgccgacccagcatgttaaagctttcagccatcatcaaaaaaatgatgccaatgatgcactggctatctgcgaaacggcctgccgacccggtatccattttgttccggtcaagacggtggaacagcaagatatcaaggcactgcgcagtgcccgacaactcatggtggaacaacgtaccgcactcgccaaccagattcgggctttcctcgctgaggagggggtgatcgttcctgctggtattcagaaactgcaacagtacctgcctgagattctagaagaggagagccatgagctgtcctctgtactacgacgtttgcttcatactttgggggaagacctacggaatctgaacattcgcattcatgaaatggataatgaaatagcggcactttctcgtcagcaaagtggttatcaccatctgctcacgatccccggcgtcggtcctcttattgcagccgccttcgtgagtgaagtcagtgcgccccaatttgccaatggccggcaactttctgcctggtgtggcctggttccccgacaacacagttcaggtggaaaaaaccggctgtcttccctgagcaaaaatggaaaccgtcatctccgaacgttaattatccacggtgctcgtgccgtgatgcgctgtgtccaaaatcgtgatgattgtctgggagaatggttgagaaaactgattgcccgatgtgggtttatgaaagccacgatcgctttagccaacaaactgacccggattatctggcgtgttctgcgggatgaagtggattttaatatgcaaaaagcttttactattaattaattgagcaacaaaaatagacgcattatcgagtttgcaaacactgatgagaaaacggctaccgtccctgtaatagcctgttcttatacaaggtagtgatataccgatgtgtgagaaggaagcagggtgcggatgacatcatggcgcggataatttttccattatgacgccggatatatggtcgcaaaccgtataacttagtgcttgcacaactggggcgtccatata

SEQ ID NO: 5214 - DNA, 1392 bp, unidentified
  source 1..1392: mol_type = unassigned DNA; note = element_7ff4f53
  misc_feature 1..3: note = core
  misc_feature 4..86: note = LE
  misc_feature 87..1127: note = CDS
  misc_feature 1128..1392: note = RE
  misc_feature 1136..1379: note = bridgeRNA
tgatgggatggacggtgcccgcttccgcaccatccgggaaggtgtgccaatatggcaactcccgaacaaccgtaaaggagtctcccatgggcaagattgccgctgatctcaacaccattacgaccgttggatttgatctcgcaaaacacgtctttcaggtccatgcaatcgatgcagagggccgagtcgtcataactaaagcaatccgacgaaaggacgtcttgaagttttttgcagatttgcctcgctgcgtcgtgggtttggaggcatgtggctcggcccatcactgggcacgggaactgatcaggcttggccatgatgcccgtctgatgccaccagcctatgtaaaggcctacgtgcgccgtcaaaagaatgatgctgctgatgcggcggcgatttgcgaagcggtaacgagaccgtccatgcgcttcgtccccgtacgatccgtcgaaaaccaagccacacttatgcaccataaggtgcgggagcttctggtcgggcaacgaacacagctccttaatgccctaagaggacatctgtccgagatcggcataatcgtcgcgcagggactgaacaatgcgcgtgcgctcgcaagcctcatcattgaagagaacgacatagttcctgccattgtgcgctcagccttggagccattggtccggcaactggttcagcttgatgaagagatcgggcaaagtgaccgcgcgatcctcgccattgccaggtccgatggaatggctcgccgcctgatgacggttccaggaataggccccatcaccgcctcggctttcgcagcgagcgtacaggatgtctcggctttttcgggtccgcgcgagtttgctgcgttccttggccttaccccaaggcaagcgtcctctggtggaaaggagcgtttggggcgggtttccaaaatgggcaaccgatatttacggaagttgcttgtggtcggagcacatgctgttctctaccatcgccggtccagcaccgatgcactgagaacctgggcagatagattgttggacaccaagccctttaagcttgtcgccgtggccattgcgaacaagcttgcccgcatcgctttcgcgatcatgcgcggcgaggcaagttatgggaaaatgccagcctgaaaggaagcaaacgcttttcttcagcgtaaacctgaagatgaaagatccggggtgctcgtgaggtgatgggaagcgaacgaggataggccttgaaaacctgcaaaatagtcggagccctgagctcgatctcttgatcaggaataaaggtcagcggaaaccatcagggcccagcgataaccgcagcaaagaggccggagacatgaccgcatctccaacgatcgcattgccgaaagaaatcccttgatcggcgggcaccgtccagaca

SEQ ID NO: 5215 - DNA, 1378 bp, unidentified
  source 1..1378: mol_type = unassigned DNA; note = element_7ff8bdc
  misc_feature 1..2: note = core
  misc_feature 3..86: note = LE
  misc_feature 87..1118: note = CDS
  misc_feature 1119..1378: note = RE
  misc_feature 1125..1366: note = bridgeRNA
tgatggtgtggaacggcgcttcgcaccggcattggggatgcctattgtggtgacgccaatcgccacaagacagaaggaaccgttccatggaaaagattaccacgatcggactggacttggccaagtcggtctttcaggtccgtgccattactgaaagcggaaacgttgctgtccgacgtctattgcgaagatcacaggttttggacttctttcgccatatggagccatgccttgtcgggattgaggcttgcggaagcgcccactactgggcgaacgccatcggcgaattctgccatacggtgcggttgatgccgtcggcctatgtgaagccctacgtaaagcggaataaaaccgacgcagccgatgcggaagcaatctgtgaggcggtaacgcgcccgacgatgcgcttcgtaccagtcaaatcacctgaggaacaagcggctgggatggtgttgaaaacgcgagagttacttgttcgccagcgaagccaaactgctaatgcactgcgtgcccacatggctgaactcggtatcatcgctgccaccggcatgaccagcattgccaagcttgttgcaatactgcacgatgatcaggacagacgcctgcctgtttcggctcgggccgcgcttttggagatggccgatcaaattgaaaggctcacagaaagaattgagaagctggacaccaagattgtcgcggcggtgaaggccgatgatgccgctcgtcgtttgactaccatgcccggcggcggccctattatcgctgcgaccgttcgcgccaccgtccaggatcctgcagccttccggaccgggcgggatttggccgcctggatcggcatcataccaaggtcgaactcgagcggaggcaaggagcgagtcaggaagatctcgaataggggcaacaagcaattgcgcaccctgctcattgtcggtgcgacgtcgatcctcaagcaagcccgcagaggcgccaaactacccgcctgggtcttatccttgatggcgcgctgcccttacaaagtgaccgcagtggcgctggccaacaagatggcgcgtaccatatgggcgcttctcgtcaaaggcggcacataccgagctccggccatcatggcgacaccttaggaaaagaatgcctggcgttccggcgtcgggatgaagtggcaatgtacgtaagcgtgatgaacccgaggggcgacacctcgatgccggtcagaccgtctgactcagtgcgccattgagcgcgcaaatttgattaggcgatcggcatcgcggatctcatcgtggccagcggtcgatgaccgcgctgataggccggacatacgaccgcaccgtccgacgacgacttacgctaaaagaccttgccaaccgggccgttccacata

SEQ ID NO: 5216 - DNA, 1441 bp, unidentified
  source 1..1441: mol_type = unassigned DNA; note = element_800041b
  misc_feature 1: note = core
  misc_feature 2..145: note = LE
  misc_feature 146..1168: note = CDS
  misc_feature 1169..1441: note = RE
  misc_feature 1208..1439: note = bridgeRNA
atggaatggacgcctccccccgtaagggctagcgactgaagcggttcggggaatgggtgaaggaaggtgggttctcacaaccgacggcatcagatgtgccaaagtggaagttctgaaacgtaccacttgaggtaggagaacccgaatgaagcttaccgcagtcggcgtcgatgttgcgaaacgagtttttcaactgcactgggtcgaggcggaaaccggtgaaatcatcagcaagcagatcaagcgggcggcgttcctggagcatttcgtgaaccgcgcgccgtgccagatcgggatggaggcttgtggtggcgcgcagcattgggcacgccggctgattgagatggggcaccaggtacgactgatgccgggcaagacggttaaggcattcgtcagcgggaacaagaacgatgtggccgatgcccgggcaatctggactgcagtgcagcagtcgagcgtgaaatcggtcgcggtaaagagcgaagcgcagcaggcggtgctggcactgcaccggatgcggcagcagttgatcaagttccgcacgatgcagagcaatggcctgcgcggcttgctcacggagtatggcgaagtgatggcggtcggccgcgcggcgctgaacaaggcgatgactgacgtgctggcccgcctgagcgagcgactgccggcggcgctggtgcacacacttcgcgagcaatggggtcgacttggagatctggatgaacagatcgccgagatcgagcgtcggctgtcggcgtggatgaaggaagaccggtcttgcaggaagctcgcggagatccccggcgtcggtttgttgacggcgacagcggccgtggcgacgatgggtgatgcgaaggcgttcaagtcagggcgggaatttgcagtgtggctcggactggtgcccggtcaggttggcaccggcggcaaggtgagacttctcgggataagcaagcgtggcgacacatatctgcgcacgctgctgatacatggcgctcgggcggtgctaacgcacgcaaaggagcccgggccgtgggtgcagcaaatcagtaagcggcggccaccaaacgtcgtcacggtcgcgctggcaaacaagatggcgcgaacgatctgggcgcttctggctcatgaccggtcgtatgagagaagttacgtgagtgtcaaaccggcatgaccggcgcgacgtttcaataaaccagttttgcaaacggatgggcacgtcaaaaggttgcgcaaggtaattgagtgtgatggcaaacaggtcagaccgggactcacgaaacctgaatagccttttgggctaacagcccgctaaggaaatgaggcgtgggtcagcggattccattgaggccagcgggttcgacccgcaacaaggtcggatataaaactgcagccttcctgtccaccagcacacacaatctcttggcaaacgggaggcgtccatata

SEQ ID NO: 5217 - DNA, 1598 bp, unidentified
  source 1..1598: mol_type = unassigned DNA; note = element_800a9b1
  misc_feature 1..2: note = core
  misc_feature 3..213: note = LE
  misc_feature 214..1500: note = CDS
  misc_feature 1501..1598: note = RE
  misc_feature 86..252: note = bridgeRNA
aacccctattcctgcacacttggcaccaccataaatgaaactgtacaggcgataggttattgaatatatctttttcattgcttatactgtaattagcggcggcaaagatcgttttctttttgggcctatagcccgtattctaaactgattttaggtactctcatttgcaccaccacctgtccagcctcttacggcagaaggacgtacagtaaaatgataacagacagagtaccgtgccgtaaattttacaatggaggtgcctttatagataaaatttacgacaattgttgtggtattgatgttcacaaaaaactcatcgttgcctgctttagaaaaggcagccggcaggaagtacgtgagtttggcgcaacaaccagagagcttcttgaattagctgactggctcagggatggcggctgcgaaatgactgccatggagagcacagcctcgtattggaagcctctgtataacatccttgaatcttctgacctgaaagccatggtggtcaatgcccgccatatgaaagcagttcccggccgaaagacggatgtgaaggatgccgaatggattgcggatcttcttcagcacggattgctccagcccagctatatccctgacaaagaccagcgggaactgcgggaactggtccgttaccgcaaaagtcttgttggcgaacgtaccagggaattgaaccgtctccaaaagatgcttgagggagccaacatcaagctgtccggcacagtgtcagatatcaatggcaaaagcgcccgcggtattttggagtatcttctcaccggggcatccattgacggagcgaaatacgacgagatgtatgagcgaaaaatcattgcccataatctcaaagccaccaaagaacagatcatagacgacctcaatggtgtcatgagtccgctgcagcgccggatgatgaaagagcttctggcacatctggacgaactgaacatccacattaaaaatctggatgatgagatcgacaacttcatgaagccggaggaaaaacaggcttcccaggcaatccaggatgtaaccggtatcgggaacaccagcgcgcaggcggtcatttccgtaattggtacggacatgggccgttttcccacggacaggcatatttcttcctgggccgggttatgtcccggcgataacgaaagcgccaaaaagcggaagtctggtaaaacaagaaaaggaaactcgcttttgcggaccactctgattacctgcgcacatgcagctgtaaaaaataaaaagtcgtatttccatgctcagtttatgcgcatcagcgctcacaggagaagtaagcgcgcctatgtcgcagtcgcccattcgatgctgatagccatttaccatatcctcaaagacggagtagccttcaaggatcttggggctgattattacaaccaattcaacaaggagcgcaaaatcaacgcgtacctgaaaaagctaaaagcgcttggctgggaagtcccggcagctgccacctgaatctgtcagctaagttcataattctttaaaaaaacttgaaaaagtttcaagggggaagtctgcgcttttttggctacccggaggttatgtttcacagt

SEQ ID NO: 5218 - DNA, 1460 bp, unidentified
  source 1..1460: mol_type = unassigned DNA; note = element_800ca88
  misc_feature 1: note = core
  misc_feature 2..228: note = LE
  misc_feature 229..1446: note = CDS
  misc_feature 1447..1460: note = RE
  misc_feature 13..240: note = bridgeRNA
ctacttgatgcttgtgggtaggaccggtgtccggccagactcggtctaggtgcccggcgggttgctcttcagccggctgcccaccagatggatcggtgtggctctactccgggttgcggccccgtcgggcatcgtggcgaaggtgtggctccagaggggtctgccctgctctaagtagcaatgcccgcctcgccgttccatcggatgcgagacgaaggcggtcagctcatgaaggtgttaatcgaggtcgatccccacaagctgtcggccacgatcgaggtcgtcgacacgaacgagacggtgttggcgaccggccggttcggcactgacaacgccgggtatcgcgcgatgcgcaagcgcgtggcggcctggcccgagcggacctgggcggtcgagggcagcaacggcgccggacgcccgctggcgcagcggctgctcgccgatggtgagcacgtgctcgacgtgccggcgaagctgtccgcacgggcacggttgttcgacaccggccacaaccgcaagaccgacgcccacgacgcgcactcggtcgccgtggtcgccgtccgcacgacgggtcttcgggtgctctcctacgacgccgagctcgaggcgctgcggatgctgaccgaccgacgagatgagctctcccgcacccgggtacagaccgtcaaccggctgcaccggctgctggccgagctgatccccgggacggcgaagaaggagatcaccgcaggtcaggccaaggccatgctggcctcagtgcgaccgcgggacgtggtcggcaagacccgccgccgcctagccgcggagttgttggccgagctggtcgtggtggagaagaagatcaaggagctgaagaaggagctcaaggccatggtcctggcccgcggctcgacgttgatggagctgcccggggtcgggccggtcgtggccgcccgggttctcgccgacgtcggtgacgtggcccgcttcgccgaccggaaccggttcgcgtcctggaccggcaccgcaccgatcgaggcctcctccggcgagattgtccggcatcggctctcccgcgccgggaaccggcgaatgaaccacatgacccacatcgccgcggccactcagatccgtcacaacaccgaggggcgggcctactacctgcgcaagattgccgccggcaagacccgacgcgaggcgatgcgctgcctcaagcgccgcatctccgacgctctctatcgccagctcgtcgccgacgcccgagccgccggcattgtcagtgccgagatcggcgaggcgggcccgggagggcacagcggggcgtcacacaaatccagcgcggccggcttgcacccgcacaccggcacttcggatcagccacttcccggacccgcgcacacgacgctacccccgacctcgccgaccaggaagacctcacccggcagaacgctccaaaccgcctcttgacaacagaggggtgc

SEQ ID NO: 5219 - DNA, 1433 bp, unidentified
  source 1..1433: mol_type = unassigned DNA; note = element_8010607
  misc_feature 1: note = core
  misc_feature 2..233: note = LE
  misc_feature 234..1418: note = CDS
  misc_feature 1419..1433: note = RE
  misc_feature 12..231: note = bridgeRNA
cgttaccttgttggtggtcccgggtggtccggggctgggccagccgctgcgggcatgatgtcttgcccctgtacgtagatgatccggggggtgttgtcacccgcggcggccgggcgccggtgaccgctgataaggggaacgacccactgcgtgtgaggtcttccgtaacgtgggtgcgggaccgatcgtccaccggctggtcctcacccacttaagcgggaggcggcagaaagatggatatcgaggacatcgaggtcttcgtcggcatcgacgtcggcaagactcaccactgggccacggccctgaccaagggcggcaagaaggtcttcgacaaggccctgcccaacgacgaggcgcgtctgcgcgccctgtacgagaaactggccgcccacggtcaccttctggtggtggtggaccagcccgccaccatcggggccctggccgtggcggtggcccgggacatgggcatcaccgtgggctacctgcccgggctgtcgatgcgccgcatcgccgacctgacaccgggcagcgccaagaccgacgcgaaggacgcggccgtgatcgccggcgccgcccgcaccatgccccacaccctgagagccatcagcacctcggacgaggacgccgcggcgctgagcatgctgaccggtttcgacctggacctggccagacaggtcaaccagaccgccaaccggatccggggcctgtacacccagatccaccccgccctggagaccatcctgggacctcggctgaagcacgacgccgtcctggaggtcatcgccgcatggcccacccccaccgcgttgaggaaggccggcagggcccgcatcgacgccaagctcaagaagcacggcgcccggcgccacgccgcctgggccggcaagatcgtatcggccctgggccggcagaccgtcaccgtcaccggcaccgaggccgccggcacggtgctgccccacctggcccgccagctcatcgccctgcactcccagcgggccgacgtcgccgcccgggtcgagaccctggtgcgggcccaccctcttcacgaggtcctgacctccatgccgggtgtcggggtcgggaccgcagccgtcttcctggccgagaccctgggcaagaccttcgacaccggcgcccagctggcctcctacgccggcctgaccccggtcacacgccgctcaggctcatcgatccgcggcgagcgcgtctgccgcaccggcaacaagagactcaaacacgccatgttcctgtccgccttcgcctccctgagagatcccgtctcccgtacctactaccagcgcaaacgggaccagggcaagcgccttgggccaggccctgctcgccctggcccaccgccgcatccccaccctgcacgccatgacccgcaaccagccacgaaactacccacagccgcttgacacaccacatagggg

SEQ ID NO: 5220 - DNA, 1577 bp, unidentified
  source 1..1577: mol_type = unassigned DNA; note = element_80121d8
  misc_feature 1..2: note = core
  misc_feature 3..252: note = LE
  misc_feature 253..1428: note = CDS
  misc_feature 1429..1577: note = RE
  misc_feature 3..228: note = bridgeRNA
ctcgtattatatagtagtagtgtttatagaccctctccaaggtctgtatgttatactattttagatactgtggattagtttaaacatcctaccacttagatggttttagaaaggctctaaccacagtctctttgttaatttgttaatcagttagataccgcatgacggtttatattgaacgaggttacaatcgcaaggagtacccgtggttctaaaacagtatcaattctatttctaaagaggtgttcttccatgattttagttggtattgatgtagccaaagataagcacgactgctttatcatgaattcagatggtgagattttagctaaggcttttactttttctaataaccttgaaggttttaattttctttacgagaaaatcaaatccgtatctaaaccaaaagataaaataaaagtagggctcgaggctacaggacattatggctataaccttcttggatttctacttaacaaaggtctgcccaccttcgttattaatccacttcatacaaatctctttcgaaaaagcctaacccttagaaagactaaaacagataaagtagattccaaaactatagctatgatgttaatgtctgatgtagctttaaaaccctacacagacacatcttaccacaacgaagaactaaagtcactatctcgttatagatttactaaagttcaggaacgcgctaagcttaaaacttctgtttcacgtttagtccagattcttttccctgagcttgaaaaattagtttctactcttcatatgatttctatttatagtcttttagaggaatatcctggggcttcttatattgcttcggctcatcttactaaacttactaatcttctgaacgaagcttctcatggccattatgaccgtaatacagctatcaaatttagagaagctgcaaaaaattccataggttcagttatgccggctaaatccctagaacttaaacatactattaaactcatcagggaattaaccatcgaaattaacgagatagacgatgaaataaagaagataatggatagcatggcttcacctattactactattccaggtattggttacagcatgggagctatgattatttctgaaataggtgatttcaaccgtttttcttctccggataaagtattagcttatgccgggttatctccatctacttatcagtccggcaaactagataactgttactctcatatggaaaaacgtggctcaaggtatctaagatatgccttatttactgttacccagaaagtatgtatttgggataatacgtttgcagagtatttatctaagaaacgggccgaaggtaaacattattatgtagccatatctcacgctgttaagaagctcgtaagagttatattccatttagaaagaacaagacaggcttatctaaaagccgcataaaaatagaataattaaatactgtttttttgagagcaccggcaacgatgctctatttgtcatgcaatttttaagctaactacaaaaaaatttagaattattcatattcttttagatatagcttatttatatcttgactctttatagttagt

SEQ ID NO: 5221 - DNA, 1479 bp, unidentified
  source 1..1479: mol_type = unassigned DNA; note = element_801d981
  misc_feature 1: note = core
  misc_feature 2..261: note = LE
  misc_feature 262..1464: note = CDS
  misc_feature 1465..1479: note = RE
  misc_feature 9..238: note = bridgeRNA
cgttatgtttttcgcggtcctgcaatggggccgctggcctccgggcccggtatgactgttgccccctgtcgaagtcgatgacctggggggtggtgtcaccgggtccgaggggtgccgtcggagacgctgataagaggtccgaccaccgcccggccgggcgcaatgcccggccatgtgggggcggcaggtctgcataacgtggatgcgcgcgtgcggacccaacactgaggccggcatggcatcaacacacgtgggggcacggtgaccgacatcagcgacgtaggcgtcttcttcggcctggacgtcggcaagagcgcacatcacggccacgggctgaccccggccgggaagaaggtgttcgacaaggcgctgccgaacaacgagccgaaactgcgggccgccttcgacaaactccgcgacaagttcggcaccgtcctggtggtcgtggaccagcccgcctccatcggcgctctgccccttgcggtcgcccgggacgccggttgccaggtcgcctacctgcctggcctggcgatgcggcggatcgccgacttgtatcccggtgaggccaagaccgacgcgaaagacgcaacggtcatcgcggatgcggcccgcaccatgccccacaccctgcgctcgctggaggtgggcgatgagaccacggccgagctgaccgtgctcgtcggcttcgaccaggacctggccgccgaggccacccgcacctccaaccgcatccgaggcctgctcacccagttccaccccagcctggaacgcgtcctcggcccacggctggaccatcaggccgtcagctggctcctggagcgctacggttccccggccgctctgcgcaaggccggccgccgccgactggtcgaggtcatccgacccagggctccccgcatggctgaacggctcgtcgacgacgtcttcgccgccctcgacgaacagaccgtcatcgttcccggaacctccaccctggacgtgatcgtgccgtccctggccaagtccctcgcggccgtccacgaacaacgccgaaccctggaagcccagatcgagaccctgctggaggcccaccctctttccaaggtcctgacgtcgatgcccggcgtcggcgtcaggaccgccgccactctcctggtcaccatcggcgacggcagctcgttcccgagcgccgcccacctggcctcctacgccggcctggcaccggcgacaagatcctccgggacctcgatccacggcgaacacgcccccagaagcggaaaccggcagctcaaacgcgcgatgttcctctccgccttcgctgccctccacgaccccaactcccgtggctactacgacagatgccgagcccgaggcaaaacccacactcaagccctcctccgcctcgcccgccaccgcaccagcgtcctcttcgccatgctcagagacggcacctactacgaaccccgcaccccagccaccgcttgacgaaagacatagagg

SEQ ID NO: 5222 - DNA, 1357 bp, unidentified
  source 1..1357: mol_type = unassigned DNA; note = element_802074c
  misc_feature 1: note = core
  misc_feature 2..75: note = LE
  misc_feature 76..1101: note = CDS
  misc_feature 1102..1357: note = RE
  misc_feature 1126..1354: note = bridgeRNA
taatgagatggtcacccccgacaccctgcgaaggctagcctttcgcagggtgttttcattccagaggccatcgccatgaaaccagcagcattgattggtatcgatcttggtaaacacagttttcatctgcatgcccaagacggcggcgggcgcgaagtgtttcgcaagaggaccacgcgccagcaattgattcgcctgttggccaatcagcctgtctgcgcagtggcgatggaagcctgtgccggctcgcactgcctggctcgggagattacggcgctggggcatgaggttaaattgatctctccgcaatttgtgcggccctttgtgcagggcaacaagaatgatttcatcgatgcgcaagccatctgcgaagcggcttgcagaccgtcgatgcgtttcgtaaccccaaaaaacgaagcccagcaaaccctctcggtgctgcatcgtctacgcgaatcgctgattcgggatcgcaccaaaaccatcaaccaactgcatggctttttgttggagttcggtatcagtctgccggtgggcaaggcagtcattcggcgtttgcccagcgtgctggctgagcatgaattgcccccacgcctgtgcgcgctgctgcggcgcctgcatgagcatttcacttatctggatgagcagatcaaggtcctggacaaggacgtcgccagccagctgaatgaggatgacctgggcagccgactgctgacgatcccctgtgtcgggccgattacagccagtgtgctggcagcggaaatgggcgatggcaagcagtacgcctgcagccgggactttgccgcttcggtggggctggtgccaaggcagtacagcacaggagggcgggccaatctgctgggtatcagtaagcgtggcgacaagaatttacgtcgcttgctggtgcaatgtgcgcgcgtctacctgcagcgtctggagcatcagcgcggtgcactggccgattgggtacgcagcctgctctgtcggcgccactcgaatgtagtggcctgcgcactggcgaacaaactggcgcgtatcgcctggggcctcgccacacagcacagccgttatgaagcaggggcagacggctgcgccgcctgaccctgctgatgttacagcatcacgaagcaccctttcaggttttgcgatagctgaacaacagatgacgtgaacggcctaccggcctggtgaagaacctgacacaaaaatcggcttatgaagccgccgggcttttcaggatcaccaggtgcgactctcatcgtggcgcggggcatgccccatacagacgccggatagatttaagcaagccaaacacccatcgctgatcagtaattgcaaaaatgggggtgaccataga

SEQ ID NO: 5223 - DNA, 1155 bp, unidentified
  source 1..1155: mol_type = unassigned DNA; note = element_803bbdf
  misc_feature 1..2: note = core
  misc_feature 3..207: note = LE
  misc_feature 208..1143: note = CDS
  misc_feature 1144..1155: note = RE
  misc_feature 36..213: note = bridgeRNA
cttgtcttatgattttctgtgccgagcaggcaaaaagtgaccgccgggagagggtcgcagccctctcgtcggcggcgagggtcggatcggggaaatgctgaccgtttgacgggtcgagctagagtttgatcgccctcgtctttcccttgaggcctgaacggatacctgcagccaggctgcggaggacaagcacaggacaagcgaaagatgaccaatgataccatcggcgtcgacatctcgaaagatcatctcgacgcccaccgcatgagcgacggcgaaagccgccgcttcgccaacgacaaggccgggcaccgggcgttcgtaggctgggcgggccgatgcggtgcgcgcatcgtctatgagccgaccggtccctatcaccgagccttcgagcgcagactggcggaggcgggcttcgccctcgtcaaggtcaacccgcgacaggccaggcgatttgcagaagccaccggcaggctcgccaagaccgaccgtctcgacgccgccatgctggcccgcatgggcacgctgctcgaccttgaagcgcggccggtgcgcagcccgatcctcaacgatctcaaggacctgcacatggcgcgcgaggcactggtgaaaaaccgcacggcggcaaagaacagggcaaagacgctcgcccttgtcatcctcaagcgccacaacgccgagcaactcaggcagatcgagcgccagatggccgcgatcgaagccgagatcaaggccttgatcaagtccgatcccggtctcgcgcgccgcttcgacatcctcgtctctatcccgagcgtctcgacgatcaccgccttcgcgctgatcatcgacatgcccgaactcggcaccctcgaaaacggtcgggcggcctcacttgccggactggctcccgttgcccgccaatcaggacaatggaccggccgcgccttcatccgtggcggccgcgccaatgtccgtcaggcgctctacatgccggctctcgtcgccatgcgcttcaatcccaatctcaaggtgaaatacgaccagctcatcgccgtcggtaaagctccaaaggtcgccatcacagccatcatgcgaaggctcgtggtgctcgcaaacgcactgctcagggatggccgaaaatgggcccaaaacctgccttgaacaacacggata

SEQ ID NO: 5224 - DNA, 1579 bp, unidentified
  source 1..1579: mol_type = unassigned DNA; note = element_8047c8f
  misc_feature 1..3: note = core
  misc_feature 4..265: note = LE
  misc_feature 266..1465: note = CDS
  misc_feature 1466..1579: note = RE
  misc_feature 1..232: note = bridgeRNA
cccattaccatgtttggtaggtcccggtggtcggggccgggtcgccggttccggtatgactgtctcgccctgtcgttgatgatccggggggtgttgtcgccgggagcggggacgttcgatgaccgctgataggaaccaggccggccgcatggacgcgtcggggcgcatggcccaggtctctccgtaatgtggatgcggcacgggcgtccggactccatcgaccgagtcgcggcggccgacggaaccccatgacgggaggacaatgatgagcccggacgacatcgacgtgtgggtcggcctggacgtgggcaagagcgcgcaccacgcgtgcgccctcgaccgcgacgggaacaccctgtacgacaggccgctcaaacaggacgagaacgccatccgcacgatgctggaacgcctctgcgaacacggccgcgtgctgctggtcgtcgaccagcccaacaccatcggctccctgcccctgaccgtggcccggagcatgggcgtcgcggccgcgtacctgcccggaacggcgatgcgccggaccgcgcagctccctcccgggaccgcgaagaccgaccagcgcgacgcgcacgtgatcgcgtgggccgcgctcaggctccccgagagcctcagggacgccggcccggacgacgagaccctcgccgccctgaagctgctcgccggccacgacgaggacctcgcccacgaatccacccgccacatcaaccgcctgcggagcctgctcctgcagacccaccccgcgttcgaacgcgccctcaagggcgaccgcatcacccgcgacgcgaccctcgccctgctcgagcactacggcgggcccgccggcatggaaaaggccggcatcgaccaggtcagggcgtgggccaaggacaacaagctgcgcgccgggaccatcatcgacgacatgttcaaggcgatcggccagcagaccgtcaccgtgtccggcacgctcacggccgagaccatcatcccctcgatcgcccatgacatcaagaccatcaaggaccggcggcgcgacctcgccgcgcaggtcgaaaggctcctggaggaccaccctcttctccgggtcctgacgtcgatgcccggggtgggcgtcaggaccgcgagcaacatcctcctcggcataggcggcgacgtcacccgcttcaaaagcgcggcccacctcgccgcgtacgccggcatcgcccccgtcaccagccagtccggcaccagcatcaaaggcgaacgccccgccagaggcggcaacaaacgactcaagaacgcattatggcaatccgcgttcgtcgcatccaccaaacacccatcctccatcgcctactacaagcgcaagcgcgaacaaggcaaacaccacaacgccgccgtcatctgcctcgcccgacgccgctgcgacgtcatctacagcatgctcaagaacggcaccctctaccaggaaccgaccctcgccgcctgaacaccacgaaggacgaacacaccggtcgccaccggcgaggcgaagcacgcccacgacaaccaaccaaaacccgacacatcaaccccctacggaattgacaaaaacataggaaca

SEQ ID NO: 5225 - DNA, 1238 bp, unidentified
  source 1..1238: mol_type = unassigned DNA; note = element_804ba56
  misc_feature 1..2: note = core
  misc_feature 3..236: note = LE
  misc_feature 237..1217: note = CDS
  misc_feature 1218..1238: note = RE
  misc_feature 12..208: note = bridgeRNA
cttgtatctttacttccgccatggttagctatcttggcactgagacagaagaagcttggcccacccttaaggtccaaccttgtgccgtagatcaagccttctgtctcgcttctgatgccagcgaagacactgaacgttagccaatacccgaagggcataaagggcgttgaccctgtatgcacaaggccagtgggctcagttggtggatttcattattcatacctaggatcaagtttatgtttttcatcggtattgatgtcttaaaagccaagctcgattgtagtctgttgctggaggtcgccagcggtaaacgccgcgctaaaactgtggcgaattcccaagccggcgtcagcgagttgctgacgtggtgcgtaaaacaccacgcctttccccaagcgctccacgccatccgggaaggtactggcgtttatcatgagcaagcggcgctggccttggccgatgccgggggcaccgtgtcgattgtgaatccggcccagattaaagactttggccgcagcttgggcatccgcacgaaaaccgatggcgtcgacagccgggtgctggcccgttatgcggctttactcaagcccaggccctggacgccaccggctcaggaagcccgcgtcttacaagccttattgtcccgccgtgaagccattgtccaagacttgcaacgcgagcgaaaccgcctggaaaaagccgaggccaccgagacgccatcgactatccggcaatccctgctggactccatcgcttttctagaacgccaacttgccaagctccagcaagacattgacgatcacatcaataagcatcccgacctgaaagccgaccgtgacttactcatcagcattcccgccgtcgggccgcaagtcggcaatcagttgttggcggtgatgcataaccatcgcttccaatcggccgaacagctcgctgcgtatctggggctggtgcgggtagagcggcaatccggcacttcgctgctcggccgacctcgcttatccaaaacaggccccgcccgtatccgggcggttttgtatatggcggctatcgtcggtacggaacacaatccacatatcaaagcactgtatcaacgcctgcaagcgcgcggcaaaagcaaaatgtccgcccagggagccgccatgcgcaaactggtgtatttatgctttggcgtcctgaaaacgcgtcagccttatcaatctaattatgcgatttaaagttgactttcaagacggtat

SEQ ID NO: 5226 - DNA, 1196 bp, unidentified
  source 1..1196: mol_type = unassigned DNA; note = element_8053fef
  misc_feature 1..2: note = core
  misc_feature 3..215: note = LE
  misc_feature 216..1193: note = CDS
  misc_feature 1194..1196: note = RE
  misc_feature 39..194: note = bridgeRNA
tcctttagacttgtaaataaatatatagtaaatttacaattaagagagaaaaggagaagtgcactatgacatacgctctaagtaagacttatagactgattcagacttctcctttttgatcaagtactcaaatagaaattagggatttaggcccattattaaggagttgagttactcttgatcatctctcattaattcacttaaaaacttataatatgaaccaagtctttatcggaattgatgttagtgcagcaacactggacatctgtatcaaagttaatgattctttatcttttgtggtaatcaagaaccagattaaagatattaagaagtttttacaaccttaccaagaccaaaatgttaagattgctatggagaatacaggtaggtataattgggcgttctatgaagccttatctgggtttgagtttacaacctatgttatatctcctcttcatcttaagaaaagtctgggcttggttagaggaaaaaatgataagatagatgcagagcgtattgtaagttttcttataaagaaccacctagatttaagaccttgggtatgccctagcacaactatccaaaaactaaaaatatggattacagaacgcaatcaccgtatcaagagtaaaaggcaattatctacaatgaataaagattatccaaagatgaagggtttgggtatagataaatccttaaagatgatgaacaagaagctaatcgcatcattagatgcacagataatggctatagaaaaagagataaccttattgttaaaagtggattctgagatacaaaagcaagtggagctaattggttctgtaccaggtgttgggaaagtgctaagttgggaaataatagcaaaaacaaatgggtttactactattaaaacgccaagagaaatggcttgttattgtggagtagcaccttttgaataccagtcagggacatctatatataggaaacctgcagtatcacatctagcagataaaactattaaaagcttactgcatttaggagctatgagcgccataagattaaaaaatgatttaggtgaatactatcgaagaaaagttgcagaagggaaaaataaaatgagtgtaattaatgctgtacgaaataaaattattcatcgaatttatgctgtattgaaaaaccaaactatctatcaaaataatttggttttatcatagaaa

SEQ ID NO: 5227 - DNA, 1444 bp, unidentified
  source 1..1444: mol_type = unassigned DNA; note = element_805d93b
  misc_feature 1..2: note = core
  misc_feature 3..231: note = LE
  misc_feature 232..1434: note = CDS
  misc_feature 1435..1444: note = RE
ctcctaccatcaattcatagtataaatctatgtgggtgaaagtttattgattagccatggaaaggcaggagggctcatttcttcctggatctgagaatccttagtacagtctgtcccctgcctcccaagccataataagttgattggatcatagaatccttgtcacgatggaggattggtcgggaggcaattcctgctttggccatgccaagatggaaaggaggaatggatatggacgaaacacagcggttcagatggtttctgggtatcgatgtttccaaggagacattcgatgggtgctgtatcaacatgaagggggaaagactttttagtctatctacctcgatggacaggaaggggtttgaagagctgatcaagcaactctgtggcctgtctgtttccatggagtctgtcctggtgggcatggagtcaaccgcctgctatcatgtcaacctttattctttccttatctccctagggtataccgtgatggtgattaatcccttgcttatttctcatttcgtgaagcttcagctacgcaagaccaagacagacaggaaagatgccactgtgattgcacagtttcttcttctgaaccgagattccctttctcaaaccatcctctcttctgacatctcagatctcagagatctgtccaggcaacgagagagtctggtggaccagatgagttcgaccaagagtgaaatcaagcggttactgaccatgacctttcctgaattggaacatatttcgggtatttttaacaaatccatgctccgtctgctgtgccactatccttctgctgcttcaataaagcaggccaagcgttccaagatagctaagatactgataccgggatcgtatgggaagcaaaccgatgtatcggtggaccgaatcctaaaggctgcacgggtatctgtagggacgtcaagcgctacgaaggagatcattctcagacagaaaacatccttactgatccagatggaagaacatctccaagagcttacggatatcctcatcgaactctgcgaagggaaggtacagggagagaaggatatccttacctctatgaagggaatcggggagaagagcgcagtgaattttctgatcgagataggtggagatattaagcagtttgaaagtcataaaaaggtgattgcaatggcagggctcgatccggccgtttaccaatcagggaagatcgataggaagggaaagatctccaagcgaggcaatcgacatctcagacgggtgatctggattatgacaacgaaggtcatccaatttaatgaacgattcaaacaatactacttgaagcgaataaaggatgggttgccttacaaaatggctgtgctggcaactgcccataaactaattagagtgatctttgcaatgttgagaaaccaaacattattcgatccaagaatgaattgatgatagttga

SEQ ID NO: 5228 - DNA, 1384 bp, unidentified
  source 1..1384: mol_type = unassigned DNA; note = element_805ed55
  misc_feature 1..2: note = core
  misc_feature 3..76: note = LE
  misc_feature 77..1117: note = CDS
  misc_feature 1118..1384: note = RE
  misc_feature 1117..1371: note = bridgeRNA
tgatggggtggacggccccctacggcatcgatgtgccagaatgaggttgttgaaatctcagacaagggagccgtccgtgaaccagattatccgaattggaatggatacgtcgaagcatatttttcagctgcatggggttgatgccgccgagcaggcggtgttgcgcaagcggctgcggcgcaaggaagtgctggcgttttttgccaagctgccgccgaccgtgatcgggatggaggcgtgcggcgcggcccattactgggggcgggagttgcgcaagctcggccacgaggtcaagctgatggcgccgcaacacgtgaaggcctacgtcaagcgcaacaagaacgacgggcgcgatgccgagggattgtgcgaggcgatgagccggccgacgatgcagttcgtgccggtgaagaccgaagagcagcaggcggccctgatgctggcgggggttcgccaacaactgatcgcaaggcgcacgcagctgagcaacgcgatccgcggctacgcggcggagttcggtgtgacggcggccaagggtctcgacaagatcgagccgttgttggcgcggatcgcgcaagacgagagcttgccggcgctggcgcgcgagctgtttgcgatcgagggcagggaatacgcccaagtgcaggccgaactgaaggcgatcgaggccaaactgatggcctggcatcgcgccaacgccgccagccggcggctggcgcagattcccggggtgggaccgatcggcgccacggcgctggtgatgaagacgcccgatccacgcgcgttcccctccggccggcacttcgcggcctggctcgggctgacccctaaagaccattccaccgccggcaagaccaggcttggcaagatcacccgtgccggcgacgaggtcttgcgcagcctgttggtggcaggagcgaccgccgtgatccagcaggttcggcgcggccgtggccgtccgtcgccctggctggtcgcgctgctgaagcgcaagccgcccaaactcgcggccgtggcactcgccaacaagattgcccgcatcgcctggaagctgatgacgacgggcgagagttacgacggcgcgcggatgcctggcgcatcggcactcgccgcttgagagatcggccggtcggcgggtttcgccgcaccggctgagccggagctgcaagaggagagcagatggtaggatcgatcgatccgaggtgcgagacagtccgtgggacccattggccgaacaaggtcgcgtggttgtttggagctcgcgtcgcggaaaccatcttggccagcggtccaaagtcaccgcatcaacaggccggacatatggacgcaagcgatccgatcaaaccgtcgaaaaaactcttgtggcacgggggccgtccacata

SEQ ID NO: 5229 - DNA, 1623 bp, unidentified
  source 1..1623: mol_type = unassigned DNA; note = element_806accb
  misc_feature 1..3: note = core
  misc_feature 4..252: note = LE
  misc_feature 253..1491: note = CDS
  misc_feature 1492..1623: note = RE
  misc_feature 8..225: note = bridgeRNA
gttcgtaatataaggttagccagatttttctggttgacctatttttatatggtcttatgataacggtagtcggggtagaacgtcgcacccgtgggaataaatcccgttagctaaactgttcaccccctacttgtataaacatgtttcaggctggttgggacaaagagatcccgtttaacaagcgaacctatgacattacaagaagctttaggggttaccgacaaatgatgtatttctaggaggagatattgtatgaatccagtcattggtctggatgtatcaaaaggtgaaagtcaggttcaagcatttttagataaaggtagaccttatcgtaagagctttagtatcaaacatactactgaaggattaggtagtttattagagttccttaaaggggttgagagttcagctggtggttatcaaccttcggtcgttttagaatcaactggacactaccatattcctgtcattcatttccttgaggagcaaaattatgtttatattgttgtcaatcctcttatttcacacagagcaaagagttcaagtttgcgaaaggttaaaacagatgcagtcgatgcctatcacctttgtgagctgttctataaagaagaattagaaccttataaaaaacgaggtattcaactattaaaccttcgtaaccttacaagacaacaagaaagtattgcggaaatttcagcaaaaactaagttacagctgcactctttgttggatcaagtatttcctgaatatcgaggtgtatttggaagtttatattcaaaggtatcgttacttaccttattagcattccctacatcagaggcagttttaagtgtaagtgagaaagaattatcagagaagataggttcgttatgtatgagtcgttcagaactttgggcaaaagaacgagcagagaaattaaaagatgcagcccttcgtaacccgtttcagaacaacctgtatcagagtcatatttttaatctcgagctattagttaatatggttcttcaatatcaagagcatctatctaagattgcagctgaaatagatgccctcgctaaagaaattgaagaatatcatatacttcagtctatccctggaatcggagaaaaaatcgccgccacgattatatccgagattggagagatagatcggttcagtgatgccaaaaagctcgttgcattcgctggagtagatcctagcgtttactcttcaggtaagtttaccgcatcagtcaaccgaattaccaaacgaggttcttgtaggcttcgtcatgccttatatatggctgttcaaagtggtattcgtgattctcgtaagaaaaaaacgactgatgagataatagcacgtaataaaagattaagagagttttacgataagaaacgtgaagaaggaaaacccttcagagtagcagttatagcctgtgtaaataaactcttacattggatttacgccttactaaaaagcagaactaacttccaagatatagattaaaaactatatctcactaaatacaacaaaaccttccaattacaaaatagaggaaggtgatttggcatgttcaattttagtatatcatgacattattaatctttttattgaaaaatgttgacaaactattagctg

SEQ ID NO: 5230 - DNA, 1392 bp, unidentified
  source 1..1392: mol_type = unassigned DNA; note = element_8070a48
  misc_feature 1: note = core
  misc_feature 2..294: note = LE
  misc_feature 295..1377: note = CDS
  misc_feature 1378..1392: note = RE
  misc_feature 1..304: note = bridgeRNA
cagtaagagtgccctggctaggtgttcctgggcggcttgaccctcacagcgatagaccgcttggtggcccggtaccgcgaggtgtctcggagcagtctgacccacactccgatcggccacaatctgtgtctttccccggacctgtcggccgccccgggacactttgcggcgaggttttgcctcaccgatgcatgtgacccaagaagggcctgattttctgtcacgttactgtcctgtccaggcatgcggtcgcggcaaagccgtccctatcaccgtcgaagctggaaagccgtaatgaaagttggtcaagaggtgctcgtttgtagcgtggtcggtggcgtcgacacgcataaggatcttcatgtcgccgccgttgtcgacgaacgtgatcatgttgttggaagccggtgcttcgcgacaacccggcacggctacaagcagatgctcgcctggatgcgatccttcgggcagctgcggcgcatcggcgtcgaggctaccggcacctacggtgcggggcttctgcgctacatgcagaacgctggcgtcgaagttctggaggtcacgacaccagacaagcatgatcggcgcaagcgcggtaaaaacgatgacctggatgcccaaaatgctgcacacgcagccttcaccggcaagcgcaccgtcacgcccaaaagtcgtgacgggatgatcgagtccttgcgtgtgctcaaagcctgccgaaagacggcagttgccgcccggcgtgtggcactgcagatgatccaaaacaccatcgtctgcgcacccgacgaactccgggaagcgctccgcaagatgacccgcatgcagctcgtcaggaccttggcagcctggcggccggatctgaccgactaccgcaacgtggtgtcggcctacaggatcgccctcaagtcgcttggtcggcgttacctcgaattgcacgacgagatcgccgacctcgacaccatgatcatcgccatcaccgacgaactggctcccactcttgtggcccgaaactcgatcggccacgggtccgccgcacagttgctcctgacggctggggacaactcggagcgtatacattccgaggccagcttcgcggctctttgtggtgtgagcccagttcctgcttcttccggcaagacgacccgccatcgcctcaatcgaggcggtgaccgagcggcgaacagcgcgctgcatatcatcgccatcggacggctccggaccgatccgcgaaccaaggcctacatggcaaagcgcattgccgaggggcattccaagctggaggtcatccgatgcctgaaacgctacatcgctcgcgaggtgttcagcctgatcagccagcgtcgacgcgagataaaccaggcccaggttccggcttgacaaacagaagggcgt

SEQ ID NO: 5231 - DNA, 1528 bp, unidentified
  source 1..1528: mol_type = unassigned DNA; note = element_8073b9b
  misc_feature 1..5: note = core
  misc_feature 6..420: note = LE
  misc_feature 421..1428: note = CDS
  misc_feature 1429..1528: note = RE
gccctgaaagggcagaagctcctagcccagggcaacgccctgggttttaaggatgtagccaatacgccctgtaagggcaaaagctttatattttttgcttgaggttttaaagcttttgcccttactattatatttgcacttggaaaaataaagaggtgaaaatctttatatctgcaaacttttgttaactttgcagaaaattagataagtacaataaaaaaagaagaatactccatatccagcgttaaccctgtgccctttctagcatagtaaaggcttagccctgtttggggaactggatattttctgagcagaagcttgagagtaaattagcctgcttgtgtagaacaagacaggactcgtagtatagttgtagccgctcagaacggagcacccttcttattaaaaacttcattcaaaatgcaaatatacggaatagatttggcaaaagagaaatttgacgtaagttttttcgacttgacatcaaaaaaagtatcaaaccaaccttcacataaggttgtaacgaacaatttaaagggtattggaaagttttttaaaggccttcctagcgatgctgtattggttgctgagcataccggagtttatggtgataccctcttgaagtgctgcatggatagcaatgtaaagattgcctttgtgggtggatatgtcatccatagatacagagctacccctgaccgtgccaagacggatgtcctggattgtgcactgctcagagattttggagagagatatcctgataagctgaaatacaagacgtttccagaagaggctctatatgagcttcgtcaattggcacgccaccgagaaatgcttgtagaacagcgtaagcagctaataacagccgacaggagcgaggattgtcgtcctatcagaagtcttgccgtcaagcgaagcatggaccgtatcaaagagatgttggacacggaaattgcagagacggaaaaagaaatgttgaaagtcataaatggacatgagagcattcaccacaactatgagcttgttaaaagtgtcgatggagttgggctgattaccgcagtagaactattggtaaaaacagagaatttcacaaaaataactacagcgcgccaatatgctgcttatgcaggaactgcgccatacgaaaaatcatcggggaaaatggacaagggagcacatatatccaagattggtaatagacggtcaaagaccttgttgtacatctgcgcagaaagcgccagattgcacaacaaggagattaaactgtattacgagaggcgtactttaatagataaaaagccgcgtcattatgtactaaatgccatagcaaacaagttgctaaggatcatattcaccctcgtggaaaaaggtgaatactatgacgcaaacttcatcaggcaagacccaagggtcgttaaatataattaacgttaaaaaatacgctcaaagcttgctcaattagagtaaaacagggcgccgggattgcgtcaatagctacccagggcgttgccctgggctaggagcttct

SEQ ID NO: 5232 - DNA, 1431 bp, unidentified
  source 1..1431: mol_type = unassigned DNA; note = element_80799b2
  misc_feature 1..2: note = core
  misc_feature 3..119: note = LE
  misc_feature 120..1151: note = CDS
  misc_feature 1152..1431: note = RE
  misc_feature 1187..1384: note = bridgeRNA
agatggggtaatcggccggccggcgaatagatgctggagattggtgctgcgcttcaggctgatggcaatacgaggtcaccgcgtgaacgggcctcaggcatcagaaggagaagcgcagcatggagcattctgccggactggacgtatcggtcaaggagaccagcgtctgcattgtggacgacacgggcaagatcgttcgcgaagtgaaggtggcaagcgagcccgacgctttgctagcggtgctgacgaacccggcttatcacttcaagcggatcggattggaagccggcccgttgtcgcagtggctgttcagcgctctcgccgaagctggcctaccggtgatctgcgtcgagacgcggcacatgcgagcggcgctaaaggcgcagatcaacaagaccgaccgcaatgatgcccgcggcatcgcgcagatgatgcgtgcggggctttaccgtccggtgcatgtgaagacattacgcagccagaagctgcgcatgctgctgacgcaccgcaaattgctgcagtcgaaggcgatcgccatcgagaacgacctgcgcgccacgttgcgcaacttcggcctcaaggttggcacagtgggaacggtgaaattcgaggcgcggatcaaggagcttgtcgagaaccttcccgacttagtcgtactggtcgaaccgctgctcattgtccggcgggcgcttcgggagcaaatcgctatcctgcaccgccgcttgctgatcatcgtgcgaggcgacgatgtatgtcggcgtctgatgacggtgcctggtgttggtccggtggtggcgctgacctaccgtgccaccgtcgacgttccggcacgctttcgaaactccaaggcggtcggggcggtgtttggactgacaccctccaagtatcaatccggcgaagttgaccgaaccggcgcaatatcacggtgcggagacgatatgatgcgggtgatgctctacgaagcggcccacatcatgctggtacgcgcgacgaaatggtcgtggctgaaggcctgggcaatgcagatcgccaggcgccgcgggctcaagaaggccatcgtcgccctggcccgacgactggccgtcatcatgcaccgcatttgggtcgatggcaccgagttccggtggaccagggaagctgcagccgcatgaaagctgcgatgcatcaaacctaataggaggaaactcgagctccaccgagcggtggaatgatgtccctcgcgggacgatggatggggtgagttcgtatgtcggcttggcctaccgctaatcgacggtaaggccgcccattagattgttccccctatcctcgaatcccatagtggaagggcctcagtgccgattccggagagaagcgcgagcccgcgagcgacattgacactgcgatggtggatagcctgaaagcgcttgaccccaaccggccgattagaga

SEQ ID NO: 5233 - DNA, 1281 bp, unidentified
  source 1..1281: mol_type = unassigned DNA; note = element_8087a9a
  misc_feature 1..4: note = core
  misc_feature 5..249: note = LE
  misc_feature 250..1257: note = CDS
  misc_feature 1258..1281: note = RE
  misc_feature 32..201: note = bridgeRNA
tcttgtattctggaaattatactaagaaaaaggaaacttaaaaaggggagtttttgaagatggacgggaaggaggccggtcggattgctaggtgcaaagcctgtggcgaagataggtctcccgtcttacaagctatggatgctgaacggaatctaaggcttgaagcctgaatttacaaggtaagcagtagcttggataatagacgggtcccggcaaagaggtaaggttaagagaggaggtgagagagaaatgagtaagaggacactttatgtaggaatagatgtatcaaagaaggcccttgaggtagcaacaactgttgatgggaaggaggcagaggcaacgaaggagataatgaataacctcggtgggtttcggatgttagaggaatggacgaggaaacagagtcacaagcatggatgtgaagagatacactactgtatagaatccacgggtgtgtatagtgaaaaggtagtggagtatttacagggaagaggggatttgatggttagtgtagtaaacccatttgtagttaagtcatttggaaagagcttaggagtgaggactaagacggacagggtagactcggagttattagctttatatgcagctacagtgaagccgaaagtaacagagaagagaccagaggatttaaaggaactaaggagcttagttcgtcatctagagtatttaatcaatcgtcgtggtcaggaggcggggagactggagtcaacaaccaacgcattagtagcagattctataaaggggataataaagagctacgataaacagatagagaagataaaggaagcgatagaggagcatctaaggaagcatcctgatctaagagagaggacagagctattggagtcaatcccagggataggagagataacatcgaaaatccttttatgtgagcttcatatggagggtgggggagagaggatatcggcaaaagcacaaacagctcatgcggggcttgctccacaacataggatctcgggtagcagtgttagaggaaagcctaggatatgcaagacaggtaattctaggttgcgtagatgtctttatttcccaacaatggtagcgataaagcataatccagttattaggaggttttatagaaggatgttagagaatggcaaacctaagatggttgcactagtagcagctatgaggaagctactagttattgcgattggggttttaaataacagaacagagtttgctgaaaactgggatggacgagaatatgcataaaatgtattgacaaataaaacggaa

SEQ ID NO: 5234 - DNA, 1437 bp, unidentified
  source 1..1437: mol_type = unassigned DNA; note = element_808a8b9
  misc_feature 1..2: note = core
  misc_feature 3..231: note = LE
  misc_feature 232..1422: note = CDS
  misc_feature 1423..1437: note = RE
  misc_feature 15..207: note = bridgeRNA
gtcctaccttgaagacgtgggtctgatctggtcattcgtaaggtcggtggacccgggggctccgggtatggctgtaaaggctgagccgctggatggcttacgggacttggccgcccggagccccgtgacgactcgaccgctgattgggagacgcgactcgatcgctgctgtaggacaacgtcggcgaggtcgtctgcgggagcgaagtacgacgagctggcggaggggaatgtgcccgagatctgggccggggtggacatcggcaagacgcatcaccacgccgtggtgatcaacgcggagggcgagcggctgctgtcgcgccggatccagaacgacgagaccgagttgctcgcactgctcggcgatgtgctggcgatatccgacgacgtgctgtgggccgtcgacctcaaccatggtggggccgccctgctgatcggtctgctcaccgcccacgatcagtctgtcgcctacctcaccggcctggcagtgcaccgggcctcggccacctaccggggtgaggcaaagaccgacgcgaaggacgccttcgtcatcgccgaccaggctcgtatccgccgggacctggggctgctcaggcccggggacgagatcgccgtcgccttgcgcaccctgaccacccggcgcctggacctcgtcttcgatcgcacccggcagatcaaccgtctcagggctcaactgctggagatttttcccgccttggagcgggcactggacttgaccaacaagggtccggtcatgcttctgaccggctaccagactccggcagcgatccgccgtacaggtgcgaaacggattgagacctggctgaggaaccgcaaggtgaaaggcgctgccgcactcgcccgcactgccgtggacgccgcccaggcccagcacactgcgctgcccggcgagaggctggccgccgccatggtggtccgccttgcgaagggggtgatggccctcgacgaggagatcgcggaactcgacgctctcatcgaggcccggtttcgcgagcatccgcacgccgaggcgatacgcagccttcccggcatgggcgccaggcttggcgccgagttcatcgccgccacaggcggggacatggatgccttcggcagtgcggaccgcttggccggcttcgccggcctggccccgcagccccgcgactccggccgcgtcagtggcaatctgcacagaccccgccgctaccaccgcgggctgctgcgggccatgtacttgtctgccccggcaagcctcaagtgctgccccgcctccaaggcggactaccagcgaaagcggagcgaggggaaggggcacaagcaggccctcctagccctcgcccgccgacgcgtcaacgtcctgtgggcaatgatccgtgacagagagtgctaccaagtttcactccccgtcacagtcgcagcttgacatcagcattgggaa

SEQ ID NO: 5235 - DNA, 1363 bp, unidentified
  source 1..1363: mol_type = unassigned DNA; note = element_808c730
  misc_feature 1..2: note = core
  misc_feature 3..78: note = LE
  misc_feature 79..1107: note = CDS
  misc_feature 1108..1363: note = RE
  misc_feature 1108..1351: note = bridgeRNA
tgatggtgtggacggcccctgcgcggcatcgctgtgccagactgaggtcgttgaaccttcaggagagaggagccgtccgtggatcagattacccgcattggcatggatacatcgaagcagcttttccagcttcatggcgtgaacgcagccgaggagccggtgctgcgccgcaagctcaggcgctcgcagatgatcgcgttctttgccgcgctgccgccgacggtgatcggcatagaagcgggcggggcggcgcatcactggtcccgcaccttgtcggccttgggccatgaggtcaggatcatggcgccgcagttcgtcaagccgtatgtgaagcgaggcaagaacgatgccgccgatgccgaggcgctgtgcgaggcggtgagccggccgaccatgcgcttcgtgcccgagaagactgccgagcagcaggcggcgctgatgctggtgtccctgcgggatcggctggtgcgctcgcgcacccagctgaccaacgccattcgtggtcatgccgcagagttcgggctgatcgcggcccgcggcacggataagatcgcacccctgctggagcgcatcgccggcgacagcaacctgccggctctggcgcgctcgctctttgcccaactgggcgaagagtttgcccagctccaggagcggctgaagaaggtcgatgtcgcgctgatggcatggcatcgccagagcgaggtatcgagacgcctggctgagatccccggcgtaggtcccatcggcgcgtccatgctcgccctgaagacgccggatccgcggagcttcaagtcagctcgtcactttgccgcctggatcggcctcaccccgaaggaccattccacgggtggccgaaccaggctgggcgggatcacacgcgccggcgacgaagggttgcgcagtgtgctggtggtcggagcgacggcgctcatccagcacatgcgacgcggcagtcggctctggccgtggctgcagcgcctgcttgcgagcaagccgtacaaactcgtggcggtggcactcgccaacaagatcgcccggattgcctggaagctgatgaccagtggccacggctacgagcccgcctacgtcctgcgcgcggccgtgtagcaagttccgtccggcccacccggacgggttcggaagtttgcacgaagcagagagatggagcgatcgatcgatccagagacgcgagacactccggacagtccagcggcctaacgaggccgatcgactggttggaacttgcgccgcggattccatcttggccagcggctcgacagcgccgcagcgaaggccggacatatggatgcaacgatccgattaaccagcctcgaccttcttgcaaaccggggccgtccacata

SEQ ID NO: 5236 - DNA, 1130 bp, unidentified
  source 1..1130: mol_type = unassigned DNA; note = element_80917ea
  misc_feature 1..2: note = core
  misc_feature 3..209: note = LE
  misc_feature 210..965: note = CDS
  misc_feature 966..1130: note = RE
  misc_feature 22..202: note = bridgeRNA
cttatctgttcggaatctggcagcttaggtgccgagagccggcgtgggccgccgtacgagcctggatctgagcgatcgccatgtagcttggcgcccacgccggaatctcccttgatccgcccgaacagttgctggagctgacactcgaagcgataagactgggcaagcgggggagctctcgacccttccagactatacggagtcgggcgatgaacgggatcgggattgatgtaagcaagcgccagctggatgtcggcacgacggacagagagaccctgcaggtcagcaatagcccctctggctttgttgaattgaacgcttggctgaagaagcgtccagcgatccagatcgtgctggaggccaccggcggatatgagcagcccgtgctggatttcctgcacaaggcaggccatcgggtggtgcgcgccaatgcctttcgggcgcggaaactagctcaggggctggaccaaatagccaagacagaccgcttggatgcctatgcattggcacagatggccgcgctggtgaaactgccggcctaccagccactagagccttggcagcagaaactgcgggaatttgtgcgggcacgtcgacagatgatgcaggccctgaccgtagcgcgacagcagcaggaaatggtgcgtgatcgtgaattgcgacggcttttgcagaccaacatcacccgcttgcagacactggtagaacgcctgggaaagcagattgccgagcaagtcgctcaacagccccagctcacgattctgaagtcgatgaagggcgtgggaccggggctacaggcggtgctggccagctacctgcctgagctgggccagatcagcggcaaggccatcgccagcctggtgggcgtggcaccgatgtcccacgacagcgggacgatacgcggaaaacgaagcatccacggcggtcgagccgagatccgtcaggagtggcgatcgtggcggtaatgcggaagatgctggtgatcctcaacgcccgcgtgcgcgacgctcaaagcggaccaatcccggcctgaagcgcgcacgggcacatctccaaaggctgccggccagcggccggcactaccgcgtccgtctactggagggaccgaactccctccagcaacaccgttg

SEQ ID NO: 5237 - DNA, 1410 bp, unidentified
  source 1..1410: mol_type = unassigned DNA; note = element_8097ffd
  misc_feature 1: note = core
  misc_feature 2..85: note = LE
  misc_feature 86..1123: note = CDS
  misc_feature 1124..1410: note = RE
  misc_feature 1179..1405: note = bridgeRNA
caatgggatggactcccccctcctaaagtggagatgtgccagactgaaagttccacccaaaagtcgtgcacgaaggagccatcccatgaacgccaagcttagtagagtcggtgttgatatagcaaaaaatgtcttccagattcatggtgtcacttgtgatgagcggacggtctggtgccgtcgcgtaccccgggaacagtggttaaacacggtgctgggtcatcttgagccgggtagcgaagttggcatggaggcctgtggtggcgcacaccattgggcacggcaactacaggctgccggttaccgggtcaagctgatggctccccagtttgtaaagccctacgtgaaaggcaacaagaatgatgcaaacgacgccgaagccatttgcgaagccatgagccgtccgcacatgcacttcgtcccggtgaagaccgtagcccagcaagacctgcaggccgtacatcgcatccgtagcgagctggtcgagcaacgcaccgccaaggccaatcagatcaggggcctggtggccgagtatggcctgattgcaccgctgcggctggagcacttgcgcacggtgctgccagactggctggaagatgtcgacaacggtttaacggagcgcttccgtcgcctgctgcacgggctgtcacaagacctttgcaggctggatgagcgtgtagcggagctggacgaagaaattcgcgttatcgcacaaagcgatccggcggcgctgcgcttgcagcaattacgtggcatagggcccattacggctacggcactgttggccaccttgggtgatgcgaaccaatttgccaacggccgacaaatggcggcggcgctgggtttgacgccaaggcaacatagctccggtggcaaggagcgcctgttcggtatcagcaagcggggcgacgcgtatttacgtactttgctgatacatggcgcccgcgccgtcatgcgctttgccgccggcaagactgaccggctcagcgtgtgggtaacgagtctggcccagcgtcggcaccccaacatagcagccgccgcactggccaacaagacagcgcgcatcgcctgggccctgctgcacaacggcacagactaccaacccggtggggccgcgcgctgaagcgcgccgccccaccgggttaccagaaaagacggattaaggagcaccctcaacacacgattgcaaagcatgccgaatgatggcgaacaggtcgaaccggcactgacaaaacccgattattgaactgtgccatgagcacgaaagggcgatagggagtcagtgcgcgcatagcccattatggccccgcgtcacagcagtgacgttgcagttaaaggccggatatacgtgagcagtcgtacctaagcgcaaaaactcggagtgcttgcaagccggggggagtccatata

SEQ ID NO: 5238 - DNA, 1640 bp, unidentified
  source 1..1640: mol_type = unassigned DNA; note = element_8098d6a
  misc_feature 1..5: note = core
  misc_feature 6..421: note = LE
  misc_feature 422..1630: note = CDS
  misc_feature 1631..1640: note = RE
ctcataaggcaacctcttgttctttgaagctacccgaaggcgcgcagcgtagggttgtccaccgggcttggttgtggacaacgcgctggccctttgtcaggccaagaagcgtgttgtccacaactgcgaagcactcggtggtcaacccgtgttcggggcgaggattttgtgtgcaagcggcattgacgccgccaagcaaatcgaccgaaggtatcaatcgacttccgtgccctcgtggtgactgcccgcggcgctggctgctcgacagcccaaatgagacctgcagcacccgaggtgccggaaggccacgacgggccaccggatgtagcgccacgcttacccagccagagcgccaatttatgagcgtcccgccatgccttccgacacggacagtcttaacccaaaccgatggaggttgtccatgaggaattctgtttttgtcggcctggattgggcctaccgctcgcacgcggtgtgcgtcgtcgacgctcagggcagtgtgctcaagcacttgaccgtcagccacgacgcccaaggactgggcgagctgcggcatgcactcgctgcctttggcaaggctttgcccatcgccatcgaacggccctcgggcctgatcgtggatgccttggtcgaagccggccatcaggtctttgccattcaccccaacgccgtcaaggccagccggccgcgctatcgcagcaccaacgccaagagcgatgcgggagatgccttcatgctcgccgacttgctgcgtaccgatggtcatcgctggcatgccttgcagccccagtcggcggccatccgtggcctgcgcaccctggtgcgaacgcgtgacgacttggtggccacgcgcgttcgcctggccaaccagctcaccgctctgctggatgcttactggcctggcgccacttgtatctttgccgccgtcgattcgcccatcgcactggcctttatcgagcagtggtccaccgcgcgcaaactcaccgcccggcagatcgccgccttttgcaagcgccagggctacagcggcaggcgctcgcctggcgtgctgctcgatcgcctccaggccgccgcgccaagcctgtgcgaacccatgctcgcccaggcctatgccacggccgccttggccctggtggccctgctcaagccgctcgcggcacagatcaaatccctggatgggcatatcgccctgagcatggccgcgctgccgcaggccatctcggtgatgtcgctgccgcgcgcagggtgcatctgcgccgcccagatcctggccgaattgggtgacgtacccgagcgctttgccagcgccgagcagctctgctccgaggctggcgtcgtacccgtcacctacgagtccggcaagagtcgcgccgtcaccttccgatgggcttgcaaccaccgcctgcgtcgggcaatcacctgtcttgcagacaattcccgccatgccagtccctgggcagccagcgtctaccaagccgcgcgcaaacgcggctgcgatcatccgcacgcagtgcgcatattggctcgtgcctggactcgcgtgctctggcgcatctggaccgacggcaccgaatacaacccggccattcactccagcgcctgtcggatcgaaaacactcaagcaggttgacaccggatgt

SEQ ID NO: 5239 - DNA, 1429 bp, unidentified
  source 1..1429: mol_type = unassigned DNA; note = element_809c72d
  misc_feature 1: note = core
  misc_feature 2..79: note = LE
  misc_feature 80..1111: note = CDS
  misc_feature 1112..1429: note = RE
  misc_feature 1202..1423: note = bridgeRNA
taatgagatggtccgccgcttgatcaacctgcggagagtgggtgatcttgttggcaggtttttaaggaggatcatcgacatgcagatacgttctgttggtatcgaccttggcaagacaacctttcacctggtggcccttggcgagcgtggcaaggtgcttcttaggaagaagttctcccagaggcagttggtagctttcacggccaacctgcaagtgtcgctgatcggactggaagcctgttcgggagcgcacttcctgggtcgtaggctgcgcgaacaaggccacgatgtacgactgattccagcgcagttcgtgaagccgtttgtgaagtcgaacaagaacgatttccttgatgcagaagctatcgctgaggctgtcgaacgccagaacatgcgatttgtcccgatcaagacggatgaccagttggacctgcaggcactccatcgagtacgcgagcggctggtatcgcggcgcacagcggtgattaaccaactgcgtgccttcctgctcgaacgaggtatcaccttccgcaagggccccgccactctgcgtaagcagattcctgagatcctcgagaacgctgacgagaacttatcgccgcggatgcgcaacctgctcgatctgttgtggcaggagtggcggtcgctggatcagcaggtcgaaagtttgagccttgaaatggagagcatttctgttaccgacccggcctgtcagcggctgcggcagataccgggcgtaggcccgttggtcgcaacagccatcgtcgctgcgataggtaatggcgctgcctttcataagggccgcgaatttgcggcgtggctggggctggtgccaaagcagtactccaccggcggcaaggccaagctgctcggcatcagcaagcgaggaaatccctatctcagaaagatgttgatccacggcgcacgggcagcggtgctacggctcaagcgagaacgatcgccgatcggcgcgtggatgaacggtcttgaagccagagccccgaagaacgtgctcatcgtggccaccgccaacaagctggctcgcatcgtctgggctgtgttgtcgagtggtgaagattatcgagcggcgcccagttcgctcgctgcttaaaaccagggtggaaaaggcgcctgcggcttggaaagcgctgacgcgcttctcacttttccaccctattacgtctgctaaaggttgaccccaccaagtctgcatcggagaacagtagggacgaaagaacagtcacaacggcatgcctgaaacctgtggcgaaaaatggtctgaaacgaccgagcgatttaccaggacaggcacgcgcggaactcatcatggctcaggagacttctctccaccaagaagccggatacatttgcgcagacttccttcttcgtctatcaacttctcccttgcattcgcgcgtcggaccataca

SEQ ID NO: 5240 - DNA, 1499 bp, unidentified
  source 1..1499: mol_type = unassigned DNA; note = element_80a0650
  misc_feature 1..2: note = core
  misc_feature 3..202: note = LE
  misc_feature 203..1477: note = CDS
  misc_feature 1478..1499: note = RE
  misc_feature 5..202: note = bridgeRNA
ctgatggctctaccctcctgagtcatggggtcgcctcctgggaatgcttgcggtgcttgtccctcgaggactgagatgagacggcatcccagggggccggccctgcaggcccgacgcccacaagggtgtcgtcccccgaggactggtccatcagcacggcgccgtgcctgcacccgcctgttggtcgaggaaaggaggcatgatgcttggtgttgggatcgactgggccgaggagttccacctcgtcgccctgggcaagccaggcgagggggtgatcgacatccgccgggtggagcacacccctgccgcggtccaggcgctgctggcccacatcgccaccctggagcccgacccagccgaggtccgcgtggtcatcgagacccgccacgggctgctggtcgagcggctgaccgatgccgggttcacgatcctgccggtcaaccccgacctgatcgcgcggcggcgaggaccggccaggaagaaggacgacgccgaggacgcccgcctggcctgcctgctcgcgctggaccgctacgccaccctgcggccgctgctcccccacggccagctcgccggcgagctgcgcgcgatcgcccgcgacgacgaacgcgccgcccgagaccagcgccgcctcgcgaaccggctccgccaagacctcatcgcgaccttcccggccgccctggcgatcgccggcgacgacctgggcgcgccgaccatcctcaagctgctggagcgctggcccaccgcccagacgctgggcggggcagcccgccacgagctgctcgccttcgcccaagcggcccaccacggctggcccgaccgcctcgccgaccgcgtccaggccgcgctggccaccgaccacttcaccccacgcgactacctcgtgcgcgccaaggccgacaccatccgcctggctgccacccaactgctggccatcaccgcccagcgtcgggtctgggagcggcgcatgggcgagctgctgctgggcgccccccgctacggccgcgccaagcagcccagagccgaccccgaccagctggggcaggcgttccctggcggcaaggtctacctgagctttcccggcctcggtgaccgcctcgccgccaggatcgccggcgagatcggcgaccatcccgaacagtacgggtcgccgaacgccctgcaatgctacgcgggcaaggcccccgtcacccgccgatccggaaaaagcgagctggtcgtcgcctgccggctggcctgcaaccgctacctggccgccgcggtgcagcaatgggcgttctgctcgctgcgcgagtccggctgggccagggagttctacgacacccagcgcgcccgcggcaagacccaccacgccgccctcagagcgctcggcaaccgctggctggaggtgctgtggcactgccttcgcaagggcgtgctctacgacgaggccacccacgtcgccaaccgcaaccgcgcactcggcaaggccgcctgaaaccgtggttgacaaagggtgt

SEQ ID NO: 5241 - DNA, 1378 bp, unidentified
  source 1..1378: mol_type = unassigned DNA; note = element_80a093a
  misc_feature 1..2: note = core
  misc_feature 3..77: note = LE
  misc_feature 78..1115: note = CDS
  misc_feature 1116..1378: note = RE
  misc_feature 1111..1363: note = bridgeRNA
gatggggtggacggcccctgctacggcatcgatgtgccaagatgaggtcgttggaacttcatctggaggagccgtccatggtcgagattatcacgatcggtcttgatatcgcgaagaacgtctttcaggtgcacggggtcgacggcggcggcgaggtcgcgctgcggcggcaattgcgccgtgccgaggtggtgagcttcttcggcaagctgccgccctgccttgtcggcatggaggcgtgcggtagcgcgcattattgggctcggcaaattgccgcgttggggcacgaggttcgccttctgccgccggcgcatgtgaagccctacgtgaagcgcggcaagaagaacgacgcggccgacgcggcggcgatctgcgaggcggtcggacggccgcacatgcggttcgtgccgatcaagagcgccgagtgtcaaggagcccttctgctgcaccggacgcgcgacctgctggtgcggcagcgcacgatgctgatctgcgcgctgcgcagccatctggcggagttcggcgtcgtcgccggccagggcaagggcaacttcgccaagctggtgacgcgcctcgaggcggtggaggacgaggcgctgcccgagctggcgcgcgcggcgctgcggccgatcgcgacccagatcgacgacgccaacgcgaagatcgaggcgttggagaaggcgatcgtggcgcgtcatcgcggcgaggaggccagccgccggctcgccagcatccccgggatcgggccaatcatcgcctcggccatcgccgcgacagtgcccgatgcctcggtcttcaaatcgggacgtcagttcgcggcctggctgggcctcgtgccgaaacagaactctaccggcggcaaggaccgcctcggcggcattaccaaggccggcgaccgctacatcaggcgattgttggtcatcggcgccaccggtctcatccgctacaagcacaagaacgttcccggcggcctggattggctgaccgggctgctggcgcgcaagcccgtccgcctcgtcaccgtggcgctcgccaacaagatagcgcgcatcgtctgggccgtgctgtgccgtagggaggtctacagggaagcggcgatggtgcaggccgtctgaccaacgacgacacgcaaaaggcgtcttcgattgcgagggtgaagagtgacttgatggcgatcccggtcgagccggggatcgggaaaacccgaattgtgtcccgcgccacccaagcgcgttacggtgatggggagccgatccgcgtacttcatcaaggccagcggccatgccatgccgcgcaaacaggccggatacatgaccgcacccgaccacaacgccacaaacgtcacattctccttgcaacgcaggggccgtccatacag

SEQ ID NO: 5242 - DNA, 1359 bp, unidentified
  source 1..1359: mol_type = unassigned DNA; note = element_80a1d7d
  misc_feature 1: note = core
  misc_feature 2..65: note = LE
  misc_feature 66..1118: note = CDS
  misc_feature 1119..1359: note = RE
  misc_feature 1127..1353: note = bridgeRNA
taatgggatggtccgccccgtcctcccgcagcatcatctgggcagtcacaacaaaggaggttgcaatgtccctacgcaatgcgccgcgccccgcggccgtctatggtgtcgatatcggcaagaacatcttccacgtcgtcggcttggacagcgacggcgagcccgtccagcgagttcgcttccgacgcgatacgttgatgaagttctttgagcgggcagcgccagcaatcgtcgggatggaatcgtgcgctggatcgcaatggatcgccaggagacttcaggcactggggcacaaggttcgcctgatcccagcgcagttcgtgaagccctacgtcaagtcgaacaagagcgacatcatcgatgccgaagctatcgccgaagcagccacgcggccgacgatgcgatttgccgcgatcaagagggaggagcaagccgacctccaagccttgcatcgggtgcgcgaccagatgatcggcacgcgaacccgtctgatcaaccagatgcgagcattctgcctggaatacggcatcgcattgagacagggcgccggactgttcaagctcgacttgccactggttctcgatgacctgtcgaatgacctctcgccggcaatgcgcaaactgcttgtggacctgttcgccgatctgcgccagttggagcagcgcatcaacgacgtgactagggagatcgcagcgattgcagaccgagaagatgttgcccgccggctcatgacgatccccggaatcggagcattgggagccaccgcgctattggcggccgtcggcaccggatgccagttccagaaggctcgcgacctggccgcatggctggggcttgtccctcgagaatactcgaccgggggcaaacagaagctactcggtatcagcaagcgcgggaaccgctacgttcgcaagctgctcgttcatggcgcgcgatcatgctttcgccacctggatcgaccccgggatcgcctgggaagctggcttgatgggttgcagagccgtatgcacccgaacaaagccgttgtcgcacttgccgccaagatggcgcgcattgtctgggttgtcctgaccaagccgggagcgctctacgaacgcagggaccctgctttcgcctgacgctccggctcgattgcaaggctcgggaatagtgatgacgaaacagtggatcagcatgccgtaagccctgtgcaaaaaagcgggcttcgtgcccgaaccatttattgggaacggcgtgcgcggatctcatcatggcctggctgcaacagcagctcactcgcgagaggccggatacatttatgcaactggaatcgtcgtcggcgatgtcgcgaacccttgcacggacggggcggaccataca

SEQ ID NO: 5243 - DNA, 1800 bp, unidentified
  source 1..1800: mol_type = unassigned DNA; note = element_80a315a
  misc_feature 1: note = core
  misc_feature 2..358: note = LE
  misc_feature 359..1675: note = CDS
  misc_feature 1676..1800: note = RE
  misc_feature 111..289: note = bridgeRNA
tagtataataatggtgtagtcagtaagactacttggttaataagtttctatataccagataacagaagaaggagttcttccttcatcagatgttatcctaaataattatcatgtctgacggttcctgatagacaccagagaaagcataaggtatcatctcttaggataggacaaataatgtatcactccttgggatgctgatttcaccagcagatacctacaagaaagtcaattagtccattcgacagggttttatgttttagctggttgggagccggaaggccatacccgtataacgtgctaggttgtgtacctgccagattggaaatggattcctatcagaaaggagctatcgctcatgtcaaacaaatttatttttaatcttgatgatttattcatctctgttggtattgatgttggtgctgacttctcctggatgtctatcgcacttcctaaccaacagattataggaaaaccttataaaatcctacataatcaaatgaattccctcgcaactgctgtttctaaaataaaagaagcagaagggttgtattctttggaaagtcgcattttcctcgaatccacgggaatttatcattacccactcttctgctatcttcgtgataagggttttaactgctcggttattaatcctatcatcactaagaatagcacaaatatcaacatacgaaaagtacataatgaccgttttgattctaaaaaagcggctttagttggtttgaagcctgatctaaaggtttctcttatgccttctgaccttgctttgaactgccgcaatctctgtcgtgaatactacgatttaatggataaccgcagtgcttacgtgaacaagcttcaaggcgaattgcgtatggctttcccacagtatcttggtatattctccaagattacagccaatacatctcttacattattggaaacttatacatctccatctgcctttattgaagcagacccgcaagagattattgataccattaaatcaactgcacgttttggagttgcatatgctgccagcaaatacaatgccattattcaagccgctcatgatgctaatgaatttggctatattttagacagcaatatcaaacgtattcgtttatatatcagcttcatccgtaagtacgacgaagaaatcaaaaacattctcgatgctatgcatgagcttattgatgccaatgaagaaactgacttcgtcaaacagattcacttagttgaaacgttcaaaggcgctggtttcttatctgctgtaactctcatgggagagattggtaatttctctgctttttcaaaacccaagcaacttttcgcttatttcggtcttgatccagcagtaaaacaatctggtaaattcgaaggaactaagattcaaatttccaaaagaggatctgctatagccagacgagctattcatacactgactttacaaagcatcagcacatcccgtacaggagaagcaaaaaatccggtactccgtgattactatctgaagaaatgtgaatcaaaacctaagcttgtagcaatgggtgccgtttcacacaaggtgtgcaatatgatatttgcaatactcagagataacaaaccttttgaaatcattactccgcaggagcatattcaacaatacaatgctgctaaatgcgacatagctgcataaaatactgttaatccaacgaaccaatatctttttttgcaaaatgatattttcaccaagggataagtgtacccttttttatggagaaaatatttttcatttatctattgacatttattagctggact

SEQ ID NO: 5244 - DNA, 1600 bp, unidentified
  source 1..1600: mol_type = unassigned DNA; note = element_80af510
  misc_feature 1..2: note = core
  misc_feature 3..267: note = LE
  misc_feature 268..1488: note = CDS
  misc_feature 1489..1600: note = RE
  misc_feature 33..287: note = bridgeRNA
ctgatacaatatatttgaccgagaaagtgcggtatttggaatggcactttccgagttccgttaacctaagctataatggaaaggtatttaaggtctgatgttctcctccttgtgcttttacgctcgtaaataagactgtcagccggctttccattatagcattcggtttccgcaggttgggcttcgcgtccgtgtaactaatcagattgaatcggtaatggttcttgtcagtcacctttttacaaatccatattagtgaggtcacttatgaacgctgtcggcatcgatgtttccaaaggcaaatctaccgtttccatcctgcgccccggcggagaagtcgtcgcttccccgttcgaggtttctcacaatccaagggaacttcatgagctcgtcaaactcattaaaagcctggacgatgatacaaagatcgttatggagtacacaggcaactactaccttcccgttgccttgttcctccaaaagtccgggttgttcgtttccgtcgtcaaccctattctcgtaaaagaccacggcaacaaatctttaactgtccgcaaaggcaagaccgataaaaaagattctataaagcttgccgcttttgccttagaccgttggaatgagttgccactcttttccgcacgatctgacacgagaactttgctcaaagcttttaacagaaaatacaaccagtacatcaagctcaaagtcatgctcaaaaacaatctcatctccattctcggcctgacttttcccggtgcgaatactctcttcaatactcccgcaagaaaagcagacggacacgagaaatggatcgattttgccctaaaattcccgcattgcgagtgcatttcgagaaaaacatactccgttttttccaaatgctatctttcttggtgcagaaaatgcggctatcatttctctggcgcaaaagcgaaagaattttactcgtttgcctgcaactgtgctccgtccttagccgattcagagacggctcattcgcttgtttctactgcaattgcgcagcttaatacgctcaatgaagctcttgcctctttacagaaagaaatggatcttttggcaagttccctgccagagtatgatactgtcctgagtttctttggcgttggctctgttctcggctcgcagcttattgccgaaatcggcgacgtgttacgcttctccaacaagaaagccctcgttggctttgccagcatttacgctccgccgttccagtccggaaacttcaatccgcagtctcgctccatctctaagcgcggctctgccgccctgcgcaagaccttgtttcaagtcatgtctgtcattctgcaaaacgcacctccaaacgagcctgttttccttttcatggataaaaagcgctccgaaggaaaacacttctacgtctacatgatggcgggcgcaaacaagtttttacgcatttactacgctcgcgtcttggaacacctgaacgcattgcgagaagctgcttgaccgtgtttattactgctgccgttctctcgaacggctttttcccttgcgcttttttgtcccaaaaatttcttagaaaaacttcttgctttttccttgacttttttttgcaggt

SEQ ID NO: 5245 - DNA, 1534 bp, unidentified
  source 1..1534: mol_type = unassigned DNA; note = element_80b17d6
  misc_feature 1..2: note = core
  misc_feature 3..242: note = LE
  misc_feature 243..1418: note = CDS
  misc_feature 1419..1534: note = RE
  misc_feature 3..219: note = bridgeRNA
cttgtattatagagtagtagtttataaagcccctctccaagggctgtgctacactgtagaggatgctgtggattggtacaattgtcctaccacacagatggtttaagaaaggttccaaccacagccctttgcaggattgttaatcagttaaataccgccagacggtttatgtggaacaaggttacaagagcaaagtaccctgtggatacagcatcacaaatttaccgctggagggttttattatgatttctgttggaatcgacgttgccaaagacaagcacgactgcttcatcatcagctcggagggcgaagtcctcgcagacgtgttcaccatcccaaacagcgtggatggatttcaccgcttgttggagacaatccaaagctgctcatcccctcaagacaaaattaaagtagggcttgaggcaaccgggcattacagctacaacctgcttgggtttcttcttgacaacggtctggccacctatgtcttgaaccccttacacacgaatctgtaccgaaagagcctcagcctcagaaagaccaaaactgaccgggtagatgcgcgcacgattgcggcgatgcttttgtccgatgtgggcctcaagccctatacagacacagcttaccacaacgaggagctaaagtcactgaccagatatcgttttgacaaggtgaagcagcgcggccagttaaagcagtctattgccagattggtctgcatcctgttccctgagctggagaagctggtgccaacgctgcatctggcctccgtttacgccctgctggaggaatttcccggagccaaacaagttgccaatgcgcatctaacgagactgaaaacgctcttgcaggacgcatccaagggtcgttacggaagggacatggcgctggaaatccgtggtgccgccagagattctattggctctgttatgccggcaaaatctttggagttgcggcataccatccatcttatccatgagctggacggcgagattaatgagattgaatctgaaatacagaccatcatggaagaaatgcattctcccgtcaccaccatcccaggcattggcactcggatgggggccatgattttggccgaagccggtgacctctctcgctttgactctccggacaagctgctggcttacgccggactttcaccatctacataccaatccggccagctcaaaaactgctatgcccatatggaaaagcgaggctccagatacctgcgctacgccatctttaatgccaccaaatacgtctgccattgggatccgacctttgctgcctacctcgccaaaaagcgggcagagggcaagcactacaacgttgccatttctcacgctgccaaaaaactggtgcgtctcatctacgccttggaaaaatccagagagccttaccgctcagcagcgtaatttctcttcatagcccgcatggcgtcttactagacgtctgctttgctataccctttttgaactatctgttctttgtccaccatccgctagttcaggcttgacttctaatagttaat

SEQ ID NO: 5246 - DNA, 1357 bp, unidentified
  source 1..1357: mol_type = unassigned DNA; note = element_80b6211
  misc_feature 1..3: note = core
  misc_feature 4..79: note = LE
  misc_feature 80..1099: note = CDS
  misc_feature 1100..1357: note = RE
  misc_feature 1093..1344: note = bridgeRNA
tgatggggtggatggcccccttgcggcatctgtgtgccaaagttgggttgtcgaaaactccaacagaaaggagccatccatgaaccagattaccatcatcggcctcgacttggcgaagaaagtctttcaaatccacggtgttgacgcctccggcggggtggtgctgcggcgcccgctgcggcgcggcaaggtgctggagttcttcaccaggctgccagcgtgcctgatcggcatggaggcctgtgcgacagcgcactactgggggcgcgcgctcggcaagctgggccatgaggtgcggctgatcccgccggcgtatgccaaagcttacgtgcggcgaaacaagaacgatgcggccgacgcagcggcgatctgcgaagcggtgagccggccgaacatgcgctttgtcgttgtgaagacagagacccagcaagccaccgcgggcgtgcacaaggtacgagaattgctggtgaaacaacgcaccatgctgatcaaccatctgcgcggcatggcggcggagttcggcatcgtggtggccgagggaccgcagcgcgccgctgagctggtggcaatcgtgctcgatccggagcaaacacgcatccccgcgccgctgcgtcagacactgatgagcctggtcgatctgctgagcagcattgaacggaagctgcaagacattgaaaagcagttgctcgattggggccgcaacaaccagacctgtcggaacctgatcaccatccccgggtatggtccgatcctgtcgagtgcgatggcggcgatcgtggtcaatcccggcgtgttccgcagcgggcgggacttcgccgcctcgctcggtctggtgccgcgacacgaaggcaccggcggcgtggtcaagctcgggccgatcagcaagcgcggcaacggctacttgcgccggttgctggtgaacggcgccacctcggtgctgaatagcaagcgcgccaggaaggatccgtggctggtcaagttgctcgagaagaagccgcgcaagttggcggccgtggctttggcaaacaagatggcgcgcatcggctgggcgatcatgacgcgccagcagagcttccgggcggcgccggcggcggcctgagcggccggcgacgggccgcccgggaggcttgcgagggtaacgcagcgtgatggcaatgtcggtcaaccgactgatcgagcgagacctgtcacccgtcttgggacaacgcgatcccgtggccatgatcagaactcgatcaacggttcccatcagggcctgcggtctgcgaccgcgccaacaggccggacacatgaccgcaaggtgccgccatttgcacgcacgcgacaaaacccttgccagccgggggccatccacaca

SEQ ID NO: 5247 - DNA, 1418 bp, unidentified
  source 1..1418: mol_type = unassigned DNA; note = element_80c21fa
  misc_feature 1..2: note = core
  misc_feature 3..95: note = LE
  misc_feature 96..1112: note = CDS
  misc_feature 1113..1418: note = RE
  misc_feature 1176..1417: note = bridgeRNA
ataatggtatggacccactccacttcctaacggcctcgcaatgggccaaaatgggagtgtaacaattccatttaacagaagcggagtgggtcactatgaagattactacaattgggttagatatagcaaaaacagagtttcatttatttgccgtcaatcgtgaaggcaggctggtaaaaaagaagcagctaaagagaaaagcactgctggcacatataacgaagtttgaaccttgcttgatcgttatggaagcgtgcggaggtgccaattattgggcaagggagtttatcgctttagggcacgaggtcaaattgatcgccccgcagtatgttaagccctttgttaaaggcaacaagaacgactataacgatgcgcaggctattgcagaagcagcacaacgtccgagtatgcgttttgtgccgattaaatccattgagcaacaagatgtacaaaactttcatcggcagcgggaaaggattaaaaaagagcgtaaagccttggtgagtcagattcgtggattattagcggaatatggtgtcgtcatcaatttgggggttgctgcggtacgccgtgatttgccattgatacttgaaaatgctgacaatgggttaacggcactgtcacgagaattatttgctgaactttttgaggaattgcagagcgttgaagaacgctttaagcagtgtgagcgacgtataaaaacgttgaacaaggagaatgagatatgccgccgattggatgaagtgcttggtatcgggcctattattgcgagtgcaacgtatgcggctgcgggtgatggtaaagaatttgtcaatggtcgacactattcagcctggctaggtttagttccaggtcagcactccagcggtggtaagccaacattgctcgggatcagtaagcgcgggaatgcttatttacgtaccttgtatattcatggtgctcgttcggtgctaagacattcagcgaacaagacggataggttcagtcgttgggcgcaggcgttactagcgcgtcgaggccataataaggcctgtgtggcagtagccaataagttggcaagaatcgcctgggttatcatggcaaaaggtgaaacttatcgcccagccgtataaccttagtaaaagtttttggcgggaacgaacactatggtgacttttcgctgaacaagagcaaacccgttacttcagttgcaaaagataagatgatcggatggtgagataggtcagaccggctcattcaaaacctgtttcctacattggccgttaaaaggccggacggatgatgaggagtttgagcgcaaataaccatcggggccaggatgttaaaaacacatccatcaacaggccggatatatgagagcaatgattttcctctcacatcaatgatcagctatcttgcaaaccggagtgggtccatat

SEQ ID NO: 5248 - DNA, 1618 bp, unidentified
  source 1..1618: mol_type = unassigned DNA; note = element_80cd103
  misc_feature 1..3: note = core
  misc_feature 4..253: note = LE
  misc_feature 254..1489: note = CDS
  misc_feature 1490..1618: note = RE
  misc_feature 8..229: note = bridgeRNA
gttcgtattatgaagtcagccagttttttctggttgaccttttttatttaagagggtttattaatacggtagccggggcagaacgaccgatcccgtggggcaaagaccccgttagctaaaccgttcgccccctacttgtagaaacatgattcaggctggttgggagtgggatcccgcataacaagcgaacctatgacactacaagaaggaattaggggttaccggcaatcacttttatgggaggagataaaatatgaatccagtcgttggtctggatattgccaaaggggaaagtcaggttcaagcttttttagataaggggaaaccttataaacatagctttaaaattattcatgacctagaaggattggatcacttccttcagtttctagtagagattgagaaacttactagagtaaaaccttcgattgtcttagagtctacgggtcactatcaaacaccgattgttcagtttttggatgagcatcagtatgtatatattgtcgttaatcctttaattgcttacagagccaaaagttcaagtttacgtaaggtcaaaacagatgccatagacgcttaccacctctgtgagctttactacaaggaagagttggaaccctataagaaacgtggaatccaattactcaacctacgccatttaactcgccaacacgaaagtttatcagggattagttctcaaacaaagctacaattccatgctattctcgatcaggtgtttccggagtaccgtggaatattcggggacttatactctaaagtttctcttcttactctgttggagtttccgacttcagaagctgttattcatgctggagaagctcaagtagcagataaaatcgcatcgttatgtatcagtcgttcagagaagtgggctagagaaaaagccagtgctctaatggcagcagcttctcgtaatccatttcaaaggaacttatatcaaagtcttatctttacactgcaaatgtctgttgagatgattcttcaataccaaaagcacctatcgaaattagaaaaacagatagatgctcttgctaaagagattgaagaatatgggattatccaaacgatccccggtattggagaaaagatcgcggcaacgattatctctgagatcggggaaatcgatcggtttaatcaccctaaaaaactagtagcattcgctggtgtagatccagaagtatttgaatcgggtaaattcaaagcgacgatcacaaagattacaaaacgaggatctagtcaattacggcacgcgctgtatatggctgttcgttgtgccattcgggactctcgtaagaagaaacaaggtgacgagattatcccccgtaacaagagattaagggagtattacgacaagaaacgaaacgaaggtaaaccttttagagtagccgtgatcgcttgtgtaaataagctgctccattggatatatgctattctaaaaaacagaaccgctttccaagatttaacctaattaaatgaaaaaaccatatacaacaaaaccttccatagaggtgttggaaggttatttggtatgtgcatttttagtatagcacgactgaaatttatattttaatgaaaaatgttgacaaactattagctg

SEQ ID NO: 5249 - DNA, 1436 bp, unidentified
  source 1..1436: mol_type = unassigned DNA; note = element_80d1deb
  misc_feature 1..2: note = core
  misc_feature 3..229: note = LE
  misc_feature 230..1420: note = CDS
  misc_feature 1421..1436: note = RE
  misc_feature 10..222: note = bridgeRNA
tccctacgttgttctgcgggacgtgggggcctttcgtatggttcatccacccaggggtgccgggtgtggttgaagaagctctgccgcttgtggctctcagtgattggccacccggtgccccactacgactcggctgccaaccaagaattgcgaatgatcgctccgtagggaatcgacagcgaggtcgtccgtcgggaggcaccagcacaacaccgcacggaggcatcacatggccacgatctgggccggaatagacgcaggtgaagtccaccaccactgcgtggccatcgacgagagcggccgccggctgctgtcccgacgtgttaccaacgacgagccagaactactcgaactcctagccgacggcctggcttcgggcgacgaggtgacctggggcatcgaccttgccgacggcggagccgccctcgccaccgcgatcctgctcaaccacggccagccggtgcactacatctccggtcgggccatcgaccgcgcctccgcgagctaccgaggcgagggcagaaccgaccccaaggacgccaccgtcatcgccgaccaggcccgcgtccgccgcgacctgcaccttgtgcgcgcgaccgacgacaccgtgaccgacctcaagatcctcaccggccgccgcatggacttggtcgccgaccgcacccgcaccgtcaaccgcctacgagcccggctcaccagcatcttccccggcctggaacgggcgttggacctgaccgacaccgggccgctcaccttaatgaccggctaccagaccccggcggccatccgccggatcggcgccgagcggctggtgacctggctacgcaaccgccacgtcgtccgcccgcaccggctcgccgagaccgccttccgcgccgcggaacagcagcacacgagcctgcccggcgaagagctgaccgccgagctggtacacacgccggcgaaggaagtgatggacctcaaccagcaggtcgccgatctcgacaagaacatcgaggcccggtttcgtgaccaccacgccttcgacgtgatcaccagcatgccaggtctgggcatcatcctcggcgccgagttcctggccgccaccggcggcgacatgacgatcctcggcagcgccgaccgcctcgccggcttcggcggcgtcgcaccagtgccccgcgactccgggaagaccagcggcaacctgcggcgcccgcggcgctacaaccgtcgtctccaacgcgtcttctacatctcggcgctgctcaacggcgggcactgcgatgagtcgcgcaggttccacgaccgcaaacgcgccgagggcaagcgccacatccagaccgtcctcgccctggcccgccgccgcgtcaacatcctgtgggcactcctacgcgacggacggtgctacgagctcaccccgcccagtgctcccgcggcttgacagaccgcatgaggaa

SEQ ID NO: 5250 - DNA, 1328 bp, unidentified
  source 1..1328: mol_type = unassigned DNA; note = element_80e43b1
  misc_feature 1..2: note = core
  misc_feature 3..68: note = LE
  misc_feature 69..1073: note = CDS
  misc_feature 1074..1328: note = RE
  misc_feature 1095..1326: note = bridgeRNA
ttaatgagatggtcactccctccttcccagtactatgctgaggacaggctttcattcggagaaccatcatggaaaacattgcgcttattggtatcgatctgggtaagaactctttccatattcattgtcaggatcatcgtgggaaggccgtttaccgtaaaaaattcacccgaccaaagctaatcgaatttctggcgacatgcccggcaacaaccatcgcgatggaagcctgtggcggttctcactttatggcacgcaagctggcagagttagggcattttccaaagctgatatcaccgcaatttgtccgcccattcgttaaaagcaacaaaaatgacttcgttgatgctgaagctatctgtgaagcagcatcacgtccatctatgcgtttcgtgcagcccagaaccgaatctcagcaggcaatgcgagctctgcatcgtgtccgtgaatccctggttcaggataaggtgaaaacaactaatcagatgcatgcttttctgctggaatttggtatcagcgttccgcgaggtgctgccgttattagtcgactgagtacccttcttgaggacagtagtttgcctctttatctcagccagttactgctgaaattacaacagcattatcactatcttgttgagcagattaaagatctggaatctcagttgaaacgaaagttggacgaagatgaggttggacagcgcttgctgagtattccctgcgttggaacgctgactgccagtactatttcaactgagattggcgacgggaagcagtacgccagcagccgtgactttgcggcggcaacagggctggtaccccgacagtacagcacgggaggtcggacgacattgttagggattagcaagcggggcaacaaaaagatccgaactttgttggttcagtgtgccagggtattcatacaaaaactggaacaccagtctggcaagttggccgactgggtcagggagttgttgtgtcggaaaagcaactttgtcgtcacctgtgctctggcaaacaagctggccagaatagcctgggcactgacggcgcgacagcaaacttacgaagcataaaggcagaaatacaccagtttaaacaatcattcatctggttttgcgaatactgatattgatgatactaacggcccaccggcctgttgaggaacctgtaaaacggaaaggctcattgaagccgtatattttctggaggttcatcaggcgcggaactcatcgaggcgcgggaataaaatcccattcagacgccggatagattcaagcaagccaacttgtcgtcaaaatcggtgttgcaaaaacgggagtgaccataga

SEQ ID NO: 5251 - DNA, 1372 bp, unidentified
  source 1..1372: mol_type = unassigned DNA; note = element_80ffafc
  misc_feature 1..3: note = core
  misc_feature 4..188: note = LE
  misc_feature 189..959: note = CDS
  misc_feature 960..1372: note = RE
  misc_feature 1110..1360: note = bridgeRNA
tgctggtgtggacggcctctcatccccacggttctatggcgctctcggcgtcacagctagatgagaggaatgtctaatgaatcttcctattcgtatcggtatggattacttccaagtcggttttccagcttcacggcgttgacgagaacgaggtcgtggttgtccgtcgccagtttcggcgagccgagatgatccgctacttcgagcggcttccgccggttctcgtcgccatcgagtcctgcggcagctcgcaccattgggcgcgcttgctgcagtcattcggtcacgaggtgaagctaatcccacctcaatatgtgaaggcttacgtgaagcgcggcaagaacgacgcggctgacgccgaggcgttgtgtgaggcggtcacccggccgagcatgcggtttgtacctgtgaagtcgaaggaacggcaagcggcctgcatgttgatgaccgtgcgggaacgcctagtcagcgtaaagtcgcagctctccaatgctttcaggagctatgcagctgagtttggcattgtcggccccgccggccggcagaacgtcgcggcactgatcaagcgggtgcttgaagacaatagcctgccggagatggcgcgggatctgttccgcctccaggcggaagagtatgctacagtcgaagctcgcttggcaaaggtcgaggccaagctgatgaagtggcaccgcgaggatgacgtcagccggcgtattgcgacgattcctggcgtcggcccgattgggtcgtccatgctaagcatgaaggctccgccgccggagacgttcagatcaggccgtgactttgcggcatggctcggactaacgcctaaggatcattcaactggcggccggcaaaagaaacggcggtattacgaaggctggagattcggtgctccgatcgactttgatcgtcggcgcgaccgcgctgctgaggcatatccgaaaggggcggcataagcctacatcctggctcgcctccctgctggaacgaaagccgccaaagctagtcgcggtggccttagccaacaagttcgcccgtatcgcctggcggttgatgatatcgggcggagtatacaaccgacccgtagccgccacgcccacctgatctgaaatcggcccgcgagcgaggttgctccgcggatagcccacgaacttgcaggacgcagtagatggaaggaccgatcggtcgatacgcgcgagcttccgaaggttacactggcatcatcaatgtcgcctatgtgcttggaacgtgcgtagcgaacaccatctcggccagcgggctttgtccgcgcaaacaggccggacatctgatagcaagcgatcaggtcaaaaatctgctaccatcctgacaagtgggggccgtccacatc

SEQ ID NO: 5252 - DNA, 1290 bp, unidentified
  source 1..1290: mol_type = unassigned DNA; note = element_8102585
  misc_feature 1..2: note = core
  misc_feature 3..201: note = LE
  misc_feature 202..1269: note = CDS
  misc_feature 1270..1290: note = RE
  misc_feature 7..241: note = bridgeRNA
ctaatgggggtgcaccgcttcagtcggggatgcggcagggtggtgcgctccagccgccggtgggtgagcactcgctctatcaggtccgagtgtgagacctaaagtcaagaccgtgcccctgccggtaggcgaggagaactgacggctggtgggatgtcgtgccactgagcactgatccattaggttgccgtgattctccttatggctgacgtggtcggtattgaaaccgatcggggaccgtgggtggcggccctgctgggtgcaggttatcaggtgtatgcgatcaacccgatgcaggtcgcccggtaccgggaacgccattccacatccggggcgaaatctgatcggggggatgcgcatgtcctagccgaaattgtccgactagaccgggctcatcatcgagtgctcacaccggattcggaactggtagaggcgattaaggtgttggctcgggtgcatcagaatctgatctggatccggcaacgccacgctaaccagctgcgctcgatgctgcgcgagttctatcccgccgccctagcggcctttgatgacctggccggacgtgacgcgttggccgtgctcgccgccgcccccacgcccgcggcgggacgagcgctgagtgtcgagacgatcactgaattgctccgccaggcggggcgtcgccggtacctcacaaccacggcggtgaaaatctaccaggctctacacgccgagtacctccaggcgctcccgcaaatcgccgacgcctatggcgcttccaccagtgctctcgtctccatcctcattgaaatgagccgccagattaccacagtggaagaccgggtggtcacacatttgagccgacaccccgaagacaaaatctatctgagtcaacccggactgggacacgtcctcgccgcccgggtcctcgccgaattcggagatgcccccggccgctataccacgagcaaggcacgccgcaactacgccgggacatctccgatcacccgcgcttcgggaaagaaaaccctcgtcttatcccgctacgtccacaataaacgcctcaccaacgccttataccagcaagctttcgccgcgctcaccggctcacccggcgcccgcgcctactacgacagcctccgtgcccgcgacatcggccaccacgacgcgctacgacgcgtgtccaaccgtctcgtgggaatcctgcacggctgcctgcgccacggcaccgtctacgacgaggccacagcctggcccccacccaaaaaagatcaacaagcgggctcttgacaacttacgaccgtgggatgt

SEQ ID NO: 5253 - DNA, 1386 bp, unidentified
  source 1..1386: mol_type = unassigned DNA; note = element_8106c5f
  misc_feature 1..2: note = core
  misc_feature 3..84: note = LE
  misc_feature 85..1119: note = CDS
  misc_feature 1120..1386: note = RE
  misc_feature 1152..1372: note = bridgeRNA
gatgaggtggatggctcccgctcacggcatctgagtgccaaattgggttgctgtcatttcaacccgagcaaaggagccacccgtatgcaaattaccaccatcggcctggatctggccaaacatgtttttcaagttcacgccgttgatgctgcgggcgtggtcgtcctgcggaaggctttgcggcgcgcccaggtgctgccgttcttcgccaagcttgcaccgtgcctgatcggcattgaagcgtgcggcacgtcacactattgggcccgtgaactgatccgcctcgggcatgaggtgcggctcatgccaccggcttacgtgaagccctatgtgaagcgcggcaagaccgacgcggccgacgcggaggcgatctgcgaggccgtgacgcggccgacaatgcgcttcgtgccggtgaagtcacgtgaccagcaggccgcgctgtcgatgcatcgcgcgcgcaacctgctggtcaagcagcgcacccaactggtgaacatgatgcgcgggctactggccgaattcggcatcgatattccgcagggtctcgggcgcgctttgctgatggcgcagagggtggtcgaaggtgcgacgccagacgtgccggaagcagcagccaagatcgttggcatgctgtcgcagcaggcgctcgacaccgatgtgcagttgcgggagattgatcgcgcgctcctcgccttgcagcggactgacgatgtggcgcggcgcctggcaacgattccaggcatcggcccggtcggtgcgacggcgctggccgcagccgtcaccgatcccggccaattccgctccggccggcagttcgcggcctggctcgggctgacaccgctgcagaactccagtggcggcaaggagcggctcggccgcatctccaaaatgggcgacaagtacctgcgcaagctccttgtgatcggcgcaacctcgctggtccggcgcgccaggcacaagcctgagaccgtggacccacgtctcaccgacctgctcgcgcgcaagcccgtgcgggtggcgacggtggccatggcaaataagatggcgaggatcgtctgggcgatcatgacgcgaggtgaggtctaccagacatcccacatgccagtgctggcggcatagactttaaaagtttagctgaggagatcagcttcaggaggttgtgagagcgacgcgatgtgatggcgaaaccggtcaggccgggaacagggacaacccagcaaacgtcaaaggcgtcatagcctgattagcagaatgggaccccgttcgcggactccatcatggccagtagtccctaccgactgcatcaacaggccgaacagaagactgcacccgacaaatacgccagatcatcaaatttaacttgcaacgcgggagccatccacagaa

SEQ ID NO: 5254 - DNA, 1421 bp, unidentified
  source 1..1421: mol_type = unassigned DNA; note = element_810c61f
  misc_feature 1..2: note = core
  misc_feature 3..79: note = LE
  misc_feature 80..1123: note = CDS
  misc_feature 1124..1421: note = RE
  misc_feature 1121..1408: note = bridgeRNA
tgttggggtggacggcccccttacggcatcgctgtgccagaatgaggtcgttgctgatctcaaacacaggagaccgtccatggacccgattattcgcattgggatagatacgtcaaagcacgtcttccagctgcacggggtgaacgctgccgaggagccggtcctgcgcaagaagctacggcgccacgacatggtggccttcttcaccaagctgccgccgacggtgatcgggatcgaagcctgcggcgggtcgcatcactgggcgcgcttgctgcaggcgctgggtcacgaggtgaagatgctcccaccccagtttgtcaagccttacgttaagcgtggcaagaacgatgccgctgatgccgaggcgctgtgtgaggcgatgagccgaccaaccatgcgcttcgtcccggtcaagtccccggaccagcaagcggccctgatgctggtgggcttacgcgatcgcctgatccgccagcgcacccagctcgccaataccattcgcggctatgcggccgagttcgggttgattgccgccacagggatctgccggatcgagccgcttttagagcggattaaggcggatgaccgtctgccgccgctggcccgtgagctcttcattatccatgccaaggaatacgcccagctgcaggcccggctggaggaagtcgaagacaagctgatggcttggcaccgtgccgatgagtgcagccgccgtctcgccaggatccccggcgtggggccgatcgtcgcctcgatgctggtgttgaaaacgccggcccctgaggcgttccgctcggctcgccactttgccgcttggctcggcctgaccccgaaggatcattccactgccggcaaggtccgtcttggcgtgatcacccgggctggggacgaggccttgcgcagcgtgctggtggtcggcgccacggcggtgatccggcagttgcggcgcagccagggagcggcggcctcgccctggctggtggcgttgctcaagcgcaagccacccaagctggccgcggtggcgctggccaacaagatcgcccggatcgcctggaaactcatggtgtcgggtgagcgctatgcagtgcaaggcattgttgttggtacgggccgggctgcttagacctttggcctgacacgatgaatgagccagatgagcggatggctcgctcccgtgcagagccgatgacggaccttgcaagttgacaaggagatggtgcgatcgatcgatccagatcccgagacactccgtagattgcagtggccccgcaaggtcgcacatctgtttggaactcgggtggcggaacccatcttggccagcgttcatgtgcgagcgcgacaacacaggccggacatatgcacgcaagcgatccgatcgaactttgtccaaatcttcttgcgagacgggggccgtccacata

SEQ ID NO: 5255 - DNA, 1384 bp, unidentified
  source 1..1384: mol_type = unassigned DNA; note = element_810e55f
  misc_feature 1: note = core
  misc_feature 2..90: note = LE
  misc_feature 91..1122: note = CDS
  misc_feature 1123..1384: note = RE
  misc_feature 1146..1376: note = bridgeRNA
caatggtatggactcctcctcccctaatcggcatctaagtgccacactggtaaacgtaatcaaccagtcaacggaaaagaggagtccaccatgaagcttagtagagttggaatagatttggcaaagaacgtttatcagttacacggagttgaccgatctggcaagacgatattgaagcgccgcctgaagcgtcatcaatggctcaaggtgttgctggatgaaacggagccaggttgtgtgattggcatggaagcctgtgccagtgcgcatcactggggtcgggagctgcagtcacgaggttacacggtcaagttgattccaccgcagttcgtgaagccgtatgtgaagagcaacaagaacgatgccagggatgctgaagcgatctgcgaggcgatgagccggccgaacatgcgcttcgtgacggtgaagacggtggagcaacaggatatccaggcgacgcaccggatccgtgaagagctcaaggttcggcgtaccgccaaggcaaaccagatccggggcttagtggccgagtacggcctggtggcgccgcagcgtttaagttcacttcgtgctgcgatcccctgttggcttgaagatgcggagaatggtctgacacattacttccgatccctgctgcagggtctgtgggacgacctgcttatcctggatgatcgcatgtgcgagatggataagaccatcaagcggctggctaaggacaatgaagactgcgtgcgtttgcagcagctgcgcggattcggcccgatgatatccacggccctggtggcgacggtgggcgatgcccggcagtaccacaagagccggcagatggctgctgccatcggcatcaccccgaggcagcatagctcgggcgacaggcatcgcctgctcggtattagtaagcgtggtgatgtttacctgcgaatgctgatgatccacggagcaagatcggtggtgactcgagccaaacataaagatgacccgctcagtcgctgggtcactgagatcgccaagcgacgacatccgaacgtagccgcggtggcattggccaacaagaatgcacgcatggcctgggccatgctgcgtcacaaaactgattacgatcctgactttgcgatgagctgagacaagacgtataaaaggaggccctccaagacgattgcttaagcaaactgcatgatggcaaacaggtcgaaccgacgtcagggaaacccgggaatgtccacgtacttgaaagtacgacaaagcgattgggactgacgcgcgaataaaccattatggcccggcatcaatcaatgtatgccaacttcagaggccggatatacgtatgcagtcgtaccatgtctgccaaatacagcttgcttgcaaatgaggaggagtccatata

SEQ ID NO: 5256 - DNA, 1385 bp, unidentified
  source 1..1385: mol_type = unassigned DNA; note = element_81190bd
  misc_feature 1..3: note = core
  misc_feature 4..93: note = LE
  misc_feature 94..864: note = CDS
  misc_feature 865..1385: note = RE
  misc_feature 1120..1372: note = bridgeRNA
tgatggggtggacggcgcccgcaacggcatcatcctcttgagacgcgtgccaagatggctgctgtcgagcactcatctgaaggagcaccgtccatggaaaagactaacaccgatctcaatactgtagccaccagcggcctcgatctggccaagcacgtcttccaggtccacgctgtcgacgctgccggccgggtcgttacgaaccgagcgcttaggcgcaaagatgtgctggcattcttcgaacgtctgccgtcatgcctgatcggcatggaagcatgcggctcggcccatcattgggctcgcgaagtggcaaagtttggccatgacgtgcggctgatgccgccagcgtatgtgaaggcctatgtgcgtcgtcagaagaacgacgccgctgatgcagctgccatctgcgaggcggtgacgcggccctccatgcgctttgtaccggtgcgatcggtcgagaaccaggctgcgctcatgcaccataaggtgcgcgaacttttggtggcacagcgcacgcaactgctcgatgcgctgcgcagccatctagccgagatcgggatcatcgccgcacagggaccgaacaatgcccgtgctctggcggttctcatgatggagggcaacgacatgatcccggcgatcgtacgctcggcgctgttgcctgttgtgcgccggttgaatgaactcgataatgagatcaggcagagcgatcaggcaattatggccctcgccaaagctgatgaaacggcacgcagtctgatgaccattccgggcatcggtcccgttaccgcctctgcgcttgtcgcaagtatccaggatatctccgcgttctcgggccgcgtgagttcgcggccttcctcgggctaacgccccggcaaagctcatcaggcggaaaggaaaggctgggacgcgtttccaagatgggaaaccgatatctgcgcaagctgctcgttgtcggcgctcatgccgttctgttccatcgcaagcgttccagcgatgcgttgagaaactgggcggatcgcctgatggaggccaaaccgttcaagcttgtcgccgtggcgaccgccaacaagctcgcccgcatcgccttcgcgctcatgcgtgatgacgcacgctatgccggtacaccggggtaacggaaaaaacggctgaggctgcggtccagaatcgagggtgacaatgacgtgatgggaacagacgaggacatatcccgaaagcctgcagcatagtcggagcttcgagctcgttctcttgatcaggccaaaggatcagcggacaccatcagggccagcggtcacagtaccgcaacaacaggccggagacatgaccgcacccgcgaccgtcccatcgctaaaacaaacccttgatcagcgggcgccgtccagaca

SEQ ID NO: 5257 - DNA, 1396 bp, unidentified
  source 1..1396: mol_type = unassigned DNA; note = element_81197b4
  misc_feature 1: note = core
  misc_feature 2..91: note = LE
  misc_feature 92..1129: note = CDS
  misc_feature 1130..1396: note = RE
  misc_feature 1163..1388: note = bridgeRNA
caatgggatggactccccctcacctgaacggcatcaacatgccagacggggattgttaaataaccagtcaacagtgagaaggagtccactcatgaagattagtcgcgtaggtatagatttggcaaagaatgtttttcaggtccacggggttgacgagcacggtgagctggtatggaagcgcagcttaaagcgggcaacctggatcggtgtgttcttcaagaccgtggagccgggttgcgaagtcgctatggaagcctgtacaggtgcgcatcattgggcaagagaactccaggccagaggctataaggtgaagctgatcccaccgcagttcgttaaaccgttcgtgaagagtcagaagaacgacgccaatgatgcagaagcgatcagtgaggccatgagccgtccggccatgcactacgtggcaattaagacagttgaacaacaagacattcaggccgtgcatcgagtgcgcagtgaactgatgagtcaccgtaatggcaaagccaatcaaattcggggattggtagccgagtatggtctggtggctccacaacagttgggtccgttacgcgcagcgatcccgtgttggctcgaagatgctgagaatggtttaacggatcgattccgtgcgttactccaagggctttgggaggatctggtcaacttagatcaacgtgtcaaagcacttgatacagaagtcgcagcgatcgcagcgacgcatccagatgccaaacggttacaacaactacgcggtgttggacccttggttgccaccgccctggtggccaagttcggcgatgccacgcacttcaaacaaggccgacaagccgcagcctcggtgggcttaacccccagacaccacggcacaggcggtaagaaccgtatattcggtatcaccaaacacggcgatccttacttacgcagtattctgatccatggtgcccgtgccgtcgttagccaagccaaacaacgcgatgaccggctcagtcgctggaccactgaacttgcccagcgcagtcatatgaacgtggctgcggtggcactggctaataaaaccgtgcgtatggcctgggctatgttacgcaacggtactgattacgatcctgagcttgccgtggctgaagtttaaccacggtcagaataggttttatagaaggagcaccttacacacgattgcacagcacactgatagatggtgaacaggtcggaccggcgtcggtaaaacccgtgaatgtccgcgtgcatcgagcacgaagaagcacttgggaactggcgcgcgaataacccatcatggcccggcatcaatggatgccaactttagaggccggatatacgtacgcagtcgtacctcatcaccattcaacagcgggctggcaaacgagggggagtccatata

SEQ ID NO: 5258 - DNA, 1472 bp, unidentified
  source 1..1472: mol_type = unassigned DNA; note = element_811e820
  misc_feature 1..2: note = core
  misc_feature 3..211: note = LE
  misc_feature 212..1222: note = CDS
  misc_feature 1223..1472: note = RE
  misc_feature 13..193: note = bridgeRNA
cttgtatgtaatagacatatggtggttagctaccatcacatgaagcggagtgagcttgtcccctcccggaatggcgagaaccttgattggcagaaaaagccctccgcttcacctttcacgccagcattaacattcaacggttgccaggagcgatgactctgcatgtacgagggtaataggcgtgatggttcagtgaaaggagaaaacatctatgtttcagttcggtatcgatgtcagcaagaaaaccctggatttatgtctgctgcgggaaggtgtcaaaggcaaggtaaaaacccgcaagcttaaaaacgatttcaatgcagccgatgccgtgatcggctggctcagtaaacagcactgtgaacctgccaatgtccatatcatcatggaggccaccggggtttatcatgaatcgcttgcatacggcctctacaaggccggagctaaagtttcgctcgccaacccacatcgcagcagagaatttgcgcgtggcatggacattctgacaaaaaacgaccaggttgatgcttatatgctcgcctgctacggtgcacttaaggtgccggaaccgtgggtccccccgcctgagaatgtccgccatctcagcgcacttctccgccgacgtgatgcacctgtcaccgacagcacccgcgaaaaaaacaggctggaaaaatgtcgggcaacggacacacctcttgctgtcactgaatccatcgaaaatgtgcttcgtaacctgagcgcagagcctgagcatctggacgctctgatcctgacccacctcgaccagcatcctgaattaaaaaaggattttgacctgctgacatcaataaaatccgtgggttatcagttaggtctgaatatgctggttatcctgcggggtcatcatttcgatacagcagagcaggttgctgcatttctgggcgtggtccgtgttgaaaaatactccggcacatcggtcagagggaaaccgaaattatccaaaatcggcccgccggaaatccgcgcgaaactgtatctggcttcgttgtgtggcctgagatttaacccggtgatgaaagcgatgtatgagcggttatgcctgcgtggcaaggcaaaaatgtgtgccattggcgcactgatgcggaaactcgtccactggtgctatggcgttctgaaaacacaaaagccgttcgatgctgaatacctgtcttcagatgcgcgtagcgcatgtaaggcggcataacgttgttttatatgactctgtagttaacccgccgaagcccggcgcaggccggtggaggactgtcagagagtggtatccccctcccgccctgaacagccatgcgggcttatagcgatgattatgctgatataagcccttttaaccctgttagcgcggcgtagccgcgatgtatcgggaacttagtgctgacagcgcttagggggctgtatccctaaaattaaagcgattttttcttgacgaaacacagtag

SEQ ID NO: 5259 - DNA, 1328 bp, unidentified
  source 1..1328: mol_type = unassigned DNA; note = element_812f805
  misc_feature 1: note = core
  misc_feature 2..70: note = LE
  misc_feature 71..1042: note = CDS
  misc_feature 1043..1328: note = RE
  misc_feature 1110..1316: note = bridgeRNA
ctatgtatggactcctccaacccagttgcctaggttggaaggtcgaccaaaaccagaacggagtccatacatgcatcattcaacaacagttggggtcgatcttgcaaagaacgtcatccaggtctcggtagtttctcctcgaggcaaagaagtccttaatcgatcttttacccgccgcaagttcgcggagttcctggtcaaacagaagtcatcgcttgtcgcttttgagtcgtgcgcaagcgcgcactactgggcgcgtgctgcgaagcggcacgggcatgaagcgcgcatcatcccggccaaggccgttgcgccgttccgccagggtcacaagaccgacagcaacgacgcgctggccgtggcggaagctgcgcgtcgaccgaacatcaaagatgcgccgatgaagacggccgagcagcaaggtctgcaggcagttcagcgctccagggagttgctgatcggtgagtgcacggcgttatcgaaccacctgcgtggcatcctgctggagttcggcgtggcgataccacagggctttgcctcgttgttgagagcgttgccagaaatcctcgaggatggtgacaacgagctgccggacctgtaccgaccaacgttacaccgcatgcatcagcggctgctcgagctccgggaagacatcgagtcgatgacccgtgagatcgatggcctggtaaagcaacgtccagtctgcaagcgcctcacggcgatcgaaggcatcggcccgatcggtgcgttgtcgctctatgctgtgatgggctccggcaaggccttcaccaagagccgtgagttctccgcctacctggggctgacaccgcgccagtacagtagcggcggcaagaccaacatcgtcgggatcagcaagaaggtcggtaatcgcagactgcgatcgatactgatccagggcgcgctggcctacgtctaccgcatgaaggagccgcgatcgttgaaagatcgctggctcagagacctcatcgagcgagcgggactgcgccgtgcagcggtcgcactcgcgaacaagaacgtctgaacggcctgggcaatggtgacccagggaacggaatataaacgtcgagagcacctggagatggctgcctagaacgtcctgcaaacttaaaacctcgtatcagataaagatatctgctccggtcaaacctgcaccgctttgaggccctagagcccactgacccttagaggaaccggagtgcgcatacatagagggccaggagatagcgtctccaaccaaaggccgaatatacaaacgcgtctgaactctgatcgaagaaattgtttgctagactggaggagtccatata

SEQ ID NO: 5260 - DNA, 1583 bp, unidentified
  source 1..1583: mol_type = unassigned DNA; note = element_813acee
  misc_feature 1: note = core
  misc_feature 2..135: note = LE
  misc_feature 136..1245: note = CDS
  misc_feature 1246..1583: note = RE
  misc_feature 1265..1556: note = bridgeRNA
agacgatatgagaaagccatttgggtcgcctcccccgcggcgcagcttctttccgcgggctcgggatgccacaatgggctttgagtatcggcccgtgcggtagcccttaccgcacctgcggggaggaggcttcccatgccccatgttacctccatcggtctggacttccacgcgcgatcggtcgccgccgcggcgttcaaccccttcaccggcgaggtggtgcaccgtgacttcgggacggacgccgccgagatcgcggagtgggccctcgggttcgaggagcccagggcctgctacgagagcggccccaccggcttccacatggcgcgcgagctgcgcgcgctcggcctcgactgcgccgtggccgccgtctccaagatgcagaggccggcggcggacgcgcgccgcaagaacgaccggcgcgacgccgagttcatcgcccgcatgctcgccacccacaacatcgtggaggtcccgctgcccgatgcggccgtcgaggccgcccgggacctcgaccgcgccctcgacgacgccacggcggagtaccgccgcgccaggcagcgactcaacatgttcctgatcaggctgggccacgtctgggacgagcgcaacgccgacgggacgaggaagggatcctggacgcgcgcccactggaggtggatatccgggatcaggctcgaggggccccagcgcgacgtgctcgagtactacgtcacggccgcgaggtgcgcggagtcggaccgccggcagctcgagaagaaggtgctcgccctcgccaggaccgaccggtggcgcccggccgtcgaggcgctctcctgcatcaagggaatcgacacactgacggccttcaggctcgcagccgaggcgggctccttcacgaggttccggacggccccggccttcgcgagctggtgcgggctgatcccgtcggagcgctcgagcggcgagaccgagcggcgcggcgggataaccaagacgggcaaccggctcgccaggacggcactggtggagtcggcgtggcactacctgacgtgcacgccccgcccgaaggccccggcgcccggcgcggacgtccccgcggcgatccgggcgcgcgccgacgactgcaccgccaggctctgccgccgccgcgaggcgctggcggcggcgggcaagagcccgtgcaaggcaaacgccgccgtcgcgcgcgagctcgcctgctgggtctgggagatcgggtgccgggcggaggggaccctcggctgaccccgtcggacaacaagcctcccgctgggagggcccgcgcctcgacgcatcgccggcgcgcgttcacgaaccctttttgggcagcccaagggccgcgcccgtgaacaagactggtttcggacgagcgcgccggacggagaatcgaaatgcggtggggtgcgcggacataccgggctgaccgccggcagcgcgcccgcaagagcccgcggatattagcttgccaggcaagcgtcgactaaacgtgcagcgtgcgcgggccctcccgacgggaaacgaaaaagcccggtttaaaaccgggctcgaacaaacacgcctattgacaatggctttctcatatt

SEQ ID NO: 5261 - DNA, 1208 bp, unidentified
  source 1..1208: mol_type = unassigned DNA; note = element_81455bd
  misc_feature 1..2: note = core
  misc_feature 3..221: note = LE
  misc_feature 222..1193: note = CDS
  misc_feature 1194..1208: note = RE
  misc_feature 6..200: note = bridgeRNA
cttgtatctcgactacagcctcacgagaggcgatagttcccgactgatcatcgggggagccatgcaagtcgagcccaccctaaggcctagagcctgtttcgtagattgcgctgcatggttccacactcatcctgataagtccgaacggtatccagagcttcgagctcgcatcaacaaggttggacggatgcagtgacgatcagacagaagaggagaagaccatgtctgtagtcggaatcgacatcgccaaatactcattcgacattgccacggtgcaggcaaacggcaagcaccgcaccaagggcaagctcgccaatgatccggcagggttcgaggccctgcagcagtggctgctcaaacacgccgatccacaggcctggatcgtgatggaagcgaccggtgtgtaccacgaggcgctagccgagtggctttacgagagaaactaccgcgtcagcgtgctcaatcctgcgcagattgcctactacgcgcgcagccagttacagcgggtgaagaccgacaaggtcgatgcgaagctgattgccagctacggcgacaagcatcaggacgagctgcgtatctggaagcctgatccgccgtcgcttcgccgcctcaaggccctggtacgtcgcttgaaggatcttcaggagctcgagcaaatggagcagaaccgcctggatgtcacgagcgatgcacgagtagtggagtcaatcagatcggtgcttgagcacacccgccagcagatcaaagaaacgctcgaggcgatcaagaaacacttcgacgacaacgacgacctcaggggcaagcgagacctgttgatgagcatcgacggcgtggcggacaagacggcagcgctgctgctggccgaactgggcgatctggacagttttgatggcagccgagctgtaacggcttatgcaggactcaatcccaggcttcaagagtccgggaaattcaaaggccaaacacggatatctcgcaccggctcggccaccttgcgggcggggctgtacatgcctggcgtggtgtccatcacgcacaacacggcgatacgggcaatggccgaacgcatgagggccaaaggcaaaaccggcaaacagatcgtctgcgcggcgatgcgcaagttgctgtgcatcgcctatggcgtgctgaaatcggggatgccttttgatgccgaattagcgcttgcgaggtaatgggcaagacggtat

SEQ ID NO: 5262 - DNA, 1395 bp, unidentified
  source 1..1395: mol_type = unassigned DNA; note = element_814896a
  misc_feature 1: note = core
  misc_feature 2..87: note = LE
  misc_feature 88..1116: note = CDS
  misc_feature 1117..1395: note = RE
  misc_feature 1162..1390: note = bridgeRNA
taatggaatggtcgcccctactcaaaacggcatctatgtgccaaagtgtggagagtgataattcacacagcaatagaggcgaccactatgaatattagtacagttggcattgatctagcgaaaaacgttttccaagttcatggagctaacgaacgaggcaagaaattgtggaacaagcaattacaacgcaaacaagtgttaaaattcttcactaggatacctccatgtttgattggtatggaagcttgcggtagtgcacatttttgggcaagaaagttagaagagttagggcataccgttaaactaatggctccgcaatttgtaaaaccgtacgttaaaacaaataaaaacgatgcggcggatgcagaagctatttgcgaagcagtaacaaggccttctatgcggtttgtaccgatcaagaacggcgagcaacaagcaattctatcaatacatcgtgcacgccaagggtttgtaaaagcaaggacggcacaagcaaatcaaataagaggtttgctcatggaatatggcattataatcccacaaggtatcgttaacataaacaaaaacacaccggaaatactggaggatgccgaaaatgaattaccgggcatatttcgtcaactgttgcaacggctgactagccatttaaaggagcttaatctccaagtaattgcgttagattcacaaattcaagcctatcataaggcaaacgaagcaagtaaaaaattagcagaaatacccggtattggaccaattaccgcaagtgcactgacagcttctattggagatgcaaaatgtttcaagaatggccgtcaattggccgcatggttgggactcgttccgcgacaacattcaagcggaggaaaaccttcactgggagggataagtaaacgaggcgattcttatctgagaacattacttattcatggagctaggtctgtagttcgcgtagctacaagccaaaagacggcaacacactgctgggctataaacctagtagaacgacgtaataagaatgttgcagctgtagctttagccaataaaaatgctcgaattgtatgggcattattggcacaaaaccgtgagtatcaacacaactttaactcagtagcgtaaaagcatattttaaaaggagattagcacttcaatgggaggaactcccaaccgattgttcaggcaatcatgacatgatggcaagacaggtcagaccgtgctaggtcaaaccttattcacacagggagcgaaaagctcgacagactgttcaggagcctaccagcatattccatcagggacatgggttatataacccttaattaaagtccggatctatggctgcaatcttaaccttcttaaaatcatgaaatgaaagcttggcaaatggggggcgaccatcta

SEQ ID NO: 5263 - DNA, 1434 bp, unidentified
  source 1..1434: mol_type = unassigned DNA; note = element_8156bb2
  misc_feature 1: note = core
  misc_feature 2..70: note = LE
  misc_feature 71..892: note = CDS
  misc_feature 893..1434: note = RE
  misc_feature 1212..1428: note = bridgeRNA
taatgggatggtccgccgcctttacccagccgacagctgggttataaggaacgtacggaggaggcatcccatggaattacacacgatcggcatcgatcttggcaagacagtctttcatctggttgggctcaacctgcgtggtgaggtcctcgtgcgcaagaaggtgtcacgcaagcaactgctgcagttcaccgcgaacctgcacgtcgacttgattggcatggaagcctgcggcggcgcgcatttccttggccgggcgctgcgcgagcagggccacgaagtgcgactgatgccggctcagtatgtgaagccgtatgtgaagacgaacaagaacgactacatcgatgcagaggcgatcgcagaggccgtggcaagaccaacgatgcgcttcgtaccgatcaagaccgatgaccagttggatatgcaatcgctgcaccgggtgcgtgagtgctgggtcatgcgccgcacggccatcgtcaaccagattcgtggcttgctgttcgaacgtggcatcactctgcggaagggacggcggcatgtcgatggagctttgcctgacatattggaagatgccgattcgaagctatccggcgcattgcgtgtgttgctcgcgcaactgaagctggaactcgatcagatggcgatacggatcgacgaggccgatgctgtactcaataagaccgctcatgagaatgaagcctgccaacggcttgtggcgatacccggcatcggtccgattaccgcaaccgcactgatcgcggccatcggcaacggagcggccttccgcaaggggcgggagttcgcagcctggatgggggtggttccacgggagcactcaaccggcggcaagcagaagctgcttgggatcagcaacatgggaactcctacttgagaaggctgttcatacaaggtgctcgcgctgtcttgcaacatcgtacaaagcaggcgcccggtttgagcgagtggttggcaaaacttgcgagtcgcacccaccacaatgttgttgccgtggcgttagccaacaaactggcccgaatcgcctgggcagtgctcgcaaaagaggagcggtaccagcctctggcgttgatcagcttggagacagcttgactggcctgcagatgacgcctggctgaggccaggcttggaaatcgcatacgcgattcccacatctacagcccagcggctactactgcggaggatttgattttctaccaggtctgctggcgaacaatgagatggctcaacggtcgaacccggcgctctcgaaacctgtggagtaaaaaagtcttcacaagactgcctacttaatgaggaacagagcgcggcgcattccatcatggcccggaggaaccctctccaacaaaggccgtatacattgcgcagaccaacctgccactttcacttttcgcttgcggaacggcggcggaccataca

SEQ ID NO: 5264 - DNA, 1828 bp, unidentified
  source 1..1828: mol_type = unassigned DNA; note = element_815c20d
  misc_feature 1..3: note = core
  misc_feature 4..237: note = LE
  misc_feature 238..1452: note = CDS
  misc_feature 1453..1828: note = RE
cttatatgttactatttttctagaccctctcgatcaagggtctgcagggatcacccctgcacgatatcccctgccggggaaaggcttgtgtctccatacggctcgaccggtaaacaaagatcgtccttccctggcagctttcctgggccaatcgacgattggagggacgtgcttcgagcacccgttatataaggacccgatatccccaggagttgctctagaaaaggaagtgtaaggatgtggtacgttggtttggattgggccgacacccatcatgacgtagaggtgctggatgaggcgggcaagcgcgtgggagtacggcgctttgcccacagccacgcaggcttgcacgagctgcaagcgtttctgctcggcatcgcggcttcgcccgaggaactgatgtgcattgtcgaaacgacccacggcttgctcatcagcttcctgctggaagcaggcatcccggtgtatccggtgaaccccaagacggccaatcagctgcgcaaagccgccggagccaagaccgatcaaattgacgcccatttgttggccaaactgggtcgcttggacctggcggaactgcgccgcttggcaccggatagcgagaccgtgcaggagttgaaaacgctcacccgcgatcaggatgccttgattcagacccagacgcgtttggtgaaccagttgacggcctgcctcaaggactactatcctgctgccctgaacctgtttgccaagttgcagcagcgctccacgttggtgtttttgcaggcgtatcccacccctcaagccgcgcaggcggcttcggtggaagagctcacggccaccttgcgagcaggcaagcataccaacccgaccaaggctgccccgaagatctttgaggagctgcatcgtccccagttggtggcaagcgaggtcatcgtgcgcgccaagtcgcgcctgatgctgtctctggtcaagcaactgctggtggtgatccaggaaattgccagctatgacaaggcgatcagccccctttttttgacccatgacgatcatgagatctggaggtcgctgcctggagcgggcaagcgcctggctccccgtctgctggccgaatggggcgaggatcgcagccgctatgccgatgccagcagtgtccagaccttggccggaacggcgcccgtgccgtttgaaagcggcaattacgccaaagcgcacaaacgctttgcgtgcgtgaagccgctgcgcaacgccctgcaccagttcgcctggcaatcgacgcggcaagaagcctgggcgctggcctattaccagcgcaaacgggcagaaggcaagacccacagtatggcgatccgtgccctggccaacgtctgggtgcgcatcatctatcgcatgtgggtgaacaagaccagctatcagaccgcgacctttgaagcggcgaggcttgcgcatgcgccccggccacacgccgcctgagtccaagcctccccactccatcacgtcccgttgggcgcgctcagcgctgcgaaggacttcgcgagtgcggagagcacatgctccaacggagtcgcccaagcggttcccgcgtcgcccctctgccgaacgtgactcctggccctcgcctgctccaacgtctgccgcagcccgccaccgcgttcccgactcccggtgtgggttgcttccaccagaccacgccgagtcaaggccgcgcaggaggtgcggaggtcgggtgcgggcgcgctcgtcttggccttgaccggtgtggtagacttgcacccccacatgggaggcagcttcacccacgttcaacttgcttcttcctttcccgtttgtgcctcttgacatagagggt

SEQ ID NO: 5265 - DNA, 1564 bp, unidentified
  source 1..1564: mol_type = unassigned DNA; note = element_815dd5f
  misc_feature 1..2: note = core
  misc_feature 3..269: note = LE
  misc_feature 270..1436: note = CDS
  misc_feature 1437..1564: note = RE
  misc_feature 1..246: note = bridgeRNA
gtatgatgtttatagaagcttaaacatcacatttcctttcttttaatctggtatcgtggttcaatacattcagatactgtggacttttgatgtaaccttgtagccttgactactctataggagtgtattgccgctacctttatctgaattgtttatgtgctggatgttgccgggagtatttctcctgagtacttatttcaatcaagtctacgatgataatcgctggtggatatcacggtatcagactttagaaagggaggtactgcctcatgatttacgttggtattgacattgccaaacttaaccattttgcctctgccatttcttctgatggcgaaatactcatggaaccgtttcaattctctaatgacgctgatggcttccatatgttggtatccagactccattccctcgaatctgacaacatcatcatcgctcttgaatctacggcacactatggcgacaaccttgtacgataccttgttgccagttcctttaatgtgtgtgtacttaaccccatcaagacgtcttccatgcgtaaaaacaatattcgcaaaacgaagacagataaggtcgacacttacatcattgctaaaactcttatgatgcaggattcctacaggtttgtcactttttatgaccttgacctgatggatctcaaacagcttggacgcttccgtcagaaagccattaagcagcggacacgtttgaagattcagctgacttcttatgtggatcaggcatttcctgaactgcagtatttcttcaaatcaggcctgcaccataaggctgtctatgcccttttgaaagaggcgccttcgcctcaggacattgcttccatgcacatgactcatctaagccatctccttacgaccgcctcacatggtcacttcaaaaaggaacaggcaaacgaattaagagttctcgcacggaagtctgtcggtgctaacgacagtgctttatctattcagatcactcaaaccattgcccagattgagttactggatagccaattaaaaaaggttgaaaccgaaatgactgagatcatgaagtttcacgactctgtcatcatgacgatcccgggtatcggttatatcaacggcgggatcatccttggggaaatcggtgatattcaccggttttccacccccagtaagctgctggcatttgccggtctggatccatctgtataccagtccggaaattttcaggccaagcggacacggatgtcgaaacgcggctcccgtgttctcagatatgctctgatcaacgcagctcacaatgtagtaaaaaacaatgccacctttaaagcttactatgataagaagatggcagagggccggactcactacaatgcccttggacattgtgccggcaaacttgtcagagtcatctggaagatgctgactgacgaagtagaatttaacctcgattaagaggtctgtataccaatatcaattgatttttttaagcaccctaagggagctctattaaagttacccttttttaccatcgatacctaaaagaaattttttgctaatttatacttgacttttcatagctg

SEQ ID NO: 5266 - DNA, 1559 bp, unidentified
  source 1..1559: mol_type = unassigned DNA; note = element_816086d
  misc_feature 1..2: note = core
  misc_feature 3..278: note = LE
  misc_feature 279..1499: note = CDS
  misc_feature 1500..1559: note = RE
ctggtattatcctcacctgatataccggtgaggaaatttctgataaacttaacctatatttccgtagggggacatcttgcgatcctccctatggcggcattagccgaccattgaaaaaagactgttgcttcctgcgatctgactgggaatgttgattaaggatgctatggggaccggttgacatcggcctaccattcatatcccaggatacatttggtcagacgctgcaggaacaccctccctactgaaaaaaacaaccacctgacgaaaggacacccatgaactaccttggcatcgacgtttcaaaagcaacttcccgttatgtccttctagacaacgacggagaaaaggccgcaaaaccattcacgctcgacaacaaccaacaggcctttgctaaattgctggaacgaatcaaagaactcaacctccaacccgacggacttctcatcggcattgaagccaccggcatctggtgggagaacctttactgttttatgaccgaacaaaagttcaaagtcatcgttcttaatccacaccagaccaacaaattccgcgaagctctgcgccttaaggccaagaccgacgacatcgacgcctatgtcatcgccgggttgttgcgctccggcgaatatgccgccagctacatccccgaggaaaccatccaggtcctgcgcgagatcgtcaagctcaggcaccaactcgtgaccaatcgccagagctttgaacggcagacccacgcgttattaggcctgcttttcccggaatacgaaaaaacggccatcaaaaacccgttctccatcgcatcgctggccatccttaaggcttatccgaccgccaaacatctggccgaagccaaaacaaagaacatcgaaaaaatcgttcgtcacattcaaggcaataattttaatatcgctgaaatccaaacgctcatcgcaaccgctaaaaattcaatatattccggccgcgctaaagacgcccgcggcatgaatctcaatatccttctcactcacgtcgaaacgctgcatcagtcgatcgcccaactcgaccaaagaatcgacgacatcttgtcgccgcaaaactccgatgacgcccatagcttcccaggcgccaatctgctatccatccccggcgttggccccaaaaccctggccgccatcctctcggtcgttggcgccgatggcagtgcttatccggacggcaaaagtttcatcggttacatcgggttcttcccgaaaatctacgagtccggcgaaactcgacgcgacaacatcatctccaaacgcggccccaactacatccgccgcgccctttacatcgccgctgtcgcttgcttaaaacataatccccagctaaaagctctttacgatcgcaaaatctctcaaggcaaaaaaccaaaacaagctcttatctgcgtcgctaaaaaactggcccacctttgcctgagcatgctgcattccggtgaatcttacaacccgtcacgcgtctttatgccggcctgagaaagatcgttttactgctctttgacaacctaatttttaccttgactctttataggatgt

SEQ ID NO: 5267 - DNA, 1333 bp, unidentified
  source 1..1333: mol_type = unassigned DNA; note = element_8161295
  misc_feature 1..2: note = core
  misc_feature 3..80: note = LE
  misc_feature 81..1118: note = CDS
  misc_feature 1119..1333: note = RE
  misc_feature 1093..1318: note = bridgeRNA
agataattggactccctcactccctacagagtgaggtaatataaaagttaccacacaaatatattataaagagtcctgttatgtatcgtactagagttggcgttgatttagcaaaaaaagttattcaagtttgtatctatagaaacaaaaaagtgcaatcgaatatcgaaatgacaccggatgagtttctttcttggctggttaatcaaaaacctctgacgataatatttgaagcttgtagtatgtcgaattactggaagcaaaaagccactgaagctgggcatgaagccttattaatctcagccaaacttgtgtccgttgttcgtcaaaatcaaaagaccgataaaaatgatgccctggcaattgttcaagccacttttttacctgatgtgacctttattggcggtaaaacgattgaacaacagcaaatacaaacgattaagcgtttgagagagttagccgtaaagcaccaaggtgcttgtcaaaaacaacttgtttctttgttgttggaattgaatattcgtatcggtaatcgtcaaggcggcatcctttgtgctattgatgctgtcttagaggacgcaaccaatggcttgtcagatgaatgccgaagagccatctatatcggcaaaggtcagttagctgtagcgattgaagccgttgagcattatggtaagtgtttagagaaagtcgtttcaataaataaggaatgcaaaaagctacttagacttgaaggtgtaggtacgacgaatgcaattaacttatatcttgcactgggctgctgggatattggtgtattcagtaaaggaaaagatgcgtctgcctgtataggattaacaccgatacagcattcatctggtggtttggtaaaactcggttcaattggcaagcattgtaaaaatagtatactgagaagtcagcttatttgtggtgcgatggctgttgtcaggcaattggccacacgagaggcaaaaacgaaaaaagatgtttggttaaaaggtttaatcgaacgtcgaggtaaaaagtgcgcggctgtagcgcttgctaataaaacggttagaaccgcgtttgcgatgctcacacaaggtacagaatacaaagcagagttgttaactgcttaaacaagtttaacaattaaaatgcaaaacgaagataaaaatcagcttgtttagtcagtagccaactgagagcttagcgctcgctttacagatttgacaacaagttcgcgtaaatatcaaagagcctgagatagcttctcaatatagagctcgtacataagtacgcatttatttctttgtgttatgattttgattgttgacaagggggagtccacata

SEQ ID NO: 5268 - DNA, 1354 bp, unidentified
  source 1..1354: mol_type = unassigned DNA; note = element_8162e68
  misc_feature 1: note = core
  misc_feature 2..74: note = LE
  misc_feature 75..1100: note = CDS
  misc_feature 1101..1354: note = RE
  misc_feature 1122..1351: note = bridgeRNA
taatgagatggtcacccccggcaccttgtgagggctacgctttcacagggtgttttatttcggagaccttaatcatgagcgagttagcattagtcggtatcgatctcggcaaaaatacattccacctgcacggtcaggacaagccagggcgagagctgtttcacaagaaactctctcgccagcagatgatgaagtttttttgcaatctccctgcatgcaccgtagttatggaggcttgcgctggctcgcattttgtggctagagagctgatggcgatggggcataaggccaagctgatttcgccgcagttcgtccgtccatttgtcaaaagcaacaagaacgactttgtagatgctgaggcgatctgcgaggctgccgcacgtccgacaatgcgtttcgtcacacccaagacagaggttcagcaactgctttcaatgatgcatcgcatgcgggaatctctggtgcacgatcgcactaaagtggtcaatcagatgcatggctttctgcttgaattcgggattagcctgccgaaaggcccaacaatgatgaagcgtttggcgagtattctgagcgagcatgaactgccgattcgactgacggtgttgctacagcgattgcataagcacttcagttatctggatgagcagatcaaggaaatggataaagagcttatcggccaacttgccgacgatgatcttggcagtcgcttgctgagcataccgtgtgtcggcccgatcaccgccagcctgctggctgccgaaatgggggatggcaaacaatacggatgtagccgtgatttcgccgcgtccgtagggctggtgccccggcagcacagcacgggcggcaaggcgactctgctgggaatcagcaaacgaggcgataagaacctcagaagattgttggtgcagtgcgccagggtttacatgcttaggctgaaatatcagcacggcgctctggccgattgggtgcgctcaatgctctgtcgtcgccactcgaacgtcgtggcctgcgctttggccaacaagctggcacgaatcgcatgggcgatagcggctcaccatacgcaatttgaaagcgggccagaggctttagctgcctgaagctgatgttgtgctgtgctaagaatcacccacctaggttttgcgatgactgaacaatcgatgacgtgaacggcccaccggcctggcaaagaacctgtgtcgaaaatcggcttttgaagccggtacacttttaaggattgccaggcgcgactctcattgtggcgcggagcgtgctccaaccagacgccggatagatttaggcaagccaactaaccatcactgatcagcattgcaaaaaaaggggtgaccataga

SEQ ID NO: 5269 - DNA, 1433 bp, unidentified
  source 1..1433: mol_type = unassigned DNA; note = element_8163acf
  misc_feature 1: note = core
  misc_feature 2..135: note = LE
  misc_feature 136..1155: note = CDS
  misc_feature 1156..1433: note = RE
  misc_feature 1194..1433: note = bridgeRNA
gaatggaatgagcgcctctcacccgtgagaggtaggagttgacggcagaaaggtgggccctcacggggcgacggcgtcaaagtgcccaaaacggaagatcatagagattttccagagccaagccggagaaccctcatgaagcttatgcccgttgggatcgacattgcaaagaacgtcatgcagatgcactacgtggatgaagggaccggggaggttgtaaacaagccgatcaaacgtgcgcagttcctcgagtatttcgcgaatcgcgcgccgtgcctgatcgggatggaggcttgcggcggtgcgcatcactgggcacggcaactcacgaagatgggccatcaggtgaagctgatgcccgcggagttcgtgaaagcgttcaacattcgcaataagaacgatgcggcggacgcgcgggcgatctggctagcggtgcagcaaccaagcaagcccgtcgcggtaaagacagagatgcagcaggcgatgctggcgctccaccggacgcgagaacgaatggtggcgtttcgcacaatgcagatcaacggcctgcgcggaatgctgaccgaatacggcgaagtgatgggcaagggccgggccgcgataacgaaggcaataccggaagtacttgcacgggtcgcagatcggttgcccgcggtgctcatcgataccttgcgcgagcagtggaaccgggtcgcggagttggacgaacagattgcccgtatcgagcggcgaatgcgggaatggaagaaagacgatcgcgcggtgaaggcgatcagcgagattccgggcgtgggattgctgacggcgacggcggcagtcgcgatgatgggcgacgtgaaggcatttagatccggtcgcgagttcgctgcgtgggtcgggttggtgccgaagcaaaccgggtcgggcggcaaggtaaacctgcacgggatcagtaagctcggcgatacatatctgcgcacgctgctgattcacggtgcgcgcagcgtgttaacgaatgcaaaggagcccggcccgtggatcgagcaaatgaagaagcggcgaccgttgaacgtggtgattgtcgcgttggccaacaagatggcgcgaacgatctgggcagtactggctcacgatcgaccgtatcagaaaggatacgtgagcgcgaaaccggcatgaccggttagcccggcacagaaggtaacgtttaacacagggtgaacgctgaaggttgcgcgggcaacgtatatgatgacaagacaggtcggaccgggacttgctaaacctggatttggggcagagcttcgagctcgccggaggaatgaggtgcgagtcagcggatttcatagggggccgcagcggcaacatcggctgcaataagcccggatatagagctgcaacccatcctgtcaacgttggaacatgcgaatcttgtgcaaatgggaggcgctcatata

SEQ ID NO: 5270 - DNA, 1278 bp, unidentified
  source 1..1278: mol_type = unassigned DNA; note = element_816a058
  misc_feature 1..2: note = core
  misc_feature 3..195: note = LE
  misc_feature 196..1176: note = CDS
  misc_feature 1177..1278: note = RE
  misc_feature 26..201: note = bridgeRNA
cttgtattatccttcctgagcagagagaactggccagttctcactgccatgcagtccgcatgccgaacccggcctcaggcccacagcctgtttcgtagatctatgcagcggactgcccttctccacaggtgacaaaccggacagtatcatggaccggttttcccggtaatccgcattcacaaggttggtctcactatggaacaggaactgcattttattggtatcgatgtctctaaagcgaagctggatgttgatgtactgcggcccgatggccgtcaccgcagtaaaaagtttgccaataccccgaagggccacgatgagctggtccgctggctgaacagccatcaggctgcgcctgcacatatctgtatggaagccaccagtacgtacatggaagacgccgccgcgcatctcagcgatgcggggttcacggtgtcggtcatcaatcccgcccggggtaaagccttcgcacagagcgagggactgcgcagcaaaacggacgccgtcgacgcccggatgctggcagagttctgccgccagaagcggcctgctgcatggcaggtacctcatccggttgaacgggcgctgcgggcactggtgctgcgccatcagtcgctgacggacatgcacacccaggagcttaaccggctggagacagcgcgggacgttcagatgccaagtattgacgcgcatcttctgtggcctgatgccgaactgaaacgtctggaaaaacagataaaggacctgacggatgatgacccggatatgaagcaccgcaggaagctgctggaaagtatcccgggtatcggggaaaagacgtcagcggtgctgctggcgtacatcggcctggaaaaccggttcggcggagcaagacagttcgcggcctttgcgggactgacgccccgccatcatgaatcagggagcagcgtgcgcggcgcaggccggatgagtaaggcgggccatgtgtcgcttcgcagggcgctgtacatgccggcgatggtggcagtaagcaaaacgacctgggggcgggcgttccgtgaccgtctggcagctaacggcaagcggggaaaagtcatcatcggggcgatgatgcgcaaactggcgcaggtggcctacggtgtgctgaaatcgggcgagccgttcgacacgtccaggcatgcaccggtagcggcttaaccgggccgtgaaaggaaaaaacagcgcctgacggcgctgtggttgtcatgcctgtaatccggaaaaccggaagctaaaaaaacttgcaggccataacagtat

SEQ ID NO: 5271 - DNA, 1387 bp, unidentified
  source 1..1387: mol_type = unassigned DNA; note = element_8172a43
  misc_feature 1: note = core
  misc_feature 2..88: note = LE
  misc_feature 89..1129: note = CDS
  misc_feature 1130..1387: note = RE
  misc_feature 1161..1382: note = bridgeRNA
caatgggatggactcctcctcaccttgtcggcatcgatgtgccaaactgagaatgtagttttcagttaacgataaagaggagtccgagatgaagattaatcgagttggtgttgatttggcaaagaatgttttccagttacatggtgttgaccgcagaggcaaagcggtctggaagcgtaaattatccagaggtaaatggttaagtgttttatttgaaactattaaacccggaacagagattggcatggaagcctgcgccggggcacatcactgggccaggctgctcacgcatcggggctatgcggttaaaatcattccaccgcaatttgttaagccatttgtgaaaagtaacaagaacgatgccaatgatgcacaggcgatctgtgaagcgatgggaagacctaatatgcacccggttcgagtgaaaacagttgcgcaacaggatatccaggccatccatcgtgtccgagaggagataaagggtcatcgcatagccaaggccaatcaaatacggggcctggtcgccgaaaacgggttagtggcaccgcaacagttatcgtcattgcgcagagcgatcccggagtggctcgaagatgcggacaatggcctgaccctgttgttcaggcaactactgcaaggactatggggagatttatacgcactggatcagcggatggtcgagttggataaacagataagaatcattgcacaagaaaatccgaccgctaaacggctacaacagttaagaggcgttggaccgttgattgcgactgccctggtggcgacggtgggtgatgggaagcagtatcgtaaaggcagggatatggctgccgctattggcttaaccccaaggcaacacagttctggtgggaaagacagactgctcgggattagcaaacgaggtgatgcatatctgcgatgtttactggttcacggagcccgttctgcagtgcgcacggccaaagataaagaggaccgtttaagtcgctggatcatcagcctgcaatccaggcggcactcaaatgtggttgccgtcgcgctagccaacaagatggcacggatggcctgggtgatgatgaccagtgatgttgattatgatcccgatttagcagcagcatcagtgaactaaatatgatgtaacgaggtgagtctattcaattgacgattgcgaagtaaattgtgtaatggcaaataggtcgaaccggcgctgataaaacccgagaacgaccgagtgtgtaacagcacgagttagcaatagggaatcggtgcgcgaacaacccattatggcccggcatcaacgtatgccatcttaagaggccggatatacgtatgcagtcgagccagctgccgttgacagattactagcaaacgagggggagtccatata

SEQ ID NO: 5272 - DNA, 1326 bp, unidentified
  source 1..1326: mol_type = unassigned DNA; note = element_817772e
  misc_feature 1..2: note = core
  misc_feature 3..71: note = LE
  misc_feature 72..1109: note = CDS
  misc_feature 1110..1326: note = RE
  misc_feature 1084..1311: note = bridgeRNA
agataattggactccccaacccttgagcgctaagctactttagtcgttctatcaaataatggagtctatttatgaaaaatactattgttggtgttgatttagcaaaaaatataattcaaatttgtgttcatacaaataaaaaagtgcattctaatacagaaatgacaccggatgaatttatagcatggcttgctaactctactcctataacagttgtatttgaagcttgtggaacttcgaattattggaagcagaaagcgatttctttaggtcatgatgctcgtcttatttcaactaaattagtcggtgcaataaggaaaaatcaaaaaacggataaaaatgatgctttggctattgttcaagcgacattactgcctgatgtagtttttatctctggtaaatcaacagagcagcaacaattacaatcaataatgagatttagagagctgagtgttaagcagaaagtagcatccggtaatcaattaaaggctctcttactagaatttaacatcaaggtatcaagtaagctaggcggcctaaaaggggtaattaaatctacactagaagatgctgaaaatggtttgacctttgagttcagagacgctttatcagcagcttgggctcaatatttatcgatcaacaaagcaattgacctttatgatgagtgcctaaataaatcaatagaaacacatcctgattgtaaaaagttacttaaaattgaaggtgttggaccattaaatgcaattaacctatacattgcgttaggttgtgctgaactaggtacattcacaaaaggaaaagatgcatcggcatgtattggattaacaccaatacagcactcatctggtggtaaggctaaaattggtacaataggacgacatgtgaaaaatagcaggttaaggacgcaattaattacaggcgctatgtcagttatccatcgagttacaacaagagcgtctataactaaaaaagatgcttggttaaagtcactaattgaacgacgcggaaaaaaatgtgctgctgtagcacttgcaaataaaacagtaagaacagcctacacgatgctcactaaaaatacagaatatacagctgagatcctcccagcttaaaaaagagttcaatcaataaaaatgaaatatcgaagataaaaatcagcaggccaagacagtccttaacatagagcataaagctcgtaccccagatttgtcagcctgttcgcgtaaatatcaaagagccagggttagctactcaatagagctcgtacataagtacgcatttatttcttcaagtatttatttttgttgttgacacgggggagtccacata

SEQ ID NO: 5273 - DNA, 1377 bp, unidentified
  source 1..1377: mol_type = unassigned DNA; note = element_8178a31
  misc_feature 1..2: note = core
  misc_feature 3..84: note = LE
  misc_feature 85..1107: note = CDS
  misc_feature 1108..1377: note = RE
  misc_feature 1087..1363: note = bridgeRNA
tgatggaatggacgccccctcctgacggcatctcgatgtgccaagttggcggtgtggttaacgccaagataggagggggcgtccatgaaagaggttactatcatcgggatcgacttggccaagcgcagctttcagcttcacggcgcagggtcggatggaacggtggcgttccgcaggaagctgagccgggggaagcttctgggctttctggcgttgcagccacgctgcgtggtggcgatcgaggcgtgcgcgagcgcgcactactggggtcgggagatcgagcagctgggccacgatgtgaggctggtcccgccgatctacgtgaagcccttcgtgaaacggcagaagaacgacgcggccgacgcggcggcgatctgcgaggcggcgtcgcgaccgaccatgcgctttgtggcggtaaagtcggcgaagcagcagtctcgggggatgctgttccgcacgcgtgacctcctggtgcgtcagcgtacgcagacgatcaacgccttgcgcggccatctggcggagttcggaattgttgctccgcagggacccgctcatgtcggcaagctggcgctggccctggaggatccggggtcggggctgccggaggcggtccgcgaactggctaccattcttctcgagcagattgcccgcctcagcgcgaaggtcgacggcttggggaagaagctccaggccagcgcgcgccaggacgaggaggccatgagactgatgactgtgccaggcattggaccggtctgtgcgatggcgctccaggccttcgcaccgccgatggatagctttcggcgcgggcgcgacttcgcggcctggctcggcctcgtgccacgccagcacacgactggcggcaagccgaggctgggcaagatatcgaggatgggccagcgcgatctcaggcggctcttgatcacaggcgccatgatggtcgtacggcacgcggcccgacgcggcgagacggcggacccctggctggccggaatgctggcgcgcaagccgaggatgctggtcgcggtggccttggccaaccgcatggcgcgcatcgtttgggcgctggagacgaggaaggagacctaccgggttcccgccgccgcctgagggcgaagcacgggaagccgtcggggatgcgggcaggacggagaacgggcaagggcaagacggtcgacgagacgggatcgggaaaaccagtttccgaacaaagagccttcgagctcgcagtgttgatatggacccgatccgcgtatctccatgcgggccagcggcgccggacttacgcgccgcatcaacaggccggatagatgtaagcacctgaccgcatgctcagacccgttcaaagaatcgcttgcatcaacggggggcgtccataga

SEQ ID NO: 5274 - DNA, 1462 bp, unidentified
  source 1..1462: mol_type = unassigned DNA; note = element_8183422
  misc_feature 1..2: note = core
  misc_feature 3..238: note = LE
  misc_feature 239..1276: note = CDS
  misc_feature 1277..1462: note = RE
  misc_feature 17..183: note = bridgeRNA
cttgtatgttgcgttcagaggcgtgaggatgaattcacgtttcggcggtaaggccgtccgtcccttaggccaactttggttgagcctgtcccgtagatcggccgccgcccctctgcttgcacgccgtggagaatcgaaggccttttgagcctgcatgttcaaggtcggcgcacgcagtgagtccgttagcagcggataggggcggcagccgagaccatcctatctccgaaggaggtctatgaacaagcaggtttccacttcgcaagcgatggagttttgcgggatcgacgtcagcgctgcttctctgtcggtagctctggtcaagccggatggaagtttggcgcagcgcgagtttgccaacagcgccagcggtcatcgggcgctgttggtctggttgaaaaagcgcaatagccaagtacgtgtgtcgctggaggctaccggcatttactcgttggatgtgtcgctggcgctggatggggaagcatcgatcgagctgggggtgctgaacccgaagcttgtgaaccggtttgcgcagaccctgcgccggtccaagaccgatgcagccgacgccgtagtgctggccgaatacagccagcggatgccgttcgtccgctggcagcggcctgcgcccagccatctcgagctgcgcaccatgagccgttacatcgggtcgctggtggtggaacaggcaggcttgaagaaccgcctgcgcagtgccgagagcacggacaccacgccgcgcgcggtgctggtcgatctcaagcgggccctggctgcggtggaacggcgggtagagaggatgcgtgccgaggctctcaagctggtcgaggccgaggtggagttgcgcgagcgctaccagctgctgaccacggtgccaggcatcgccgcggtcagcgcgctaacgatgctcagcgaactgattttgctggcacctgggatgacagtccgccagtgggtggcatccagcggcctggacccggcgcatcaacagtcgggcacgagcctgaacaagccgtcacgcatcagccgcgccggcaaccgacgcctgcgtgccgcgctctacatgtcggccttatcggcagctcgctacgaccggcatctggcagccttctatcgagcactgcgggcccggcataagaccggtctgcaggcgctgatggcggtggcgcgcaaaatgctgcacgccatttatggcatcttcaaaaacggcataccctacgacggccgtcggctgtttccgagtatccagacggaggtagaatcaatcgccgggtgaaacggaagcaggctctgctgggaagcaaccacgccgagggataacctggcgggctcatcctgacgatggaccggcgggcgagcagcaagcgcccgcccgcgcccgaaaatcatcggagggatagaccccgatgccttgaaaatccaaactcaatagcgcaaaaatagttgatttcgaacagagaat

SEQ ID NO: 5275 - DNA, 1380 bp, unidentified
  source 1..1380: mol_type = unassigned DNA; note = element_8187c60
  misc_feature 1..2: note = core
  misc_feature 3..86: note = LE
  misc_feature 87..1118: note = CDS
  misc_feature 1119..1380: note = RE
  misc_feature 1149..1368: note = bridgeRNA
tgatgctgtggacggctcctccaccggcacgcgagtgccatagatgtgggtgctgttaaggctcccatgattcggaggagcaaaacatgcaaacgattaagacaatcggtctcgacatcgccaagtcggtctttcaagtgcacggcgttgatgctgccgggcaagtggtcgtccgccgtaagttgaagcgtcgctacgtcctggcgttcttcgagaagctgccaccctgcctagtcggcatcgaggcttgcgcctcatcacaccattggtcgcgcgagctccagacacttggccacaccgtgcggctgatgccacccgcttacgtgaagccctacgtcaaacggcagaagaacgatgctgcggatgctgaggccatttgcgaggcagttaccagggccaatatgcggtttgttgcgaccaagactcccgagcagcagagcggcctggtgctccatcgcacgcgccatctcttcatccgccaacagaccgcggtgatcaatgcgatccggactcatcttgccgagtttgggattgtggcgccggtcggccgcaatggtgtcgagcaactgctgaatgtcgtcgccaatcccaacgacaagcgagtccctgagatagcccgtgcgtgtctcttggcattgggagctcaattgcaaaggctcaaggggcagattctagagttcgaccgtatgatcagagcctggcaccgatccagtgagacaagccggcggctcgatgattgtcccggcgtcggcccggcactggctaccgctttagtggctaccgttgctgacccaaaatccttccggtcagggcgcaatttctcggcctggatcgggctcgtgccgaagcagcactcgagcgggggcaagaacaggctcggcagtatcagcaagcaaggcgatcgctatctacggggcctgttcgtggccggcgcgctcgccgtcatccgctatgccaagatccatggcagcgggcatcgaccctggctcgcggcattgttggcgcggcgaccgacgaaggttgccgccatcgcgctcgccaacaagattgcccgaatggcttgggcgatgatggccaagggcgagcgataccgggagcccgttgcgcttgcggcgtaaacgagatcgcgccggacatctggcgtgatgtgacggttgggagggcgaacagcacgtaatgcagagccggtcgatccggcgatcaggacaacccagttaccccctagcattgtcgaatgcgggctattgatcgggacctgatccgcggagggcattatggccagcggtcatgtgaaccgcgctaaaaggccgaacacatgggcgcaccgaccaattctgcgtacgtgaagaaagtccttgccaactcggagccgtccacaca

SEQ ID NO: 5276 - DNA, 1510 bp, unidentified
  source 1..1510: mol_type = unassigned DNA; note = element_8188be1
  misc_feature 1..2: note = core
  misc_feature 3..293: note = LE
  misc_feature 294..1412: note = CDS
  misc_feature 1413..1510: note = RE
taatctccattccgccgccttcggctggcggcgcaaatagtaatgaaagtgttccaactctctacactgtgctgtaaaatagtttgcaagaagctacactacaaagcacgggaggaggagttgtaataactttcttcgttttagacagcatactaatcagtgtaagttctgccttttcaagcacaaataagtggtattatgaatccgtacactaagaattgtttaagcaccttggtttaattgtgtggcagttcagtcaatggcttcttatcatttgtgaaaggagtccgtctatgaaagttacttatcaaacctgttgtggtgtcgatgttcataaatcttttctcgttgccacaattgtaaaaactactggtggcattgaaccctcttaccaaaagaaacgcttttccacctttaacaattcaattcttgaattcaagcaatggcttcttgacaatcactgccatgatgtctgtatggaatccactggtaaatactgggttcctgtctttaatcttctggaagataaaatcaatgttgtcattgccaatcctaaatgggtaaaggcagtgaaaggcaacaaagatgataccaaagattctaaatggattggggatttgttccgtcttggccttgtcaagggcagctatattccttgtaagaaagtccgtattctcagggaatacactcgctatcgctacaagcttgtttcctgccgttcaagtgaaaagaatagataccagaatgctcttactgtctgtaatgttgcattagattctattgtttccgatatctttgggaagtcatccacatccattatcgactatctgcttgaacaatcgggtacatctattaaccacgaagaaatcgcatctaagcttcttaggaggctcaaatccaaagaagatgctgtccagtttctctgtaccattccgggtgtcaaacgtgatagtgcaatcactgtcatctccgaaatcggtactgacatgtctcagttctcaagttctaaacgtttgtgttgctgggctggtttaacgccaggcagcaatgagtctgctggtaagaagaagtctgttcggattacacgtgccggtatctacctcaaacctgcattagtacagtgtgctcatgcagccgtaaaatctgacaaatctccttactacaaaaagaaatatgaatctcttgttaaacgtcgtggcaagaaaagagccattatcgctattgcccgtatgattcttactgctatctatcagatgctgtctactggtgagcagtggaatccgagcgatctttacaaaatcgatatgcctgtagctcttgttgaaaaacaaaaagcaaaagctatcaagcaagccaagaaactattacaacgagagggattatttcctcctgatgaaccattagcttcttgatttaattttctaactctataacactttaaaaagttgcctgccttagacagcttattcaagtgcgtcaatttatggtcttcctctactttctttcacac

SEQ ID NO: 5277 - DNA, 1603 bp, unidentified
  source 1..1603: mol_type = unassigned DNA; note = element_818cf33
  misc_feature 1..2: note = core
  misc_feature 3..274: note = LE
  misc_feature 275..1471: note = CDS
  misc_feature 1472..1603: note = RE
  misc_feature 12..294: note = bridgeRNA
ctactataataaatttagacgttaaatccacagcgaaccagctatggtttacacgtacttgttacataagctataatggaagcagtgactggatcaacgactttctccttgggacaccatgcccgtaataaagactgttgaccatgctttcattacagcattcgtttttgcaggtagagccaacctttgtgcgctcgcatcactcagtagacagaataggtaatgagtaaagcgtggagctatcgtcactaattctatcattaggagagatattatgaacgcagtaggtatcgacgtttccaaaggcaaaagcactgttgctgtcatacagccatttggagttgtcatagctgaaccatttgatgtgtctcacacagaaagtgatctcaataagcttgtgcagctcatcaaatcactttcaggtgaaacaaaggttgttatggaatacacaggtgcatattatgaaccgatcgccaatgcactccacaaccagggtatatttgtatccgtagtcaatcctttgttgatcgatgactatggcacaaagcgtgttagaaaggtcaagaccgataagcaagattctctaaaaatagcctcgtttgctatcgataaatggcttgaccttcgtgagtacatacctgccaatgatattcgcaaaacgcttaagatccttaacaggcagtatgttcaatacaataaaattcttgttatgcagaaaaacaatcttatcagcctgcttgattcctgctttccaaatgccaacacattattcacttcacctcgcagagagtctgacgggcacgaaaaatgggtcgatttcgtgctgaagtttcctcatattcattctatttcaaagctttccttatcagcttttaaggtaaagtatcaaagctggtgcagaaagaacaattacaactatagtgataaaaaagttgctgatatccactcatattgcaaaacacagataagcgtattacctatgacggattccgtcattaagattattacagaagcggctgtgatgcttaattccactcttgaaacgctgtgcatgttccgtgatgaaatggacaggctttcatcaacgctccctgaatacaatgctgttatgggcatttatggtgttggaaaagtgctctgttcgcaattgattgctgagattggggacgtaagaaaactgaataattccaaatctcttgtagcaatggctggtattgacccaccgcctaaccaatcaggaaaagttgacacaaaatcaagaagcatttccaagcgtggttctcccgttcttcgcaagacactttttcagataatgacgatcattatacagaataagcctgttgatgaccctgtttatcaatttcttaacaagaaacgttccgaaggcaagccttacagagtttacatgatcgctgctgcacacaagttcctacgcatttactatgctcgggtcatgcaggctctgaactgatctctaaacaaatattttttaatcagactgcttcaaaaaaagattttgatgcggtcttttagtcatgcactttttatctttgtgaattgtttgtaaattcacttaattggggcttgacttttatttgcaggt

SEQ ID NO: 5278 - DNA, 1417 bp, unidentified
  source 1..1417: mol_type = unassigned DNA; note = element_8194f1e
  misc_feature 1: note = core
  misc_feature 2..79: note = LE
  misc_feature 80..1111: note = CDS
  misc_feature 1112..1417: note = RE
  misc_feature 1190..1408: note = bridgeRNA
taatgagatggtccgccgcttgattcctcgaccgtagtagagggatcgtggtggcagcttctaataaggaggatcatccatgcagatacattcggtaggcattgacctgggcaagaccacgttccatctcgtcgcactaggagtggcgggcaaggtgctggtgaagaagaagttcacacggaagcaactgctggcccacacagcgaacatgcagacatcgctgatcggtctggaagcctgctcaggtgctcatttcctcggccgggcgttgcggaagcagggtcatgatgttcgtttgatcgcagctcagtttgtgaagcccttcgtgaagtcgaacaagaacgacttcatcgacgctgaggctatcgccgaagctgtcgagcgcaagaacatgcgttttgtcccgatcaagaccgatgatcaactggacttgcaggcgatccatcgagttcgggatcggctgatttcgcggcgcaccgcggtcatcaaccaactgcgcgcgttcctgctcgaacgcggcatggtattcgctcagagaccggcgaacctcaaggccgccatggccgacatcctggagaacgcggaagctgacctgacacctcagatgcgcaacctgatccacatgctttgggacgagtggaagatcgtggagcaacagatcgaagcactcaacgatgacctggaacgggtctctgccagtgacgcagggtgtacccgcatccgccagatcccagggatcgggccagtcgtagcgacggcgatcgtggctgccatcggtaacggtgctgcgttccgtaaggggcgagagttcgctgcatggctcggcatcgtgccacgtcagcactcgaccggcggcaaggcgatgctgttcggcattagtaaacgtggcaacgtatatctccgcaagatcctgatccatggagcacgcgcggcagttttgcggatcaagcgcgaccgagcccccatcggagcctggctcgatgcacttgacgccagagctcccaagaacgtcgtcatagtcgccatggctaacaagctcgcccgtattgcatgggcggtgttgtcgagcggaaacgactaccggccggcagtgaacccgcttcctgcataagaagcgcggaaaagacaccttcagcttggaagcgctaacgcgctcccactttaccgcaccacgacgacgatcgaactcacccaccgaagtctgcacaggagcagcaaggacgaaagaacagtcacaatggcgtgtcgccagcctgattccgacaatggttttcaacgaccgatcggcttataaggacagacccgcgcgcaactcatcatggccagcagagctgatctccgcacaaaggccgaatacatttgcgcagacttgtctcgcggccaaacttccccttgcagtcccgcggcggaccataca

SEQ ID NO: 5279 - DNA, 1612 bp, unidentified
  source 1..1612: mol_type = unassigned DNA; note = element_819d616
  misc_feature 1..2: note = core
  misc_feature 3..228: note = LE
  misc_feature 229..1599: note = CDS
  misc_feature 1600..1612: note = RE
  misc_feature 57..217: note = bridgeRNA
agtctcccaataagtggctgatgtttcgccagcaacaacttgggaagcttactttgtgaaagcaaaagctctttgcagcgaaaccttgtaattcaatgattaaaaaaatcaccgattagtctggtcctgtctgccctttaagtttccaattgaccgttggaggtcttatagaagagtaaactaaaataggcggtcaggcaaagagcttttgtttttaaaaattatactatggacaaagtaaaatcaaaaaaagcaaaaacaaaaaacgtaattgaaatgccggttgtaaatccttactctgccggcattgacgttagtgacaaagaacatgtagtagcagtaccggagggtctggctacggaacgggtaaaaaattttggagccatgacctgcgatattgtagaagttattaaatggttgcaggagtgcgagattgaaacagtggccatggaaagcacgggtgtctattggaaaccattattcagcatgcttgtccgcaatggctttgaagtgtacttggtaaatgcggcacatgtaaaaaatgtgacaggtagaaaaacagacgagaacgatgcgatgtggatccagaaattacacagttgcgggttattgaaaagttcttatttaccagacgatgaacaggaggcactgagaacgctggtaagatatcgcagaacattagtgcaggacagcagtcgcttcatcaaccgcatgcaaaaatcattggagctgatgaatataaagtttcatacagtgattagtgatattacaggccagacaggtaaagctgtaatagaagccatactgaaaggagagcggaattcagttaattttttaccctatataggaaaaaggataaaagctgataaaagaaccattgtaaaatcactggaaggaaattggagagaggaacatttgtttacattaaaggaaagttatgagatgtacaagatatacagattacgaattgcggcttgtgatgcagaagttgaaaaacatctacagcactatgaagcaaagcagaatgaaggtgtcatagatgtaaaaccagtcaatgcaaagaaaagcacaactaaaaagaagaaagataaaaatcatccccgctttgatgtacgaagatatcttgaaaagatacatggagtggatgtactaaatatttatggtttaagcgaaacaggaggattagaattgttagcagaaacaggaacagatttaagcaaatggaaaaatgaaaaccattttgtgtcatggcttaacctgtgtccgaacaataaaatatcaggaggaaaattaatcagcagcacgctgctaaaaaagagacccaatcctgcaagcctggccttccggcaagcggcaaatggagttcagaaaagtaacaattcgctgggagattattttagaagaatgaaagcaaagggcggtaataaatatgcgatcatagcaactgcaaataaaattgcaaggatttactataaaatggttcgatacaaacaggaatttaatccaatggaactggaagcatatcaacagaaatataaacaggccaaaatagcttacttagaaaggaaattatcacaactaaaaaaagatgtggcctgacaagttgtataga

SEQ ID NO: 5280 - DNA, 1361 bp, unidentified
  source 1..1361: mol_type = unassigned DNA; note = element_819fc40
  misc_feature 1..2: note = core
  misc_feature 3..89: note = LE
  misc_feature 90..1127: note = CDS
  misc_feature 1128..1361: note = RE
  misc_feature 1152..1349: note = bridgeRNA
agatgtatggactcctcccctttaagggagatttacggtataaagtgaaaagtattcactcaaatcaacttttaccaggagtccacacaatggaacaatgtaacgtaattgctatagatcttgcaaaagatatttttcaagtttgcattatgacctcaaatggaaaaattattttaaataaggcaatgaatagaactaagctaaaagaatggttagctaaacaaaagctttcccttgttgcgatggaaagttgtggcggtgctcattattgggcaaggttcgctcagtctttaggccacaacgtaatggttataccaccaaaacaagtaaagccatttagaacaggtcaaaaaacagatgccaatgatgcagtcgctattgctgttgcaagtcgagcagctaatataaaaccagctagaattttatcaatcgaagaacaaggccttcaatctattgaaagaatgcgaagcatacttgataagcaaaaactacaaatatcaaatcaagtacgcagtttattgctcgaatttggtattgtcattaataaaagtattaaaagctttaaagagcggatgcctgacattttagaagatggggaaaatgatttaccttttatgatgagaaaaactttactcacaatgtgggagctttattctcgccttgaaaaagactttgaagctatcaataatgagctaatacaattaacagagcaagatattgattgccaaagattaatgaaacttgaaggtgtaggacctattacagctattaggttaaaaatacaattgggcaatggcgagcatttcaaaagtggtaggcaagtagccgcctgtatcggtcttacccctaaacagcatagcagcggcggaaaagtaaaattaggctcagtggggaaaagttcatgcgatagacctttacgcagttgtatttttttaggcgcaagagcggtggtctctaagttaaaaagtagagcgcccaaaacagaaaaagagcgttggttaaaaaccttaatagagcgaagaggtgttaattgtgcctcgatggcattagctaataaaacagcacgaacagccttcgcacttttgaaaaataatactcattatacacctgtattaatagcaacttaaaaaagtaaaaaatattaaatttatattgttacaacaaagatcttaaaaatggttagaccaaccttcaacagcctgtaatatgctctgaacatatttataatgtcgcgcaggagattaggcatgaaggtgcgaatacatcaaagtgaccgggatagcttcccattaagagtccgaatataagcacgcatctaatatttttaaagtttttcttgcacaatatgaggagtccatata

SEQ ID NO: 5281 - DNA, 1361 bp, unidentified
  source 1..1361: mol_type = unassigned DNA; note = element_81a0510
  misc_feature 1: note = core
  misc_feature 2..180: note = LE
  misc_feature 181..1104: note = CDS
  misc_feature 1105..1361: note = RE
  misc_feature 1105..1351: note = bridgeRNA
tatggaatggcccgccccttccgtcccgcagcttaaggctaagctggcctggcaatcggaggaggagtggaagatgcagatcgcggttctggggattgatcttggcaagaacagctgcagcttggcgggcctggacaacgctgggcgcgtggtcgtgcggaggcgcctgcgcgggagagcgtgatcaagttcgcggccagcctgccgccttgcatcgtggcgatggaggcctgctgcggcgctcaccacctcggccgcatcctgcgcagccaggggcacgaggttcggctgatgtcgcccgagtatgttcgcccctacgtcaaggcacagaagaacgacgaccgcgacgccgaggcgatcgccgaggcggccacacgaccgaccatgcgatttgtcgagctgaagagcgaggcgcaactcgacatgcagacgctccaccgcgcccgggaccggctggtcggcgagcgcacggcgctgatcaaccagctgcgggccgttctgttggagcggggcattgtggtcccgcaagggcggcgcaagctggagcagcatcttgcggcgatgctggacgaaggcgagggcctccctctcagcccgcgggtgcgggcactggttgcggatatgcgggccgagtggcgcgagctcgaccggcgcattggggccttcgatgacgagttcgccgctcgtgctcgcagcgatgaggctgcccgtcgtctggccaccatccccggcattggggtgctgaacgcaactgccttgctggcagcgatcgggacaggcgaggcgttcagacgagggcgggaccttgccgcctggctcgggctggtgccgcggcaggcgagcaccggcgggagagccaagctgttgggcatcagcaagcgcgggaacaaataccttcgcaagctcctgatccatggtgcgcgctccgtcctgcgccccctgtcccggagcgcgacgccgctcggggcgtggctgcggggcctcctggcacgggcgcacgtgaacacggcggtggtagccttggccaacaagctggcacggatcgcctgggcggtgctgtcccgaactcggacgttcaacgcgggcgccgtgatggtcgcctgaggaatcggccaccgcgggagcccgacgcgagtggctgacgatgtctgcgggcggtgaatgcgagatggcctgacagtcgaagccggcggaccggaagcctggttttaaaaacggcgcgctcgatgccgtagcttttatgaggaccgggacgcgcggatctccatcttggccgggagcctgctccgaggccggatacgttgaagcagactgatcaggtcagaatgcataagcctcttgcagacggggcgggccatacg

SEQ ID NO: 5282 - DNA, 1169 bp, unidentified
  source 1..1169: mol_type = unassigned DNA; note = element_81a7a22
  misc_feature 1..2: note = core
  misc_feature 3..119: note = LE
  misc_feature 120..1163: note = CDS
  misc_feature 1164..1169: note = RE
cttgtattagcgcgaatcattacagtgcgagcgttccgtgaggaacggcccggtccaggtggccacctggaccgggccgccgatcgtcggatcggagcccaccgcagccttaggggctgatggtcgtagcaagatcgcgatcggcacttcatcgggcccggatggttgaaggaaccgagggttcgcatcacaaggaagggtcgacgaagatgagcaagcataccatggtctgcgccggcatcgataccggcaagcgcaagcttgatgtggcggtcgtggaaggttcgcatcagctgcaggtcgctaacagtcctgacggccacacggtcctgtcagcatggttgcgtcagcgtcgcgtcaagcgagtaggaatcgaggcgaccggcggatacgaacaagttgtggtcaccacgctgcgccgcgatggctttgtggtgattgtgttccagccggcgcaggtgcgggcctatgcgaagtttcacctgcaacgggccaagaacgacaagatcgatgccgcgctgatcgcgctctgcacggcagatgcgccaaagatccacgccccgccagatccgcgcctggcgccatttgccgagcatttaacgctgatcgagcagctcaccgaggacatcgctcacgtcaaaacccgtcgcgagtcctgtcgcgaccatcgcatccggcaccattggaacgacgagattgctcgcctcaagcggctgctgaggatcgagctcaaggcgctggtcgcggcaatccgccaacacaacgatctcgccacgcggctcgaccttatcgccagcgttggcggcatcgggttgaagactgctgtcgcgattctggtgcgcatgccggagatcggccgcatcacccgcgaacaagccgcagcgctggccggcctggctccctatgatgatgacagcgcggatcacgtcggcgtccgtcatatcgaaggcggtcgagagcggctgcgaaaaagcctctacaccgcagccttaccggcggcattccattggaatcctcacctcaacgtcatctaccgccgattgatcgcagccggaaagccgcacaaggttgcgctcgtcgcttgtgccagaaagctcctcatctacgccaacaccgttgtcgagagaggaaccccttggaccgaacgacctgccgcaatctaatggttg

SEQ ID NO: 5283 - DNA, 1322 bp, unidentified
  source 1..1322: mol_type = unassigned DNA; note = element_81a81d1
  misc_feature 1..2: note = core
  misc_feature 3..315: note = LE
  misc_feature 316..1092: note = CDS
  misc_feature 1093..1322: note = RE
  misc_feature 1093..1316: note = bridgeRNA
ttaattatatggtccgcctcatcctaagccgttaggcttagagtaggctttcaaagaggtgaaccatatgtctactatccacatcttaggtatcgatttaggtaaacactgctttcatgctgtcgcacacaatttcgcaggtaaagaggtgctacgtaagaaatataatcgaagccaacttctaaagtttctcgcaatttagaaaccaccactatcgcatttgaagcatgtggtggtgcacattggttagcccgtaaatgtgctgattttgggcatcaggttcaactgattcctcctcagtatgtaaaaccttatgtgaaaggtaataaaaatgacttcattgatgctgctgctatcgctgaagccgcaagtcgaccttccatgcgctttgtcgctgttaaatcagaagatgcacaagttattgctgtcattcatcgtatccgtgatggctttattaaagagcgaacagcctgtatgtctcgtatcggagcgatattgttagagtttggactgagcttgcccactgggcatgcgaaaatgaaaatactttttcagtggatagcagaccagcgatatcaaactcttccacaaagtcttatgcacgaattaagcttaattcacgcacattatttgtatcttaatgagcagataaaaatacaagatacgaaattgaaacagctagctgagcaacatgaattggctaagttattaaaaactgtgcctggcatcggtgatttaacagcaacactgtgtgtggcagatgtaagtgccgccagtaatttttcaaatggaaggaatatggctgcttggttagggttagtgcctcgacaatactctacgggaggtaaaacaaagttacttggggtgagtaaacgaggaaataaacacctccggacattatttattcatggcgcaagagctgtattatcaaggctagagacaacgggtaaagtatttggacaatggctggtagatttaagagccagtaagccattcaatgtggttgttgtcgcattggccaataaattagcaagaatagcttgggcggtgttataccaccgccaagcgtttaagactgcatcgcagtcataaccgagcttgcaacgacaatgcaagtgatgacattaacggtaaatcggccagattaagaacctgataataaaaacagcaataaatgctttgggctttttaaggataatctggcgcggatatcatcgtggagctaggacattaatatgcctaatttcgactctgaatacattagcgcaaaccaactccgttattactaatattgtagttgcaataacggggcggaccataca

SEQ ID NO: 5284 - DNA, 1386 bp, unidentified
  source 1..1386: mol_type = unassigned DNA; note = element_81b36d0
  misc_feature 1..2: note = core
  misc_feature 3..86: note = LE
  misc_feature 87..1118: note = CDS
  misc_feature 1119..1386: note = RE
  misc_feature 1145..1374: note = bridgeRNA
tgatgcagtggacggctcccacccggaggcatcacgttgtgccaaaatggtggttcatctgaaccacagggaaataggagctgcccatgaacgaagttatcacaatcggtgtagatcttgcgaagaacgtttttcaagtccatggcattgatggtttgggcgcggtgattatcggccgccaattgcgccgctctcagatgctgcccttcttcaagaaacaaccgccgtgcctggttggcatggaagcctgtgccacggcccatcattgggcgcggcaactggtcgcgcttggccatgcggtcaagttgatgccgcccaaatatgtgaagccctacgtgaagcggaacaagaatgatatggcggatgcggaagcgatctgcgaggcggtgacacgcccgaccatgcgctttgtggagatcaagacccgcgaccagcaatcggttctgatgctgcaccggacccggcaattgtttgtccgccagcgcaccacgctgatcaatgccctgcgtgcgcatctggccgagtttggcattgtcgccggggttggccgcaacggtttggaacggttgctgaaggtcatcgaggatggcgaagatgaccgggtgccggcggcggcgcgggactgtcttttggccttgcgcgatcagcttgagatggtgaagggtcaggttcttgatgcggaccggcatatccttgcctggcaccgctcgagcgaggtcagccagcgccttgatgatatccccggtgttggccctttgattgcgaccgcactcgtcgcctcggttcccgatccccacgtcttcaagtcgggccgtgatctggcggcctggatcggattggtgccgaaacagaactccaccggcggcaaggatcgtctcggtcacatctccaaggcgggcaatcgatatttgcgcatgctgttggtcgttggcgccctctctgtgatccgccgtgccaagcaagtgggctacacccgtcggccctggctgacaaagctattgcaacgccgctcgaccaagatcgcggccatcgcgctggccaacaagatcgcccgcacggcctgggcgatgatggcccatggaacattctaccaggagcctcaatccgaggtcgtttgaaacacgcgccggcgttgcctgcgctaaagaggttggaaaggacaccagacgaataatgcaccgagcggtcgatccgaagatcgggacaacccattttagccagtgcagcaacgagactgcgtgcttttgaccgggacccgatctgcggagagcattatggccagcggccatggatcagtgccgcacaaacaggccggacacatggcagcaccgaccagcgttgtatttaagtcaaattagtccttgccaacagggagccgtccacaca

SEQ ID NO: 5285 - DNA, 1443 bp, unidentified
  source 1..1443: mol_type = unassigned DNA; note = element_81b742b
  misc_feature 1..3: note = core
  misc_feature 4..219: note = LE
  misc_feature 220..1428: note = CDS
  misc_feature 1429..1443: note = RE
  misc_feature 10..215: note = bridgeRNA
tccctaaggttgttgttgtctggggttggtgccccggatgcccagggcgatggggtgtggctgatggtgtctctgccgcacggtggcttcggaggaatggccgccccgtcgtgctggacgccccggccactgattcagatctgatgcgggctgtcgctgattagggaactgtcggcggggttgtccacggggttgaactgcgacaacaggagaagtggcgtgacggatcggcctctggtgtgggtcgggatcgacgtcggcaaggcccaccaccacgcctgtgcgatggacccggacggcaaagtggtgttctcgcagaaggtggccaacgaccaggccgcgatcgagcagctcgtcgcccgcgccgcgaagtcggcgaccgaggtgcggtgggcgatcgacctgacgagcagcgccgcctacctgctgatcgcggtcctggccgccaccgggcagcgggtggcctacgtgccgggccgggtggtcaaccggatgaccggcgccttccggggcgaggcgaagtccgacgcgaaggacgccagggtgatcgccgagaccgcccggatgcgcaccgacctgacaccggtgaccgccaccgacgacctggtcgtcgaactcacccgcctgaccgcccaccgcgaggacctgatggccgactgggtccgcggcgtcaaccggctgcgcgaactgctcaccggcatttttcccgctctggaacgggccttcgactactccatgcgcagcgccctggtgctgctgaccggcttccagacgcccgacgcgatccgcgccgcgggccctgagggcgtcgcggcgttcctgcgtgagcacggggcctggcccaaggggatccccggcatggccgccgacgcccacgcggccgcgctggcccagaccgtccgcctgcccggcgaggccaccaccgcggccctcatcgcccgccaggccgccgtcctgctcgaactcgaccggcgcatcaaggacaccgacaagctgatcaccagccggttccgcgaacacccgcaagccgggatcatcgagtcgctgcccggcctcggccctcacctcggagccgaattcgtcgtggccaccggcggaaacctggccgggttcggcacctccgggcgcctggcctcctacgccggcctggtccccgtcgcccaggactccggccgggtcaccggaaacctgcgccgacccaagcgctacaaccgcaaactgcgcagggtgttctacatggcggccctgtccagcctcagggtcagcggcccctcgcgcgccttctacgacaagaaacgcggcgaacgactcgtccacacccaagccctgctcgccctcgcacgccgtttggtcgacgtcctctgggcgctgctgcgcgacggacgaaccttcacacccgccgcgccacaaccagccgccgctgcttgacacggtcattcagat

SEQ ID NO: 5286 - DNA, 1378 bp, unidentified
  source 1..1378: mol_type = unassigned DNA; note = element_81b8085
  misc_feature 1..3: note = core
  misc_feature 4..85: note = LE
  misc_feature 86..1120: note = CDS
  misc_feature 1121..1378: note = RE
  misc_feature 1145..1366: note = bridgeRNA
tgatgcagtggacggctcccacccgccggcatcacgatgtgccaaaatggtggttctatgaaccacagggaaataggagccgtccatgagcgaagttatcacaattggtgttgatcttgcgaagaacatttttcaggtccacggcattgacgcggagggagccgtgattttctgccggcaactaaggcgaactcagatgctgcctttcttcaagaagcaaccgccctgtctggttggcatggaagcgtgcgccacctcgcaccattgggcgcggcaactgattgaacttggccacgaggtcaaactgatgccgccgcactatgtgaagccttacgttaagcggaacaagaacgacatggcagatgcagaggcgatctgtgaggctgtcactcgaccaaccatgcgcttcgtatcggtaaaaagcatggagcaacaaagcgtgttgatgttgcaccggacgcggaacttgctggttcgccagcggaccatgctgattaacgccatccgcgcccacatggccgagttcggaatcgtcgcgccgggtggcgtgccgcaggttaaaaagctcctcagtattatcgccgatacggacgatgcccggttgcctccgattgctcgtacttgcctggaaagtctggccaggcacttcttgtcacttcaccaggaaattcatgttgccgagaagcacattcatgcttggcatcgatcaaacgatgccagccgccgcctggaaaccatccccggcatcgggccaattatcgccagcgccctgacggcttccatcaccgatccagaggtcttcaagaatggccgtgaactggcagcctggatcgggcttgttccccggcagaactcaactggcggaaagcaacggcttggaaaaatctccaaacaaggagatcaatatctgcgctggctactcgttgccggagccatgtcggtgatcctgcacgcaaaacggcgaggcacgactaacctgccgtggcttgccaatattatagcccgcaagccagccaaagtcgcagcggtggcgctggccaacaagaacgcccgcatcgtctgggcactgctcaggcaaggcgggacatatgagaagccagcaaccactccggcaatttgaaatgcgtgcgggcaagaggagttaaacagtttggcagagtgaaagtgatgtaatgcaaaatcggtcgaaccgaggattgggaaaacccgtttgggtcaaggcgcataaagcgcgtgcttttgattgggacccgatccggcggatcgcattagggccagcggccatgtgtgccgcatcaacaggccggacacatgacagcacccgaccaatttgcacaaatatcaaaataacccttgccaacagggagccgtccacaca

SEQ ID NO: 5287 - DNA, 1615 bp, unidentified
  source 1..1615: mol_type = unassigned DNA; note = element_81bb5ea
  misc_feature 1..2: note = core
  misc_feature 3..269: note = LE
  misc_feature 270..1370: note = CDS
  misc_feature 1371..1615: note = RE
  misc_feature 26..289: note = bridgeRNA
ctgatacaatataattgaccgaagaaagtgcggtatttgggaatagcactttccaagttccgttacctaagctataatggaaagggataaggtctgtcgaatttctccttgtgcttttacgcacgcagtaaagactgtcagccgccctttccattatagcgttcggtttcagcaggtaggacttcgcgtccgtgtaacaaatcagattggatcggtaatggacaaggtcggtcaccttatatccctaatcctttttccggaggtgtcacatgtacgctgtcggtatcgatgtttccaaaggcaagtctaccgttgccgtcctgcgcccgttcggagaagttgttatttctccgttcgacgtgtatcacaatccaaacgaacttcaagcgctcgtcacacgccttaaaagtttggacggcgataccaaagtcgttatggagtacaccggcaattactatcttccaatcgctcagttcctctctaacaacggtttgtttgtctccgtagtcaatcctatcctcgtgaaagactacagctccaaatccttaactgttcgcaaggtcaagaccgacaaaaaagatgccgttaaaatcgccaattttgcctttgaccgctgggctgaactcacacctttttctccctttacagagattcgtctgcaacttaaagcattgaacagacagtacgataagtgcaataaactcaagataatgcttaaaaacaatcttatctcgctccttgaccaaacttttccggaagtgaatcttttatttgcttcgccggttaaaaagtctgacggaagagagaaatgggtggatttcgtcttgaaatactaccatgcagagtgcgtttgcggcaggtcgcttgctgcatttgctaaatcttaccgctcctggtgcgggaaaaacgggtatcattattccgaaaagaaagccaggcagatttatgcattcgccagcaactgtgttccaacattgccgttttcggaaggcacaaaactcattgtgacttgtgctgctacgcaactcaatgatatggatgctactcttgcgtccttaattgctcagatgcattccattgccaaagttttgcccgagtacgatgttgtcatgtcgatgtacggcgtgggatacgttctcggccctcagctcattgctgaaataagcgacatctcccgcttcaaaaagaaacaatctctcgctgcctatgccggtgtcgatcccgaacagaaacagtccggcaaaaacgatcctaaatctcgccccattaccaaacgcggttctcctcatctgcgaaaaacgctgtttcaagtcttgagcgtcttcttacaaaccgccccccgaagacgaacctgtttttcaattcattgacaaaaaacggaaataagggaaactttaccgcgtttacatgactgccggtgcgaacaagttcttaaaaatctactatgcccgtgtgacggagcacctcaactctctccaacaagcggcttaacttcattccaatttttactttttctaagtcgacgagttctcggcggctttttttgcttgcattctttcctactaaaaaatcttctcaaattctttcattttttacttgacttttattagcaggt

SEQ ID NO: 5288 - DNA, 1386 bp, unidentified
  source 1..1386: mol_type = unassigned DNA; note = element_81bbc95
  misc_feature 1: note = core
  misc_feature 2..87: note = LE
  misc_feature 88..1113: note = CDS
  misc_feature 1114..1386: note = RE
  misc_feature 1158..1378: note = bridgeRNA
caatagaatggacgcccccaactattaacggcatcaatgtgccagagtggaggtgttactaaccactcacagatgagggcgtccaccatgaagattataacgattggcatcgatttggcgaaaaatgttttccaggtgcacggcgttgatagtcgcggcaagccggtgttgaggaaaccactcaagcgcgcacaatttactctgttcttctcgaaccttgagccttgtctgattggcatggaagcctgtggcagcgcgcaccactgggcacgcaagctgcagacgttcggtcacaccgtgaagctgatggctccacagttcgtcaagccctacgtgaaaaccaacaagagtgacagcgctgatgcggaagcgatctgcgaagccgtcacccggcccaatatgcggttcgtggccatcaagaccctggagcagcaagcggtgctgtcgctgcaccgggcacgccaggggttcgtcaaggcgcgtaccgcccaggccaatcagattcgcggcctcttggccgagtatggcctggtcatccccaaaggtattagccacgtcagcaagcaggtgccgctgattctggaagatgcggagaacgagctgcccgggatgtttcggcaactgattgatggcctgttggaacacttccgtgagctgcaccgccaagtcactgagcttgagatgcagatcaaagcctggcaccaggacaatgaggccagctgcaagctcgcggcgattcccgggatcgggcccatgaccgccagcgcgctggtggcctccatcggcgatgccaagacgttcaagaacggccgacagctcgcggcctggctggggctcgtgccccggcaacattccaccggcggcaagcccactctattgggcatcagcaaacgcggtgacgtgtacttgcgtacgctgctcatccacggtgcgcgctcggccatcctcgcagcccagcggcgttcggaaaatacgggctggctcgcccagttactggagcggcgacatccgaatgtggtcgccgccgcgctggccaacaagaatgctcgggtcgtgtgggcactcctggcccatgaccaggaatatcaacccgcctacgccaggacagcgtaacggcctctccgatttctgaccgaacagcgtaaggagttcaaatcaccgattgctcaggtactcacgcagtgatggcaagacaggtaagaccgtggttggcacagcccagaagaacccaggcacttcaagtgcgacaaagcgatcggggagccaaccagcgcattccatcagggacagcggcaataccgcatagaaagtccggatgtacgactgcaatccctacctttaagctgtcacgaactgggtacttggcaagacgggggcgtccatgta

SEQ ID NO: 5289 - DNA, 1412 bp, unidentified
  source 1..1412: mol_type = unassigned DNA; note = element_81be08d
  misc_feature 1: note = core
  misc_feature 2..267: note = LE
  misc_feature 268..1248: note = CDS
  misc_feature 1249..1412: note = RE
  misc_feature 1234..1346: note = bridgeRNA
taatgtaatgaaccatccctatccacgctgctagctcagcgggagtcctcaggctagcctttgatctaaaggatctcaaccttggatgggagatcaaaatgactattagtattttaggtattgatattgccaagagcactttccagtttcatggcgccgattgtaaaggcaatacagtgctgaagaggcggctgcctcgacataaactggctgccttgacataaactggcagctgagataaccaacattcccctttgtgccatcgtgatggaatcctgcggcggaaccaactatcgggcacgcgcattccaaagaagtggccatacagtaaagctgatcagcccccaggttgtaaaacccttcgtgaaaaccaacaagaacgatgcgaatgatgcgcaggcgatagtcgaggcagccagcagaccgtcgatgcactttgtgccaataaaacaggtggaacagcaggacatccagtcaatccatcgagtacggactcgggtggtcagaaatcgaacagcattgatcaacgagatcagggggctatgcctggagtatggaattgttcttacacatggggttggcagagttaaatcttccctgtctgccgtcatcgccagtagcgataacgagctgacgccatcatcacgagaatgtatgcaggatctgtacgatgagctgttggacgtcgattacagattgaagaagctggatcccaggattcgaagcctgtgtcggcaggatgagcgctgcaaacgcattctgaagatatcgggtataggcgagttaactgcgacagccattgtagcggctgtgcccgatccgagggaattccgaaatggccggcacatgtcagcctggctaggactggtgcctcggcaatcatccagcggagataaacaggttctcatgggtatcagtaagcggggtgatcgctaccttcggactctgctgattcatggagccagggctgtattgagtcagtccaggaatctggataacgacgatagtcgctgggttggtagaaaaaagccacgttgggtcataacaaagcggccgtcgctttggcccacaaaaatgcgcggatcatttggtcgatgttggctacaggggatgagtttaactatggatcacacgcaactgctgcctgatactcaatgtcaggcagtttctattaacgaacggaagactatcgcgagtttgctacagttgattttaatgatggtgaataggtcataccggcttttctagcacctgtaacttgtcacgacccctggaggtcatggtactgattaggaatgagagcgcggatttacatcagggcacgagcactgcttagatgccgaatatatgactgcaactcaggcctataacaactatcggaaatcgacttgcaaaaggggatggttcatata

SEQ ID NO: 5290 - DNA, 1171 bp, unidentified
  source 1..1171: mol_type = unassigned DNA; note = element_81bf5ca
  misc_feature 1..3: note = core
  misc_feature 4..205: note = LE
  misc_feature 206..1168: note = CDS
  misc_feature 1169..1171: note = RE
  misc_feature 7..181: note = bridgeRNA
ctcgcttgtatgtttagacttgaaggggtgggtgggactaaagctcgtcatctgactctgaccagtacagaccgtgggagacttcgtcccaccccttcacctaatgcgccgataaggaatgcatcggctcggaccgacgatagaaacaagccagcgcaacggtgaaccccgtcaagtatctaaaccctagctcggagggtgtgccatgacaatcctggattcgcaggtggtcgtcggtgtggatgtggcgaaggacgagatcgttatctatcgatccgacctggaaaagaccctaaatatcgcgaacaagcgatcaaccttgaagcaatggctcaagacgctgccagcgcacagcgctatcgcgctagaagcgaccaatatctatcaccttgatacaacggaaatggcccatgaaatgggccatgacgtttacgtcatcgatggcagtcgcctcaacaaataccgcgatggaataggcatgagggcgaaaacagatacgttggatgccgaactgctggcccgttacttgagccgcgaatccgacagattgaggatctggaatccgccaccgaaggcttacacacaaatgaaaagcctgcttcgccgtcgggctcagttggtccgggcctgtgttgcactcaagcagagctggaaaaacgaatccttgctgaaagagcacttcaaccagcttctggccgccattgcccagttcgaaaagatgattcagaaaacgctcaaggaaattgctgaggaaggtgggattgatgatcaggtgaagcgttgccaggccatcgagggcgtagggctcctgacggccaccgcagcggccactgcttttatgcgtggggaatttgccaacagcgacgagtacgtcgccttcctcggcatggatccgcgtgtgaggcagtcaggacaaaaggatcaaaagcgccgactctctaaacgaggggactcggagttccggcgcttgtttcacaatagcgctatggctgccagccgttcgccgacctggaagccgtactacgaacgctatctggccagaggtctaaaaggcactcaggccttggttatcctggcacgcaagctggccagagtgatgtttgccctgatgaaaaaccaaaccgaatacaagccaaattctatgtttgggtgttccccccaaacatagaat

SEQ ID NO: 5291 - DNA, 1653 bp, unidentified
  source 1..1653: mol_type = unassigned DNA; note = element_81c06c3
  misc_feature 1: note = core
  misc_feature 2..273: note = LE
  misc_feature 274..1248: note = CDS
  misc_feature 1249..1653: note = RE
  misc_feature 13..293: note = bridgeRNA
cctgttactatatatttgccccttgatttatggcaaccagccataggcatgggacatctcgttgcctaaactgttagaatgggaaggtaatggtctgaccttcacctccaagggcttacacgtccgcaaggaagtcagtcagccatccttcgcattcgcagtgttcgatttgtgcaggtagagcctgagcgttcgtgtcagcaaacagattgaatcagcaatgagaaaagatggcttttgtccattgcaaaattcttttcaggagtgttgaacatgaacgcagcaggcattgatgtttccagtagaaaaagtaccgtagctgtccttcgtcctttcggcgaggttgtaaagctgccctttgatgtcactcacagtgctgaggggcttgccgccctggtgcagcagctgaagtccattgagggtgagacccgggttgtcatggagcataccggccgatactacgagccggtggcgcaggctctccacactgcgggtttttacgtcagtgcagtcaatccgctgttaatcaaggaatacggcggcaattctctgcgcagagtcaagacggacaaggccgatgccatgaagattgcccggtacgcccttgacaactggagcgaactgcgggattatactcctatggatacaattcgctatgatttgaaaaccctaaaccgccagtttcaactggcctccaaacagaaaacagcagcttccaacaacctcatcgctttactggaacagtcattccccggggttcgcaaatgctttgacagtccggtacgcaaggatggtacgcagaaatgggtggatttcgtctacaccttctggcacgctgactgcgtccgcaagaacagcctgaatgcttttaccgagcgttaccgcaaatggtgtaaacgtcacggctactttttcaaacagagtaatgcggcggaagtgtatgaactcgccagatctgttattacgctggttcccaaggggccagtggcgaaggtgcttgtgcagcaagcagccagccagctcaccagcatctcccgttctgtcgagacctaccgtgccgagatgaaccgtctggcctccatgctgccagaatatcctttggttatgggactgtatggcgttggagaatcctttggcccgcagcttatggcggaaatcggtgatgtgcgccgctttgaccgcaagcaggctctcgttgcctttgctggaatagacccatgccaaatcagtccggggaaaagaatgtgagaagtaacaaatcctcaaaaagagctcgccatatctgcgcaaaaccctgttcagtattatgatgtgcctgctccagtccgccccggctgatgaaccggtctttcaatttcttgaccgaaaacgcagcgaagggaaaccctattatgtctacatgacggcgggagcaacaagttcctgcgtcgttattacgcaaaggtcagggattatctcgccacgctggacaactttccacctgtggatatggattccactggcttgaaccacttgaactgaaatctgaatacttccggcagattagaccagcgttttgcgtggtctttttgttgtgcccttttattgctacctaccgcctgcaaaattttctttcgtcatgttccgattggggcttgactttttatttgcagg

SEQ ID NO: 5292 - DNA, 1449 bp, unidentified
  source 1..1449: mol_type = unassigned DNA; note = element_81c3bc0
  misc_feature 1..2: note = core
  misc_feature 3..234: note = LE
  misc_feature 235..1434: note = CDS
  misc_feature 1435..1449: note = RE
  misc_feature 12..201: note = bridgeRNA
tccttacctttcttgcagggtggtcgttgccgttggccgtaggcttcgaactgcccaggggcgtcgggtatggctttcatgggtttgccgtcggtgatggccgaaggagattggccgcccggcgtcccgcgacgactcgaccgctaattgagagatgcgattcgatcgctgtgtaaggacacgtcggcgtggtcgtctgctgggtcgattgttacggcgattacggaggtggttgtggggcagcagttgtgggctggtgtcgacgccggtaaatctgatcactactgtgtggtcatcgacgccgaagggcagcggctgctggcgcagcgggtcgctaacgacgaaactgcgctgctggagttgatcagcacggtcagcactgtggttgatggcgctgagatcacctgggcgatcgatctcaacggtggtggcgctgcggtgttgattgctctgctggtcggggccgggcagcggctgctgtatatccccgggcgcaccgtctatcacgcctcgggcggctaccgcggcgatggcaagaccgacgccaaagacgccgcgatcattgccgatcaggcccggatgcgccgcgacctgcagccgttgcgacccggcgacgagatcgcggtggaactgcgcatcctcaccagccggcgcgctgatttggtggccgatcgcacccgggcgatcaaccggctgcgggcccagctgctggaatacttccccgccctggaacgcgcctttgactacagcaccagcaaggccgcgttgattttgcttaccggctatcaaacgcctgacgggctgcgccgcgccggtgctgctgagctggccgcctggttgcgaaaacgtaaggcccgcaatgccgatgctgtcgcgtccaaagcccttgcggccgctaacgcccagcacaccatcgtgcccggacaacacctggctgccaccgtggtggctcgcctggctaaggaggtgatggccctcgacatcgaaatcgacgacaccgagacgatgatcgaggagcgatttcgccgccaccgccacgctgaaatcatcttgagcatgcccggcttcggtgtcgtgctcggcgccgagttcctcgccgccaccggcggcgacatatgcggcttcgactccgtcgaccgcctcgccggcgtgtccggactggccccggtaccccgcgactccgggcgcatcagcggcaacctcaaacgcccccgccgctaccaccgccgcctgctgcgcgcctgctacctgtccgcccaaatcgccatccgcaccgacgccgcctcgcgcacctactacgaccgcaaaagatccgaaggcaaaacccacacccaagccgtcctcgctttggcgcgccgccgcctcaacgtggtatgggccatgctccgcgacggcacggcataccagcccgcacctaccgccgcggcggcttgacaacttcattgagaa

SEQ ID NO: 5293 - DNA, 1357 bp, unidentified
  source 1..1357: mol_type = unassigned DNA; note = element_81c5b30
  misc_feature 1..2: note = core
  misc_feature 3..75: note = LE
  misc_feature 76..1098: note = CDS
  misc_feature 1099..1357: note = RE
  misc_feature 1074..1345: note = bridgeRNA
tgatggggtggacgccccccgacggcatcgatgtgccaaagtggaggtgttgatcaccacttgagggaggcgtccgtgtcagagattagcatcatcgggttggacatcgccaagcatgtttttcaagcgcacggcgcggatgcgtcgggccgcgcggtgctgcgcaagaagatcagtcgagcgaagctgttgccgttcttcgcctcgcagccgcggtgccgggtggtgctggaggcatgcggcggtgcgcatcactgggcgcgcgagctggcgaggctgggtcacgatgtccagctgatcgcgcctgcctatgtgcgaccgttcgtgaagcggcagaagaacgatgcggcggatgccgaggccatatgcgaggcggcgcagcgcccgagcatgcggttcgtgccgatcaagtctgaggcgcagcaggcagcggcgatggtgttccgcggccgcgatctgttggtccggcagcggacgcagatcagcaatgcgctacgcggccatatggcggagtacggctgggtcgcgccgaagggcctcgctcatctggacaagctcgccacgctgctggcagatccgacggcagtgcccgaaggcgtccgctcggtatgcacggcgctgctcgagaacctggcactgctggaccggcagatcgccgcgctcgacaaggagatcgtgcgccgctcgcgcgaagacgagatcgcgcggcggctgatgacgatccccggcatcggcccgatcacggcgacagcgattaccgctcttgcgccaccgccggggacgttcgccaaaggccgcgacttcgccgcctgggtcgggctgaccccgcgccagcactcgaccgggggcaagcagaagctcggggcgatctcgaagatgggcgaacgcacgctgcgaaggctgctgatcatcggcagcagcgcggtcgtgctccaggcgagcaggcgcggcgccccaaggggctcgtggctcgaacagatgctggcgcgcaagccgcgcatgctggtcaccgtggcgctcgccaacaagacagcccggatcgtctgggcgctgctgatgaagaacgaggattacagggctccggtcgtggcggcttgaccgccaaggaccagaggtcgtcggaagacgcagtcggtcgaaggagggtatggcgcaacagtcggcgagacggggccggaagaaccagcgctttccaccgtgcctatcagcacgcttagggtgatgtggttccggtccgcgaactcccatacgggcccgcagctctcatcgctgcaccaagaggccggacagatggcagcatccgactacgcgccaacacctcaaaaatgccgcttgcgtctgaaggggcgtccacaga

SEQ ID NO: 5294 - DNA, 1583 bp, unidentified
  source 1..1583: mol_type = unassigned DNA; note = element_81c7574
  misc_feature 1..5: note = core
  misc_feature 6..248: note = LE
  misc_feature 249..1460: note = CDS
  misc_feature 1461..1583: note = RE
actcactggtgcaccctcttcttgccgggcgctataacccggcgctcggaaccctggtcaccaccggtccatcgccagtgctgctcgccgctcgacggccggcatgagtttcgcgagggccggtggcccaggacgtgctgactggcattagggctgagcgacagagatcgccgatcagtgagcgtccaggagccacgtcccgggaccaccgggtgcttccccactgcggacacagcaaggaggcagacatggagcatggcacgattcgtttcgggagcgtggactggggatccgagggccacgctgcctgtgtcgtcgatgccgagggcactgcgatcgacgagtttcaggtggcccacacgggcgccggcttgacggagttgtgccgccgcttccgccgcgccggggttcagcgagtggcgatcgagcggcccgatggcccggtcgtcgacgctctgatggacgccgggctcgaggtcgtggtggtctccagccgtgccgtcaagggcctgcgtactcgctacggcctggccggcaacaaggatgaccgcagtgatgccttcatgctcgccgactgcctgcgcaccgacggccaccgctgggcttcgctgcaaccggaccagccgcagaccctggccctccgcgccgccgtgcgcacccgcaaagacctggtggccacccgcatcgccaccgccaaccagctgcgcgcccacctccagctcgtcttcccgggggccgtcgggctcttcgccgacatcgacagcgccgtcagcctcgacttcctggagcgcttctccaccgccgccaaagccgcctggctctccgagaggcgcctggctgcctggctggccgccaacgcatacagcgggcgcaccggtgtcgggacgctgctgcaacggctccagggtgctcccgccggcctgcacggggccgccgcccaggcccaggccgcggtgaccctggccctggtccgggtactgcgcaccctgctcaccgagatcgcctcgctggaggcgcagatccgtgagcagctcgccctccatcccgacggtttcatcttccagagcctgccccgctccggctgcatccgcgctgcttccctgctggccgagatcggcgactgccgagcccgcttccccagcccggaatccctggccgccctcgccggcgcggtgccctcgacgcggagctcgggcaagctgcacgtggtcaccttccgctgggcctgcgacaagaagctgcgcgacgccatcctcgacttcgcccaggactcgatgcgtgccaacgcgtgggcagaccgcctctaccaccagcatcgagcccgcgggcacacccatccccacgccagccgtgtcctggcccgcgcctggatctacgtgatctggcgctgctggcaggaccgcgtcgcctaccagccagagcggcaccgcgccctccaagccctgcgtgtcgcggcctgaccggccacgtgtccacgatccaccttccgccgcatcgagccccagaggccttcctacgaccacgcgattgctcgtttcgcgccatgggcggcgttctgccaccacggaggttgacttagggct

SEQ ID NO: 5295 - DNA, 1826 bp, unidentified
  source 1..1826: mol_type = unassigned DNA; note = element_81c7f83
  misc_feature 1..2: note = core
  misc_feature 3..336: note = LE
  misc_feature 337..1695: note = CDS
  misc_feature 1696..1826: note = RE
  misc_feature 121..295: note = bridgeRNA
ctagtataataatgatatagctacaagagctatagagttaataagttacaaggtcatatctgatgaataacagaaggagaattccctctccatcagaagttataaacatttaccgtgtctgaggtttccttaatgcaccagacaaaatatagaggtataatcaccgaggcaggatcattgacgtttcctccttgggaaccagcagagcctctgctggcgaaaccttaagataagtctgtcagtccattcggtggtgatttatgttttggctggttgggaggcctcaggctatacctgtataagccgctaggttgtgtatccgccttttggaattggatgcctgccggaaaggataaaaacatgcaataccaaaaagtacttaagatgcttgaaaacactccctatctctcagtcgggcttgatgtcggggcagacttcacctggatgtccatcatgctccctaatagcacgcttaccgggaaacctttcaagatcgttcattccgatccccagtcccgggagcttgccgtcacaaaaataaaggaagcacaaaaggcgtattctcttgaaagccgctgcttccttgagtccaccgggatctaccacatcccgctcctgtgcttccttcgcgataagggttttgactgctcggtcattaatcctatcattactaagaatagcacaaacatgaacgtaagaaaactgcataatgataaatttgattctaaaaaagctgccaaagtagggctggatgcttccctgaagacttccgtcattccggatgatgaggtcattgacctgcgcaacctggtacgggactattattacttcaaggacctgcagtccgctgtcatcctgaagctcacggcggaactgaaagtatctttccccgcataccgaaaggtgttcagtaaggtcaccacccagacttctttaaaacttctggatgcgtatccccttgcacaggagcttctcgccgcaccaaaggagacggtggtggaaatgatccgttccacagcacgcttcggggaaaagtacgccctggcaaaatatgacgccctgcatgacgccgcagaggatgcagctgttttcgggcgtgcccttcaaagcaacgccctccggatccggctatatataaaactctaccgggaataccaggagcatctggacagcatgctcgaagaactgcataaagctgtcgaaaggctggaaggaacgccggtccgtggccgtatctccctcctccagaccctgccgggtgtcggtttcctgagtgcggtcgtcctgatcgcggaaatgggctcctttgacctgttttcctcacccaaaaaactttatgcttactttgggatggatcccggtgtaaatgattccggcaagttccacggggacagggtccatatgtccaagcggggctccagccttgccaggcgtatcctgcatatggccgccatcaacaacctgaaagtagataaagcagcaaatgcgcccgtgaaccctgtcatttatgactattacatccgcaaatgtgccggcaagaaaaagatcgttgccgttggggctgtcatgcacaaaatctgtaacaccatttttgccatgctccgggataataagccttttgaactcattacaccagaggaacactgcaaacggtacgcagcagaacactcaggaactatgaacgccgctgcatgatagaagtcggaatcaactttaaaaaatcccataacaattgggtttattaaagttacccttttttagatcaactgctcgaaaaaaattttttaaacatttttcaatttacctattgacatttcttagctgga

SEQ ID NO: 5296 - DNA, 1392 bp, unidentified
  source 1..1392: mol_type = unassigned DNA; note = element_81cc70a
  misc_feature 1..3: note = core
  misc_feature 4..87: note = LE
  misc_feature 88..1116: note = CDS
  misc_feature 1117..1392: note = RE
  misc_feature 1087..1379: note = bridgeRNA
agatgggatggttgccgccctccccagacggcatcgcaatgtgccaaggtcgtgatgttcaacgccacgagaaggagaggacggcaaatgaaggatactatgatcggggtggacctggcaaagaacgttttccagcttcacggcgcgacaatgacggggcatctaagtttccgtaagaagctgacgcggtcacggttccggcagttcatggcagcccagccgcctgccgtggttgtgatggaagcatgcggcagcgcgagctactgggcccgagaaatggtcaaatttggccacgaggtgaaactgatcgcacctcaatatgtgcggccctttgtcaaacggcagaaaaacgatgctgccgatgctgaagcaatcgtcgttgcagcacagcgcccggagatgcgttttgtacagccgaagtcggaagaacagcaggcatgcgctgtgttgttccgagctcgggagcgcctcctccatcagcgcaccgagcttgtgaatgctttgcgttcggtgctgtacgaatatggccacatcattccgaaagggatcgcccatatcaagcggattgaaagtatcctggacgagccgaacagtgacctgccagccctggtgcgcgaggaatgctttgatctgctcgaacagattgctgaaaagacggcccggatcgacgtcaaaacggcaaaggccaaagccctttccctggcgaccgatacagcgcggcgactccagacaatgcttggtgtcgggccccagactgcgttggcgatcagcggctttgctccgccgatggagagcttcaaacgcgggcgagactttgcggcctggcttgggctcgtgccacgtcaatacacctccggcggcaaggagcgacttggacgggtatcgaaggctggccagaccgatatccggtctttgttgatcatcggtgccatgtcacgcctgacagtgctggcccgcaaatccatcgtcgagggatcatggctggcacggatgctgcgtcgcaagccgctcatgctggtggcgatcgcgcttgcgaacaagatggcgcgggcaatctgggcgatgatgacaaagaaagaggattatcgaaatccggcgcgagttgtagctgcatgacggatatgcatcacaacacaaaatgcgccggtgaagaaggtgtaggaagtcgatgacctgaatgggcacaatgatcgaaaagatctggatcaggaaaaccagccgtcgttcccgagcttgaaagctcttgcagaagatttggacccgatccgcagatcaccataccggcccgcggcttcttgaaaggccgcaaggaaaaggcctgagagaagaacgcactcgatcaccgggcacatcaggttgaaaggctcttgcatcgagggcggcaaccagaga

SEQ ID NO: 5297 - DNA, 1518 bp, unidentified
  source 1..1518: mol_type = unassigned DNA; note = element_81cda8b
  misc_feature 1..3: note = core
  misc_feature 4..245: note = LE
  misc_feature 246..1391: note = CDS
  misc_feature 1392..1518: note = RE
  misc_feature 3..219: note = bridgeRNA
cttatattagatttagtgcagttagctactgccaaagcccaagtgctacacttggaataagccactgtggattagtttatcacctccaatcgctagacgatttgtgaaaggctctaaccacagctttttgtttcaattggtaatgagtttgataacgctagacgttttatctcgtgtaaggtcacaaggcaaaaagttcgtggataaccaagtggacttgaatacatgatacggaggtatgacctatgctttatattggcattgatgtcgctaaaaataaacacgatatcgctgtcttaaacgacaaaggaaagaccattctcacatctttgacggtgtcaaatagcagagctggttttgacttactacatcaatctctcaaacagctcaaccaagactgtctcatcgctctggaagatacaggacactatacctttaacctcttgaacttcctacatgaacaccattatcaggtttatacctacaatccgctactcatcaaggaattcgccaagtccttatcacttagaaagactaaaacagacaagaaggacgctcgtgtcattgccttaaaactcttatctgacccaaatcgggaacagttcaaacacgataaacgacaagaagagttgaaaatcctaaccagacaccttaaccgactcaagaagaaacaaactgactggaaagtccagtataccaagtgcattgacatcatcttccctgagttggataaacttatcggaaagcattctgactatgcctacgagctcctctcacgctaccctagccctgagaaaatggtacaggcgggattcgataacctccttgacatcaagaggctatcagcccataaaatcaaggatattctcgacatcgctccatcttccatcggaacaagctcactagcccgtgagtttgaactcagagagattatcgagaacatccagcactataacaggcttatcaagaccgcagagacgcagattgatgaactgatggctgacatcaagtcggtcatcaccactgttacggggattggaaatcgtctagaggctgttattctagccgagataaggaacatccatacctttgacaaccctgctcaactccaggcattcgctggtttagagccagccatttaccaatctgggcagatggagatgacgggaaagatggtcaaaagaggttccccacatctacgatgggcaatcttacaggccgcaaaagcatgtactcgctattcgccccaatttagacagttccttagtcttaagctggaacaagggaaacactacaatgtggctatcacacatgtcgctaaaaagcttattcgagtaatcttttacttgcttaagcatgacataccttttgacgagaagaggctaaggtaaggataaaattcaatagtacatacctttgaaaattcgacgtctttcaaaggcttttcagcttaccttcaaactcattacaagaaaacaacaatctaaaaaattaaacttgacttttcttatagtttgt

SEQ ID NO: 5298 - DNA, 1539 bp, unidentified
  source 1..1539: mol_type = unassigned DNA; note = element_81d6dea
  misc_feature 1..4: note = core
  misc_feature 5..256: note = LE
  misc_feature 257..1444: note = CDS
  misc_feature 1445..1539: note = RE
atcacgtataatgttgaacataaagaatttaaattcaaaaatttgatttctttatgttttttgctattataaatagtaatcggtaaagacggattataacaggcacttcgagtgcgtaaaaatgaatgtctgccatataattatttattaattcgattgtagttaatggaacgaaagagttcggatgattaagcgtgtaggaatataggtaattcaatatggtgttagccgaaatatttaagaaaggagtttaatgatgaaacatattttaagttttgatattgctaaaggtaaaagtgtttattgttttattgatgaattaagaaatactattattgatgctactttaattgaacataataaaaatgaatttgataatttatttaaattagttaaaaattatcctaacctaattgtaattatggaatccacgtctgtttatcacttgcctgttgaaaattattttagatctaaaggtatagatactattgttattaatcctaaacttgttaaacaatttaaagatactttaaataaatctaaaactgataaattagattgttttaaaattgctagatgttatttaggaactattgataatttttattataaaaatgatgaatattttatttataatccactagctcgtcaatattggtctttaattgaaggacaaactagattaaagaatagatataaacaattaattgaaattgtttttcctgaatttagccttatttttaataacttatatgatgatttggctttaaattttatacatgattttcctcatcctgttttatttgctaatagaagaattgattatttaatgaattatttaaaagaaaaaaatgcaaccactcaagcttttagatttaaaaataaagttttaaaaatgaaagaacttgcttctaattcattatgttttgtttcctttgattctttacaagttcaaaatttagttcaaataatagaaatgattcaatatcataaatctgaaattaataaaattaaaaatcaattaatcaatgaaatgaaatataagaaactatttaaaattattaattctattcctggttttggtgaattttatactgctttatttttagctgaagttggagatataacaagatttgataacaaataccaatttatatcatttattggtatagattcagtaacatcacaatctggtatttctgcatatcatgggccaatttctaaaaccggttgtaaatttggcagaactattttatttaatgttgttacaacattaattcaaataagtgcacattctgataaaactaatcctatttatttgttttttagaaaaaaacaatccgaaggtaaacgccattataaatgcataattgcttgcgaaacaaaattatgtaaaaccatttataaattatgttcttccgattgtctatacaaaaacaaatagactaatttaccaaaatttttaaaaattgaggaaactcagttctttttgtcgtgattataatatcataaattttgtaatttgacaaaacttagata

SEQ ID NO: 5299 - DNA, 1571 bp, unidentified
  source 1..1571: mol_type = unassigned DNA; note = element_81e2d73
  misc_feature 1..4: note = core
  misc_feature 5..289: note = LE
  misc_feature 290..1561: note = CDS
  misc_feature 1562..1571: note = RE
ctcactggactacctttcttgtgtcagcgttctccgatagggcgctgatgcaccccgggtgccgccgggccatcgcccggctcgctcgacactgttgatgtccagcatgagatctgcgaggtctggtggctgcccgggacgtgtggaccgtcgatagggctgagcgccaaacccgggatgaccgggagcgagcgccgatcagtgagcgaaccggcagacacgtcccggctcccatggcaccgtgagacgagggcgcctccccactgggcttagcagcaaggaggctgacatgaagtctgccaacacacccgacaatgaacaaaccctgtccctgcccgacgacccgcccggcgacgtcaccgcgggtctggactgggcccgcgacgatcacgccgttagcatcgtcgatcaccgtggccgagagctcgaccgatgcatgatcgaacacaccacagacggactgcatagcctgctggccttcctggcccgcaacaacgccgccgaggtagcaatcgaacgccccgacgggcccgtcatcgacgcgctgttggacgcgggcatcaccgtggtcgtagtcagcccgaaccaagtcaaaaacctccgccgccgctacggatccgccggcaacaaggacgaccggttcgacgcttacgtgctcgccgacacactccgcaccgatcgggcccgactgcgcccgctgattcccgaccgcgacgacacgaccgcgttgcgtcgggcctgccgtgcccgcaaggacctcgtcgcccaccgcatcgcggtcggcaaccagctgcgcgcgcacctgcgcaacgccctgcccgccgccgtcggcttgttcaaagacatcgactcgaacatcgctctggcgttcctggaacgtttcgactcccaggacaagctcgactggctcacccccaccaggctcggttcctggctgcgtaagcagggatactccggacgcaccaatcccaccgtgctgcacgcgaagacccttaccgcaccgcgtggccccatcggcgagttcgccaccgctctggccgctatcaccgccagctacgtcaaggtcttgcgaaccctgcaagaccagacccgcaccctggaaaagcacatcgacaggcaactgagcatccacaccgacgcacacatcttcaccagcctgccccgagccgggcgcattcgcgccgcccgcctgctcgccgagatcggcgactgccggtcccggttccccaccccggagtcgttgatctgcctcgccggtgccgcaccatccacccgacaatccgggaagatccgcgttgtcggcttccgctggtcctgcgacaaacaactcagagacgccgtcaccgacttcgccgccgacagcgtcaaagccaacccctgggccgcgcacctctaccaacgagcccgtgaccgaggccacgaccacccccacgccgtccgcatactggcccgcgcatggctcaccatcatctggcactgctggcaagacaacgtcccctacgaccccaccaaacaccgcgcacttcaggcctacctcgacccgaaaaccgaggcggcttgacatagggctt

SEQ ID NO: 5300 - DNA, 1350 bp, unidentified
  source 1..1350: mol_type = unassigned DNA; note = element_81e30c8
  misc_feature 1..5: note = core
  misc_feature 6..234: note = LE
  misc_feature 235..1281: note = CDS
  misc_feature 1282..1350: note = RE
  misc_feature 36..223: note = bridgeRNA
cttttatttttgtatagaatttgaaaaaaggtcaataatattgttgttaatcaaaatgtattggcttgtgtacgaggggatgtggggctaggtaagcattgctataccgtaaaaaaggtttcccccgtacactttattctcaagagtctgaacagtacttaaggcggtataaccagcttggataagataaaagaatagactaaggaggattttcaatgcataaaaaaaattcttatgactatacaaaaacaatccattgggatcgacatctcaaaagacacgttcacagcatgtggatgttctgtaaatcatgacgggaagttaacatttaccgaagtaaaaaatttcaacaatgcacaacaaggatttaatcaattgctgcggtgggcaaagacttttgctgatccaaattcagaattgatttttttaatggaggctacgggagtatattatgaatcattggctcaccaccttttcaaggttaaaaagaaagtggttgtggtcttgcctaatatgtcaaagcattatttttcaagtttaaatattaaaagtaagactgacgaattagatgcaaaaatcttaagtcgatttggtgttgaacgtattcatcgcctatggactccaccactcgaaatcttacttcatttacggaatttgacgcgaaattatgttcaacttcaagaacaaaagaccaaactaggaaatattaaacacagcaaagaatcttcgaataacatacagaagtttatattgacgagcaatcaaaagttaatcaagcaaatagatgttcaaattgaacaatgtaaaattgagataaaaaaactcgttatgtcagacgaagaactaaacgaaagaattgagaagttaatgacgataaaaggcgttggattcatgacggttgtggcggtaatagctgaaacatttggatttgaacactttaaaagcgctaaacaggttgtaagcttcgcaggatatgatgttgtgcaaagggaatcaggcacttccataaaaggtaaaaccagaatatctaaaaaaggcaatagattcattcgcaatgccttatactttccagcgatggtagctacaagatataatcctgatctaaaggcaaattatatgcggattataagtaataatccatcaaagatggtaggtcaggtagctatccaaagaaaacttttagtcttgatatatactttatggaaaaataattcaacctatgtatcaaactacaataaaatagccccaatggaaatcattgaggctacgctagatagttaataaattaacttctttgaattacaaaaatactgttttttgtttcaaaaaatttggaatttaaaacagtac

SEQ ID NO: 5301 - DNA, 1314 bp, unidentified
  source 1..1314: mol_type = unassigned DNA; note = element_81e8402
  misc_feature 1: note = core
  misc_feature 2..68: note = LE
  misc_feature 69..1085: note = CDS
  misc_feature 1086..1314: note = RE
  misc_feature 1087..1307: note = bridgeRNA
taatgagatggtacgtccctccctacagctaaacttgaaatggtttagtcttaaaaggaaagtaccaaatgaataactcacacattatcggaatcgatttaggtaagaactcttttcatttagttggtcatgaccatgctgggaatcagttatttaagaaaaaacttactcgccaaaaattactagagttcttatcgtgtcatgagcctgtcattatagccatggagtcatgcggcgggtctcattggcttgctcgaaagtgtactgaatttggtcatacagccaagctaatcccacctcaatatgtaaaaccttacgttaaaactaacaaaaatgattttatcgatgcaaacgctattgcagaagcagcttcacggccaacaatgaggttctcttcagcaaagactgagtcagctcaggttatctcagcgattcgaaaaattcgtagcgggtatattagagagcgcaccgcctgtatgaaccgaattggctcaatccttcttgagtttgggatcagtttgccaaaaggccacgctagtatgaaaggtttatttcagtggctagtggataagaatcaaaaccttcctcctctaatcatttttgaattaagtgagttacacgaacactatcaaaaccttaatgaacgcatagattcacaagcagataaggtcgagagaatccttgcagataacgagcagatgaaacaactgcaaagtgttccaggcattggcccagtcatcgctagtgcttgtttatcatcagttggtaaccccagtgacttcaaaaacggcagaaattttgcggcatggatcggactagtccccattcaatactcaactggtggtaaatcaacgctacttggaatatcgaaacgaggaaataaagaactaaggacgctattcatccatgctacgaggtccattttatggagagacaaatcggttgaaaaatactttggctcgtggcttgtagagcttaagaaacgaaaaccttttaacgtggcagtggtagcactagccaacaaaatagcccgtatagcatgggcagtcttagtcagtaaaaagtcctttgaaataagaacataatcagaatttgcaatgagagaaaaagatgacacaacggttagaccaccagactgaagacctgttgccccaaacagcaacttaaaatgcttttcgctttgtgaggacagtctggcgcacacctcatcatagagctgagactaatggcggtctctaatagactctgaatatattagcgcaaatcagctcgttgtttttaactctacttgcaataacgggacgtaccatatat

SEQ ID NO: 5302 - DNA, 1353 bp, unidentified
  source 1..1353: mol_type = unassigned DNA; note = element_81fc683
  misc_feature 1..4: note = core
  misc_feature 5..83: note = LE
  misc_feature 84..1106: note = CDS
  misc_feature 1107..1353: note = RE
  misc_feature 1115..1341: note = bridgeRNA
atgatggggtggacggcccccacccggcatcggtgtgccacactggttctgggtaaacagccaccagtgaaaggggaccgtccatggaaaaggctagcatgattgggctcgatatcgccaagaacgtgttcgaagtgcatggccgcagcgcggctggcgaggtggtgctgcggcgcagcctgaggcggggccaagtggagaagttgttcgccaagctggcgccggcggtgatcggcctggaggcatgtggctcggcccatcactgggcgcgcgtgctcggcaagcacgggcaccaagtgcggctgatgcctccggcctatgtgaagccctatgtgaagcgcaacaagagcgatgccatcgacgcggcggcgtgctgggaggcggtgggccggcccgatatgcggttcgtgccggtcaagacggtcgagcagcaggcggcgctgtcgctgcatcgcagccgcgacctgctggtgagccaacgaacccagctcggcaacgcgctgcgggccttgctgtcggagttcggcatcgtggcgggcaaaggcaaggcaggcttggcccggctggtcgatgaactgcgcgccggcacgctcgatctgccggccgatgcggtggtggcggcgatggcgctggccgatcagcgcgccgccctcgatgcggcagccgatgccctggagcgccgcatcaccgcgcaggccaaggccgacgagaaggcccgcctgctgaagactgcccctggcgtcggcccgctcagtgcccatgccacgctggccaccctgccggatccctcgctcttcaagagcggccgcgacttcgccgcctggcttggcctgacgccgcggctcaacggcaccggcggtaagacccgcaccggacgcatcaccaagcaaggcaatcaacctttgcgacgactgctcgtgctgggcgccaccgcctggctgcgccaggtgaaagcacaccccgaaaagggctcgccctggttgcgcggcatgctggctcgccggcccagcaaggtcgtggccgtcgcccaggccgcccgcaccgcccgcatcctgtgggccatgctcactcacaaccaaccctatcgcgcgccagccatcggctgagccgcccaaccccttcgcaaggagcacagcagcaactgatggcgaaatcggtaggcataccggaccgggaacactccgtgctgtcatcgcgcgctaaagcgcgccgggatgataggagcctcggcacgtataccatcgaggccagcggcacatcgatcggccgcacaaacaggccggacacatgaccgctcctacttctcgccaaatagatgctgcttacctcttgcgaaacgggggccgtccacac

SEQ ID NO: 5303 - DNA, 1156 bp, unidentified
  source 1..1156: mol_type = unassigned DNA; note = element_8201f7c
  misc_feature 1..2: note = core
  misc_feature 3..205: note = LE
  misc_feature 206..1144: note = CDS
  misc_feature 1145..1156: note = RE
  misc_feature 36..211: note = bridgeRNA
cttgtcttatgattattcctgcttcttgtgagagaaagaagcgccggagagggcggtcaccctcgtccggcgatgggggatggatcgtgaaatgcgaggccgttttaagggccgggctagagtctgatcgcccccatcttttccaatcgtcctgaacggatacccaaggtcttgccttggatgacaagcataggaggcggaaaagatgagccaggatactatcggcgccgacatctcgaaagaccatatcgaccttcatcgcctgccggatggaagaaggttgcgtgttgccaatgatcgcacgggatttgcggcaatcctcaagtggatcggcggtgcggcggtcgcgcgtatcgtctatgagccgaccggtgcctaccacaaagcattcgagcgctgcatgattagccacggtctggcgctcgccaaggtcaaccacgggcttgcccgccgttttgccgaagcgtctggcaaactggccaagacggatcggatcgacgccgcaatacttgcccgctatggcctgttgctcgaaccgcgtctgttgcacgcaaccgcggatgctctcaacgatctgaaagaactgcacgtcgcccgtctggccttggtgaaggacaggacggcggccaaaaaccgagcgaagaacctgacgcagcctttgctcaagcggcagaacgcgtctcgcctcaggcagatcgaacgccagatggacgatatcaatcaggccatcatgcggttgatcgaggccgatgacagtctcaaggcgcgtttcttgatcctggtgtccattcccggcatctccactgtcagcgcctttgcgctgatcatcgaaatgcctgaactgggcgagctcgacgagaaggctgccgcgtctctgtgcgggctggcaccaataagccgccagtctgggcgatggaccggacgcgccttcatcaccggcggcagagccaccgtgcgccaagcactctacatgccagccctcgtcgcagcccacttcaatccggacctcaaggccaaatacaagctactcaccgaaaacggaaaaccacccaaagtcgccatcgccgccgtcatgcgaaagctcatcgtcctcgcaaacgccctcctgcgtgacgaacgaaaatggaccccaaaaccagcttgatcaaaacggata

SEQ ID NO: 5304 - DNA, 1277 bp, unidentified
  source 1..1277: mol_type = unassigned DNA; note = element_820e43e
  misc_feature 1..2: note = core
  misc_feature 3..266: note = LE
  misc_feature 267..1262: note = CDS
  misc_feature 1263..1277: note = RE
  misc_feature 46..214: note = bridgeRNA
cttgtatgttgctcctgcaccaaggagaagggttagtctctaaggtgtgacatacgagaaatacgtttctgggggaggccgatcgctcctgaaggcaggaccaagtcctgaccttgtctgtagagaggccccccgcctcattgcccaccacgaagagtatcgagaagccgacaagtcggacttcgcattacaaggttgcagtggcatgaagttcgaggtcgggggaaccggagacatttttacctgatttctctggagttgaaagcatggggttgtatatcggtatcgacgttgggtctcgcagttgcgccatgagctggcgggacaagggccgtgtggcaggttcttgggacattatccagacgccgaaggggcgtaaggcagccgtgaaaaagctgttgtccctcaaacccgtcgcggtggtcatggaggcgactggagtttattacctggatctggctattgagctggccgcagcgggtttaccggtctcggtcattaatccgaaaagcttccataacttcgccaaacttacgctgacaaccagtaagactgacggaatcgatgcgcagttattggccgagtatggcgagcgcatgacaccccgattatgggttgctcctacgccgatccagctggaactacgggccattggtcgccatatcaaccgcctgacctgccaccgcactcgggcaaagaacgagctgcatgcgttgcaggcgactgaaacctcaatggcgctgctcatcgaggatgaggaagaggcgattgctatgttcgacaaacgaattgaacgcttcagggttgcgggccgtgagttgatctcgacatgccccacactgagtgcgcaattcaagcacatgatagcggcgccggggatgggggaagtttcagtgtttgcggcattggctgagctaaccacgttgcccacaacgctgaaatcatctcaggtgagtcgtcatgcgggacttgatgtgaggctgacgcagtccgggaccagcatcaataagcctgggcgtatgagcaaggctgggaacgcctatctgaggtctgcgatgtttatgcctgcgatgacagcggtgcgttgcgatccttacgtgaaggcgtttttcgaggcgctagtgagtcgcggcaagagaaaaatgcaggcgatctgcgccgtgatgcgcaagtacctgaccggactctgggcatgcatgcgctcgggagaggattttgatacggccaagctgttcagcgaaaaacacttcgtgaaagcttgaccggcaacagagtat

SEQ ID NO: 5305 - DNA, 1378 bp, unidentified
  source 1..1378: mol_type = unassigned DNA; note = element_820eb00
  misc_feature 1..2: note = core
  misc_feature 3..85: note = LE
  misc_feature 86..1117: note = CDS
  misc_feature 1118..1378: note = RE
  misc_feature 1147..1366: note = bridgeRNA
tgatgctgtggacggctcctccacctgcacgcaggtgccataattgtgggcgccgtttaaggcctcacttccccaggagttcgtcatgcacacggtcacgacaatcggtctcgatatcgcaaagtcggtttttcaggtccacggtatcgacgcgcagggcaaggtggtcatccgccgccagctgaggcgccgctatgtcctcgcgttcttccagaagcttccgccgtgtctcgttggcatagaggcctgtgcttcatcacatcactggtcgcgcgaactgcaagcgctcgggcacacggtacgcctgatgccggcggcgtacgtgaagccctacgtcaagcgacagaagaacgatgcaactgacgccgaggccatctgcgaagcggttacccgcgcaaacatgcggttcgtcaagaccaagaccgccgagcggcagagctgcctgatgctgcatcgcacccgtcacctgtttattcgccagcagactgcggtgatcaacgcgatccgtgcccatcttgccgagttcgggatcgtcgcgccggtcgggcgcaatggcgtcgaggaactgctcgaagtcgtcgccgatcccagcgacaaacgggtgcccgaggttgcgcgcgtgtgtctcgccgcgctcggcgcccagctacggctgctcaagctgcggatcctggaatttgaccgtatgatcaatgcttggcaccgatccagcgagacgagccggcggctcgatgagattccgggtatcggtccggcgctagccacggctctcgtcgccagcgtcgctgatccgaaggcgttccgctcggcgcgggatttctcggcctggatcgggctcgtgccgaggcaacgctcgagcgggggtagggagaagcttggcagtatcagcaaacaaggccgatcgctatctgcgcggcctgttcacggctggcgcgctggccgtgatccgctatgccaaatccatggcaccaaacatcggccttggctcactgcattgttagcgcgccggcgcaccaaggtcgccgcgatcgcgctcgccaataagatcgcaagaatggcgtgggccctgatggccaggagcgagcgctatcgggaacccgtcgcgctcgcggcgtgaatgaggtcgcgccaacatccggcgtgatgtgaaagttgggagggcgaacagcacgtaatgcagagccggtcgattccggcgatcaggacaacccaccagtgccattgcatcatcgaatgcgggtaattgaccgggacctgatccgcggagggcattatggccagcggtcatgtgaaccgcatcaacaggccgaacacatggcggcaccgaccagcaacgcgacgtgaagatttcccttgccaactcggagccgtccacaca

SEQ ID NO: 5306 - DNA, 1352 bp, unidentified
  source 1..1352: mol_type = unassigned DNA; note = element_821a299
  misc_feature 1: note = core
  misc_feature 2..287: note = LE
  misc_feature 288..1103: note = CDS
  misc_feature 1104..1352: note = RE
  misc_feature 1104..1342: note = bridgeRNA
tatggaatggcccgccctttcaccctgcatcgagtaagatgccgggtatcggaaagagaagggaacgagccaatgtctattgttatccttggggttgatctgggcaagaactcttgcagcatagttggcgtcgatgcggccggtgcggtggtcactcgtcgcaccatgcgtcggcagaggctgatctactatgtgacgaagcttccgggctggtcgcaatggaagcatgctgcggtgcgcatcatctcggtcggctatttgcagaacagggtcacgagatccggttgatgtcgccggaatacgttcgcccatatatcaaagcgcagaagaacgatgatcgcgatgccgaggggatcgccgaagccgcctcacggccgacaatgcgcttcgtcgaactcaagagccgggagcagttagacatccagacgctgcatcgggtacgttcccgacttgttgcggagcgggcaaacctgctcaaccagatgcgggcgatcttgttggagcgcggggtgatcttctctgccggcggaagaaggtttgagctcgaattggattccatgctttctgaaggcagcgagatgctgtcgcaacgcatgcttcagctgattaagggactgcgtggcgaatggaaggagctcgacgcaaagattggggcactgaacgacgagtttgtccaactggcgcgcaacgacgatgccacacgcaggttgacctcgatccctggcattggggtgctcaacgccgcggctttggtcgcggcggtcggcaaagctagcagatttgctaaggcccgagatcttggctcctggctcgggttggttccgagacaatacagcacgggcggcaaggcacggctgcttgggatatccaagcgcggcaacacctatctacgcactttgctcatccatggtgcgcgcgcggcattgccatcgctttcaaaaagcgacactcctctaggacgatggctgacagcaatgatcgagagaggtgtgcatcgcaacgcgatggtggtggctttggccaacaagctggcgcgtatcgcctgggccgctttacgcaaggagacctattttgaacgcggctacctagcagcaacggcataatcgctcggtcacgtgctatcgcgcgcgtagcccaatgaggtttgcaggaaggatcgtgaagatggcctgacagtcgatcggcgtttggaaagcccgattaaaaaaatggcacgtggtgccgacggacttattggggctctgaacgcgcggatgtccatcttggccatggggttacccatgagaccgtatacgttgacgcaggctgatcagaacaccgtaaaatcctcttgcagacgggcgggccatacg

SEQ ID NO: 5307 - DNA, 1169 bp, unidentified
  source 1..1169: mol_type = unassigned DNA; note = element_8222954
  misc_feature 1..2: note = core
  misc_feature 3..203: note = LE
  misc_feature 204..1166: note = CDS
  misc_feature 1167..1169: note = RE
  misc_feature 3..179: note = bridgeRNA
cttgtatgtttagacttgaaggggtgggcgggactaaaagcccgattccgactcttaccagtacggaccgtgggagacttctcgtcccgccccttctacccaaagcgccgataaggaatgcatcggtaaaaccgacgatagaggcaagccagcgctccggtagaccccaacaagcacttaaaccctagctccgaggattcgttatgacaatccttacctcgccaacggtagttggtgtcgatgtggccaaagccgaaattgttgtttaccgcgaagatcttgaaaccattcaggccgttgtcaacgaccgacaaacgctcggccgctggctcaaaatgttgcctgcgcaaagctccattgccctggaagccaccagcacttaccacctggacacggcggaacttgcccatgaaatggggcatcgggtttacgttgtggatgcttataggctgagccactaccgcgaaagcattggtcaacgggcgaaaaccgatccttgtgatgcgcgtttactggcgcgttatttggcgagtgagcaggatcggttacgtgtctggagcccacctccgcaggcctataaagtgttgaaaagcctgctgcacaggcgcgcggaactcatcagattgcgcgtgagcatcacgctgagttggtcgagcgaaccacttttgaaagatgagctggctttgcagttgaagtctttcaaacaggctgagcagtccattcagaagttgctgcaaaaagtcagcaaagaagcgggtctcactgaaaacatcaagcgttgcaaagccattgaaggggttggggatcttacggctttaggcttggcgaccgcgtttatgcgcggccactttgttagtagtgatgcgttcattgcctttttagggatggacttgagagcaaaagactccggaaaaaagaccggccctcgccgcttgagcaaaaaaggtgatacggagatacggcgtctggcccataacgcggcgatggccgcctgtcggtctcccacctggaaacctttttatgaatcgtacttggcaagaggtttagcaagaacccaggctttggtgatcctagctcgcaagctctgtcgagtggcattcgctctcatgaaaaaccagagcgaataccagccgaatttaaggttgcagggttcccctgcaacatagaat

SEQ ID NO: 5308 - DNA, 1452 bp, unidentified
  source 1..1452: mol_type = unassigned DNA; note = element_82277fb
  misc_feature 1: note = core
  misc_feature 2..91: note = LE
  misc_feature 92..1171: note = CDS
  misc_feature 1172..1452: note = RE
  misc_feature 1184..1404: note = bridgeRNA
taagacaaaatggcgccccttctgggcttgaaaaccgtgggtaagatgcaagcatataccacaaaacaagaaaaccaacagaaggaacgtaatgaaaagaaaagtatatgtaggaatggatgtccacaaagaaacgaacagaattgcgtgtttaacgaacaatacaaaggaaatagtaaaagaacagcagataaaacataatgaggttcagatcaaaaagttcgtcaataaactaaaatcagaatggaacgagatacatagttgttacgaggcgggagtaaccggttatccactttacagatatctaaagtctttgggagtgaattgtatccttgtagcacccggaaagataccaagacaaagctcggataagagagacgcgatcaaattagcaaaattattacgaagtggagatttagaatcgattcatgtaccgagtgaagaggacgaagcagtaagggattatctaagatcccgtgacagtcttcgtttggatttaggaaggaatcgtcagaggttgatgaaattcttattaagaaagggtataacttactcagcaacaaagtattggacagtcagtcataacaaatggttgaacaatctacagtttaacaacgagatccttcaagagacgtttaacgactattatagtcgagtaagagttcaagaagagaatttaaaagcgatggataagaggatacaagagatagcggaaagtgaaccgtatcgagagaaagtaggaatattaagatgtttccgaggagtggattatctaaccgcaatgtttttactttgtgaggtttgtgacttcaaacgattcaaaacagccggttcgttcatgagttttcttggacttgttccgggagaatattccagcggttccaaaagaaaacaaacagggataacaaaaactggaagtcccagacttcgaagaatattgacagaagcagcttggcaacatcgtttccctggaacaggaagtaagattgtaaccgcacgtagatcgggacaacctgcgttagttgttgctttggcggaaaaagcatctctcagattacacaagaagtttcgtaatctacagcaaagaggaaaaactcctcaggtaatgataacggcagtttcaagagagttatccggatttctttgggcggcgatgaatctggttgcatagagttagagtaatgtttcatccaataattgaattcgttagagaagatgtacgataaaggaggaatacttgttggctcagtgttgaagcaaatttgaatttcaaatttgaccttcgttttaagactaagaacagctcccgatgtatagattatcctgcggtatccaacccgcgaatatcagtctgatcaatcgtcgcgaatgcttttctctaacgagttaaattattgggtgattaaaaaaaaatgcgaaaaaatatttacggctccggatgggggcgccata

SEQ ID NO: 5309 - DNA, 1437 bp, unidentified
  source 1..1437: mol_type = unassigned DNA; note = element_823299d
  misc_feature 1..2: note = core
  misc_feature 3..49: note = LE
  misc_feature 50..1159: note = CDS
  misc_feature 1160..1437: note = RE
  misc_feature 1185..1391: note = bridgeRNA
agatggggtattcggcttgtgccccattcttgatgaagaggcatagtaggtgctgcgcttcgagctgatgatagaacgtggtctgtccaaacagccacaagcatcaggaaaggaagcgcagcatgaaacatttgccggactggatgtctctgtgaaagagacctctgtttgcattgtcgacgagaccggcaagatttgccgcgaggtgaaagtcgtcagccatcccgatgacctcatcgcggttctcaaggatccgaccttgcggatcgagcggattgggcttgaggccgggcccttgtcgcaatggctgttcgaaggtctggccaacgctggcttgccggcgatctgcatcgagacccgccacaccaaagcgttcctcaaggcgcagccgaacaagagcgatcgcaacgatgcgcgcggcatcgcccagatgatgcgcgtcaacttgtaccggccggtgcacgtcaagacgatgaccagtcagaagcgccgagcgctgctgacggcacgcaagctgctgcgagaaaaggctctcgccatcgagaacgacctgcgcggcctactgcgcaacttcggtctcaaggtcggtgtggtcggcgcggtgaagttcgaggcgcgcatttgcgaactcgtgaaaggacatttcgatctgtccgaaattgttgagccgctgcttgatgcgcgccggaagctgcgagagaactttgcgacgctgcaccgcaaacttctgacgatcgtccggaatgacgaggtctgtcggcgcctgatgacgattccgggcgtcggccctgtcgtggcgctggcctataccgcgacgatcgacattcctcagcggttcaggaactccaaagcggtggggccgatcctggggctaacgcccgcaatgaaccaatcgggcgagagccgccgcatcggttgcatctcgctatgtggcgacggcatgatgcggactttgctctacgaagccgcgcaggtcctgctggccaatgtgaaaaaatggtcttggctgaaagcctgggcaatgaacgtggccaagcggcgtgggcggcaaaaagccattgtcgcgctttcacgtcggctggccgtgatcatgcatcgcatgtgggtggacggcacagagttccgctggaccaggaaagaaattacgccggctgcctgaccaaggcgatcaaggaaggagacaacaagttccacttgccagtggaaagatgtccttcgcggacgatggatgaggtgagttcgctgtcgcgctagtaccgatcgcatatcgctatcgcgatcaggacgagctatagatttgttccacctcattcttctaccccatggtgggaaggcccccgtgccgatcccggagagaagcaagacccgcgaaagacatcaaggccccggcgaagtggaaagcttgaaagcgcttgacttcaaaacgccgaatagaga

SEQ ID NO: 5310 - DNA, 1419 bp, unidentified
  source 1..1419: mol_type = unassigned DNA; note = element_82330d2
  misc_feature 1: note = core
  misc_feature 2..85: note = LE
  misc_feature 86..1114: note = CDS
  misc_feature 1115..1419: note = RE
  misc_feature 1189..1411: note = bridgeRNA
taatggaatggtcgccccttcccgaaacggcatcaaagtgccagagtggaattgcgacgatccactaaccgagaggggcgacaaaatgcagattacaacagtcgggcttgatctggcaaagaacgtgatccagttgcatgcaatcaatcagcatggcaaggcggtccttaagaaggcattgaggcgcgatcaagtattgccgttcttcgccaatttaacgccgtgcctgatcggcatggaggcgtgcagcagtgctcattactgggcgaggaaattgcaggcaatgggccatacagtccgactgatggcccctcagttcgggaagccttacgtcaagacgaacaaaaacgatgctgccgacgctgaggccatctgcgaagcggtggccagaccgaacatgcggttcgtaccggtcaaggatatagagcaacaggcggtgttgtccgtgcaccgagcacgacaaggattcgtcaaggcacgcaccgcccaggccaatcagattcgtggactgctgggcgagtacggcatcatcctgccccaaggaatgattcaccttacccaaggcttgtccgctgcgctggaaaaggcaagtgacgatttacaagctgtattccgccaactgatccagcgcctgcatgaccatttgaaggagcttgatcgccaggtcggtgagttggaacagcagatccagctctggcatcgggaaagcgccaccagccaaaaattggcacagattcccggcatcggcgcaatcacagcaagtgcgatggtagcttccatcggcgatgccagatgtttcaagaacggccggcagcttgccgcctggctgggattggtgccacggcagcattccagcgggggcaagccaacgctcttgggaatcagtaagcgaggagacgcctatctccgaacgctgttgattcacggggcccgtgcagtgttgcgagtggcggagcgcaaagccaattacgcaggcagctggttggctaatttaatgagccggcgacatcaaaatgtagcggccgtcgcgttggcaaacaagaacgcacgcattatctgggcgcttctggcacacaatcgggactaccaggcgaacttccaattggaggaataaagcgccaatcgtacgttcgaatcatgagcaaccccggcatcgcatgacagcagtatcgattctgaaggagcactccaccgattgcctgggcaatcaagacgtgatggcgagatggtcagaccgtggcaggtcaaacctaatttacacagggagcatcaagctcgacagactgattaggcacctgccagcatattccatcagggacagaggctacggcctcgatcataagtccggatctatggctgcaatctttacctgctcaatatcaccgattgaaggcttggcaaaacaggggcgaccatcta

SEQ ID NO: 5311 - DNA, 1571 bp, unidentified
  source 1..1571: mol_type = unassigned DNA; note = element_8233e4b
  misc_feature 1: note = core
  misc_feature 2..244: note = LE
  misc_feature 245..1321: note = CDS
  misc_feature 1322..1571: note = RE
  misc_feature 81..239: note = bridgeRNA
ccctaactttgcgacatcaatctttaagagaagaaaaaaaagaaaatagaacggtaattcttacctttgttgtattaaggaaagattgaccgccggagagcaccctacgattaacactgggcttcgagcccccaatcggttgtaggactctccgggttctttagttgaaagtcatttagaaagttaggctctgagcctatttagggtggcaactcacaactaatcacggtcaatccaataattaatgtacaaatttatgaaaaaattctttattggagtagatgtttccaaagatactgtcgatgtgagctttttcgatgacgacaggatgaagtcccctgagtacctggcccagtattcaaactcgcccaaggggttccgcgagatggtcaaggacctgcgcatgtgttgccacggtgtcagcagcgggcagtggctgttctgctgcgagaccacgggtcggtatgaccaccctctgtgccactggcttgttgaccacggcatggtggtctggcgagagagcgccctccaaatcaagtggtcgtccggtatccagaggggcaagaacgacagggtggactcgctgcgaatcgccgagtacgcctggcgccaccaggacaagatgcagaagttcgtgaagccgagcgagtcgctctccaacctgaaggcggccttcacacaccgaaggcggcttgtggagaaacgcaccgccacacgttgccaactcaagtcaatgtcctcggagaaaggtctctccgcatcggtcgcaaggatgatcgtcagggacttgagccgggagatagagcgcctgtccgcaagcattgcgaccatggacgagtcaatccagaagataatccgcagcgacagcgagctcgacaggaactaccgccacatcatatccgtcaagggtgtcgggccaatcacggccgtggcactgatcgtgtgctccggcaacttcaaggcaatcacctccgccaagaaaatggcgtgctactgcggtgtggcatcattccggagccagtcgggaacatccatcaacaggaaggcaagcgtatcaaacctctccaaccgccagatcaagtcgctgctcagcatggcggcccggtcggcatcaaggtcaaaccccgtcttcgctgaatatttcaaccgcaccctatcgaggggaaagcctgtggcactggtctacaacaatctgagaaacaagataatcaccgtcgtctacaaactcatagagagggactgtgacttcgatgtggactacaagcgcatgcactcaacaggtcagcgggctaacgagccggcaattagagaggcagtttgactgaaaaagcgcaaaaaaacactacctttgcaatcgcaagccaaagaggaagcaggcactgctggggagcaacctgccagcaataggcttgacacgttacacagtaacgattgcaagggccgaggcattcattttgccccgacccttagtttgttactggcaacgtgccatggctaagaaaacccatccccacaaaatggtaatttttctcaaaaaaaacaccaaaaaatttgcctgttcagttagaaag

SEQ ID NO: 5312 - DNA, 1377 bp, unidentified
  source 1..1377: mol_type = unassigned DNA; note = element_8235cea
  misc_feature 1..2: note = core
  misc_feature 3..86: note = LE
  misc_feature 87..1118: note = CDS
  misc_feature 1119..1377: note = RE
  misc_feature 1148..1365: note = bridgeRNA
tgatgctgtggacggctcctccaccggcacgtgagtgccatgaatgtgggtgctgttaaggctcccacgattcggaggagcaaaacatgcaaacggttacgacaatcggtctcgacattgctaagtcggtctttcaggtccacggcattgatgcggagggcaaggtggtcatccgccgtcagttgaagcgtcgctacgtcctagcattcttccagaagttgccgccatgcctgatcggcatcgaggcttgcgcctcatcgcaccattggtcgcgtgagctccaggcacttggccacacggtgcgactgatgccgccggcctacgtgaagccttacgtcaaacggcagaagaacgacgccactgacgccgaggccatctgcgaggcggtcaccagggccaacatgcgatttgttgcgaccaagagtcccgagcagcagagcggcctggtgctccaccgcacgcgccatctattcatccgtcagcagactgcggtgattaatgcgatccgggcccatcttgccgagttcgggatcgtcgcgccggtcggacgcaatggtgtcgaggaactgctcggggtcgtcgtcaatccaagtgacaaacggctgcccgaggttgcccgcgcttgtctcacggctctcggcgcccagctgcggatgctcaaggcgcagatcctagagttcgatcgtatgatcagagcctggcagcgatccagtgagacgagccggcggcttgatcattgtcccggcgtcggtccggtactggctaccgctctagtggctaccgttgctgacccaaaatccttccggtcagggcgcaatttctcggcctggatcgggctcgtgccgaagcagcactcaagcgggggcaagaacaggctcggcagtatcagcaagcaaggcgatcgctatctgcgcggcctgttcgtggctggggcacttgccgtcatccgctatgccaagatccatggcaccaagcataggccctggctcacggcattgttggcgcggcgaccgacgaaggttgccgccatcgcgctcgccaacaagatcgctcgaatggcctgggcgatgatggccaaaagcgagcgctacaaggaacccgtcgcgcttgcggcttaacgagatcgcgccggacacctggcgtgatgtgaaggttgggagggcgaacagcacgtaatgcagagccggtcgatccggcgatcaggacaacccagctaccccctagcattgtcgaatgcgggatattgatcgggacctgatccgcggagggcattatggccagcggtcatgtgaaccgcgcaacaggccgaacacatgggcgcaccgaccaatctgcataggtgaagaaagtccttgccaactcggagccgtccacaca

SEQ ID NO: 5313 - DNA, 1433 bp, unidentified
  source 1..1433: mol_type = unassigned DNA; note = element_8239ade
  misc_feature 1: note = core
  misc_feature 2..71: note = LE
  misc_feature 72..1109: note = CDS
  misc_feature 1110..1433: note = RE
  misc_feature 1211..1427: note = bridgeRNA
taatgggatggtccgccgccttcacccaggcagcagctgaggtataaaaagcatacggaggaaggcgtcccatggagctacacacgatcggtattgatcttggcaaaacagcgtttcatctggttggggttaacctgcatggcgaaatcgtggtacggaagaagttttctcgcaaacagctgctgcacttcaccgcaaacctgcaagtcgaattgatcggcatggaagcctgtggcggcgcacacttcctgggccgagcattgcgcgagcaggggcatgaggttcgattgatgccggctcagtatgtgaagccgtacgtaaagacgaacaagaacgacttcatcgatgccgaagcgatcgctgaggcagtcacccgtccgagaatgcgcttcgtgccgatcaagaccgatgatcagttggatatgcaatcgctgcatcgggtacgtgaacgctgggtaatgcgtcgcacggccatcgtcaaccaagttcgtgggttactgcttgagcgcggcatcacgctgcccaaaggacggtcgcatctggatacagccttgccccggatactggaagatgccgatctgaagttatccggcgcactccgcgccctgctggcgcaactgaagctggaactcgatcagatgacaatgcggatcggcgaggccgatgccgtgctcaacaagaccgctcgtgacaacgcagactgtcaacggctgatgacgattcccgggctcgggccagttacggctaccgcacttgtcgcggcgatcggcaacggaggtgccttccgcaacggccgggggttctcggcctggattgggatagttccaggggagtactcaaccggcggcaagcagaagctgcttggtatcagcaagcgaggaaatccctacttgcgaaggctctttattcaaggtgctcgcgctgtcttgcaacaacgcacaaaacagtcgtctggtctgagggcgtggctggagcaactggcggcccgcacccaccccaacgtcgctgccgtggcgttagccaacaaactggcccgcatggcctgggctgtgctcacaaaggcggagccatatcggcctccgttacaagccagcccgatcgcagcctgactggcctgcagatgacgcctggctgaagccaggcttggaaatcgcatccgcgattcccacatccgcaccccagcgacgacgacggagtttacagtttcctgccaggtctgctggcgaacaatgagatggctcaacggtcgaacccggcgctctccaaacctgtggagcaaaaaagtcctcacaagactgactatttaatgaggaagagagcgcagcgcattccatcatggccggagtagtccactccaataaaggccgaatacatttgcgcagaccaacccgccacccttacttttcgcttgcgacaaggcggcggaccataca

SEQ ID NO: 5314 - DNA, 1373 bp, unidentified
  source 1..1373: mol_type = unassigned DNA; note = element_8246a65
  misc_feature 1..2: note = core
  misc_feature 3..77: note = LE
  misc_feature 78..1115: note = CDS
  misc_feature 1116..1373: note = RE
  misc_feature 1115..1360: note = bridgeRNA
tgatggtgtggacggccccctacggcatcagtgtgccagaatgaggttgttgcaaatctcagacatggagaccgtccgtgagccagattatccgcattgggatggatacgtcgaagtatatttttgtgttgcatggggttgatgcgacggagcaggtggtactgcgcaagaagctgtcgcgcagacaggtgctggagttcttcgccaaattgccgccgaccgtgatcgggatggaggcctgcggggcgtcgcaatattgggcgcgagagctttccaggctgggccatgaggtgaggctgatggcgccgcaattggttaaaccctacgtgatgcggaacaagaatgacgggcgggatgcagaaggcctgtgtgaggcgatgagccggccgagcatgcgcttcgtaccggtgaagacggccgagcagcaggctgcgctgatgctgatgggggtccgcgacggattgatcgcccggcgcgcccaattgaccaatacgatacgcggccatgcggcggagtacggcctgatcgcgcccaagggactggacgcgaccaaaccactgctggcgcggatcgcgcaggacgagacgcttcccgctctggcgcgcgaactgtttgtggtgctgggccgggagcgcgtcaggctcgagggtgagttggaggcggttgaggccaagctgatggcctggcaccgcggcgatgccacgggccggcgcctggctcagatcccctcggtcggtccgatcgttgcaaccgcgctggtgatgaagacacctgatccgggcgcgttccgctccggtcgtcactttgcggcctggctgggattgacacccaaggaccactccaccgctggcaagaccaggcttggcaagatcacgcgggcgggcgatgaggacctgcgccgtttgctggtcgtcggggccacggcggtgatccagcaggccaggcgcggacgcggtcatcactcgcgctggctgctggcgctgatcaagcgtaagccgccgcttgcggccgtagcgctcgccaacaaggtggcgcgcatcgcctggaagctgatggtgacgggcgagagttatgacgccgcacggctgaatgccgctacgacgggtaccgcttaacagattggccggccggcgggctcgctcgtcagccgacccggagctgcaagagcagatggagcggtcgatcgagcaacgaagcgagacaatccgcaggacccatcggccgccaacaggtcgcgtggttgtttggaactcgcatcgcgcaaaccatcttggccagcgatccattcgatcgcactcaacaggccggacatatggatgcaagcgatccgatcaatcccagaaagctcttgtgccacgggggccgtccacata

SEQ ID NO: 5315 - DNA, 1498 bp, unidentified
  source 1..1498: mol_type = unassigned DNA; note = element_824a0a4
  misc_feature 1..2: note = core
  misc_feature 3..242: note = LE
  misc_feature 243..1478: note = CDS
  misc_feature 1479..1498: note = RE
  misc_feature 7..241: note = bridgeRNA
ctaatgggagctgccgggtcagggaaggctcggtgccgtagccgccagcaggtgagcacttccgccgccggaagcagtcgacttctgtggtcagaccgtgcccctgctggtcggccgggaggccagaccgttgatggggtggcgtgcccgccccatggggcgtgagcactggatccattaggccgcgtgccgcgccttccgcaggctgcagaggaagcgaagttcctgaccaggaggacgagttgctgctgatcggcgatgactgggccgaagaccaccacgatgtcgaggtccaggacggggacggtcggaaactggccgtcgcgaagctgcccgagggcgtggaggggatcgcaaaactgcacgagctcgtcgccaagcacggcggcaaggacgagggtctgttggatgccgccgaggtcgtggtcgggatcgagaccgaccgcggttcgtgggtgcaggccctgatcgcctccggctaccaggtctacgcgatcaacccgcggcaggtcgcccgcttcaaggagcggtacgcctcttccggcgccaagagcgacaagggcgacgcgcacgcgctcgcggacatggttcgcatcgaccgcgaccagctgcggccgatcgccggggacagcgagcaagcgcaagccgtcaaggtcgttgcccgcgcccaccagaccctcatctgggaacgcacccgcaccttccagcgactgcgcagcacactgcgcgagtacttccccgccgccttgaacgcctacgcagacctcacgctgaccagcacggacgcgctggaactgctgatcaaggcccctaccccggcagccggagcgaagctgacccgcacgcagatcaccacagtgctggcacgcgcccggcgccaccaccgggacgcgaaggcagccacgatccaggccgcgctgcgcgagcggcagctcggcctggccgagcccgtcacggccgcctacgcggccaccgccaccgcccacgcccggctgctgatcgcgttgaacgagcagatagccgggctggagggacaggtgaaggcccattttctgaagcacccggacgctgagatctacctctcgatgcccggcatcgcagagatcaccggcgcccgggtgctcgccgagttcggtgacgatcccacccgctacgccaacgcgaaggcccgcaagaactacgccggcaccagccccatcacccgggcctccggcaagagtcacaccgtccaggcccgctacgtccgcaacaaccggctcgccgacgcgttgcaaacccaggcgttctccgccctgcgggcctccccgggagcccgccgctactacgacaagcaacgcgcccgcgaggccggttacaaccccgccctccgacaggtcggcaaccgcctggtcggcatcctccacggatgcctcaagacccgcacccgctacgacgaagcgaccgcctggtcgcaccacgcgcatccccatgccgcttgacttcaaacgacatggggtgt

SEQ ID NO: 5316 - DNA, 1365 bp, unidentified
  source 1..1365: mol_type = unassigned DNA; note = element_82598c7
  misc_feature 1..3: note = core
  misc_feature 4..106: note = LE
  misc_feature 107..1117: note = CDS
  misc_feature 1118..1365: note = RE
  misc_feature 1143..1363: note = bridgeRNA
agatggaatggtcgcctcccgccttaacggtcgtccggcgccgcagtctcgcgtccagagcatgcgacattgctggttcggcagtcctgccgccaaggagaaccagatggaacccacgaccatagccatcgacctgagcaaacgcgttttccagattcactatgtcgagcctgagaccggcgcgattcacagcaaggctctcaaacgcgcccagctcgtgccgttcttcgcgaaccggcctgcgagccgtgtcgtcatggaagcctgtggcagcgcccatcactgggcccgggttctggcacggctgggccacgacgtgcggctcatcgccgcgcagttcgtgcggcccttcgtgaagtcgaacaagaacgatgcagccgacgccgcagcgatctgggaagccgcacagcgtcccggcatgcggttcgtagccgtcaagaccgaaggccagcaggccatgctggcgatgcatcgcatacgccagcaactggtccggattcgcgtcatgcaggtcaaccagcttcgtggactgctctatgaattcggcgtcgtgttgccgcaaggccgccgggcatcgatcgaagccgccaaagccgcgctggcgtcactggccgacgagctgccagccatgctggcagacagcctgcaggaccagctttcgagacttcgcggactcgacgagcagatcgcacggatcgagcaacgcattctcgattggcgccgcaatgatgacgcatgcaaacgcatctcggagattcctggcgtgggcgtgctcacggcgaccgctgcggtatcagtcatcggacaggcaacgacgtttcgctccgggcgggagtttgccgcctatctgggcctggtgccacgacagaacagttctggtggcaagataaagctcggcggcatcagcaaacgcggagacgtgtatctgcgcacgctgctgattcacggcgcgcgatcggtcatcgtgagctcaaggcatttgccagagcgtttgcgccagatgctgtcccggcgtccaacgaacgtcgttgctgttgcacttgccaacaagatggctcgcacgatctgggcattgctcgcatatggtcgaacgtatcaggcagcacccgcgcagtgatctcgcttcaaagtctttaatccccattcacggttgcacaggtgtattgaacgatggcaagacaggttggaccgcgcaaaggcaagcctgagacatttctcggaccttgagtccgtcgtttagattaggacctttgcggcgaaatccatcggggccggcgggcatgcccgcgatcgagtccggatataagtccgcaaccacccttctcgccacacacaatcaccttgcaaatgggaggcgaccatata

SEQ ID NO: 5317 - DNA, 1405 bp, unidentified
  source 1..1405: mol_type = unassigned DNA; note = element_8266ff3
  misc_feature 1: note = core
  misc_feature 2..81: note = LE
  misc_feature 82..1101: note = CDS
  misc_feature 1102..1405: note = RE
  misc_feature 1178..1396: note = bridgeRNA
taatgagatggtccgccgcttgattcctcaaccgtagtcgagggatcgtggtggcagcttctaacaaggaggatcatcgctatgcagatacattcagttggcatcgacttgggcaagacgacctttcacctggtggcgctcggcgcgtccggcaaggtgcttgtgaagaagaagtttacacagcggcagcttctggcttacaccgcgaacatgcagacgtcgctgatcgggctggaggcctgctcaggcgctcacttccttggccgggcgctacgcaagcaaggccatgacgtgcggctgattgctgctcagtttgtgaagccattcgtgaagtccaacaagaacgacttcgtcgatgcggaggcgatcgccgaggccgtcgagcgcaagaacatgcgcttcgttccgatcaagacggatgaccaactggaccttcaagcgatccacagagtgcgggatcggctgatctcgcgtcgaacggcagtgatcaaccaactgcgggcctttctgctcgaacgtggcatggtgtttgcgcagaagccggcgaagctcaaggcagcgatggcggacatccttgagaacgccgacgccgacctgacaccgctgatgcgtaacctgatcgacacgctatggggtgagtggaagctcgttgagcagcagatcgaagagctgaacgatgaactggagcgcatctctgccagcgatgcaggatgtactcgcatccgcaagattcctgggatcgggccggttgtggcgacggccatcgtcgctgccattggtaacggcgctgcgttccgcaagggacgagagttcgcagcgtggctcgggattgtgccccgccagtattcaacgggcgggaaggcgaagctactcggcatcagtaagcgcggcaacgtctatctacgtaagatcctgatccatggcgcacgcgctgccgtgctgcggatcaagcgagacagagcgccgatcggagcgtggttggacgcactcgatcacagagctcccaagaacgtcgtcgtggtcgccatggcgaacaagctcgcacgtatcgcatgggccgtgctctccagcggcaacgactacagacctgtccctgtatagcggcgcggaaaagacgcctgcggcttggaagcgctgcgctcccactttacctcaccacgacgacggcttgaaacttacccaccgaagtctgcataggagcagcaaggacgaaagaacagtcacaacggcgtccgcagcctggtaccgagaatggtcttcaacgaccgaccgacttagaaggacagacacgcgcgcaactcatcatggccaggagagctgatctccacctaaaggccgaatacatttgcgcagacttgtcttctcgaccaaactaaccccttgcagtcccgcggcggaccataca

SEQ ID NO: 5318 - DNA, 1394 bp, unidentified
  source 1..1394: mol_type = unassigned DNA; note = element_826e18f
  misc_feature 1..2: note = core
  misc_feature 3..131: note = LE
  misc_feature 132..1007: note = CDS
  misc_feature 1008..1394: note = RE
  misc_feature 1173..1362: note = bridgeRNA
acatggggtaatcgcgggagcgagtcgccccggcagcaagcctggatcttggagagtggctgttccccgataagatggaaatacgggctcacgacctgacgtcgggcccaggcatcgaatggagaacagccatggaagaatatattggtcttgacgtgtctatgaaagagacggcggtttcaatccgccgcggtggccagcgagtttggcggggaaagtgcatcactgacccggcaacgattgcagcgcccattcgcaagcgggcctcggcggcaaggcgtgttgtgttcgagaccgggccgctgtcggtgtggttctatcacgcgctgcgcgccaagggcgtgccagcgatctgcatcgatgcccgtcacgccaaagccgcgctcgacatggcgcgcaacaaaaccgatgcgaacgacgctgacggcctcgcgcatcttgctgaagtcgggttctttcgcgaggtgcgcgtgaaagggtttgatagcatgctgacacgtacgctcgtcggcgcgcgtcaccagctgatccggatggcgacccagctttcaaaccagatccgaggtgtcatgaagacattcggcctactcgttcccgcgggcaaaggaagcaaattcgagaggaatgtccgaaatcttctggccgatcgggcagaactggccgccatcgttctgccgttgctggaggcctggcacggcattcgcatgcgtgccgccgagcttgggacccggctcgtctcggccgcacgccaaagccagggctgccgcctcctcatgtctatcccgggcatcggagtggtcactgcgacatctttcgccgccgccatcgaggacccggacaatttcaaaaactcacgatccgtcggggcctgggtcggtctgacaacgcgccgctatcaatcgggagaggttgactatgacggtcatatctcccggcgtggcgaccggaatctgcgatggctgctctacgagagctgcggcgaccatactgacacgcgtctcaactgaaagcagcctgcgcatatgggcgctcgggcttcgcgaaaggatcggcttcaagcgagccgctgtcgccgtggcccgcaaacttgcggtgatcatgcacgcgatgctcaagacgggcgaattcttcgacccgcaagcaggagccgcaacataacacatggcggatagcgttcacattccgaacgcttgaggtgtccctgccgggacgtgggccgagccattccgttgatggggttgcaccgttgattagacagagtcgccaaccacattgaaggctcctcccgcgaagccctatcatgcggcgactgcgtgtcgaccgcggagacaaccatgcatccggcaggcgcgcattctacgttcaggacttgacgcaacaaaagcgattagaca

SEQ ID NO: 5319 - DNA, 1665 bp, unidentified
  source 1..1665: mol_type = unassigned DNA; note = element_8270bb8
  misc_feature 1..3: note = core
  misc_feature 4..262: note = LE
  misc_feature 263..1447: note = CDS
  misc_feature 1448..1665: note = RE
  misc_feature 13..258: note = bridgeRNA
cttatataatgtatttacgttaattaaggataacgcataatcctttttaaacaagtttatacactttattgtgtataatagttttattagatagagtgtcatcgaactctccttgagactcagatctcgttactgaaagagtgatgcctctttctgataaactgattacgtataagttagatgttgacctagttttaggtacttcgcatttcccataaggcggtaacgtttattagattagaggattctatctaaaatatttatgaatggtgattctatgttttatttaggtattgatattggtaaaaatacgcatgtagcttctctcattgacgagaaaggtaaaacttatttcaaagctttttctttttcaaattctacagatggcgctaaatctctcatttctaaactagctccatatgttgaagatttagcaattggtatggaagcaactggtcattattggctttctctttattcttttctatttgaaaagggttttaaaatccatgtcattaatcctatacaaactgatggttggcgtcatggaattgaaatccgtaagcgtaaaaccgacaaaattgattctctcctaattgcagatctccttagatacggtgactttgtggaaacatccctttctagtgaagacttcatgtctcttagaaacctttcacggtttagaagctatttagtctcttctataggtgatcttaaaagaaagaccatcgctgttttagatcaagtcttccccgagtatgcatcttcttttagtgatgttttcggaaagacctctaaagagatactactttctttttctacttctgctgactttgaagatatttctgcttctcagttaaataaagtcttggagagtattcatcttaaaaagtttgccaaaaataaaatagatgaattatctcttaaagctaaagattcttttggaataactttttgtcttgattctttttcccttcaaattaaattattgattgaacaaataatttttattgaagagcagatatcaactatcgaagaagagatattcaccttaatggagaaaatggattcacctattactacgattcctggaattggtaaagttaatggtgctaccattctaggtgaaattggtgatatcaatcgtttttctaatgcatctaaattagtcgcttacgctggtcttgatgccagtgtatctcaatctggtgaatatcaatcaacgactaacaagatgagcaaaagaggctctccgtaccttagaaaagctctattccaatctgctttaagagctgaattttgtgaccctgtgtttagtgagtattatcagaaaaagatatccgaaggcaaacatcacttggtggctaccaacgccgttgctagaaagctctgtcataccatttacgcaattctaacaaagaaaactccatatgaggttcaactttagcttttgttttgcgtaattgttccaaagaatttatggcaggttctgtcaaggacggttttcccttgacgggttctgacaggaattctataattttagcaacaaaacaaaataatatttattttttagatctgttcttacagatcatactttcatgcatattttaatttaaattattcctaaatatttcttatttcacctcttgacttttaatagttagt

SEQ ID NO: 5320 - DNA, 1425 bp, unidentified
  source 1..1425: mol_type = unassigned DNA; note = element_82756d3
  misc_feature 1..2: note = core
  misc_feature 3..123: note = LE
  misc_feature 124..1143: note = CDS
  misc_feature 1144..1425: note = RE
  misc_feature 1185..1425: note = bridgeRNA
gaatggaatgaacgcgtcccacccgtgaacaacggaacgaagaggaggatcctcaagggccagtggcatcgatgtgccaaaagtggaaaatacatacgtttcccggccagccggagcatccaaatgaactttactgcagtaggcgtggatatcgcgaagacggtttttcaggtgcactacgttgaccaagagacgggcgagatcgtcaacaagccagtcaagcgggcgaagtttctggagcacttcgcgaaccgtgcaccgtgtcttatcggcatggaggcgtgcggtggtgcacatcactgggcacggcagcttacgaagatgggccaccaagtgaagctgatgccagcggagttcgtcaaagcgttcaacattcgcaacaagaacgatgcggcggatgctcgggcgatctggttggcggtgcaacagccaagtaaagcggtggcggtaaagaccgagatgcagcaagcgatgctggcgctgcaccggatgcgccagcagttggtgaagttccgcacgatgcaggtcaatgcgttacgcggcttgctgacagagtacggcgaagtgatgggcaggggtcgggccgcgctagataaatccatacccgaggtacttgccagggtcacacagcgcttaccaacggcgctaatcgacacgctacgcgagcagtggaatggacttgcgaagttggatgagcaagtcgcggaaatcgagcggcgcatgcgcgagtgggtcaaggaggaccgggcggtgaaggcgatcggcgagattcccggcgtgggactgctgacagcgacggcggcggttgcgatgatcggcgatgcgaagacgtttcggtcgggacgtgaattcgcggcgtgggcgggtctcgtgcccaagcagacaggatcgggcggcaaggtgaacctgcatgaaatcagcaaacggggtgacacgtatctgcgcaccctgctgatccacggtgcacgatcggtgataacgcacgcaaaggagcccggcccatgggtcgagcaaatgaagaagcggcggccggcgaatgtggtgatcgtggcgctggccaacaagatggcgcggacgatctgggcggtactggcccacgaccggccataccagaaaggatacgtgagcgcgaagccggcttgaatggtggagcgccaagtcaaagactaacgtttaacacaggggtgaacgtcgaaggttgcgttggcaatcgagtgtgatgacaaactaggtaggaccggggactcgctaaacctgaatcaagaagagagcttcgagctcgctaacagaatgaggtgtgagtctgcgtatttcataggggcccgcagcggcagtaccggctgcaaaaggccggatatagagctgcaaccatcctgtctgtcagaagcacacgaaaaactagcgcaaaagggacgcgttcatata

SEQ ID NO: 5321 - DNA, 1112 bp, unidentified
  source 1..1112: mol_type = unassigned DNA; note = element_82788a1
  misc_feature 1..2: note = core
  misc_feature 3..191: note = LE
  misc_feature 192..1103: note = CDS
  misc_feature 1104..1112: note = RE
  misc_feature 1..174: note = bridgeRNA
cctgtgtgttggtttcggtgtatggttgaagtgggaaggagaccgagtggatcctggtcgtcctttcggacaggccgtggcatggcccggtcccttcccaccggtgaaccatcaacctgaacagttgcacggggctgttcgaagcagaccccgcaccacaggaagaggcgtggacatgatagcccagaactatgtcggctgcgacatctccaagcagtggctcgactttttttgatgagacaagcggtcgtcttcggcgcatcgataaccaggccgatgcgatagcggcctatgtggcgggccttgatcccagtcgggacttcgtcgtcatggaggcgacaggcgtgcatgaccggctgctgcgccatgcgctggccaaggccggcgtgccattctcgcggcacaacccggcgcacacccaccactattcgaagtcaacgcgacggcgcgccaagaccgatcctctcgatgccaggatgctgagcggctacggccgtcgctataaccctgaggccgagccggcgccgagcgaagaagtcgagcagcttcaatcgcttgctggccaccgcgatcaactggtcgggatgcgggcaacggcgaagaagcacctcgccgaggccttcgaggagatcgtcatcaccagccttgaagacctgatcgccgacctcgacacgcgcatcaaggcgttcgagagccagattgccgcagtcattcgtcaaaaccaggacaccgcccgcgaccatgcgctgatggtctccgtgcccggtgtctccaagggcggcgcgctctcgctgctggcgctcctgcccgagctcggccagcgctcacccaaggcgatcgccgcgctcgtcggccttgccccgttcgacaacaagagcggcaagctcaaccgcaggagccagatccagggcgggcgatcacgcgtgcgccgcgccctctacatggcagccctcaccgccatcagaacctgtgagcgcttcaagacattctacacagcgcttgctgcccgctcggggtccaagaaactcgccatcatcgccgtcgcaaggaagctcctggtcgtcctcaacgctatcattcgcgacaaaaccgcattcgcatgaacacagttg

SEQ ID NO: 5322 - DNA, 1552 bp, unidentified
  source 1..1552: mol_type = unassigned DNA; note = element_8288960
  misc_feature 1..2: note = core
  misc_feature 3..269: note = LE
  misc_feature 270..1532: note = CDS
  misc_feature 1533..1552: note = RE
  misc_feature 7..249: note = bridgeRNA
ctaatgagagctatcaagcctgaactctggaaggcttgatgacgacagcagccggtgggtcagcactcctttagccccgggcaccgcctcttcggggatgcctattagcagaccgtgcgcccaccggttgccggcggctggaaactgctgatgagatgtcgtgcccgggcggttggacgtgagcacttgttcattaggtcgcagaagcctccgcatgctgcccgcccgttccaccaggccagacacggacaagggaagagctggggccaatgctgttgatgatcggcgacgactgggccgaggaccaccacgacatcgagatcgaggacgacaccgggcggcggctcagccgcgccagactgcccgagggactggacggaatcgcgaagctgcacgcgctggtcgccgagcatgcccccgccgactgggtcgacctcacccctgagcagaccgccgaccgggtcttcgtcggcatcgaaaccgaccgcggctcctgggtggtcgccctacgagcatcgggctaccacgtctacgcgatcaacccgatgtcctcggcccgctaccgcgaccggtactccacctcgggggccaaaagcgacgccggcgacgcccacgtcctagccgagatcgtccggctagaccgagcccatcaccgcgagatcgccggggacaccaacctggccgacgcggtgaagctactgggccgtgctcatcaaaacttgatctgggaacgtgtccggcacgtgctgcgcctccgatcggcactacttgacttctttcccgttgcggtgcaggcattttcggatttagccgccacggacgccctcatcctgctcagccgcgcgccggacccggcccgctccgcccggctcacccgcagccaggtggtgtcggcgttggccgcggcgcggcggcaccacatccaggacaaagccggaccactgctcacgctgctgcacacgccgggccttcggcaacccgccgccgtggaggcggcctacgccgcgatcgtgctcggccaggtcaagatcctgaccgctatcaacgaacagatcaccgcgatgcagtcggtgatggcagaaaattttgaccgacacccggccgcgcagatctaccggagccagccgggcctgggaccggtcctggccgcccgcgtcctgggcgaattcggcgacgacccgcaacggttcgccaactcccgcgcccgaaaaaactactccggacagagcccgatcacgagggcatcggggaaaaaatccgtcgtcctagcccggcacgccaccaaccgccggctcggcgtcgccctgcacctgcaggcctacggctccctcaacggatcgcccggcacccgcgcctactatgacgccatccgagcccgcggaaccggccaccacgcagccctccgccaagtcgccaaccgactcgtcggcatcctgcacggctgcctcgagagcggaaccctctacgacgaaaccgtcgcctggaactcctcagccagcgtcacgcaaactgcaatggcacccgccgcttgacaccaatcgacatgggatgt

SEQ ID NO: 5323 - DNA, 1467 bp, unidentified
  source 1..1467: mol_type = unassigned DNA; note = element_82a29a4
  misc_feature 1..2: note = core
  misc_feature 3..228: note = LE
  misc_feature 229..1446: note = CDS
  misc_feature 1447..1467: note = RE
  misc_feature 7..230: note = bridgeRNA
ctaatggggctcgaccgttctgctcttcggggtgaggatggttccgagccgctggccggtcagccctgttgttcgcctggaccgttggagtcctaggcctagatcgggcgccggtcggtcggtgaggtcgactcagatggctggtgggatgacgtgccggtagagcactgaaccattaggacgccggtgtcgcctcgggctcgcactcgacacgactggaggttgctgatggggaaggtgttcgtcggccacgattgggccgaggcgcatcacgatgtgtgcgtcatcgacgacgagggccatcgcttggccggtgcccggttcccggagggcgtggagggggtggcccggttccacgagctgatcgctagccatgccgacgttcccggtgaggtggcgatcgccaccgagacggaccggggcttgttcgtcggctcgctggtcgccgccggctacggcgtgttggccgtgaacccgatgtcgacgtctcggtatcgggaacggcactcgacctcgggggccaagtccgacccgggtgacgcgttcgtgttggccaacctggcccgcaccgatggccacaaccaccggcccatcgccggtgacagcgacctggccgaggcggtgaaagtcctggctcgggctcatcaaggtctgatctggacccggcaacgtcagctcaaccagctccgctcgaccctgcgggagttctaccccgctgcgctgacggcgttccccgagctgggccaccgcgacgcccttgaggtgctcgcgatcgcgccgacaccggcgcagggccgtcggttgtcgcagtcgaagatcgcctcggcgctgcgacgagggggccgccagcgccgcatcgatgaacggaccgtcgagatccaggcggcgttgcgggccgagcagctcacggcaccggatctggtcagcgacgccatgggttcagcggcccgggcgttggtcgcggtgatcgtcgagctcaccgcccagatcgccgtcctcgagaccgacctggccgaccattttgaccagcacccggacgccgagatcatccgatccctgccaggactggggatgatcctcggcgcccgggtgctcgcagagttcggggacgacccgaaccgctatcacgacgccaagtctcgcaagaactacgccggcacgtcacccattcacccgagcctccggcacccgccaggtcgtcttggcccgcttcgcccgcaacaagcgcctcgccgacgcctgctacctctgggccttcgcagccctccaagccagccccggcgcccgcgccttctacgaccaccggcgcgcctgggcgacacccaccaccgggccctgcgcgccctggccaaccggctcgtcggcatcctccacggctgcctccgccaccacagtccctacgacgaacacaccgcctggggacaccgcgccgacatcgccgcttgacggcttacgcccgtgggatgt

SEQ ID NO: 5324 - DNA, 1373 bp, unidentified
  source 1..1373: mol_type = unassigned DNA; note = element_82a8f5a
  misc_feature 1: note = core
  misc_feature 2..280: note = LE
  misc_feature 281..1303: note = CDS
  misc_feature 1304..1373: note = RE
  misc_feature 100..258: note = bridgeRNA
cctttagatttgtatttctaaataaataataaatatagttattattattatatgtagaggggggtctggggggagtgttagtaagtgttagttttgtggaaaacttgaggcaatgtgtggcaaattatatgagcgactaaagtagaacttaccctgcgttttaatccacactttgctatacaggtccaaaaagccagatagaaaattagggaagaacccattacaaggtcttggttttcacctgttctcaacaaattaattaacatcaaatttgaaaacaatggaaaaattcatcgtgggtggagatatctcaaaggacaaaatcaattttgctgttcagtatggcaaccagatagtccatgaatgcgagataaagaattcttatgctacactgaaatctttcatcaaggaagtgcaacagatcgcacaggatcagagcggatctgttgatacagtacaattatgctttgtgatggaatataccggtatatacaataatatcttactagggtgtcttgttgagcaggatattgatgcttttgtttgctctggcttagcaatcaaaaatgcctcaggattgatccggggaaagaacgacaagatagatgctgccaggattgcggactatggcaagagacatgctgataagttgaagaaatatgaaccatcttccgagattatcaatcagctaaaaataatgaacacccagagggccagattagtaaaaatgaaaactcagctcacacaggaccatgacgatatcaagaagttccactccaaagaaatgtatcaaatgatgaagcagtccactgaaaaggtgaaggcagagcttgaaaaaagcatcaatgagatagaaaagaaaatgatggaggtaattgataaagatgaggctgtgaaagcaaattttaagttcgctgtatcagttccaggtgtagggaaagttacagcgatagctcttatttgttataccaataatttcacctcctttgcttcatctaaagctctggggagttattgtggagtagtgccttttgagcattcatctggcagatacaaagggagggaaaaagtctcatatatggccaataaaaagctgaagacattactccatttatgcgctacatcaagtataaaaacaaaaagtatctttaaagaatactacataagaaagatagaaatagagaagaaaaacaaaatgttggtgctgaataaccttcgcaacaaaatattaaaaacagtcttttcatgtgtaaaaaataagaccaaattcgatcgggaatataagtatgaaatggcagcctaattttgagaacatcaattatcagttatacattaaaaaatatataaaatgaatttggtgaaaccatagaaaa

SEQ ID NO: 5325 - DNA, 1232 bp, unidentified
  source 1..1232: mol_type = unassigned DNA; note = element_82bba68
  misc_feature 1..2: note = core
  misc_feature 3..404: note = LE
  misc_feature 405..1220: note = CDS
  misc_feature 1221..1232: note = RE
  misc_feature 12..248: note = bridgeRNA
cttgtcttacaagtagccaggctctcatgtgatggtagagccactgcgcggcccgtcatttatgacgggcagtggcgggggtcggaccgtttccctcttggtcgttgttgaccgtcgctgagtatggtcggccccgtcttttctgctgaccactgcccgtcagaggtttgcatgcaaaccgcgaaagggatgaacggatacatgggctttgggctcgcatgacaagacgaggtaaggaaaagacaaaagaacgatgccatccattggccggcaggcgatgcgcagcatcgctgagaggcggaatcgacatctagaaagatacgctcgacaccttttggctctcaaaccgtaagcacgaacaatttgccaacaccaagacaggcttgagatcgctcatccgctgggtgcgagaggcggaggtatctttggtcgtattcgaggctactggcgtctatcaccggctgctggaaaccagtcttgcaatgcatgattttccttttgcgcgggttaactcacgtcaggcgcgccgcttcgccgaagggaccggcacaatggccaaaacggatcgggttgatgcggccatgctggccaagatggggtctctcctggagttgcaagctgacaaacccaaaagcgaaatgcttcacaatctcaaagggatgacaaccgcccgacaggctctgatcaaggatcggacggctgccagggctcggcttgccaccgcaacacacccgttgcttaggaagcaggccactcagcgcctgcgccaagttgagcgcgacattgagcagatcgacgcgacaattgagacgatcatcacttctgacaaaacgctctccgaaaaggccgacattctcatcagcatccctggtattgcaaagataaccgcttttgcgatgctgatcgaaatgcccgagctgggcagcctgagcggaaagcaagccgcgagcctggcaggccttgccccaatttcacgccaacccggcaaatggcagggcaaagagcacatccaaggcgggcgggcctgcctgcgaagagcgatctacctacctgccgtggtccccacgcgcttcaatgcagatatgaaagcaaaatatcacgagctgattgccaaagggaaatgcaagaaacttgcgattacagcggtcatgcgcaagctcgtggtcatggccaatgctttgttgcgtgacggtcggaaatggactgaaacacgggcttgaccaatacggata

SEQ ID NO: 5326 - DNA, 1455 bp, unidentified
  source 1..1455: mol_type = unassigned DNA; note = element_82be1de
  misc_feature 1..2: note = core
  misc_feature 3..125: note = LE
  misc_feature 126..1172: note = CDS
  misc_feature 1173..1455: note = RE
  misc_feature 1212..1405: note = bridgeRNA
agatggggtaatcggcttcgtgccccatctccaccgatcggaacggaaggtgctgcgctccgagctgatgataaaacgtggtctgttcgaaacagccacaagcatcagaaagaggaagcgcagccatgaaacattacgccggcctcgacgtctctgtcaaagaaaccagcgtttgtattctcgatgcaagcggaacgatctgccgcgagaaaaaggtagtgtctcacccggaagatttggtcgccatcctgagtgatcccgcattcagcttggaacgcgtaggcctcgaagccgggccaatgtctcagtggctattcgaaggactggcgaaggccggccttccgatcttctgcatcgagacgcgccacacgaaggcgttcctgaaggcttcgcaaacgaacaagagtgaccgcaacgacgcgcgtggcattgcgcaaatgatgcgggtcggtctcttcaaggacgtgcacgtgaagacgcttacgagccagaagcgccgcgccctgttgacggctcgctcactgctgcaggaaaaagcggtcgctttcgagaacgatatgcgtgggctcctgcgcaacttcgggctgaaggtcggcgaggtctcaggcggcaggttcgaggagaggatacgcgaactcgtcgaggcggatcccgatctggcggaaatcatggagcccttgctcgctggtcgacgcaagctgcgcgaagagttcgccaaactggacaagaaggttctccgggaggcaaagcatgatgaagtttgcaagcgcctgatgacggtgccgggggtcgggccggttgtctccctcgcctatgtctcgacgatcgatattcccagccggtttcgcaattcgcgggcggtgggagccgtactgggcctcacgccggtgctcaaccagtccggcgaaagcaaacgggtcggtcacgtctccctatgcggggatgccatgatgcgaaagctcctttatgaggctgcccagtcgatgctgacgcgtgtggtgaaatggtgctggctcaaggcatgggcaatgaacatcgccaggcgacatggcaagaagaaagccagcgttgcattggcgcgtcggcttgcggtggtcatgcatcgcatgtgggtcgacggctcggaattccgctggacgcgagaggagaccaccagcaccgtgggcgcatagaattgtcagtcatcagggcaaccaaagaacgagaaattcaaggttccgcttagcggcggaagacgtccttcgcggacgatggtgatgtgagttcgtgagcggcgctataccgatgacccgtcatcaggatgcagcaaagattggaccacatcatctactgaaccccatgatgggagggctgagtgccgatcccggagagaagcgcgggccgcgaagaaacgtagaacgccgcacaaagtggaaagctcgaaaagacacttgacctcaacacgccgattagaga

SEQ ID NO: 5327 - DNA, 1207 bp, unidentified
  source 1..1207: mol_type = unassigned DNA; note = element_82c1bb2
  misc_feature 1..2: note = core
  misc_feature 3..189: note = LE
  misc_feature 190..1173: note = CDS
  misc_feature 1174..1207: note = RE
  misc_feature 12..198: note = bridgeRNA
cttgtatctctcagtaatagatgattagctatcatttattacatcggatgctagtgagcttgtattcccgcccagtactcgatactgagatgtagattaagccctagcgtccaattctcaacaaactgaatggtatccaagcacacttaaattaagttgatgctgtatgtacaaggggagtaagtagagatgatgtttatcggttttgatattagtaaggataaagtagatttatgctggctgagagatccaactaccaacaaaaagaaaacgaaagtatttaaaaacaaccagctatctttcaaagatattgagcagtggcttttaagtacaacccaagctgtagctgaggaggtcgttatcacggtagagccaacgggtgtttaccatgaaccgctgatgtactttttataccagcaaggattcaatattgtgctcgctaatccaggcaaagcaaagaaatatgccgaggctctaaatattgttcataaaacagataagtcagatgcgataatgcttgcaagctatggttatgcaaagcattcaattgttaactattggcaacctgaagcaaaagaaattagagagcttaaggcattactgcgccgacttgatgcattagaatccagcaagcaaagggagcataatcgattagaagcaagtgagtttaatgcggcgtcggagcgagttattcaatcattaaaagaaacgattaatttttttgatgatgagataaaaaaacttaaattagatatcgataatcacatagacagcttccctaatttaaaaaaagatagagcgttactagaaacaatccccggtattgggcccgttatgtctcgagagctcacgtatatattcgcagctaaaaaattcaaccaagctaagcaggcagcagcttactgtggcttaataccgaagttgcatgagtcagggaaaatgaagggccgtacaactttaagtaagctagggccctcgagaatacgaagtaagctttatatggcagcagtagtcgctgggcagtggaattatcaaataaaacagcaaaaaataagattgatgaatcatggcaaaacatcgatgcaaatcattggtgccaatatgcgtaaactcattcatatatgttttggcgtagtaaagaatcaagaagcgtttaagcttcaagaaagttaaatacgatcttgaagcataaaatgagagatggtat

SEQ ID NO: 5328 - DNA, 1511 bp, unidentified
  source 1..1511: mol_type = unassigned DNA; note = element_82c8940
  misc_feature 1: note = core
  misc_feature 2..260: note = LE
  misc_feature 261..1466: note = CDS
  misc_feature 1467..1511: note = RE
  misc_feature 9..259: note = bridgeRNA
cgttatgttcgtggtgatcccgcaaggggatcactggctctcgggcccggcatgactgttgccccctgccgatcggatggcctggggggtggtgtcaccgggcccgtgggtgtcaccccagtgctgatgagaggtctggcaccgttccgggcccgcgcaacgcgggccagcaccgatggggcggatggtctgcataacgtggatgcgcgcgtgtgacaccgctgcccagagccggtcccggcgacccttcgggaacatccatgatcgataccagtgaggtgcaggtcttcgtgggcctggacgtgggcaagagcgaacaccacgcccacgccctgacccgcgcgggcaagaaggtcctggacaagcgcctgccgaacaccgagcccggcctgcgcgcggtcttcgacaagctcaccggcaagttcggcaccgtgctggtcgtggtcgaccagcccgcttccatcggggcgctgcctctgacagtggcccgggccgctggcgcgctggtggcctacctgccgggcctggccatgcgccgcctggccgacctgcaccccggagaggccaagaccgacgcccgtgacgccgaggtcatcgcccaggccgcccggtccctgccccacaccctgcgcgcgatcgagaccagcgacgagatcagcgccgaactgaacgtcctggtcggcttcgaccaagacctggccgccgaggccacccgcacctccaaccgcatccgaggactgctgacccagttccacccctccctcgagcgggtcctgggcccacggctggaccacgaggccgtcacggaactgctgcagcggttcggctcaccgcaagccctgcgccaagccggccgccgccagatcggcgccctgctgcgcccccgcgcgccccgcatggccgaacgcctcaccgaagagatcttcgctgctctggacgagcagaccgtcgtggtcccgggcaccgggaccctcgacctggtcatcccgtccctggccgcttccctggctgcggtccacacccagcgcgccgccgtggccacccaggtcgagaccctgctggaggcccaccctctttcggcggtcctgacctcgatccccggcgtcggggccaggaccgcggctgtcctgctggtcaccatcggggacggcacctcgttccccacctccgcgcatctggcctcctacgccggcctggccccagccacccgcagctcgggcacctcgatccgcggcgaacacgcaccccgcaccggcaaccgagtcctcaagcgcgccatgttcctctcagcgttcgccgcactgcacgaccccagatcacgggcctactacgaccgccaacgcgcccgcggcaagacccacacccaagccctgctccgcctggcccgccaacgcatcaacctgatccacgccatgctccgcgacggcaccctctaccaacaccccacccaacccgaagcagcctgaagcggcgcacaacagacacctccgacttgacgaagaacatagagg

SEQ ID NO: 5329 - DNA, 1356 bp, unidentified
  source 1..1356: mol_type = unassigned DNA; note = element_82c8a32
  misc_feature 1: note = core
  misc_feature 2: note = LE
  misc_feature 3..1118: note = CDS
  misc_feature 1119..1356: note = RE
  misc_feature 1141..1350: note = bridgeRNA
taatgggatggcccgccccgcatccagacgccaatgttggtgcaattgaactcaaggaggatttacggatgcgcacaaaaccaaaccctgacgcggcagcctacgggatcgacatcggcaagaaggtctttcacgtcgtcgcgatggacgctgctggacaaccaatacagcgcgcgaagtttgcgcgtgagacgctgatacggttctttgaagccgctgatcctgtgctgattggcatggaagcctgcgctggatcgcagtggctggcgcgcaagttgattgctctgggccatgacgctcggatcatcccggccaaatttgtgaaagcctacgtcaagtccaacaaatcggacaccatcgacgcggaagccattgcagaggctgtgacccggccaacgatgcgctttgtgcaagtgcgctcagatgatcaggtcgatttgcaggccttgcatcggatccgggatcgcctcgtgcgcaaccgcacgggcctgatgaaccaggcacgcgcgttttgcatcgagtatggtttggcgatgcgcactggcgccggtggcttccactcagacgttcgccgccaccttggcaatgaagacaatgatctgtccggtgcgatgcgcacgttgctcacgagtttgttggacgatctcgatcacttagagcgccgtatcgccgagctgtccaaagagatcgaagccatcgcgcatagcgacgagacgatcaaacgtctgctgactatccccggcatcggcccactgggcgcaaccgcgcttgtcgctgcggcgggagacggcaggcagttcaagaaagcgcgagacatggcagcgtggcttggcctcgttccggctgaacattcatcaggtggtaagcaaaacctgctcggcatcagcaagcgtggaaatggatatgtcaggcgacttctgatccacggcgcgcgatcatgcttcttgcatttacaccgtgagacacacgcacttggcaggtggctcagcgctctcgaagatcgaacgcatcgcaacaaggccgttgtcgcgttagcaaacaaactcacccggatcgcttgggccattctgacgaagcctggcgaaaactatctgcggacgaaaggggcggcagcatgatctgacccttaatccgcaaaccccattgcaagggatgtgatgaccaaacggctgatcgaccacgggtaagctacgcgcaaaaaagagggacatgatcccggagctagtaatctggaacccgaggtgcggatctcatcaaggcctggctggcaaaatcagccactgatcagaggccggatacatttacgcaagccaaagacgtcatccaacaacttgcaaccgcggggcggaccataca

SEQ ID NO: 5330 - DNA, 1198 bp, unidentified
  source 1..1198: mol_type = unassigned DNA; note = element_82cb75a
  misc_feature 1: note = core
  misc_feature 2..216: note = LE
  misc_feature 217..1188: note = CDS
  misc_feature 1189..1198: note = RE
  misc_feature 28..198: note = bridgeRNA
ttgtctctcaaatctgtgctttactgcaggggaagctgggatcgagccccgggatggccatcccggggctcgcgcggcaaagcgcccgtacaggaataggtgtcaacgaccgacctcatgaagggactttgccgctccagcttcgcatcgcttgctgacttgaatgggctatccgaaggacacgcccgcagacaattcgaagcatggagcccaattatgatggcagaacctcatgaaatccagtccgtcctcggcctggacgtttcctgcgataccgtgaccctgtttgacagctgcaccagccgctgcctgaccatcgccaacgaggccgacgcgttgcgtgccgccttgcaaccgtatcaaggcaccgccacgctcgccgtgtgcgaggccaccggcggccatgaagataaactactcggcgtgctcatcgagctggccatcgccgcccatcgcgccgatcccgccaaggtcaaggcctatatcgcatccttcggcaagcgcgccaagaacgatccgatcgacgcccactggctttcccgctatggctgcgaccgcgccgccgtcctgccgcgctggcagccggccgctccgacccagcagaagcttgaactgctcgttgcccgccgtctcgacctcgtcgccatgcgggtgcaggagcaaaaccgactgaaagccccgcgcagccgcctgatcgccgacaatatcagcgctcatctttgcgaactgcagcgccatatcgaagcgctcaacacagagatcgacaccctgattagcgaaagccgcgatctgacactgcgggctacatcattgcggtcggtgccgggcatcggaccggtcctggtcccgctgctcttggctgtcatgccggaactcggcaccctcaatcgccgccaggtcgcaagcctcgccggtgtggctccgcatcccaaggacagcggcaaggccagctggcatcgcagcaccactggcgggcgacgccagatccgaccggcgctcttcatcgctgctctcgccgcctgccgcggcaatagtccacttgcaactgcctatcaggcgctgctcaaggccgcaaaaccaaagcgtgttgcgctcaccgccatcatgcgcaagatcataaccatcgcaaacgcccgtgtcagagacgccttgcggcagcaaaatgaaataatgatcgcactcgaataaactgacttgg

SEQ ID NO: 5331 - DNA, 1398 bp, unidentified
  source 1..1398: mol_type = unassigned DNA; note = element_82cde11
  misc_feature 1..2: note = core
  misc_feature 3..80: note = LE
  misc_feature 81..1121: note = CDS
  misc_feature 1122..1398: note = RE
  misc_feature 1130..1385: note = bridgeRNA
tgttggggtggacggcccccgacggcatcgtgatgtgccagaatgaggtcgttgaagatctcaagcaagggagaccgtccgtggataaacttattcgcattggcatggatacgtcaaagagcgttttccaactgcatggggtgaatgaagccgaacagcctgtgttgcgcaagaagctgcggcgcaatcaggtgctcgccttctttgccgggctttcgccgctgagggttggcatggaggcctgtggcgcggcacattactgggcgcgggaattgcgcgcgctgggtcatcatgtgctgctgatgccggcgcagcacgtgaagccctatgtccagcgctccaaatcggatgcagccgatgccgatgcgatctgcgaggcgatgattcggccacgcatgcgtttcgttgcggccaagagcgccgaacagcaggcggcacagatgctggcgaagctgcgagcgcagttcatcggccggcgcacgcaactggccaattcgatccgcggctttgcggcggagttcggcttgactgcgcccaaggggctttcccggctcggcgatctgctggccgacattcgcgctgacgcgacgatcccggacacggccagggacatgttcgagacgctggcgcgcgactatgcgcatatcagcgccgaggtcgccgtgctcgataaaaagctgtttgcgcttcataggcacaacgaagtgagccggcggctggccgtcataccggcggtcggtcctgtcggagcgacgctgctggccatcaaggtgacggatgcgcacggcttcaagtcggggcgcgactttgccgcctggctcggattgacgccgaagaaccattcgacagcaggcaaaaatcggcttggggtgatcacccgcgcaggcgacgacatgctgcgaagcgtgctggtagcgggcgccaccgcgctcattcaacatatgcggcggggcagcaaaagggtctggccatggctggcggccttgaccgcgcgcaagcccgccaaactcgcggcggtggcgctggccaacaagctggcccgcatcgcctggaagctgatggtcaccggtgagcattaccgccccctcggcgccaccaatccggtgtctgtgcagccgtaagagcattaagagttcggcgtcgagcgccctcgttcgacgccgaggccagaacttgcaagcagaggagcagatggtgtgaccggtcgaaccgggaccagcgagacactccgaggtgctcaccggcagccaatgccgcgtacgtgtttggaactcgctatccgtgtagcccatcttggccagcgctcacataccggcgcgcaacaggccggacatatgagcgcaagcgatccgatcaaccatctcagccaaaccttgcaagcagggggccgtccacata

SEQ ID NO: 5332 - DNA, 1393 bp, unidentified
  source 1..1393: mol_type = unassigned DNA; note = element_82d3f0f
  misc_feature 1: note = core
  misc_feature 2..89: note = LE
  misc_feature 90..1121: note = CDS
  misc_feature 1122..1393: note = RE
  misc_feature 1156..1385: note = bridgeRNA
caatgggatggactcctcctcccctaaacggcatcgatgtgccaaactggagtcgatatcaaccagtgaacagaaagaaggagtccacaatgaatattatccgcgttggcgtagatttagccaagaatgtttttcaagtacatggcgttgaccgtaatgagaagcccgtctggcgtcgtaagctcaaccgcgaggaatggcttaaggttttgctggagaagattacaccgggctgtgaggttggtatggaagcctgtggcggtgcccaccactgggcgcgtcaacttgaggcgaagggatatgttgttaagctgattgcaccgcagttcgtcaaaccctatgtgaagagcaataagaatgatgcgaacgatgcagaagccatctgtgaagcaatgagccgacccggcatgcgttttgttgcagtcaagacgatagaacagcaggatactcaggccgtccaccgcatccgtacaggcttgttggaacaacgcactgccaaggtcaatcagatacgcggcctggtgtctgagtatggtcttgttgccccaaaacagatctcccacttacgtgccgtcatcccattatggctggaagacgcagagaacggactgacgagtcaattccgcaaactgttgaacggggtatgggctgatttattattgctggaccagcgtctgaaagagctagatcaggagatcgaattcattgctgctgcagatcctgtggcacggagactgcaacagcttcgtggtgtggggccgatgattgccaccgccttgcttgctacagtaggagatgcctctcagtttaaaaacggcagacagatggcggcttcactcggcttgacgccaaggcagaacagttcgggcggcaaagagaagttactcggcatcactaaacgcggtgactcgcacgtcaggtgcctgcttatacatggggcacgctcaatgattaatgcctctaaaggtaaagaggatcgcttaagtcagtgggtgatgcgtatcgctaccactcgccacccgaacatcgctgcggtggcgatggcgaacaagacggtacgaatcgcctgggcgatgatccggagtggcgcggattaccagccacagctggcagcaggataaagtaaaagaaagacaagtctttaataaggagcaaaccaaccacgattgcaaaacaagccgcttgatggccaacaggtcgaaccggcgcagacaaaccccgacactgacggaggcttaaagcccggcaaagcaattgggagtcagcgcgcgaatagcccatcagggtccagcatcttaaacaaaggtgcagtagttagagaccgaatatacgtgagcagtcgaacccacgcgccaaaaaacggaatgtttgcaaaagaggaggagtccatata

SEQ ID NO: 5333 - DNA, 1152 bp, unidentified
  source 1..1152: mol_type = unassigned DNA; note = element_82d6f00
  misc_feature 1..2: note = core
  misc_feature 3..204: note = LE
  misc_feature 205..1140: note = CDS
  misc_feature 1141..1152: note = RE
  misc_feature 13..206: note = bridgeRNA
cttgtcttatcgatgggctggctctcgtgcgaaaacagagctgtcggagggcgcgctgatcccgcccggcgacgccggggagcgggccgaaatcttcttggtcgcaatgggctgttcctgagtgaggtcgccctcggctcttcttctgccttgaacggatacaggggctccgggcccgcatgacaagacgaaaggaagtcccgaatgcagcagaccatagggatcgacatcgccaaggacacgctggatgcctatcgccagtccgatggacaacgccttcaggtgcgaaacgatcgcgacggccatcgggtgctcctgcgatggatcggccggaacgccgagctcctcgtcgtgttcgaagcaactggcgtttatcatcgagatctggaacttgcgctcggggcgcgcggcctcccgtttgcgaaggtcaatccgaggcaggcacgccggttcgcccaagcgactggccatcttgcaaagacagatcgcgtcgacgcggcaatgcttgctcgaatgggcgctgcccttgctttggcaccgcaggcacctcggcggcagagcttccatgatctcagagagttgctcgccgcacggcgtgctctcatcaaggacaggaccgctgcgaagatacgccgatcgaccgcaagactagccttgataaggcgccagctggatgcgcggctgaagcgcgttgatgatgacctggagcgcatcgacgccgagttgacggcactggctaacatggacgctggcctggcggagcgccttgccatcctgcgcagcataccgggcgtcggcgacgtaaccgccatagcgctcatcatcgatatgccggaactcggggagcttgagggaaagcaggcagcgagtctggccggactggcgcctgtcgcccgtcagttgggcaaatggcagggtaaagaacgcatccaaggcggtcgcgccacgttgcgccaggcgctctacttcccggcaatagccgcggcacgcttcaacgccgatctcaagaagaagtacgaagagctcatcgctgccgggaaggagaagaaggtcgcgctgaccgcgatcatgcggaaaatcatcgtgatggccaacgccctcatccgcgacggccgtcgatgggctgcaatccgcgcttgaccaacacggata

SEQ ID NO: 5334 - DNA, 1554 bp, unidentified
  source 1..1554: mol_type = unassigned DNA; note = element_82dca37
  misc_feature 1..2: note = core
  misc_feature 3..234: note = LE
  misc_feature 235..1446: note = CDS
  misc_feature 1447..1554: note = RE
  misc_feature 19..275: note = bridgeRNA
ccattacagttttgaagcgtagttggtcgaccgttcgagccatctgcttggacagtcagactacgattgacatatgtcccgagggactgccgatcgggcgcccgcggacggccttctgcccctgcccctcgagggcccggggggtgttgccgacgcgggcgccgctgcttctgacgactgataggaaactgccgggctcctccgaccaaagagcgccacggccaggtaatgtgggtgtcgcgcgaggcagcattccgatcgaccgacgattggaaggataccaccatgccgaccgaagccgccacctgcgcagccgtcatagggctagacgtcgggaagttctcccattgggcatgccacgtgaccaggcagggcgaggtgctgagaagcgagcccgtagccaacaccgagcatgacctggacggcctgtctgcccaggccgaagccgggacgctggtcgtcgtcgaccaggtccgcaacatcggctcgctcgcgatatcgagggccaggctcgccggcctgccggtcgcctacctgcccgggatcgccgcccacggcgcggccaagctgttcgcaggcgacgcgaagacggacgagcgggacgccgccgtcatcgccaagacggccctcggcatccccgactcgctcctgcccgtgccgaagcacggcgaaaggctcgaggccgcaaggtcgatggcggcgcagagaagccacatggccgcctgctccacccgcggcaagaacaggctccggagcatcctcctggaaagctgcccggaattcgaggcgctggccgacctggcggacccccattggctgaggatgatggagtccctgggcggcccctggggcatcgtcgacgcgggaaaggcggccgtcggggccgtgacccgcggcgcgaacagggcccgcatcgacgcggcggtcgcggcggcggcgtcgacgcgaccgtcggagtaccgggtcatggcggagaatccgcaggtgaaggtgctcgccaggcgcatcagggagtccgcggaggaggcggcccggctcgacgccgagataacggcgctgctcgccggagacgaaacctacgcatgcctgccgaccatcccggggatcggccccaggaccgaatccgagctggtgacaagcatagacatcggcgactttcccgatcacgaccacctcgcatcctactgcggcatcgcgcccagaaaccggcggtcgggcaagtcgatatcgtcggtgagctcgtctcgccaggggaacaagcggctgaagaacctgctcatcttctcctgcaactcgctcagccgcagcaaaggccggttcggcgactactaccgcagctgcagggaacgcggcatgtgccacggggaggccttgaaggccgtcgccaggaagaggctgaaggtaatctacgcgatcatgagggacaaggtcccgtactcggcatagccggccgcctcttcgtagaaaccgcagggcccataagcgggtcctgcgtcagcattgcctatttgggggatcaatcgggggaaatcggttgacaaaactataggaaca

SEQ ID NO: 5335 - DNA, 1408 bp, unidentified
  source 1..1408: mol_type = unassigned DNA; note = element_82dcd1d
  misc_feature 1..2: note = core
  misc_feature 3..63: note = LE
  misc_feature 64..1152: note = CDS
  misc_feature 1153..1408: note = RE
  misc_feature 1169..1403: note = bridgeRNA
agatggcgtaacgggccgccgcggggctgaggcttcgcggcggagtggtcatcccccagattgatggtgtcgttgacggagtcggactttcgcccgctccaagcatcatcggaggatgaccatagactattatgcggggatcgacgtgtctttggaagcatcgagcgtttgcgtcgtggatgtcgccgggaagcgaagatcgccagcgagccggacgcgctgatgggctggttcgcttcgctcgggctcgatctggcgcggattggcctggaggccgggccgttgtcgcaatggcttttcgcggcgatgaaggaagcgggcttggcggtggagctgctggagacgcggcatgtgcgcacggcgctgcaaacgatgccggtcaagaccgaccgcaacgacgcgcgcggcatcgcgcaactgatgcggctcggctggttccgcccggtccattgcaagtcgatggcggcgcaggagacgcgggcgctgctgacggcgcgcaaactggttcaatcgaagctctacgacatcgagatgagcctgcgcgggatattacgcggtttcgggctgaaggtggggccgacgacgccgaaacgcttcgcgtggcgcatccacgaactcgtcgccggacatccgaccctcgagatcgtcgcgaaggcgctgctttcggcgcatacggttttgctgcgtgaattcggcatgtttgagaaacgtgtgcgggcgatggcgcggcaagacaagcgcgcgcggctgataatgtcggcgccgggcgtcgggccaattgtggcgctgacttatgtctcggcgatcgacgatccgtcgcgattttcgtcgtcgaagccggtggggccgcattttgggctgacgccgagaaaatatccgtcgggagagaccgatgtgaccgggcggatcaccaagatcggcgacgccggcgtgcgcacggcgctctatgaggccgccaacgtcatactgacgcggccggtgaagggcgctggcctcaagagctgggcgatgaagctcgcccgtcgcgccggcatgaaaaaggcgaaagtggcgctggcgcgcaaactcgccgtgatcctgcatcgaatgtggatcgatggaacgaccttcgacgcgaggcgagcggctttttccgcgccgacggcggcgtaaggaggagaaacgcaagggtttcgggcgggccaaacaccagccttcccgaagcgttcgtccctcgccgggacgatggatgggtcagaccgcaaagcgctccgtggctcacgaccacgcgcaactagattggccggcctcatcctcatcttaccccatcaagtggcggcccgcggagcttcggcgccgaccacggacagaagagtgaaccggcgaaggaagagcgttaggggattgacaacgaagggcccgtgacaga

SEQ ID NO: 5336 - DNA, 1406 bp, unidentified
  source 1..1406: mol_type = unassigned DNA; note = element_82ddfa6
  misc_feature 1..2: note = core
  misc_feature 3..87: note = LE
  misc_feature 88..1128: note = CDS
  misc_feature 1129..1406: note = RE
  misc_feature 1146..1393: note = bridgeRNA
tgatggggtggaacggccccgctaccgcagcatctgagtgctaaacgtggtcgttgtcgaaacgccacaaggttggggagccgttccatgaagcagattaccaccatcgggctcgatttggccaagcatgtcttccaggttcatggtgctgatgcggacggtgcgccggttctccggcgcaagctgcggcgcgccgaggtccatgctttctttgcaaagttgccgtcgtgcctagtcggcatggaggcgtgcggcagctcgcactattggtcccgcgagatcgccgcgctgggtcacgaggtccgcctgatcccgccgatttatgtcaagccgtatatcaaacgaggcaagaccgatgcggccgatgccgaagcgatctgcgaagcggtgacccgcaagacgatgcgcttcgtgccgatcaagtcggccgaccagcaggcggccgccatggtcctgaaagcccgcgatcttctggtccgtcagcagacgcaaacgatcaacgccctgcgcgcccatttgtcggagttcggcatcatcaccggcatcggcaccgccaaagttgcggcgctgattgccatcgtgcgcgacgccgacgacacgcgcttgccgggcgccgcgcgcttcgcgttgagcgcgatcgccgatcagatcgaggccttggcgcggcaggtcgaaaagctcgagcgggagatcgtcgcgatagcaaagcgcgacgaggacatgcggcggttggcaaccatcccaggtgtcggcgcgatcatcgccgcttcgatcaaagccctggttcccgatccggacgggttcaaatccgcccgtcacttcgcagcctggctgggactgacacccaagtcccattcgagtggcggcaaggagcggctcagcgggatatcgaaaatgggcaacacgacgctccgcagcctgctggtcctcggggcgacgtcggtgttgcgatacgtcaggcacaatgagaacgcgccccgatggctggtcgccctattggcgcgccgtcccttcaaggttgtcgccgtcgcgctggccaacaagatggcgcggatcatatgggtgcttctcaccaagggtgggacgtatcagaaaccagctgtggcaaccggcgcggcgaacgcttgagccgaatgcccagcaaaacggactgaccggcgtctatgccgggcagagggtgaggtgcaccagcagacgatgactccacgggacgacatcccgaggcgagagaggtcgtagccaccagtgcgcaaccagcgcgccaaactgatcagcccctcgcatcgcggacttcatcgaggccagcggtccaagaccgcgccaatcaaggccggacatatgaccgcaccgttcccgccggaggaaaagtctgaagaaagcccttgcccgcggggccgttccacata

SEQ ID NO: 5337 - DNA, 1528 bp, unidentified
  source 1..1528: mol_type = unassigned DNA; note = element_82de26b
  misc_feature 1..3: note = core
  misc_feature 4..500: note = LE
  misc_feature 501..1430: note = CDS
  misc_feature 1431..1528: note = RE
  misc_feature 17..262: note = bridgeRNA
cccattacagtctgagataagccatcgatgaacttcggtggcgatcattcagcgcatggcctacagtttggccaagcactgaggggccgccgattgggcgtccccggatggccgtccgcccctgcccctcgagggcccgggggtgttgccaccgaggacgctcgccgctccgaacgactgataggaaactgccggacgcgggcgccacggccaggtaatgtgggtgtctcagggagggcttccgatcggtctaccgattggaggatatcaccatggaaccaccgagaaggccggaaatcgtcatagggctagacgtcgggaactcgtcgcactggacgtgcgtcgtgacgcgcgagggcgagctcctggcaagcgggcccattcccaacaggtaaaacgccatcgacgggctctacgcgcagtatccgggcgcgctggtcgtcgtcgaccaggtccgcaacaccggctcgctcgcgctttcgcgcgccaggctcgccgggatgccgcgcgcgtacctgcccgggctcgccgcgcacggcgcctcgaggctgttcgccggagacgccaagaccgacgagcgcgacgcgatggtcatagccaagacggcgctgggcatacccgacgcgctgcttgcggtggccgacaggccgcccgagatagaggccgccaggtcgctcgccgcacaaagggactttctggcctgcgagaacacgcgcagcaagaacaggctccgcggcatattgctcgaatcgtgcccggaattcgaggcgcaagccgacctctcgggcccggcaaccctcaagctcatggccgccgtcggcggcccgtggtcgatatccgaggcctcgccgcaggccgtcggggcgctcacgcgcggctgcaggcgcgccaaagtggcggcgctggtcgaatccgtcgaatcgtcaagcaggccgccgtcggcgaccgtcgcctgtgaggaccgcgccgttcggctgctcgcgcgaaggatatcggagaacgccgccaggatagagtctctggcctctgagatatccgcgctgctcgccgccgacgagacgcgcaggtgcctgctcacggtgcccggtataggaccgcgaacggcgtccgagctggtcatatccatagacatagccgacttcgcgggccacgacaggctcgcctcgcgctgcgggctcgcgccgcgcagcaggcagtccggcacgtcgatatcgtcggtgtccgcgtcgcggcagggcgacaagaggctgaagaacctgctcatatcctcttgcaactgccttgcgcgagccgcaaccgatgggggcgaatattacgcgcgctgccgcgacaggggcatgccgcacggcaaggcgctgaaagccgtggcgaggaagcggctcaaggtgatttacgcgatcatgagggacaaggttccgtacgcagcctaacggccggcgaagaccgcaggcccggcagggcctgcgtcagcattgccaaaaacgcccaccgagaggacgaatccctcttgacggaactataggacacc

SEQ ID NO: 5338 - DNA, 1382 bp, unidentified
  source 1..1382: mol_type = unassigned DNA; note = element_82ec748
  misc_feature 1..2: note = core
  misc_feature 3..76: note = LE
  misc_feature 77..1117: note = CDS
  misc_feature 1118..1382: note = RE
  misc_feature 1117..1369: note = bridgeRNA
tgatggagtggacggccccctacggcatcggtgtgccagaatgaggttgttaagatctcagacaagggagccgtccatggaacagattatccgcattggaatggatacgtcgaaacatatttttcagctgcatggggttgatggcgccgagcagccggtcctgcgcaaacggctacggcgtaaggaggtggtggcgttttttgccaaacttcctccgaccgtaatcgggattgaggcttgtggagcatcgcactactgggcgcgggagctggaacagctcggccatgaggtgaagctgctcgcgccgcaattggtaaagccctacgtgaagcggaacaagaacgacgggcgggatgccgaggcgctgtgtgaagcgatgagccggccgagcatgcggtttgtgccggtgaagacggctgagcagcaggcggcgctgatgctggccggcatccgcgagcggctagtcgctcgtcgcacccaggttagcaatgcgatccgcggctatgcggcggagtttggtgtaacggcggtcaagggtctggacaagatcgagccgctattggcgcagatcgcggaagacgagagtgtgccgatgctggcgcgcgagctgtttgcgatgcaggggcgcgagtatgcgcagttgcaggtcgaattgaaggcgatcgaggtcagactgatggcttggcatcgcgccaatgcctgcagccggcgtctggcgcagattccaggaatcggaccgatcagcgctacggcgctggtgatgaagacgcccgatccgcgcgcgtttccctctggccggcactttgcggcctggctcgggctgaccccgaaagaccattccactgccggcaagaccaggctcggcaagatcacccgcgccggcgacgaggtcttgcgcagcctgctggtggcgggagcaaccgcggtaatccagcaggtgcgtcacggtcgcggccgtcggtcaccctggctagtcgccctattgaagcgcaagccgccaaaacttgcggcggtggcgctcgccaacaagattgcccgcatcgcctggaagctgatgacgacgggcgaaagttacgacggcgcgtggatgcctggcgcatcggcattcgccgcttaagagatcggccggttggcaacttcgcctaccggctgagccggagctgcaagaggagagcagatggtaggatcgatcgatccgaggtgcgagacagtccgtgggacccattggccgaaaaaaggtcgcgtggttgtttggaactcgcgtcgcggagaccatcttggccagcggttcaaaccgaccgcaccaacaggccggacatatggatgcaagcgatccgatcagaccgtcaaaagactcttgtggcacgggggccgtccacata

SEQ ID NO: 5339 - DNA, 1157 bp, unidentified
  source 1..1157: mol_type = unassigned DNA; note = element_82f389c
  misc_feature 1: note = core
  misc_feature 2..174: note = LE
  misc_feature 175..1140: note = CDS
  misc_feature 1141..1157: note = RE
  misc_feature 1..187: note = bridgeRNA
cttgcatcttgcggtcagcccgatctggtagtccagaagggcgaccgccgggggtggccacccccggcggtcggacggacgggaccgagtgtcccttggttcgagccgtagtcgagatcggtccgtccgtcccttcaagtctggcctgaacagatgaaggggagcaagtcccgtatgcaaggaaaggtcgaggacaagtcgctgccggaggtccatgtcggcgtcgatgtgagcaaggccaatttggacatccacattcacccggtgggcgagcagctgcgggtgagcaacgacagtgccgggcatgaccgcctggtcgaggtgctcggccggttcgcggtgaagctggtgctgatggagccgacgtcgcgctatcatcgggacgtccaacgccatctgcatgatgccggactgccggtggcgctcgtcaatccgctgagggccaggctgttcgccgaggctgccggcaaactcgccaagaccgatgcgatcgatgccgccatgctggcattgatggccgatcgcttcggcctctcggcatccgagccggtgagccggcggcaggaggagcttcaggaactcgtcagcgcccgcaccgcggcgctcgccgaacagaccgcgctgcgcaacaggctcagcgtcacgcagggcagcttcctcaagagcgaacataaaagaaggctgagctcgatcgccacgcatatcgatcgcatcgaggtgaagatcgaggaactgatcaaggctgatgccgagatgacgcgcaaagccaaaatcctgcgatccatccccgccatcggccccatcagcacccaggccttcctctcatacctccacgaactcggccgcattaccaacaagcaggccgcagccctcgtcggcctcgcgcccttcgcccgcgacagcggcggcatgcgcggcaagcgatccatacgcggcggacgcgccgagctcagatccaccctctacatggccgcgctcgtcgccagccgccgcaaccccgacttgaagcgcttctacgatggccttctcgcgcgcggaaaagctccaaagctcgccctcatcgccgtcgcacgaaaactcgtcgcgcttgccaacaccctcatcaccaaaaatcgcgtgtgggcgcccaaacccgcttgacctggaagacagatgct

SEQ ID NO: 5340 - DNA, 1611 bp, unidentified
  source 1..1611: mol_type = unassigned DNA; note = element_82f4aa1
  misc_feature 1..3: note = core
  misc_feature 4..274: note = LE
  misc_feature 275..1492: note = CDS
  misc_feature 1493..1611: note = RE
  misc_feature 11..294: note = bridgeRNA
actacaatatatttatggttaatatcccttacagccagtaaggaattacccatcttgttgcttaagctgttagaatgagtggtgcaataggtctggccatcacctcctaggacttttcgtccgtagaatagtcagccaaccggcccctcatccgcagcattcgttttacgcaggttgaaccctaagacgttcgtgtgaaacacccagtagattgaataggcaatgagaaaactggtattgaccattgctattacttttcaaaggagtatctgttatgaacgctgttggtattgatgtttccaaaggaaaaagcactgtcactatacaaagaccgggagacgtggtcgttatgccaccctgtgatatcccccacacccaatctgccataaactgtctgatcgagcagcttcagcgccttgatggtgaaaccaaggtctgtatggagcacaccggcaggtactatgaaccggttgccacatggctttccgatgcaggtatctttgtcagtgctgtaaaccctatccttatcagggatttcggtaatgattccctccatactccaaagacagacaaagcggattctaaaaaaatcgcacgttatactcttgaccgctgggcaaaactgaagcaatatggaagcatggataaaacacgcaaccaattaaaaaccatgaaccggcagttcggattctatatggctcagaaaaccgcaatgaagaacaatcttattgcacttcttgaccagacttatccgggagcaaatgatttctttgacagtcctgcccgcagtgacggcagccagaaatgggtagactttgtatataccttctggcatgcggattgtgtccgctccaagtcactgaattcctttacagagcattatcaaagctggtgcaaacgtaaagggtataacttcagcgcagacaaagcagagaaaatttatcatctttcctctgatctgattgccgtatttcccaaagatgacaccacaaagatgctgatacgacaggctgtagcattattaaacacagcttctgaaactgtggaatcccttcgcctgaaaatgaatgaacttgcttccacactgccggaatatccggttgttatggatatgaatggtgtaggctccactcttggcccacagcttattgctgagattggggatgttacacgctttacgcatcgtgaagcccttacagcttttgcaggtgttgaccccggaaagaacgattccggaaaacacatccagaacagtgtacgcacctcaaagaaaggttctccttacctgcgtaaagcccttttccaggtcatggacagccttatcaaacgctcaccggttgatgaccctgtttatgcctttatggataaaaagcgtgcacagggcaaaccttattacgtttatatgactgccggagcaaacaagtttctccgtatttattacggacgggtaagggaatatctttccactttgccggaaaacaaagaaatctaatatctttcccagtcgtatatcaggccaacgtaatgcggtggtctgatttttgtgcctttcattcaacctgtataaatttttcaatgttcattaatttctgcttgactttttatttgcag

SEQ ID NO: 5341 - DNA, 1366 bp, unidentified
  source 1..1366: mol_type = unassigned DNA; note = element_82f5cff
  misc_feature 1..3: note = core
  misc_feature 4..43: note = LE
  misc_feature 44..1117: note = CDS
  misc_feature 1118..1366: note = RE
  misc_feature 1136..1360: note = bridgeRNA
tgatggtatggacgccccctgtcgcggcgttggatgcgccagaatggagaagttgctcactcactccagacagaaggggacgtccatgacagagattatgacgatcggtttggacctggccaagacagtattccagatccacggcgctgacggcgatggccgaccggtgctgcgcaagcggctgagacgtggccaggtgctggcgttcttcgcttcgaccccatcatgcctggtgggcttggaagcctgtgcgagcgctcatcactgggcgcgcgagttgcaggcgttggggcacgaagttcggctgatcccgccgcaatatgtgaagccgttcgtgaagacgaacaagaacgacgcggcggacgcggaggcgatctgcgaggcggtgctgcgcccgaccatgcggtttgccgcggtgaagagcgccgatcagcaagcggtgctgatgctgcaccgctcgcgggaactgctggtgcgccagcgcacgatgctgatcaacgccttgcgcgggcactgcggcgagttcggcctcgttgccgcccagggagcccacaaggtcgtggccttgatcgcggtgatcgaggatcctgacgatcaccgcctgccgccgctggcccgggacgcgcttgggtctcttgtggtccagctgcgtgcggcggaggagcggatcgcggcgctggagaaagagcttttggtctggcatcgttcgaacgacgcgagcctgcggctggctgcgatccccggcgtcgggctgctcacggcgacggcgctggtggcgacggtcggcgatgcgacacagttccgctcagcgcgtcagttcgctgcttggctgggacttgtgccccgacagcaatcgagtggcggcaaggaccggctcggccgcatctccaagcgcggcgatggctatctccggcggctcctcgtccatggcgcccgcatcgtgctgttctggtccaggcgacgcaaagagacgcgctcgggctggctcgaagccctgctcgcacgccggccgaccaacgtcgtgctggtcgccatggccaacaagacggcgcgcatcgtctgggccatgctgagccgcgacgaagctttccagcccgaccggcgggccgctgcctgagccgcctctcggccaaccaagaattgcgaaggtgatgatgatgtgatggcgaaacagggtgaccgggaccggccaaacccgaggcgttgaccgagcacgtgagctcgataacgtgattggatgtcggtcctcggattccatcagggcccgcggtcatcacgaaccgcacgcagaggccggatagatgactgcaaaccccaacctcgccgcaaatcagaaatcccttggcaagcaggggccatccataga

SEQ ID NO: 5342 - DNA, 1116 bp, unidentified
  source 1..1116: mol_type = unassigned DNA; note = element_82fea0c
  misc_feature 1: note = core
  misc_feature 2..73: note = LE
  misc_feature 74..859: note = CDS
  misc_feature 860..1116: note = RE
  misc_feature 885..1115: note = bridgeRNA
aatgagatggccgccctcaccttgttagcgatatattgacagcgtgtgatttattttttaagaggctaccatcatgaacacgatcgcactgattggcatcgatctcggcaaacattcctttcatgtccattgtcaggatcaatcggggaaagccctgctacgtaaaaaattcacccgaactaagttgatggaattcttagctgcctgctctccggcaacggtggtgatggaagcttgtgctggcacccatttcatggcaaggaggatcactgatttggggcatgaggccaggctgatttcaccgcagtttgtccgtcccttcgtcaaaagcaacaagaatgattttattgacgcggaagccatctgtgaagcggcctcacggccttcaatgcggtttgttcagcccagaacggaaactcaacaagccatgcgagcgctgcaccgtgtctgggaatcgctggtgcgggataaagtgaaagccaccaaccagatgcaggctttcctgcttgagtttggcatcagtatgccgaaggggattgccgtgataaaacagctcgctactgtgctcagccgggattttgcagcctcgacgggattggttccccgccagtacagtactgggggcaagacgaccttaatgggtatcagtaaacggggtaacaagatactccggcaactgttggtgctgtgtgcccgaacgttcatactgcatatcgagcatagaaagggcaaactggctgactgggttaagcagcaacttgaacgaaagcattctaatattgtagcctgtgcgttggcgaataaactcgcccgaatagcctgggccattacgacgcgaaacacggtatttgttgcctgaaactgacatcattgtgaatctatttaacgattactccactggttttgcgaagactgataattgatgacatgaacggcctaccggcctgatgagaaacctaacataaaaattggctccttgaaaccggcacagttttaaggttcatcaggcgcggaactcatcgaggcgcaggctccttgcctatagtgacgccggatagatttaagtaagcccaaaattcatcaaaatgagtgttgcaaaaacgagggcgaccatag

SEQ ID NO: 5343 - DNA, 1612 bp, unidentified
  source 1..1612: mol_type = unassigned DNA; note = element_82ff2a9
  misc_feature 1..2: note = core
  misc_feature 3..278: note = LE
  misc_feature 279..1493: note = CDS
  misc_feature 1494..1612: note = RE
  misc_feature 16..301: note = bridgeRNA
ctcctaatatataagtgtagggtttcagtacccaacagccagttgggacttctccctctcattgtttaagctgtataatgattaggcatcggtctgacattattctccttggaccattttgcgtccgttgaaaagccagtcaaccagccgtcatttgcagccgttcgatttatgcaggttgaactaccatcatgtacgttcgtttgataccccaggagatggaataagcaatgaggaaagctggaaccatgcaaatatatatctggaggtacgtaaaaatgtacaacgcagtaggtattgatgtttcaaaaggcaagagcaccgtcgcagtcctgcagcccggaggtgtcgttattcataagccctttgatgtaccccatacatcaaaggatctcaaccagctttcagaatacctcagctcactggatggcgatactaagattgttatggagtgtaccggcagataccatgaacctatggctaatgccctgcataaagccggtttctttgtttctgttgtcaatccacaccttattaaaaactttggcagcaactccctgcgcaaggtcaaatcagatcctgcggatgcccggaagatcgcacgctatacccttgacaattggactgaactgcgtcagtatgtggatatggataatacacgtactcagttaaaaaccttaaattcacaattcagcttctttatgaagcagaaggttgctgcaaaagccaacctcattgcactgctggataatacatacccggatgtgaacaagctctttaacagtcccgtccgtgatgacggaagcgaaaagtgggtggattatgcgtactctttctggcatgtggactgtgtccgcaaaatcggcttgaagacgtttacagaacgctacaaagctttctgtaaaaagcatcattataacttccagccttccaagccgcaagaactattccatgcctccaaagaacttgttgccgttttcccgaaagagaaaaattacaaactgttaatccagcaaagcataaaacagttaaaccttgcttctgagcatgtagaacagctccgtaaggaaatggatgcgcttgcttcttccctgccggaatacacaaccgtcatgaacatttatggcgtgggtaaaacttatggaccccagctcattgctgaaatcggcgacgtatcaagatttacccacagggaagccctgactgcatttgccggtgtagaccccggcgtggatgaatccgggcagcgcaaaccaaaaagcaaccgtgcatcgaaggtcggcagcggaaagctgcgcaaaacgttattccagatcatgacgacgctgcttcaaaatgccccggcagacgacccggtataccgctttctggacaaaaaacgctccgagggcaagccttactatgtctacatgaccgctggtgccaacaagtttctgcgcatctactacggtaaagttaaagagtgtttgcgtaacttagagcagaacggctaaacttccccaatacagatttttaaaaaccggctactgggcggtttaaaagttatacccaaaagtcaaaacaaaatttctttctattttttcaaaaaaacacttgactttttattagcagg

SEQ ID NO: 5344 - DNA, 1470 bp, unidentified
  source 1..1470: mol_type = unassigned DNA; note = element_8310ca2
  misc_feature 1..2: note = core
  misc_feature 3..235: note = LE
  misc_feature 236..1255: note = CDS
  misc_feature 1256..1470: note = RE
  misc_feature 30..186: note = bridgeRNA
cttgtatgttgcgttcagaggcgtaacgatgttgcgtttcggcggagaggccgttcccaccctaggccagcgtgagttgagcctgatcgcaagatcggccgccgtccctctcttgctacgccgtggagaatcgaaggccttctgagcctgcatgttcaaggtcggcgcgaagagtaagtccgtgagcgcggacagggacggctgctggagctgatcgtagcgccagaggaggctcatgagcaagtcgattgattgttcgcaggcgaccgtattttgcggcatcgatgtgagtgcggccacactggccgtagccgtaatcgagcaggatcaaccccttcaacagcgggagttcgtcaaccgggccagcggtcataaggcgctgatcggctggctgggcaagcgcaaagcgcaggtgcgggtgtcgctggaggccaccggcatctattcgctggacttggcgctggctctgaatgatgcaccgggcatcgaggttgcggtgctgaatccgaagatggccaaccgttttgcccagacgctgaggcgatcgaagaccgacgcggccgacgcgctggtgctggccgagtacagctgtcggatgccctttaccgcctggcggccgcctagcctgagtgcgcttcggttgcgcgccgtgggtcgccatatcgtggctctggtggtccagcatacgcgcgagcagaatcggttgcatgcagcggctggctctcaggctacaccgcgctgcgtggtccaggatctgaagcgttcgctgatctcactggagcggcggatcgtgaagatgaggcgtgaggccatggcgttggtgcatggcgataccgaggtccagcagcggttccggctgctgacgggaataccgggcatcgcggctaccagtgcggtgcagatcctgggcgagctggcgttgctggctccggagatgaatgtccggcaatgggtggcgcatagcgggctggacccggtacatcagcactcgggcacatccgtgcataaactctcgcgcatcagccgcgccggtaatcgctacctgcgccgtgccctctatatgccggccctgtcagcggtgcgatgggatccgcatatgaaagccttctatgagcttctccagacacgtcacaaaacaaaactacaggccgtgatcgccgtcgcaagaaagctgctccatgccatctatggcgtcctccgcagccgtactccctacgacggtcgcaagctcttcccgcaactcgagccagcttagatttacaatctccctcgccaggtgaaacggaagcgggctctgctgggaagcaaccaggccgagggataacctggcgggctcatcctgacgatgaaccggaggccgagcggggggttaccctcgcccggccaaaacaaccatcggagggatagacccctcatgccttgaaaatcccatccatccccaccgaaaatccttgcttcccaacagagaat

SEQ ID NO: 5345 - DNA, 1197 bp, unidentified
  source 1..1197: mol_type = unassigned DNA; note = element_8316c85
  misc_feature 1: note = core
  misc_feature 2..216: note = LE
  misc_feature 217..1188: note = CDS
  misc_feature 1189..1197: note = RE
  misc_feature 29..198: note = bridgeRNA
ttgtctctcaaatctatgctttactgcaagggaagctggggtcgagccccgggatggccatcccggggctcgcgcgacaaagcgcccgtacaggaataggtgtcaacgaccgacctcatgaagggactttgccgcaccagcttcgcatcgcttgctgacttgaatgggctatccgaaggacacgcccgcagacaattcgaagcatggagcctaattatgatggcagaacccgccgaaatccagtccgtcctcggcctggacgtttcctgcaataccgtcaccctgttcgacagcggcaccggccgctgcctgaccattgccaacgaggccgacgcgctgcgtgccgccctgcagccgtatcaaggtactgccacgctcgccgtgtgcgaggccactggcggccatgaagaccgcctgctcggcgtgctcctggaattggccatcccggcccatcgcgccgatcccgctaaggtcaaggcctatatcaaatccttcggcaagcgcggcaagaacgattcgatcgactcccgctggctgtcccgctatggccgcgaccgggccgccatgctgctgcgctggcagccggccaatccgacccaacagaaactcgagctgctcgtcgcccgccgtctcgacctcgtcgccatgcgggtgcaggagcaaaaccgcctgaaagccccgcgcagcagcctgatcgccgacaacattcgcgcccacctttgcgaactggagcgccatatcgaagcgctcaacgcagagatcgataccttgataggcgaaagccgcgatctggcactgcgggctaaatcattgcggtcggtgccaggcatcggaccggtcctggtgccgctgctcctggccgtcatgcccgaactcggcaccctcaaccgccgccaggtcgcaagcctcgccggtgtggctccacatcccaaagacagcggcaaggccagctggcatcgcagcaccaccggcggaagacgccagatccgtccggcactcttcatcgccgctctcgccgcctgccgtggcaatagtccgatcgccaccgcctataagacgctgctcaaggccgcaaagccgaagcgcgtcgctctcaccgccatcatgcgcaagatcatcaccatcgcaaacgcccgcgtcagagacgcattacgagagcaaaatgaaataatgaccgtccctgcataactgacttgg

SEQ ID NO: 5346 - DNA, 1487 bp, unidentified
  source 1..1487: mol_type = unassigned DNA; note = element_8318439
  misc_feature 1..2: note = core
  misc_feature 3..260: note = LE
  misc_feature 261..1310: note = CDS
  misc_feature 1311..1487: note = RE
  misc_feature 41..237: note = bridgeRNA
ctcctatgtttgcaaagttgtgaatttccaaaagaagaatcgttaaatttatgattttaaagtaagaagaatgagagtacgccgatggctaaataactcaagaagtatattgtccgatagatatcacctcattcttttttatcttttagagtctgaacagaatgtaaggaattatgctagttgtaatatccagtatatccaaccaggagaaaagacgaagggagattctttacttaaaaaaacaaccttaaagtttaataatggaagtattaaaacaagtattaggaattgacgtagctcaaaaagaattggttgttagcctaggtagaatggttgaagacttatcaattgatttgtatgcttacaaggttttcagaaataatgaaaaaggctttttgtcacttttagagtgggtgaaaaagcaaacaaatgacactaaaaaagttcgatttgtgatggaagccaccggtgtttaccatcaaaaattcgcctattatttagatgaaaagggatatgaagtttgtgtggtcttgcccaataaaatcagcaattacatgcgaacattggacaataaaaccattacagacaaaacttgctctgaagcaattgctcaatttggattagaaagaaaattagacctatggcatcgcccaaggagtatctataagaatttgcaacagcttactcgtgaacgagaccagatagtgtttgagagatcaatggtgaaaaaccatcttcatgcagaacaatcagaagcagaacctaatgagagtagtattttacgcataaatactcgaattaatttcttgagtggacaggaaaaagagataaaaaaagagattgaaaattgggtaaacaaagactccgctttaaagcaagagatagaaaatatttgtacaatacctggaattggagagtttactgccgtaattattttggccgaaacaaatggttttgaactcatacgaaataaaagacaattgacaagttatgcaggacttgatgttaaagaaaaacaatctggaacttcagtaaaagggaagcctcgtatatcaaaaattggaaatagacatctgcgcaaagcaatgcatttaccaagtttgactgcagtaagatgggatgataattatagagatttatacgcaagaataatatctaaacaaggaattaaaatgaaagctttgatcgcagttcagagaaagcttttagaaatggtttatacaatattcaagaataagtgcccgtatgacaaagaatatgaaaccaagagaattcagaaagaaaatagcgtgcatgcacaaatggcataaacacgctagacaggctagttcttgaccgcctttcgataataaaattaagaaataaaattatattatttgtgagaaacccagaataaaaagcttttgattataaaataattgaaagtaatagaagtacgcttaaataaaaataaaaatcagtattttaatagtaaatcaacacagaat

SEQ ID NO: 5347 - DNA, 1156 bp, unidentified
  source 1..1156: mol_type = unassigned DNA; note = element_8327e8c
  misc_feature 1..2: note = core
  misc_feature 3..190: note = LE
  misc_feature 191..1141: note = CDS
  misc_feature 1142..1156: note = RE
  misc_feature 53..200: note = bridgeRNA
cttgtatgtttcattttgcccgatggaacgtacattttatgtaagattcatttggctcggcatgacagttcgaagtgcctctgggacatcaagcccgtgggggagcgatgagcgtcctgccgatttttcacgattaacccgaacggttgcttgggacaatgatcccgcatttttgcaaggatgggtatgaatgaacgacaaattagctgaagccttcgtgggcattgatgtgtccaaagacacactggatgtgcatattgcaccttccggtgtatcgctgcatgagacgtatgacgagaaggggatcgagaaaattatcgaagccttgaaggcggcgagttcgaccctgattgtgctggaggctaccggcgggctggaagtgcgtctcgcctgtgagctttcggccacgggcttgaccgtggccatcatcaacccgcgccaggcgcgggattttgccaaagccacggggcggctggccaagactgaccgggtggatgcggccatgctggccgcctttgcacaagccatccgccctgcggccagaccgctcaaggacgcggatgctcgcgcccttgaggatatgctgaaccggcgacgccagctcattgccatgcgtgtccaggaattgctccggctcaataccgccgagagcaaggcgctgcaaaaaagcctgaagacccacatcgcctggctggagaagcagatcactacggtcgacaatgacctcaacacgcaactgcgtgcgtcggatgtctggcgcgccaaggatgacgtgctcaagggtattcctggcattggcgcagtcaccagcctgaccatgctgtccaaatgcccggagcttggggcattgaaccgacgggagattgccgccttggtcgaggttgcgcccttggctaatggcagtggtaagcatcgtggtaaacgctcaatctggggtggacgcgccgaggttcgagcagtgttgtacatggcagcactcagtgccatgcgctttaatccggatatcaaggcgttcgcagagcggctcaaaaacaagggaaaggcaaccaaagtcgtcatcgttgcctgtatgcgtaaactgctcaccatcatgaatgccatgttgaaaaatatgcagccatgggtggctcaaattgcttgatttttaacacggttg

SEQ ID NO: 5348 - DNA, 1175 bp, unidentified
  source 1..1175: mol_type = unassigned DNA; note = element_8332f80
  misc_feature 1..2: note = core
  misc_feature 3..210: note = LE
  misc_feature 211..1152: note = CDS
  misc_feature 1153..1175: note = RE
  misc_feature 3..180: note = bridgeRNA
cttgtatggtaggacttgaagggaggaggagggacaaggctcgattctgactgttgacgcagcacagaccgtgggagatttcgcccctcctcctttcacccaagcgccgataaagaatgcatctggctagaccgacgataggaacaagcctgcgcctctgggtgagcccttcaagtgctcaaaccttatcccggaggaaatcctgtggcaatgccagttgctctatcaaatccgatcgttggcgtggatgtcgccaaaaatgaactggtgatttatcaggccgatagcgatctgcttgaagcgattcccaacaccaaaacatccatcaagcagtggctgaaggccttgctcggccccgtgtctattgccattgaagcaaccaacatctaccacctggaattcgctgatttggcctatgcggccggttgcacgatttacatggtgggcggctatgaactcaaacattaccgcgaaggcgtgaagatccgcgccaaaaccgacgccttggacgccaagttgctggcccgttacctgaagaacgaagccgaggagttgcgcccctggaccccgccatcaccgctgtaccgccagctcctgagccttttccgccgccgcgcggctttggtccaggcaagggtcggcctggtgcagagctggtcgaatgagccgctgttgaaggcagcttttgctgaacaaataaaatccatgcagcggcttgaaacgatgatcgaaaagacgatcaacgatcagctcaaacaagccggtttgctcggccaattgaagcgttgcctgaaagttgagggcattggatttctgaccggagcgcgcctgctcacggcgtttcagcggggggaatttagcaaagcggatgcgtttatcgccttcctgggcatggatttacgggtatcgaaatcagggcaaaaggacggtcgccgcagcttgaccaagcgcggagaccccgaggcccgccgacttttgcacaacgcagcgatgtcggctagccgtacgaaagcctggaaagggttttacgaagcccaaagagcacggggtttcagcaccacgcaggcgttggtgatgctggctcgcaaacttgctcgggtggtattcgccttgctgaaaaggcaaagcgaatatcagacaaaagtcagttgagggcttcccctcaaccatagaat

SEQ ID NO: 5349 - DNA, 1405 bp, unidentified
  source 1..1405: mol_type = unassigned DNA; note = element_833787e
  misc_feature 1: note = core
  misc_feature 2..310: note = LE
  misc_feature 311..1390: note = CDS
  misc_feature 1391..1405: note = RE
  misc_feature 9..305: note = bridgeRNA
ctgtgagtcttgtggtggctggtctgggactggctggcagggttagcgtcggtcgcttcgtcctggtcgtgactcttgatatgtgtggctcctttgtggggtgccttcaagccgacttgtccggttcagggcggaaggccgacgctgacccggctccacctcggtgacttgatcagaagattgtcggttccacctgtcgggtgggcctgactcatcacagtgttgccccgaagtgacttccacccgggcctgcgccgaccgtttgcggccggatccctgtcggtcttgtctggaaggaagtcccaccgccgtgaccatcgtcgcgtattctcatccgtttgtcgtgggtgtcgacactcacgcccgctctcacacccttgccgtcgtggtcgccgtgaccggtgagctgatcgcgaccgatcagtttcccgccaccgacgccggcatggaccgggccgtcgcgtgggccgcgcgccgcaccggtggtgatctggccaccttgtgggtgatcgaaggtgtggccacctatggtgcccggctggcagcagcggtgacccggttcggttacgaagtggtcgaggctgctcggatggacacccgggcccaccatggcaccggtaagtctgatctgctggacgctcaccggatcgcggccgcggtcttgtctctgcacccgcatcagctgcgccgtccgcgcagcgatggtctgcgggcggcattgcagatcctggtcaccgcccgcgaccacatgactaccgaacgcaccgcgaccatcaacgcactgatcgcgctggtgcgtgtggtcggcctaggcatcgacgcgcggaagccgctcaccgccaaacaggtcgcagatatcgcccgatggcgtgcccgcgtcgaagacctcgccacggctaccgcccgggccgaggccgtccggctggccaagcgagtcgtcgaactggaccaagagattgcagccaaccaggcccaaatcaccgacctgatccaccacagtcaggtctcgtccctgctggacaagaccggcatcggaccggtcaccgtcgcagttgccctcgcagcctggtcacactccggccgggtccgatccgaggccgcgttcgctgccctggccggagtcagcccgatcccggcatcctcgggcaacatcgtccgtcatcgactcaaccgcggcggcgaccgcagactcaaccgggcgctacacatggccgtgatcacccgcatgacccacgaccccgacacccgggcctacgtcgcccgccgacgagccgagggacggacgaccaaagagatccgacgctgcctcaagcgctacctcgcccgccagctctaccgcgccttccagacactccacaccacgcccgagatcgagccatcaaccgcttgacaaacatagaagagt

SEQ ID NO: 5350 - DNA, 1555 bp, unidentified
  source 1..1555: mol_type = unassigned DNA; note = element_8345b23
  misc_feature 1..2: note = core
  misc_feature 3..161: note = LE
  misc_feature 162..1412: note = CDS
  misc_feature 1413..1555: note = RE
ctcgtattataaagtagtagtgtttatagtccctctccaaggactgtatgctatactgtttggagatgctgtggagtggtttatttttcctaccacttgatggtttcagaaaggctccagccacagtctctttgtatagttgttaatcagttagataccgcatgacggtttatttagaacgaggttacaagcgcaaagagtacccgtgggttccaaacagtatcaattacttctctatgatctacgcaggaattgacgttgccaaagataagcatgactgctttatcaccaattctgatggtgaagtgctctttaaagcatttaccattccaaacaaccgcgatggatttgatgatctctatctgaagattttatccgttactgatgatttaaacaaagttaaagtagggcttgaagccactggacactacagttataacatcttagggtatcttcttgataaaggtctgaccacctttgttatcaatccgttacataccaatctttacagaaaaagtctaagccttagaaagaccaaaacggataaggttgatgcccatacgattgctactatgcttatgtctgatgtgaacttaaagtcctactctgacacatcttaccacaacgaggaactaaagtcactaacccgttatcgttttggtaaggtaaaacaacgggcaaaactcaaatcctctgttgcccggcttgtgaatatccttttccccgaactggaaaatctcgtcccgactcttcacatggcatctgtttatgcactcttgtcagagttccccagtgcatctgacattgccggcagtcatcttaccaggctgacaaatcttttatccgctgcatcaaaggggcactatggaaaagataacgcaatcctttttcgggaagcagcaaagacctctatcggctcacatatgccagcaaagtctctggaattaaagcacacaattcaattgatccaggagctgacttccgaaatcaatgatatcgagacagcaatcaaacgtatcatggatgaaataaattctccgattctgacgattcccgggatcagctaccgtatgggtgctatgatacttgccgagattggagatttcagccgttttgattcggcagataagatacttgcctatgccggaatgtcaccttccacctaccagtccgggcagcttgataactgttatgcccatatggaaaaacgaggttccagatatctgcgctattcgctttacaatgctaccaaatatgtctgccattgggacgaggcctttggttcatatcttgaaaagaagcgctctgaaggcaagcattacaatgttgcgttatctcatgctgccaaaaaacttgtgcgtctgatctatgcaatggaaagatccgggcagccatacaggacagctgcttaattttttctgtaaatatctcctttttgagtgccagtaatgacactctgtttgtcatgcagttttcaaggttcaaatatatctgaaatgcttgtcagcaattcattcaaaaatttcatttttggtcttgacttttaatagttagt

SEQ ID NO: 5351 - DNA, 1240 bp, unidentified
  source 1..1240: mol_type = unassigned DNA; note = element_834a7c0
  misc_feature 1: note = core
  misc_feature 2..216: note = LE
  misc_feature 217..1185: note = CDS
  misc_feature 1186..1240: note = RE
  misc_feature 35..199: note = bridgeRNA
ttgtatattaaattttataagtatatatttgataaaacaatgtcatcggagtgtggaataagccagagttttcgttggtcctacaggcagtgaaacatgttcaagccccacactttttacatcagaaaccggatagttcgttgggcatatgaccccgcattcgcaatggaggctcacgatgtaatagatgccattgacagttaaagtcacattgttatgaagtacattggaattgatgtcagcaaggcgacattcgtcgccgcctattcctctgacagatgcggcgagacgcgcaccttcgacaacaccgcagccggaataaagaagttcatcggaaccctttctggcatcactgatgcccactgcgtcatggaggccaccggcaactacagcgcgatgctgctctacctgctcgactccgccgggataccagtcagcatggagaacccgctcaagataaagaactttgcgagggcaatgctctccgtcgtcaaaacggatgtcctcgacgccagactcatagcgctttacggcgagaagatgaatccggctccgttcaggattcagagcgaagccatcctgagactcaagcagaagaggacggtgatgcggcagctccacaagcagaggacggccttgtccaacctcaagggctccattgagtgcctgcccgtccccgacaagggcgcaattcatgccgtcgacgaaacgctcgcgtgcatcgacaagaggcttgcagggcttcaaaaggaacttacggagcttgtcggggacgagttcggaaagcagctcgcactcctcacttccatcaagggtataggcgtgacgctcgccgccgctctcataatcaccaccggaggcttcacctacttccagaacgccaagcaggtctccagatacctcgggctctgtccaacttacgagcaatccggcacttccgtcaatgtaaggggacacatcaaccgtaacggtgactcctacaccagaggactcctttacatcgcggcatggcctgcaagtcgcttcaacgcccaatgcagggacacctacacgaggctccgaaaaagagggaagccaggcaaactcgcaatggtcgccgtcgcgaacaagctcgtgagacaggcatttgccgtcgtctcgcaacaaaaagagtatgtcgacggatttgtctccaaacgacattgacgagactgatctcaccatatttttactcttttttcgcattttttaatatagttcg

SEQ ID NO: 5352 - DNA, 1608 bp, unidentified
  source 1..1608: mol_type = unassigned DNA; note = element_8357c1d
  misc_feature 1..3: note = core
  misc_feature 4..277: note = LE
  misc_feature 278..1486: note = CDS
  misc_feature 1487..1608: note = RE
  misc_feature 13..297: note = bridgeRNA
tctattacaataaatttggacaggaaagccgggcagccagtccggctttcatccgtctcatgcctaagctacaataagaggagcaaccggctgacctctcctttcttgggctttcgtgtccgttcagaagactgtcagccgtcctcttattgtagcgttcgatttaagcaggttgagcctaccgcaatgccggggagttcgtgtcacccaatagattgaatcggcaatgagtaaaagatgggttccggttgcgcgattttgtactggaggtagatacatgaactctgttggcattgatgtttccaaaggcaaaagcatgatcgccgtcatgcgcccctttggagaagtggcggtctctccctttgaagttcgtcacacggacagcgaactgtgcgagctggcaaagctgcttagaagcctgcccggtgagacccgtgtcgttatggaagccacgggtaattaccatctgccggtagcctggttactaaatgactccggcttttacgtttcagtagtcaatgcaatgttggtgcatggctacgggaacaacagtttgcggcgagccaagaccgacaagaaggatgccatcaagttggcaaactacggtctcgatcactggcttgccttaccgaggtacgttccggaagaagatacccgattgatgctgaaaaactgctacaggcagtaccagcagtattccaaggtacaaaccatgctgaagaacaacctaatttctttgctggatactgctttccctgacgcaaatcgcctgttttcaagccctccacgcgctgacggcagcgagaagtgggtggactttgtagccacattctggcactgtgagtgcgtttgcggcagctctgagaaagtctttgttgccaaatatcagaagtggtgtaagaaactcggttacaatttcagcgaggataaggcgctggatatctacgcttccgcctgcggccattttggtgtcatgccaaagacagacaccactaagcttttggtggaacaggctgtctctctgctccgggtaacctcaacggcattggcctctctcaagcaggaaatgcagtcactggcagcttcgcttccggagtatccggtggtaatgaagatatttggcgttggcccggcactcggtccacagctcatggcagaaatcggagacgttcgccgctttcattccaagaaagccttggtggcatttgcgggtattgacgcccctccgtaccagtctgggcagatggatgtttacagcagaagcatctctaagcgtggttcgtcctcgctgcgcagaacgttatttctcgtaatggggatttacttgcagaacgctccgccagatgaacccatataccaattcatggacagaaagcgttccgaaggaaagccttacaaggtttacatgatggcctcggcgaacaaattcttccgcatttactacgcaactgttaaagcttatttggacgccttagacgaggcataatgccgtttcatcatctacggacagccaccatctgaaatttcagatgcaaagtggcttgtttgggtgcgccatttttgtgctgcttaaatttttgaatttttttcttgacttttgttagcagg

SEQ ID NO: 5353 - DNA, 1420 bp, unidentified
  source 1..1420: mol_type = unassigned DNA; note = element_8361239
  misc_feature 1..2: note = core
  misc_feature 3..120: note = LE
  misc_feature 121..1164: note = CDS
  misc_feature 1165..1420: note = RE
  misc_feature 1183..1415: note = bridgeRNA
agatggtgtaacgggccgaggcggcgcctgaggctttagctgaaggtggtcatcccccagaatgatggtctgaacggcgtacggtttttggccggcgccaagcatcttcggaggatgaccatggataagtatgccggcatcgatgtgtctttggaagtgagccacgtgtgcgttgttgatagccaggggaagatattgaaggaggccaaggtcgccagcgaaccggacgcactgatcgactggtttgcgtactatggcgcgccgatggctcggatcggccttgaggctggcccgctgtcgcagtggctttacgccggcatgcagacagccggcctggcggtggagcttctggagacccgccatgtgcgcgacgcgttcaagtcgatgccggtcaagaccgatcgcaaggatgcccgcggcatcgcccagttgatgcgtctgggctggttcagaccggtccattgcaagtcgctacccgcccaggaggtgcggtcactcctggcggcgaggaaggtgctgcagaccaagcgcatcgacatcgagatgagcatccgcggcctcctgcgcggctatggtcttaaggttggcccaaccacgcccaggactttcgagggccgcgtacaggaactcgcagccggtcacgacacgctgagcctgatcgcctcggcgctgttgaaggctcgcgctgttctcgagcaggagttcaagggtatggagaagcggatcttagctcatgcgcgcgaagacgcccgcgtcagacgtctgatgacgacgccgggagttggcgcgatcgtgtcggtcaccgtggttgcgggcatcgatgatcccagccggttcaaatcctcgcgcagcgtcggggcgcattttggactgacgcaaaagaagtaccagtccggagagaccgacatcaccgggagaatctccaagtgcggcgatgaagaagtgcgcacggcgctctatgaggcagccaacgtcatcctcacccaccgggtcaaagcctcaagcctgaaaacctgggggatggcgatcgctgagcgcgccggcatgaagaaggccaaggtcgccgtggcgcgcaagctttcagtcatcttgcatcgcatgctcgctgacggaaccgagttcatcgctgcgggcaggcctcagcccaacgcagccaacgcataaggagccacacgagatagccatttcgagcgggtcaaaccatcagcccactcgaaagccgagtcccgtcgccgggacgcatggatccggtcaggacgcagctcgccttgaagcgcattcgcgacttcgcttatgagattgtccggccgatcctgtttggaccccatcatgcagcagccctcgcgctgactgcggacagaagcatgaagccggcgacgtgacgaagcttagaagggattgacacgaggcccgttacaga

SEQ ID NO: 5354 - DNA, 1569 bp, unidentified
  source 1..1569: mol_type = unassigned DNA; note = element_8369b3f
  misc_feature 1..2: note = core
  misc_feature 3..247: note = LE
  misc_feature 248..1426: note = CDS
  misc_feature 1427..1569: note = RE
  misc_feature 1..226: note = bridgeRNA
ctcgtattattaaatagtagtatttatgaatccctctccagggacaaatgatatactgttgaagatactgtggattggttttctaatcctaccacacagatggtttaatggaggctccaaccacagtctctttgtatatttgttaatcagttagataccgcatgacggtttatttagaacgaggttacaatcgcaaggagaacctgtggttctaaacagtatcaatacttttcaaaggagatttcttatgatttacattggaattgatgttgctaaagataagcacgactgctttatcactcactcggatggcgaagcattatttaactcctttaccatctctaacaatcgcgaagggtttgaaactttatttcagagaattgaatccgtatcagatgatttaaccaaagtaaaagcaggactggaagccaccggacactacagctacaatcttctgggattccttcctgataaaggtctgaccaccttcgttatcaatccgttacataccaatctttacagaaaaagcctaagccttagaaagaccaaaacggataaagttgattcccgtaccattgccactatgatgatgtctgacatgaacttaaagtcctactcagacacatcttaccacaatgaggaattaaagtcactcactcgttatcgctttgataaagtaaaagaacgggcaaaactgaaaagttctgtttcaaggcttgtgtgcattctttttccagagttggaaaaacttgttcctacacttcatatggcatccgtctatgctttgctttccgaatttccaggtgctgacgctgtcgcatccgcacacctcacaaggctttccaacctcctctctgagagttctaagggcagatatggaaaagatactgctgtcatgtttcgtgaagctgcaagaagttctatcggctctcatatggctgctaagtccccggaactgaaacacaccatcaaactcattcaggaattaacgattgagattgacgagattgaaacagccatcaaacggatcatggatgaagaaatccagtctccaatccttaccattcccggtatcagttaccggatgggtgcaatgatcatcgccgagattggggatttcagccgttttgattccgccgataagatacttgcatatgcaggaatgtccccatccacctatcaatcaggacagttagataactgtcattcccacatggagaaacggggttccagataccttcggtatgccctttacaacgccactaagtatgtctgccactgggatgaatccttcggaacctatcttgagaagaaacgctccgaaggcaaacattacaatgttgcattatctcatgccacaaaaaagctcgtgcggctgattttcgcaatggaaaaatcaagacgggcatacataccggttccttaacctgttctgtaaatgtctccttttagagcacctgtaaagatgctcttattgtcatgcagttttcaaagttccaatgtatctgaaatgccttccggcaattcattcaaaaaattttattttagacttgacttttaatagttagt

SEQ ID NO: 5355 - DNA, 1473 bp, unidentified
  source 1..1473: mol_type = unassigned DNA; note = element_8374a1c
  misc_feature 1: note = core
  misc_feature 2..220: note = LE
  misc_feature 221..1240: note = CDS
  misc_feature 1241..1473: note = RE
  misc_feature 18..232: note = bridgeRNA
ctgatagaggctgtgatgcaaggacgttgcagttttcgtagcgtttggggtctggccgggtgtgtctctcgaatgccctgtcaccgtgatggttgacttccgaacgaagcgatcagccggccagatccagtcgcggtgtggctcgtaagaggaacggcatcagtccacatatcaggtgtgcccaccgtggcgaaccccttccaacagcttggagcacaccatgttcatgatcggcatcgaccctcacaaagggtcccacaccgctgctgcggtcgaccgcaacgacacggtgatcgacacgttccgtgtcgtcgccgactgccatcaacgtgaccggttgctcgcctgggcagaggcgttcacgccgcgcacatgggcggtcgagggggcgaccgggatgggagcgttggtcgcgcaacaactcgtcgccgccggcgagcacgttgtcgatgtgccaccgaagttgtcgtcgcgggtgcggcttttggaacgcggcaagatcgacaagaccgacccgaacgacgcacggtccgcggcgatcgtggcgtggcacaacccgtcgctgaacgtggtcgccggcctcgacgagcatcgtgtcgtactcagacttttggctgatcgtgatcaccagatcaccgcgcaacggacccgcacgatttgtcggctgcacgcgttgttgtgtctgttgatcgagggcggcaccgcacgatcgttgagcgccgaacgagctgaccaactgctggccagtgtgcacattgccggcccggtcagtcgtgagcggatcgacgctgggcgtcagctgctcgacgagattcgcgcgctcgatacctcgcggatcgaggtccgcaaacgcaccgcagagatgatcgtcgcgtccgcgacgaccgtcaccgacgtctacgggatcggaccgttgatggcagcgatcatcattggccgcgtcggtgacatccgccggttcccgaccgctgggcacttcgcccgccacaacgggaccgcgccgatcgaggcctcatccggaccgaagaagcggcaccggttgaacccgcgcggtgaccgccagttgaaccatgcgatccacatggccgccgtcacccagatcagccacgacaccgttggccgcgtctactacgcacgcaaacaggccgagggcaagactcgcaaagaagcgatgcgagcgttgaagcgacacatcagcgacgccgtctaccaacgcctcataggcgacacccgccgctgacaccaaccaggtcgagcgttccgcttgagctgccaccggtgggctcgggaggacaacgcgaggacgacactaaatccagcgtggccggcatctcacctcacacgacccgactcttcggagcagtcactcccgaacccgacaacacgctagacccgaccacccgcgccaccgacccgagcaacctcaacgcgccgcaacgcagcccgaaagaaccacttgacacaaagaggatt

SEQ ID NO: 5356 - DNA, 1435 bp, unidentified
  source 1..1435: mol_type = unassigned DNA; note = element_8377831
  misc_feature 1..2: note = core
  misc_feature 3..120: note = LE
  misc_feature 121..1152: note = CDS
  misc_feature 1153..1435: note = RE
  misc_feature 1185..1389: note = bridgeRNA
agatggggtaatcggccttgcagcttgtggatagctgaggattaagggtgctgcgcttcaggctgatggtgaaacgaggtccacattcgtggcctcaagcatcaggaggagaagcgcagcatgggctattttgccggactagacgtttccgtcaaggagacgagcgtttgcattgtggatgatacgggcaggctggtgcgggaagtgaaggtggcgagcgaaccggaggcgctgctccaggttctgataacccccggccggaccttcaagcggattgggttggaagcagggccgctctcgcagtggctttttagcgctctggcggaagcgggcttgccggtgatttgtgtcgagacgcggcacatgagagcggtgttgaaggcgcagatcaacaagacggatcgcaacgatgcgcgcggcatggcgcagatgatgcgggtggggctttatcgcccagtacatgtcaagacgttacgcagtcagaaactgcgaatgctgctgacccatcgcaagctgcttcagtcgaaggctatcgccatcgataatgatttaggtgcgaccttgcgcaacttcggtctcaaggttggcatggtggggaggacaaagttcgaggcccggatcaaggagctggtcgaggaccttcccgacctggccgtgctggtcgaaccattgctcattgtccggcgggttcttcgcgaacagattggcatcctgcatcgccgcttgctggtcatcgttcgggacgatgatgtctgccggcgcctgatgacggtgcccggtgtgggcccggtagtggcactgacctatcgtgcaaccgtcgatgtgcccgcccgcttccgtaactccaaggcggtcggggcggtgtttggactgacgcccgccaagtatcaatcagctgaggtcaaccgaaccggtgcgatatcgcgatgtggagatgagatgatgcgaatgatgctctacgaagcggcgcagatcgtcctggtgcgttcgacaaaatggtcctggctcaaggcctgggcgatgaagatcgccaggcaccgcgggatgaagaaggccatcgtggccttggcgcggcggttggccgtgatcatgcaccgcatatgggttgacggcaccgagttccgctggacccgggaggtcgcagcagcatgaagcttatagaatcaatgcaataggagaaaactcgaactccaccaggcggtggaatgatgtccctcacgggacgatggatgaagtgagatcgtatgtccgcttggacctaccggtatcactctaccggcaaggccgccgcaaagattgttccacttcgtcctcgaaccccatgctggaagggcctaagtgccgattccgaagagaagcgagagcccgtgagcgatatcaacactgccatggtgggtagtctgaaagtgcttgaccccaaacggccgattagaga

SEQ ID NO: 5357 - DNA, 1583 bp, unidentified
  source 1..1583: mol_type = unassigned DNA; note = element_837aa4c
  misc_feature 1..2: note = core
  misc_feature 3..250: note = LE
  misc_feature 251..1426: note = CDS
  misc_feature 1427..1583: note = RE
  misc_feature 9..223: note = bridgeRNA
ctcgtattattaaagtagtagtgtttatagaccctctccaaggtcttaatgctatactgtttgaagatactgtggactggttaagtccctcctaccactcgatggttttcgaaaggctccagccacagtctctttgtatagttgttaatcagttagataccgcatgacggtttatttagaacgaggttacaagagcaaagagctctgtggtcctaaacagtatcaatactattaccaaggaggtattctcatgatctatgtgggaatcgatgtcgctaaggataagcacgactgctttatcaccaactcagaaggcgaggctttgtttaaagccttcaccattcagaacaaccgtgcaggttttgatgagctgtaccaaaaaatacagtctgtagaaaaagataagtccaaaataaaagtaggcctcgaagccaccggacactacaactacaacctgctcggatacctgattgataatgggttgaccgcctatgttatcaatccgcttcacacaaatctttacagaaaaagtctaagccttagaaagacgaaaacggataaggttgatgcccgaactattgccatgatgttaatgtctgacgtgaacttaaagtcctactcagacatatcatatcacaacgaggagctcaagtcactcactcgttatcgtttcgataaggttcgggaaagggctcagcttaagcaatccatttccaggcttgtcactatcctctttcctgaattggaaaagctggttccaacacttcatatggcttctatatatactctgcttaaagaattaccatctgccaaagccattgcagactgtcatttaactcatcttaaaacacttcttgaagaagcttccaagggacgttacagccgcgataaggccatcgaaatccgcgatgcagccagaacctccattggctctaacatgccggcaaaatcattggaactgaagcataccatcaagctgatctcagaattggattctgagattgatgaaattgaaaccgagattcaaaaaatcatggatgagattcattcgccaatccttaccattcctggcatcagttatcgcatgggagcaatgataattgccgaaattggtgatttctcccgatttgattcaccagataagatccttgcgtatgcaggtatttctccttcgacatatcaatccggacagctggaatcttcttattcacacatggaaaaacgcggatcaagatacctcaggtttgcattgatcaacgctacaaaatacgtctgccattgggatccaacttttggggcataccttcagaaaaagagagccgaaggcaaacattataatgttgcaatttcacatgctgcaaagaaactggttcgtttgatatatgccatggaaaaatcccagaaagcatactcacctgcagcttagtcatttcagtaatttgatacttatttttgagcaccgatagcgatgctctttttgtcatgcagttttcaaggtttattattgtgaaagacttctatttccatccatctagaaatatcctggatttcctcaaaaaacttattgacttttaatagttagt

SEQ ID NO: 5358 - DNA, 1182 bp, unidentified
  source 1..1182: mol_type = unassigned DNA; note = element_8381b73
  misc_feature 1..2: note = core
  misc_feature 3..207: note = LE
  misc_feature 208..1167: note = CDS
  misc_feature 1168..1182: note = RE
  misc_feature 22..210: note = bridgeRNA
cttgtatctaccgaagggttgaaactgcggtacctctgatcagggcgccagctcgatgtcgtctgggtggcaaacaccgttcgttagccagagcggcgtttagattcgttgtcgtgcgagcccgaacagttgcgggggccggcggggatgtcgagcccgaattatcacacggatgggcgagggcgacaacgctgcactggaggcgtgatgtttgtcgggatcgatgtggcaaaagcggagttggtgagcggtgtccggccgaccggcacggggtggacggcggtgaatgatgaccagagggtacgcgagctcgtgacgcagatgcaggccctcggtcccacgctgatcgtgctcgaggcgaccggcggctgtgagctgctgtgcgtcgcggcgctggcggcggcgcatttgccggtggtcgtcgtgaacccgcgccaggagcgggacgttgcgcgagcgaccgggcagctcgcgaaaacggatcgtatcgatgcggagatcctcgcgcgcttcgcggacacggtgcgcccagagatacggacgctcccgaccgtggaggcgcaggagctggatgccttgctcacgcggcggcgccagttgttggagatgttgggcgcggagcgcaatcgcttgggacaggtctttggcagcggcaagaagccagtcaagaaaagtctgacgacgcacctcgtgttcctcgagaaagcgctggcgcgcgccgatgccgaacgggatgcggcgattgcgcagtcggcaatctggaaggcgcaggatgatctgctgcgccgtgtgccaggcgccggtccgatactctcgcggacgttgctcgccgacttgccggagctgggtcggctctcgcgtcgcgagattgcgaagctcgcgggcgtcgcgccgctcagtcgagactctggcacgatgcgtggtcgccgatttgtgcaaggcggccgcgcgccggtgcgcgcggtcctcttcatggcggcgctggtggccgcgcggcgcaatccggtgatcacggcattctctgcgcggctcgtgaccgccgggaagccgaagaaactcgccctggtggcctgcatgcggaagctgctgaccgtgttcaatgtgatggtgcgcaccaccacaccgtggaacccggaattcgcgacgatgaatgtcgcgaccgcttgattttcaagacagttg

SEQ ID NO: 5359 - DNA, 1391 bp, unidentified
  source 1..1391: mol_type = unassigned DNA; note = element_83849d4
  misc_feature 1..2: note = core
  misc_feature 3..85: note = LE
  misc_feature 86..1111: note = CDS
  misc_feature 1112..1391: note = RE
  misc_feature 1155..1378: note = bridgeRNA
tgatgtggtggacgacgcccgctcccggcattgagtgccatagggtggttcgtcgaagacgaatcacatgaggggagccgtccacatgcaaattaccacgatcggtttggatctcgccaagaacgtattccaggttcacggcatcgacgcgaccgagaaagtcgtcgtcagaaagcaactccgccgcggccagttaataaagttcttcgaggccctggcgccgtgcctcatcggtatggaagcctgcgccacggcgcatcattgggcgcgtgagctgacgaagctcggccacgaggttcggctgatgcctgcgaaggatgtgaaggcctacgtcaagcgcaacaagaacgatgcggccgacgccgaggcgatctgcgaggcagtcaggcgcccaaccatgcggttcgttatggtcaagtcggccgagcagcagggccggttgatgcagcatcgggtacgcgatctgctgatgcgccaacgcacccagttgatcaatgccttgcgggcgcatttggccgaactcggcattgcggctgcacaggggcgcgaagggatcaaggagttgctggcgatcgttgcccaggatgggggttcgcgcttgccggtcgatgcccacgccagcctgatcgtgctggcggcgcagcttcaggctgtgcagacgatgatcggatcgatcgagaaacgggtcgttgggcagcatcgctcgaacgaagaaagtaaacggcttgagaccatccctgggatcggcgttatcggcgccaccgcgatcgcagcgaccgtccctgatccgaaggtttttcgatcggggcgtgattttgcagcctggatcgggctcgtaccgcgagaagattcaaccggcggcaaacaaaagcttgggccgatttcgaaacagggcgatcgttacttgcggcgcatcctggtggtcggagcctgcgcggtgttgaagcaggcgcgccagcagccggagaagtatccctggctcacacagcttctcgcccggcgaccgttcaaggttgttgcggtcgcgcttgccaataagatggcgcgggtcgcctgggcgttgctggccaagggagggacctaccgggcgcctcgactgaaggcggcctgacaaagagctcggcaatgagaggatgaggttgcgttcgtgcgttcaagagctgcaggggtgatgacgacattgatgcgaaacggtcgagaccgtcgatcgggaaaacccgttaagtgccacgcgatacttgagcgcgtgcgattgtttgggacccgatcagcggattacatcagggccagcagccacaacggctgcattcaaaggccgaatacatggctgcacccgaacgcttcgctgaaatgcccgatttttcccttgcaccgcgggcgtcgtccataca

SEQ ID NO: 5360 - DNA, 1375 bp, unidentified
  source 1..1375: mol_type = unassigned DNA; note = element_838b432
  misc_feature 1..3: note = core
  misc_feature 4..75: note = LE
  misc_feature 76..1107: note = CDS
  misc_feature 1108..1375: note = RE
  misc_feature 1108..1362: note = bridgeRNA
tgctggtgtggacggctcctcgccccacctgcgctatggtcgtgagaccgaaaccgcaaaagcgaggagagatcgatgaagaacccaccagttcgcattggcatggatacgtcaaagtccgtcttccagttacacggcgttgacgctgacgaaatcgttgttgttcgtagatcctttcggcgatccgagatgatccattatttcgagaaactgccgcctgcactcgtcgccatcgagtcctgcggcagctcacatcactgggcgaggttacttacctcactcggtcatgatgtgaagctgataccgccccaatacgtgaaaccctatgtgaagcggggcaagaatgatgccgccgatgcagcggctctttgtgaagctgtcacccggccgagtatgcgtttcgtgccgatcaagtccgaggagcaacaggcagcctgtatgctgatgaccgttcgagagcgtctggtcagtgtcaagtcgcagctttcgaacgcgtttcgcagctatgccgccgaatttggcatagttggagccgccggtcggcagaacgtccatgccctgatccggcgtgttctggacgacgagtcgctgcccgagttggcgcgagagctcttccgttttcaggccaaggagtacgcggcggtcgaagcgcgtctggaggagatcgaaaccaggctcatgaaatggcatcgcgagaatgaggctagccggcgcatcgcgacaattcccgggataggaccaatcggggcgacgatgcttagcatgaaagcgccacctgccgaaagcttccgatctggccgagattttgccgcctggataggtctgacaccgcgggatcattccactggtgggcgaatgcgacacggcggcatcaccaaggccggtgacgcagcgctccgatctgtacttgtcgtgggagccacggcgctgctcaggcatattagggctggtcgacacaagccgacagcctggctagcggcactgcttgagcgcaagcccccgaagttggtcgcggtggcactggccaacaagttcgcccggatcgcctggcgcctgatgatgtcgggcggaatttacagtcgaccatctgacagcatggcagcataatagaaatcaggcttcggaggaccgatggtccccggatagcctcaccagtcttgcaggacgcacgagatggaaaaaccaatcggtcgatacgcgcgtaattccgaagattacactggcccgagcgaggtcgccaatgtgcttggagcgggcgtagcgcacaccatctgggccagcgaactctcttcgcgcaaacaggccggacatctgatagcaagcgatttggttagaagtctgctgcaatcctgacaagagaggggccgtccacatc

SEQ ID NO: 5361 - DNA, 1381 bp, unidentified
  source 1..1381: mol_type = unassigned DNA; note = element_8392726
  misc_feature 1: note = core
  misc_feature 2..283: note = LE
  misc_feature 284..1366: note = CDS
  misc_feature 1367..1381: note = RE
  misc_feature 1..293: note = bridgeRNA
cagtaataatgtcagtgtcagttttcatcattatgcttgctactggcttgcgccgatgagatcactgatgcagtgaagacttcctggtttcctgacccacactctgatcgaccagcaatgtgtctttccccggacctgtcggttatcgggaagtacttcatgcgaggcttctcctcaccgatgcgcgtgactcaagaagggcctgacggcttgtctctttactgtcctgtccgggttatcgtcgggagaaacagaaaattatttctggcgcaggaagtgatatatggcgaagacaaaagcggttcattcatcctatgttatcggtggtgttgatacacacaaagacctcaatgttgcggccgttgttgatcaaaataattgtgttttgggcagtgagtttttcgcgacaacacgtcagggataccgtcaattgctggcctggatggcatcttttggcactgttaagcgtatcggcgttgaatgcaccggctcatacggagctggcttgctacgctaccttcagagtgccggagtcgatgttctggaagtgactgctccggataaaatggaacgtcgcaggcgtggcaaaagcgatactattgatgcggaaagcgctgcccacgctgctttttcactaatacggacggttacacctaaaacacgtggtggaatgattgaagctctgcgtgtattgaaagtttgccgtaaaacggctgtagctgcacgccgcactgcgctgcaaatgatccagatgaatatagtatctgccccagatgagttgcgtgaccaaatacgcagtctgacccggatgcaactgatccgcactctggcctcgtggaggcccgatgttactgcgtaccgtaatgtgcaggatgcttatcgaattgccctgaaatcgttggcccgtcggtaccttgagcttcacgatgaaatagcagatctggacgttatgttagcgtcaattgtcgatgaactggctccagagcttattaaacgcaactcggtaggctatgagtgtgcctcacaattgctgataacagccggtgataatcccctgcggctccactctgaagcaggcttcgctgcgttatgcggggtgagtcccgttcccgcctcttccggtaaaaaaaatcggcacagattaaatcgcggtggtgatcgcgcagccaatagtgcgttgcatattatcgcgataggacgattacgtacggacacgaaaacgcaggaatatataggcaaacgagtagctgaaggtcactcgaaaatggaagcactacgctgcctgaagcgatatatctcacgtgaagtctatacactactgcgcaatcaaaatcgacagatcaatagcactcaaataacaacttgacacttagaagggcgt

SEQ ID NO: 5362 - DNA, 1610 bp, unidentified
  source 1..1610: mol_type = unassigned DNA; note = element_83b279d
  misc_feature 1..2: note = core
  misc_feature 3..280: note = LE
  misc_feature 281..1492: note = CDS
  misc_feature 1493..1610: note = RE
  misc_feature 14..300: note = bridgeRNA
ctattacaatataaacatagatcagggaagcggtacacgaccactcccttgtctgcctcattacctaagctgtagaatgagagtgcattggtctgacgtatacctcctggaactttacgttcgaaagacagtccgtcagccatcctcccattcccagttgttcgttttatgcaggtagaactgtattcttgcacgttcgtgtcagccctcaatagatcgaatcggcaatgaggagtttggtgcaccattgcagtaaatctattgttttggagggattcacatgaacgctgtcggtattgatgtttccaagggcaaaagcatggtcgccgcactccagcccggtggaaagctccttgcccgcccctttgaggtactccacaccaaaagcggcatcaaggaactcgtttcctttgtccgtacactggatggagatacgcgcatcgtcatggaacacacagggcgttactatgagccgatgctccaatggcttgcctcttccgatcttttcgtcactgccgtcaacccaaaactcatcaaggattttggaaacaacacgctgcgcagcgtcaagacggataaagccgatgccaagaagattgcgcgttatgcccttgacaactggtgcgatttgcgtcagcatacaggcatggataccacacgcacacagctcaaaaccatgaatcggcagttttccttctgtatgcggcaaagaactgcctgcaagaacaacctcatcgccctcatcgatcaggtctatcccggtgccaacatctattttgaaagtcccgcaagagcggacggctcgcagaaatgggtggattacgtcagtgtgttctggcatgtcgattatgtctgctctatgcgtctttccacctttacagagcgttaccgcaaatggtgtcatcggcacggctacaacttccagtcagacaagcccaggatgctctgggagaaggcaaaggatcttatcgcgatgctcccgatggacaagatgacgaagagcctggtacagaccgctgtcgctcagctcaacgtgctgtccaaaacagtcgagacgctgcgcacgcagatgatcgcgcttgccgaaaaactgccggaatacccggtcgttattgccatgaacggcgtcggagcgacgcttgcaagccagctgattgctgaaatcggcgacatcacccgtttccctcggcgcggctcattgaccgctttcgcaggtgtcgatccgggggcaaagcagtccgggacaatgcagctaaggagcaacaagacatccaaggcagggtctccgcatctaaggagagcgctgtttcaggttgtatcaggtctcttgatgcgtgctcccgacgatccggtctacaacttcatggacaagaagcgcaccgaggcaaagccctactacgtctatatgacggcgggagcaaataagttcctgcgcatctactacggacgagtaaaagagtatttagcgagccttccgaaagaacaggactgacgtttcacaacagcccttcggtcgacgcttctgcggcgacctatttgtgttagtcaaatcccacctttctcaacgtctcgtctttttattgtcgaggggttgactttttatttgcagg

SEQ ID NO: 5363 - DNA, 1384 bp, unidentified
  source 1..1384: mol_type = unassigned DNA; note = element_83b676b
  misc_feature 1: note = core
  misc_feature 2..292: note = LE
  misc_feature 293..1129: note = CDS
  misc_feature 1130..1384: note = RE
  misc_feature 1143..1379: note = bridgeRNA
caatgaaatggactcctccctcctacggcgtcaagcgccagactaatggtgcagccacaagtcccggagggggagtcagcatgaaccttagtcgcattggtctggatctggcaaaacaagtattccaggtgcacggcgttgatcgtcacgagcatgtggtatgtcgtcgccaactcaagcgggcacaggtgcgggatttctttcgccaactgccgccgtgcctggtggcgatggaggcctgcggcagtgcgcactactgggcgcgcgagttgcgggagctgggccacacggtttgcgggagctgggccacacggtacgcctgatcgcaccgcagttcgtaaaaccctacgtcaagggtgacaagcacgatgcacacgacgccgaggcgatctgcgaagccgccagtcgtccgagcatgcgctatgtcccggtgaagagcgcagagcagcaggccgtgcagtcgatgcatcgggtgcgcagtcgtctagtgcgggcccgcacggcgttgtgcaatgaggtgcgtggcttgctgggtgagttcgggctgatcgcgactcgacgtgggcgagcggcgacgatggccttgctcgaaacggtcatggctaccgaaccggcgtccttgccggccccgatgggcgagctgttgcgtgaattgaaagatgaattgcagacgctggaggcgcgcatcgctcgactggagcgacagattcaggctcacgtacgtggcgatgcccgcatccagcgcctgctggcggtggaaggcatcggcgcggtggcggcatccgccggtgatgcacggcaattccgcacgggccgccagtttgcggcctggctgggcctggtgccacggcagcactccacgggcgggcagcagcgcttgggcaacatcagcaagcgcggcgatacctacttgcggaccttgctcatccatggcgcccgtgcagtcgtgcgctgttgcgccaacaagaccgatgcccgcagccgctggctgcaaggtctgctgcaacggcgtcctgccaatgtcgtcgccgttgccctggccaacaagcaagaatgcccggatcctttgggccttactcagccgggagacatgctaccggcccggttgagcgttcctgccacaccgtagttgaaacatccaccacgattgctcagtgaatgacaatgatgacgaaccggtcgaaccggcctgcatgaaacctggtttatacgtgggctccctgctgcagtgaagcaaagccgttagggcgatcaggcatgtaggcgcgcatttcatcagggctcgggagttgcaacaccactccatgaagccggatatacggatgcagtcgtacacaggtttgaaatcaagacaaacactggcaaaccgggaggagtccatata

SEQ ID NO: 5364 - DNA, 1426 bp, unidentified
  source 1..1426: mol_type = unassigned DNA; note = element_83bf050
  misc_feature 1: note = core
  misc_feature 2..139: note = LE
  misc_feature 140..1159: note = CDS
  misc_feature 1160..1426: note = RE
  misc_feature 1182..1424: note = bridgeRNA
atgtaatggacgcctccctcctgcccgaaggtgacggctacggcctgtagaacgacaggagccctcgcaatacctgacggcatctaaagtgccaaagtggtggtgtaacaacgaccacaaacggtaaggagggctcgatatgaagattacgacattcggtctggacctggcaaagcgggttttccaactgcactgggtggagaccgctaccggtgaaatctgccgccggcaattgagccgggcgcagttgaaagagttcttcgccaacagggaagcgtcggagatcgcgatggaggcctgcggcagtgcgcactactggggccggctgttccaggggcttgggcatgaggtcaagttgattcccggccagtttgtgcgcccgttcgtgaagagcaacaagaccgacgcagcagatgcgcaggcgatctgggaagcggcacagcggccagggatgaagttcgtcgcggtcaagagtgagggccagcagagtgtgctgatgctgcatcggatgcgcgagcagctggtgaaaatgcggacgatgcagactaaccagctacatgggctgttgtatgagttcggtgcggaactgccgaaggggcgacacaaggtgctggagcggattcctgatgagcttgcgcggctggaaaacgcgttgccggcgatggtgatcgaagcgatccgtagccaactgcagcgaattgaggcattggaccaagacatcgccgagcttgagcacaagctggcggtgtggaagagggaagatgaagcggccaaacgattgatggccattccgggcgtcggtttgctcacggcgacagcggcggtagcaatgattggggatgccaagacattcaagtctgggcgcgagtttgccgccttccttggcctagtgccacgccagagtggcaccggcgggcgagtgaagttgctggggatcagcaagcgcggtgatgtgtatctgcgcacgctgctgattcatggcgccagggctgtggcgacgcatcagaaggtgcgcgatccctggctggagcagttgctggcgcgacgaccgttcaatgcggcggtggtcgcgctggccaacaagatggcacgaacgatctgggcgctgttggcccatgaccggacgtatcaggcagattacgtggccaaggccgcgtaggaaactaacaaaccacctaaggaggtggaccgctgaaaggttgcgcaggttgatgtgcgcttgatggcagaacaggtcggaccgcggggaagtaagcctgtatggtggacagtccttcgaggactccaaggagatgaggccttccccggcgaattccatcagggccagcagacttcgagtctgcaacaaaggccggatataagtctgcagccagatctcgaatgccaacatcgaacgtcgcttaccaaaccgggaggcgtccatata

SEQ ID NO: 5365 - DNA, 1154 bp, unidentified
  source 1..1154: mol_type = unassigned DNA; note = element_83c1840
  misc_feature 1..2: note = core
  misc_feature 3..206: note = LE
  misc_feature 207..1142: note = CDS
  misc_feature 1143..1154: note = RE
  misc_feature 36..212: note = bridgeRNA
cttgtcttatgactttctctgccgaatgggcgagaacggatcgccgggagcgggtggccacccgctcccggcggcgagggtcggatcgtgaacgcgctgaccgtttgacgggtcgagttagagtcggatcgccctcgtctttcccttgaggcctggacggatacccgcagtcaggctgcggacgacaagcacaggacaagcgaaagatgaccagcgataccatcggagtcgatatttcgaaagaccatctcgatgcccaccgtctcagtgacggcacgaaccggcgctttaccaatgacaaaaccggccacagggcgttcctgaactgggccgggcagcccggttcgcgtatcgtctatgagccgacaggcccctatcatcgatccttcgagcgcaagctggcccaagcggcccatgcgctggtcaaggtcaatccacgccaggcccgccgctttgcagaagccaccggaaaacacgccaagaccgacccgctggatgccgccttgctggcacgcatgggggcactgttggagctcgaggcgcgcccgccacgcagccatcttctcaatgatctcaaagacctccacatggcccgcgaagctctcgtgaagaaccggacagccgccaggaacagggcaaagaacctgaccctgcccatcctcaagcgtcagaacgccgagcaactcaagcagatcgagcgacaggtcagcgccatcgaaaaggagatcatgaccctcatcaaggctgatcccgacctcgcacgccgctacgatatcatcgtctcgatcccgggcctcgccacgatcaccgccttcgcgatgatcatcgacatgccagaactcggcacgctcgaaaacggccaggccgcctcgcttgcggggttggctccggctactcgccagtcaggtacgtggaccgggcgtgccttcatccgcggtggtcgcgcaagtctacggcaagccctctacatgccggcacttgttgcaatccgcttcaacccgcagctcaaggcgaaatacgatcacttcatagccgcagggaaacccgcaaagaaggccataaccgccatcatgcgaaaactcatcatcctcgcaaacgcactcatcagggatgatcgaaaatgggcgccagccctaccttgaccaacacggata

SEQ ID NO: 5366 - DNA, 1401 bp, unidentified
  source 1..1401: mol_type = unassigned DNA; note = element_83c8f8c
  misc_feature 1..2: note = core
  misc_feature 3..79: note = LE
  misc_feature 80..1117: note = CDS
  misc_feature 1118..1401: note = RE
  misc_feature 1115..1388: note = bridgeRNA
tgttggtgtggacggcccccggcggcatcgggtgtgccagaatgaggtcgctgttgatctcagacaaaggagaccgtccgtggaccagattagccgaattgggatggatacgtcgaagcatgtttttcagcttcacggcgtgaatgccgccgaagcgccggttctgcgcaagaagctgcggcgcaaggagatggtgacgttcttcgagaagcttgcaccgacggtgatcgcgatcgaagcctgcggtgcgagccatcattgggcacggctgctgcagtcgttcgggcatacggtgaggttgatcccgcctcagctggtcaagccctacgtcaagcgcggcaagaacgatgcggcagatgccgaagcgctgtgcgaggcgatgagccggccgacgatgcgcttcgtgccggtgaagtcgcctgagcagcaagcggccttgatgctggtcggcgtgcgcgaccggctgatccgcaatcgcacgcagctcgccaacgcgatccgcggtcatgcagccgagttcggcctcgctgccgccaagggcatggctcacttggttccgctgctcgagcgcattcaggccgatgagggcctgcccgccttggctcgagagctgttcgccatccaagccaaggaatatgcgcagttgcaggcgcagatcgacgaggtcgatgcccagctcatggcccggcatcgggccgacgactgcagccgacgtctcaccaagatccccggcgtgggcccgatcggcgcgatgctgctgaggatgaagaccccggagcccgagctgttccgatcggggcggcagttcgcggcctggatcggcttgacgccgaaggatcactcgaccgcaggcaaggtgaggctcggcgtcatcacgcgagccggcgacgagggattgcgcagcgtgctggtggtcggggcgactgccgtgatccagcaggcgcgacgcggcggaagggcgtcgccttggcttgccgcgcttctcaagcgcaagtcgccgaagctggtcgccgtggccctggccaacaagatggcgcgcatcgcctggaagatgatgctgacaggagaggcctacaccgcaacacccgcgcccgccgccgtggccggcgcggtctagagatcagccagacacggggagcagcagaattgcaaccgtgctgagctgatgccagaacttgcaagataatgagcagatggtgtgatcgatcgatccacgacacgggacactccgatagagccaatggcccacttactggtcgcccgagtgtttggaacccctgtcgcggaaaccatcttggccagcgttcatgtgcgagcgcaccgacaaggccggacatatggacgcaagcgatctgatcaaaccactgcaaaacaccttgcgaggagggggccgtccacata

SEQ ID NO: 5367 - DNA, 1579 bp, unidentified
  source 1..1579: mol_type = unassigned DNA; note = element_83cf144
  misc_feature 1..3: note = core
  misc_feature 4..253: note = LE
  misc_feature 254..1459: note = CDS
  misc_feature 1460..1579: note = RE
  misc_feature 8..227: note = bridgeRNA
gttcgtattatgaggtcagccagtttttactggttgacctcttttgtctccaaggggtttagtacgggtagccggggtagaacgtctctgcccgtggggccttgaccccgtgcgctaaactgttcaccccctacttgtagaaacatgtttgaggctggttgagacatcgatctcgaataacaagcgaagctatgacactgcaagatggattaggggctaccggcaaatacatgaacgaaggtgatacgatcgaatgaatccagtaattggcctggatatcgcaaaaggagaaagtcagggtcaggctttcttggacaaaggccgtccttacggaaaaagctttactgttcatcatactcaggaaggattggaagccttccattcgttcttaaagctcattgaggaggaaagcaagcagcaaccgatggtgatcttggaatcaacgggacactaccaccttcccgtcactcggttcctagaagatcataactttctgtttgttgtggtgaatccaatcctgtcatatcaggcgaagaagtcctcgagcctgcgtaaggttaagaccgacgcagtggacgcctacgccctctgtgaactgttttacaaagaggactttcagcatcataagattcgaggtattcagttgctaaacctgcgaaacttaacgaggcagcatgatgcggtcacaggtctgtatattcaaataaagctacagtttcaagccgtgttggatcaggtgtttcctgagtacaagggtgtcttcggggatcttcattctgcggtgtcgctcaggaccttgttggagtatccgacttctgatgccgttctgaaagccggtaaagcgaaaatttcggagaagattgcatcgttatgtatgcgccgctctgaaagctgggcaatggataaggccgattccttactggctgccgctgagcgaaatccctttcgtaaggcgccgttccaaagccatctgatcagccttgagatgtacgtcagcatgttgcttcattaccgagagcatctaaccgccctagaaaagcaaatcgatgccctcgctaatgaaatagaggaatataagattatccaatcgatccccggtatcggagaaaagatcgctgcaacgatcatctcggaagtcggtgaaatcgatcggtttaatcacccaaaaaagctggtagcctttgctggcgtggacccgagtgtccatatgtccggtaagtttacagccacgataaaccggattacgaaacgaggttcaagcaggctaaggcacaccttgtttttggctgtactctgcagcttacgtcgctcaggcagcaaaaaactcaaggcatactatgataagaagatatctgaaggcaagccccataaagttgcgatgatcgcctgcgtgaacaaactgcttcattggatttttgccctgcttagacgcaaggaatctttcctcgatatggcctgatgaaccactgcatgaaaaaccttccaatcccacattggagggttgtttggcatgcgcaaatttagtatagcatcatctttttaaactttaattcagaaaatcttgacaagatattagctg

SEQ ID NO: 5368 - DNA, 1445 bp, unidentified
  source 1..1445: mol_type = unassigned DNA; note = element_83da6e6
  misc_feature 1..4: note = core
  misc_feature 5..495: note = LE
  misc_feature 496..1428: note = CDS
  misc_feature 1429..1445: note = RE
  misc_feature 1..239: note = bridgeRNA
ccccgttaccttcttcgtagctcctgatcaaggagttcgtggtcgccaggcccggcatgacttaagtccccctgtcgattccatgatccggggggtggtgtcaccgggtttggtggcatcgagggaccgctgatagggacacggccgcccgttgggtaggtctcgtcgtaacgtggctgccggcttttgatgctcgactggcgaaccacgcgcgacgatacggaagacacttcacgtgaactacagctacagcgtgttcctcgggctcgacgtcggcaaaggtgagtatcacgccgtcggcctggaccccgccggcaagcggctgcacgacgcgccgctgcccaacaccgaacccaaactgcgggcgatgttcgacaaactcgccgctcacgggccgatcctggtcgtcgtcgaccagcccgcgaccaacggcgccctgccagtcgcggtcgcccgcgcctgcggccacgacgtggctacctgccaggattggcgatgcgccgcatcgccgacctctaccctggcaacgccaaaaccgacgcccgcgacgcctacgtcatcgccgacgccgcgcgcaccctgccgcacacgctgcgccacctcaacgtcgatgacgacgcactggccgagctggatgtgctcatcggctacgacgatgatctcgccgccgaggcgacccggatcagcaaccgcatccgcgggctgctcaccggcatccaccccgccctcgaacgcgtcctcggcccgaaagtcagccacccggccgtgctggagatcctgatccgctgcggcgggccgatcgggatccgcaaggccgggcgccgcaaactggcctccatcgcgaccaagaacgccccgcgcatgggcgccacactggtcgagaacatcctcgccgcgctggacgagcagaccgtcaccgtcgccggaaccaccgcagcggacaagatcctcccgcgtctggctgaaagcctcaaaaccgttctgacacaacgaaagaacgtcgccagcgaggtcgaggagatcctcgatgcgcaccctctcgcccaggtcctgacctcgatgcccggcatcggagtcaggacctccgcccgcatcctgctcgagatcggcgacgcctccggcttcaaatcctccggacacctcgccgcctacgccgggatcgcgccggtcactcaccgatctggcagcagcatccgcggcgaacacccggccagaacaggcaaccgcaagctcaaacgcgcgttcttcctcgccgccttcgccgccttgtccgaccccaccagccgggcctactacgaccacaaaagagccgaaggcaagaaacacaacgccgccctcatctgcctcgcccgacgacgctgcgacgtgctattcgccatgctccacaacaagacccactaccagcaccccgaaccccaagcggcttgacaacttccatagggaca

SEQ ID NO: 5369 - DNA, 1754 bp, unidentified
  source 1..1754: mol_type = unassigned DNA; note = element_83dd2b5
  misc_feature 1..2: note = core
  misc_feature 3..104: note = LE
  misc_feature 105..1382: note = CDS
  misc_feature 1383..1754: note = RE
  misc_feature 1411..1571: note = bridgeRNA
agcattcctgttacaaatttttagggcacttgaaatacaaaaagccctcttggtatgatgctggggtgtccaaaatcccttattcataaccaaggaggctccatatggattgtactcagaacgaaaaaattaatcaagtcaccgaaacgactcttgtgatcggaatggatattgcgaaacgaacacattatgcaagtttgattgatgtacgaggacgtgtgttacagaaagcatttccggtcttacaatcaaaagaaggctttgaagccttctatcaaattatcttaaatgccatgaaagaataccagaaaacagatgtcattgtagggattgaacctacggggcattattggttgaatctcgcttatttccttaccgaacgaggcattccattggtcatggtaaatccaatgcatgtgaaacgttcaaaagagttagatgataatttacagacgaaacatgatgcaaaggatgcacttgtcattgctcgtcttgtgaaagatggtcgatttagctatccacgcattttagctggtgtagaagccgagctacgtgtaggtgctaccttacggaatcaattagtagaagaacggagtgcgataaaaaacaagctcattcgctggttagatcgttattttcctgaatttatgcaagtgtttcctagctttgggaaaactgccttggcggcgttatggtgcacaccatttccaggtgatgtgatctcaaagacgacggaggaactcttacacgattatcggcaagtagaaggtgtgaaagcaccacagaaacataaaatcatacagttagctcacgtggcgctggattcaattggtgtaacagaaggattagagatggcccgcatagagattgccacgttagtccgtcgttatcgccagcttgaacacgaaatccaagaacttatgagccaacttaccaatctggcgaaaacgtctgtggagtatgaatggttatccactgttcctggtataggagataccaccattattgaattattatctgaaatcgggagtttttcgtattaccagcatccacgacaattaattaaacttgcggggttaacgctgcgtgaacattcttccggtcaacatagcggacaaaaacgcatctctaaacgaggaaggcggcacttacgtgcacttctcttccgtgttatgatgccgatggttcgttgtaatgaagcatttcgtcagttacatgtttattacacgacaagagctaaaaatccgttacgcaaaaagcaatccatggttgtattgtgtggcaaattactgaagatattatatgcgcttagtaccaaacaggtggcattcgatgcacagcgggtgttgacagatattccaagcctcgaaggggcgatatagcgcctatcttttgtttcattcactagacaataagatgacacggagaagctgacattatttcatccatcagacttcaagtccctaagaaagcttcgttagcctctgccttatgactagaccgaacgaaggaatgtaggcatatgatgcccggagacatgggagggtacgtcatcataagttttgcagagatccacagtgcatcgcatatggttcatttccaccagttttatccagtggaaaccgcgtagcgtacccaagttctgtcagtgtttcacatatatataaattattgttaatctagcgtgtcaaaaaaaatttttttggcaccccaacagcgggtataaccgttgatatataggcatttatagaggg

SEQ ID NO: 5370 - DNA, 1324 bp, unidentified
  source 1..1324: mol_type = unassigned DNA; note = element_83e7f72
  misc_feature 1..2: note = core
  misc_feature 3..73: note = LE
  misc_feature 74..1072: note = CDS
  misc_feature 1073..1324: note = RE
  misc_feature 1101..1311: note = bridgeRNA
ttatggaatgagcgccccttgcacctgcgccgatagttttcggcaaacgtggcaagcagaaggagtgcacataatgcagttacttgcgattgatttaggcaaacagtcgtttcacatccacgggatcaccaatgaaggcgaggtgatctcgaagaaggtgaccagatcaaaactcgaagcggccgttcaggagcattcgccggaaaccgtcgccatggaggcttgcgccagcgctcatcattggggccgacagtttgaggctcaagggtattccgtgcgcctcattcatccgcggttcgtcatgccgtttgtcaaaggctccaagaacgacgctgtcgatgccgaggcgatctatgaggccgcactgcgcccgactatgcgatttgtcccggtgaaaacaacggagcaacaggatttgcagatgctgcacagaacccgcgaccggctcatcacgcaacgcaccggactgatcaatcacattcgtggccttcttggggaatatggcgttgtcattcctgtcggtgccgtccggttccgcaaggatatcaggactgccgtcgctgacgccaagctgtcggcattggaacggcagaacttcaacgcgctaattgctgagttcgaagcctcagacaaacgcgttgccgagatcgatcgaaagctgatcgcaatctgcagaaccgacgatcgttgcaaacgactggtgacccttcccggcgtcgggccggtgatcgcgacagcactgatcgctgccgttgatgacgggcgacacttctcgtcgggtcgggctctcgcggcatggatcggtttggtccccagacaatacacgaccggaggcaaacctcggcttggcggaataggcaaacggggcaatcaatacctgcgtcgccagctcatccacggtgcaaggtcggtcctgatcaggatcgccgggcgaagtgatcggcgtgccaaatgggcgcaagacctccttgctcgcgcgggccataacaaaacgctcgtggcaatcgctaacaagacagcgcgcatcgcctgggcagtgttgcaaagtggagcaggctacaaaacggtgtagcgagcagcccggaaagctccggcttccaagaatgcgaggtgacatgacgatggtgtaacggcaggggccgcctattcaacagcctgtaaggagtggtggccatcaaaggccggtcatcttggaaggcactgaaatctgcggatcccatcgaggccaggagccaaagtgcttcgatcaaaggccggatagattcacgcatccaatgccgtcaacacgatcacaaaaacaccttgcgcagggggcgtccataga

SEQ ID NO: 5371 - DNA, 1178 bp, unidentified
  source 1..1178: mol_type = unassigned DNA; note = element_83ef993
  misc_feature 1..2: note = core
  misc_feature 3..200: note = LE
  misc_feature 201..1163: note = CDS
  misc_feature 1164..1178: note = RE
  misc_feature 6..205: note = bridgeRNA
cttgtatcttatgtgccgaccggcgcggtaaggtttgctggtctggaagatcaccggaccgtgtcgtgcagcctggttagtcgctgggccgctcgagcccgcgagcgagtcgatggcgcacgatccgcgccggtcttcgagaagcccgaacggttacccgcgcgatgagcgcgcatggacaagcaagggagccgaagaccatgaccgagtcatccgtggtggttggcatcgatgtggcgaaggcgcagctcgatgctgcggtggtgggcgcgtcggcggtgccggcgcggtttgcgaacgaggcggatggccacacggcgttgctggcctggatccagccgctggcgccgcagttggtggtgatggaggcgaccggtggctacgagtcgctcatcgtgtgtgccctgcaggctgcgggactggcggtggcggtggtcaacccgcgccaggcgcatgcctttgccaaggcactcggtcacctggccaagaccgatcggatcgatgccgcggcgctggccgagctgggtcgaaccttgttggcgcgcgacgacttggcgcgctatctgcgtccgctggcgagtgcggaacagcgcgttttggtggccctggtgacgcgccgccgacagttggtgacgatgctgcacatggagcggcagcgactcgcgctggcgctgccggaggtgcaggccagcgtgcaagccctgatcaaggcgatccagaagcagctgcgcgacgtcgatcgcgacctgaaccggcacgtcaccgagcactttgccgaactggatcggctgctgcgctcgatgggcggcatcggcccggtggcgagcgcgacgctgctcgccgagttgccggaactcggccacctgggtcgacgccagatcgccgccctggtgggcgtggcaccgatggcgcacgactctggcacgctgcatcgccgccgccgcatcggtggcggccgcttcgagctgcgccgcacgctctacatggcgaccctgaccgcgactcgtcacaacccgatcatccacgcccactaccggcggctagtcgacgccggcaagtacaagaaggtcgcgctcgttgcctgcatgcgcaagctcatcaccatcctcaacgccatggcgcgcaaccacaccgagttcaatgccagctatacccacgcttgacttcaaagacggtta

SEQ ID NO: 5372 - DNA, 1167 bp, unidentified
  source 1..1167: mol_type = unassigned DNA; note = element_83f429a
  misc_feature 1..2: note = core
  misc_feature 3..207: note = LE
  misc_feature 208..1161: note = CDS
  misc_feature 1162..1167: note = RE
  misc_feature 41..213: note = bridgeRNA
cttgtattgatgcgaatcactacagtgcgggtgttccatcaggaacagcccgacccgggtggccgcccgggccgggctgccgaccgacggatcgccggctcctgagcctttagggctgctggtgagcaagatcgcggtcggctcttcatcgggcccggatggttgaaggaaccaagggttcgcattcacaaggaagggtcgacgaagatgagcaagcataccacggtcagtgccggcatcgataccggcaaatgcaaactcgacatagcgctcgatcggtgcccggagcggctgcaggtcgacaacactgacgacgggcacgccgtcttgtggggctggttgcgacagcaccgggtcaaccgggtcggcatcgaggcgagtggtggctacgagcaggcggtcgtatccgcccttcgcaggaaaggctttctggtcatcatgttccaacctgcgcaagtgcgggcctacgccaaatatcggctgcaattggcgaagaacgacaagatcgatgccgccttgatcgctgcgtgcacggctgaggccaagaagatccacccaccaccggacccacgcctggcgccctttgccgagcttcttaccgtgatcgagcagctcaccgaggacattgcgcgcctcaagacgcgccgcgcgacatcgcgtgatgagcaaacccggcgcttctggaatgaggagatcgcccgcctcaagcggctgcagagccaaaagctcaagcagctcgtcgcggccatccgtgagcaccgcgatcttgctgaccggcttgagctgatcgtcagcgttgacggcgtcggtctgcggaccgccgtcgccatcctggtgcgtatgcccgagatcgggcgcatcacccgcgagcaagccgctgccctcgtcggagttgctccctatgacgcggacagtggcagccacgtcggcttgcgccatattgaaggcggccgtgagaggttgcggaaaagcctctacaccgccgccctgccggcagcgttcaaatggaacccggaactcgtcgcgatctataagcgtctcaccaacgccggaaagccacacaagcttgccctcgtcgcctgtgcccgcaagatgatcatcttcgtcaacaccgtcgtggcccgcggtactccatgggtgccccgagaagtcctcacttaatggttg

SEQ ID NO: 5373 - DNA, 1567 bp, unidentified
  source 1..1567: mol_type = unassigned DNA; note = element_83f61f1
  misc_feature 1: note = core
  misc_feature 2..96: note = LE
  misc_feature 97..1227: note = CDS
  misc_feature 1228..1567: note = RE
  misc_feature 1307..1513: note = bridgeRNA
agtcattatggtgtgaccggctcgatgcgctagtcgtgggttaggctgagtttgttaagaactttagtccagagccacaagcggagggaaccggtcatgaatgagaagttacgatttttgggtttggatgtccatgccgaaacgatagctgttgcagtagccgaaccgaatggcgaggtgcgcagcctaggaatgatcgccaaccgcgaagattcgatccgcaagttcatccgcaagcttgattcgcccgagcatctacgagcctgctatgaagccggcccgacgggcttcgtactgtactggcaactgacgcagttgggagtcaagtgcgatgtggtggcgccgtcgctggttccgaagaagcccggggatcgggtaaagaccgaccggcgggatgctctgaagctggcgcgcagtcaccgctccgacgatctgactgcggtgtgggtgccggatgaaggctcggaagcattgcgcgatcttgtccgggcgcgagaggcggccaagcaggatcagctgcgagcaaagcatcggctaaccaagtttctgctgcgtacgggccagcgtcctccgctgggagtgaaggcgtggacggaaaaatacgtcgagtgggtccagcaggtccgctacacgcatcctgcgcaggaggccactttgctcgattgtctgaacgaagttcagcacatggaagaacgagtcaagcggttggagcagtcgattgtggaagtgattcagctggctcccgcgccgatgcaggaagtggttcgcggtttacaggcattgcgcggtattgcgcatatctcggcagtcacgattgttgtcgagctgggcaacatcacctcccgcttcgagagcgcgcgtgaccttatggggtatagcggagcatttccgagcgaagactccaccggcaagcgtattcgaagaggaggcattaccaagtcaggtaacgcgcacctcagacgaatcgtggtcgaatcagcctggagctatcgccaccggccagcgatcggagcccggttgcgcaggcgacaggaagggcttccggcagagatcaccgagattgcatggaaagcgcagaatcgcctgcacaagcgctacatgacgctgatggctcgaggcaaggagcagagaaagaccatgacggcgatcgcacgcgaactgttgggctttatctgggccatcgggatcaaggccgaagcggcctgcaagcaacaaatggcggcatgaagggaaccgaaagaacaaaagcaaagactttccaaataaggaaaaagcaaaaacaaatcaaccaatgaacaacgttatccaaatcgaggacagggtcagccgcagccggagcaagcacgaaggagaatcctcggcttccctatgcgacaggctcagccggactcgcgaagttagtcagaggcagctcccgacggatcatgattatgcggttccgacccgcgaatatcagcttgatcaatcgtcgccattacctgccacggctgctgctgaccttgtcctcgaaaaaacaaatacaaaaaccacaccagcgattcgaagattgacagggtcacaccatatc

SEQ ID NO: 5374 - DNA, 1399 bp, unidentified
  source 1..1399: mol_type = unassigned DNA; note = element_83f7abf
  misc_feature 1..2: note = core
  misc_feature 3..79: note = LE
  misc_feature 80..1117: note = CDS
  misc_feature 1118..1399: note = RE
  misc_feature 1115..1386: note = bridgeRNA
tgttggtgtggacggcctccgacggcatcgactgtgtcagaatgaggttgttacagatctcatacaaaggagaccgttcgtggaacagattagccgaattggcatggatacgtcgaagcattgtttccagctccacggtgtaaacgccgccgagaaggtggttttacgcaagaagctgcgccgcaaggagatggttgccttcttcaaggcgcttgcgcctacggtgatcggcatcgaggcatgcggcgcatcccaccattgggctcggattttacggtcgttcggccatgaggtgaagctgatcgcggctcaactggtcaaaccgtatgtgaaacgcggcaagaacgatatggcggatgccgaggcgctttgcgaggcgatgagccggccaacgatgcgttccgtgccgatgaagaccgccgaacaacaggcggccttgatgctggtaggcctgcgcgatcgtctgatccgcaaccgtacgcagctgtcgaacgccatccgcggctacgccactgagttcggctttgccgccgccaaagggatggcgcacctcgatccgctgctcgatcgcattcgagcggatgagagtgtgcccaacttggctcgcgagctattcttggccctggctgaggaatacgcacagctacaagcgcaaatcggcgaagtcgacgccaagctcatggcatggcacaaggccaatgaatgcagtcgacgcctcgccaaggtccccggtattggtccaatcggtgctactctgctgatgatgaagactccggcgcctgagatgtttcgatcgggacggcagttcgcggcctggatcggcctgacgccgaaagatcattcgacggccggcaaggtccggcttggtgtcatcacaagagccggcgacgaggctttgcgcagcgtgttggtggttggagcaaccgccgtcatccaacatgttcggcgcggggggcgcgggtcaccctggatcgtcgacgttctcaagcgcaaaccaccgaagttggcggccgtggctttggccaacaagatggcccgtgtcgcttggaagctaatggtcacagggaatagctacaccacgaaatccgtgcccgccgccatagcgcgcgccgcatagagatcagccggacacggggagcaattcaactgcaaccgtgctgagccgatgccagaacttgcgaggtgacgagcagatggtgtgatcgatcggtccaagacgccagatactccgttgattccattggcccaaaaggtcgacataatgtttggaactcgcgtcgcggaaaccatcttggccagcgttcatgtgcgagcgcgacgacaggccggacatatggacgcaagcgatctgatcaaaacactgcataaacacccttgctaggaggcggccgtccacata

SEQ ID NO: 5375 - DNA, 1352 bp, unidentified
  source 1..1352: mol_type = unassigned DNA; note = element_83fb31e
  misc_feature 1: note = core
  misc_feature 2..83: note = LE
  misc_feature 84..944: note = CDS
  misc_feature 945..1352: note = RE
  misc_feature 1115..1304: note = bridgeRNA
gaatggaagtgacttcccctgattgctcgcctgattaactcttgtgcaaccatggggtaaacaccgccccggagggattcgctatgaccatcactactgtcggtatcgatcttgctaaaaatgtgttcgctatccacagcgttgaccagaacgggaaaactgttctggttaaacccaaagtattgcgtgccgcacttcctgaattgattgcttctttgccaccctgcgttatcggaatggaggcctgttccggggcacattaccgggcaaggcttttccggcagtatggttatgagccgcgtctgatggcggcaaagttcgtatctccctaccgtatggctggcaaatcagggaaaaatgatgccgctgatactcaggccatctgcgaagcagtccgtcgcccgcctgtgcgatttatgccagtaaaagatgaaagccagcaggcgatgcagtgcctgcaccgcacccgtcagggatttattgaagtgaaaacggcaacgtataatagcctgcgagggttgatatctgaattcggcggcctcgcgccacaaaatactggcgccctgcgacacatggtttctgcaaagaagagtcctttaccgcttcaggttcagcaatgtgttgatgatttgctggaacacgttggttgcattgaggttaacatagctaaatatgaccgaattttgtccagcatggccaaaactgatcgccagccagcggctgatggaactggccccacaacggcctgtgcgctggtcgccagtattagtaatgcacaagatttcaagaatggacgtcaactggctgcctggctggggctaacaccatcgcaacagagcagtggcggaaaatcaaagcctggcaggataacgaaagccggtgattcgtatctgcgaacgcttttgggtcagggtgtccgttcggtcttgactggcgtcgattagaggactgactcattcaaccgttgggtttctactttggttgagcgaagaggatactgccgcgctgttgtcgcgatcgcggccaaaaacgcgaggctttgccgggcatcattgcattacagcgatgatttcaggctgtactcaaccagctaaagcacgaagcagaataaccatctgaactgcactcgttgatgataaaaggttagacaccgtgaggcctgtctggctattgtacaggatatacgtatccgcttaacgaacaagaacctcacgcgcgtctttcatcaggggccgaatcgatgacgattcatcattgccgtttatagtaccgcagtctctccctttatttttaactgaagagcagacagaaaccgtaaacactggcgttgacatgccgtggaagcccttata

SEQ ID NO: 5376 - DNA, 1610 bp, unidentified
  source 1..1610: mol_type = unassigned DNA; note = element_83fe252
  misc_feature 1..2: note = core
  misc_feature 3..277: note = LE
  misc_feature 278..1486: note = CDS
  misc_feature 1487..1610: note = RE
  misc_feature 14..297: note = bridgeRNA
ctgttacaatataattgacgggtaaaaccttgcacaccagtaagggtttacacgtacttgttacttaagctatactgaaagcagtaattggactgacggatccctccttgggacaaagcgcccgtcatatagactgtcatccatgctttcattatagcgttcggtttatgcaggttgagccacagtatgtgcgttcgtgtcaccaaacagattgaataggtaatgagtaaagtgtggtttgcccgattacaatttcaattcaggagatgcatttgttatgaacgcagtaggtattgatgtttccaaaggcaaaagtacggttgctgtactacgtccctttggtgaggttgtggcttcgccttttgatgttgctcacaccggaagtgatttaacggcattagtcgacttcttaaagaagctccgtggtgagacaaaggttgttatggaggcaacaggaaactattttgaacccattgcccgttacctccacgaacaaaatatatttgtttccgtagtcaatcctgtgcttatcagtgacttcggtggaaacacattaagaaagcctaaaacggataagaaggactctttaaagatcgcctcttatgcgttaagctattgggtcgacctgaaggaatatgttcctcagaaagacttaagaaagtccttgaaactgctcaacaggcaatatcagcatgcttctaagttaaagacaatgatgaacaataatctcatatctttacttgacctgacttaccccggaatcaataagctgttcacatctccacccagagattcagacggtcatgaaaagtgggtcgactttgtattatcgtttcctcactgtgatatgatctcaaagctcaccatcaaggcattttcaaggaagtacaagaagtggtgcaacaacaattcctatcacttcacagaaacagcctgcaagaaaatatatgatttttcaaaagattgcatcagcggagttccttcagaagaatcaactgtatttgctgttatacaagctgctacaatgcttaattcagccactgagtactgccatgctatccagcttgaaatgaaccgtgcagcagctcagcttcccgaatacgatactgtaatgtccatgtacggcgttggtaaagcagttggacctcagctgatcgccgagattggtgatccaagacgcttccacagcagaaaggcaattactgcttactttggctacgacagtgaggatgatgattccggtcaaaagatttcaaaaacaaatcctatgaccaaaaaaggctcaggtgctctgcgaagaactattttcatcattatgcaagtactgttgcaaaccaagccggtcgataatcccgtgtacgattttctgattaagaagcaatcagaaggcaagcattactattcatacatgaatgccgctgcaaacaagtttcttcgtatttactatgcgagagtaaaagaagtcttaattgctgcagaaccctagacttaatagccattcatgaatacatttttcagactgcttcggcggtctttttgtcgtactcattttttgccttgaaaaatattatcatttttttcgatttagggcttgacttttatttgcaggt

SEQ ID NO: 5377 - DNA, 1593 bp, unidentified
  source 1..1593: mol_type = unassigned DNA; note = element_83fe43b
  misc_feature 1..2: note = core
  misc_feature 3..294: note = LE
  misc_feature 295..1545: note = CDS
  misc_feature 1546..1593: note = RE
  misc_feature 88..271: note = bridgeRNA
ctaataggttataataaatatatagtagttatatattagactgggatgtcttaatcccagatcgaccttctttaaaattttgatataatataatcattactaatcgcctatggaataggaccttcacctcctcgttcttttgtgaggaccaacgaaagactgtccatttcataggcaacttagaaatatctaccaccaatagagtgccgtcctgaaataaggaccttttctattaggccgtcggtgatatttcacaataagaccagtaaaatttaataacaggaggtattcactatgtattatgttggtatcgattgggctgatgaaaatcatcaggttttcatcaccgacgattcagcacagcgtttagacgctttctcaattgaaaattctcgttctggtgttgaggaattgtttgaaagaatcagatattttgtcaaagaccaaaaacaagcactgtttgcgttagaaacttctaaaggtctcctgatcgattctatcttagatgctggttacaccgtttatcctattaaccctaaatctgttgaccgttaccgagatagatacaaagtttcaggccacaaaagcgacgatttcgatgctatggtgcttgctaatatccttcgtactgatagacataattacagacccattctacctgatagccccataacccgtgaacttaaaattcttactcgagagtgctgctcactgattagacttaaaactctgctatctaaccagctaacttcgtgtctaaaggattattatccagtagcacttgaacttttctgcaaacttgatcagccaatcactctcctcttcctgaagaatttccctacttatcaacaagcaaaacaagtatcactaccacaatggtgtaagtttctctctaaacatcattaccgcgttggggttaagaaaaaagccaatgaaatttacctcaagctccaagaaccgcaatttaatgttgaaccttttgttgataatgctaaggcacgctataccttggcacttgtagaacagttacaattgttactagcgcaaattaagtctttcgaaaataaaatcgaacaactgctcaaacaacatactgatagtgagattttcctttctctaccaggtgcaggtataacattagcagcaagaatggtctcagaatttggcgataacagagaacgctacaaaaaagtttcatctgttcaggcagaagctggaactacacctattaccgaatcaagtggtaactggaagtttgtacatttcaggtcagcttgtcgtaaatcgttccgtaacactatgcaccaattcgcattctgtagcatcaaagaatcatcatgggctaaacaacgctatcagcaatatgttgcttctggtaaaaaacatactcaatctatcagatgtctggctaatgcctggctagaaataatttttcctatgtggaaaaattatatgccctacagcgagcagcgccacctgttgaaatatgtcaaagaacaaaaacctgtgaattattctcgaaatctcaattatttatcagtatgaaaaaggccaataataaaatttttttatttatttatttacatagagtgt

SEQ ID NO: 5378 - DNA, 1146 bp, unidentified
  source 1..1146: mol_type = unassigned DNA; note = element_8401394
  misc_feature 1..2: note = core
  misc_feature 3..207: note = LE
  misc_feature 208..1131: note = CDS
  misc_feature 1132..1146: note = RE
  misc_feature 22..201: note = bridgeRNA
cttatttgtcccgattgcgcgaaagtaggtgccgagagccggcgtggctgaccgttgcgctcctggatcgatcgatcgcgttgtagctaggtcgccacgccggatcttcctgccatacgcccgaacagttgcccgagtaggcgctcggaaataaggctgggcctggcgggaagggctctcgacatccctaggctagcggagatcgagatgaacggcatcggcgcgggcgtggacgtgagcaaggcctacctggacgtggccgtgttccagcagaacgaagtcaggcgattcgataacggtgccgccggctggcgggccctggtgacctggctgaagccgtacgggcctggccaggtcgttctggaggccaccgggggctacgaacagcgcgcgttgggtgccctgcacgaagccggcttgcccatgcgtcggatcaatccgcggcaagtccgctcgttcgcccgggcgacggggcagctggccaaaacagaccggatcgatgccagaatcctcgcccacgtggccagtgtgatcgatctggtgccgttccagccgctcgatgcagacgccgccaaactgcggcaatacaaggcgcggcgcgatcacctggtgcagaacattgccacggaaaagcagcgtcggcggcagttggacgaccccatccttcgcgccgatctcgacgcgcacatcgcttacatggagcaggccctgcaccgtatcgagcaggtgatcgccgacctcatcaaggacaccccgcaggcccggatcgcccgcaccatcaagggcgtgggcccggcgatggtcgcgacgatgatctgcgacctgcccgagctgggccacctcagccgcaaggcgatcgccaagctcgtgggcgtggccccactcaaccgcgacagcggcttcttcgtcggccaacgaagcacctggggaggtcgcgcgggtccacgatcggcgctatacatgtcggcgttgacggccgcccaccacgaccctcagctgaaggccttttatgcagcgctcatcggccgcgggaaacccaagaaactggcactggtcgccgtcatgcggaagctgatcgtcatcctcaacgcgcggatgcgagaggcgatagccgcggcgcctaccccatgagggtggacacagttg

SEQ ID NO: 5379 - DNA, 1624 bp, unidentified
  source 1..1624: mol_type = unassigned DNA; note = element_8408271
  misc_feature 1..2: note = core
  misc_feature 3..434: note = LE
  misc_feature 435..1340: note = CDS
  misc_feature 1341..1624: note = RE
  misc_feature 13..289: note = bridgeRNA
ctcctacaatatagtttaggtgataggcgcggcagccagccgcgtctttttccatctcaaagccgaagctgttagaatgggagagtaaatggcctgacaataaaaaccttgggtcaacacgcccgaaatggagtccgtcagccgcctctttcattcgcagcattcgatttgcgcaggtagagccaccttgtgcgctcgtgtcacccaggagattgaacaggcaatgagtaaagagcggaaagccatatccagtcagaaggaggaacaaaatgaacgcggtagggatcgatgtttccaaaggaaaaaagcatggtggctgccctgcggccaatgggtgaagtggcgttgctgccacaggaatttctccataccgaagtcggtttggaacagatggcatacgccatccttgcgttggggaaaatacccgtgttatcatggaggccactggacgctaccatgagccggttgccgcggcactgcatgcgtacggcatctatgtctgcgtcctgaatccgctgttcatcaagcagagcggaggcgggtccatccgcaaggtcaaaaccgacaaagcagatgcaatgaagatcgccaaatacggccttgacaactgggtggatctgcgggaatatactcccatggacactgtaagacaacaactaaagctgtgcagccgccagtacaacctctacatgaaaacggtggtatcgctgcaaaacaacctcatttcgctgaccgacaagacattccccggcgtgaacgaactgttctccagtccggagcgtgctgacggtcaccagaaatgggtggactttgtcataaccttctggcactgtgactgcatctgctacgtcagcgcgaaggcgtttaccgagcgttaccagaagtggtgcaagcgcaagggttatcatttcagcgcagaaaaggcgctggatatccatgccgggagttgtgaccatttcaccacactgccgaagaacgacaacacaaaactgctcatttcgactgctgcccagcaactgctcgcaggcaaggtgacactggccgctctgcgcgccgaaatgacgcgcctttcaaagcagctgccagagtacgataccgtgcgtgccatgtacggcgtgggtgagacgactgccgcacagcttgtggctgaaatcggtgatgtgcgtcgtttccctcgccgcagctccatcattggatttgcgggtgttgatcccggtatagatgagtccggcaagcacagcgccaagagcgtacctacaaccaaacgcggttcgccgcatctgaggaaaacgctataccaaatcgttctgcacttacttgagaaaagccccggcagatgagccggtgtaccagttcctcgataagaaacgtagcgagggcaaggcgtacttcgtctacatgactgccgcgcagaacaagttcctgcgcatctactacgcccgcgtaaaagaatgccttgaggcattcgacacacagcagagttccacacagagttaagcgaactgccattcttcatctcggctggcgatgcaatcttctccagcctgttttgttatactctttttggtctcgcaaatttttgcggtacttttttcatttcagctattgacttttgtttgcagga

SEQ ID NO: 5380 - DNA, 1379 bp, unidentified
  source 1..1379: mol_type = unassigned DNA; note = element_840ccdf
  misc_feature 1..3: note = core
  misc_feature 4..85: note = LE
  misc_feature 86..1114: note = CDS
  misc_feature 1115..1379: note = RE
  misc_feature 1088..1366: note = bridgeRNA
tgatggagtggatgccccctcccgacggcatcgcgatgtgccaatttggcgattgccagaatcgaccaagacagagagggcatccatggaacaagttaccatcattggaatcgatctcgcaaagcgcgtcttccaggttcacggcgcggcgagtgacgggaaggttgtctttcgcaagaagctgtcgcgggcacagttgctgccgtttctcgccgggcagccccggtgcacggtggcgatggaggcgtgcgccacggcccacgaatgggggcgtgcgatcagcgcgctcgggcatgccatccggctcctgccgccggtctatgtgaagccctttgtaaagcggcagaagaacgacgtggctgacgcggaggcgatcgcggaagcggcctgcaggccgacaatgcgcttcgtggctgtcaaaactgaggagcaacaagcgcggtcgatgatcttccgcacgcgcgacctcttggtgcgccagcgcacgcagctgataaacgccctgcgcggccacctcgccgagcacggggtcgttgccccacagggcccggcccacgtgaagcgccttgcggatgcaatcgaagacgaggaaagcctcatccagccgatcgtccgcgacgttggtcgtctctacctccagcagatcgccatctacagcgagaagatcgccgagctcgagaagacccttcatcgcgaggccgcgcggagcgagacgacggcgcgcttgcaaaccatgccggggatcggacccatcaccgccatagcgatcgagacgtatgcgccgccgctcgagacctttcgacgtggccgcgacttcgccgcctggcttgggctcgtgcctctccagaaatccacgggcggaaaacagaagctgggtcgaacctcgaagatggggcagcgtgacattcggcgcctattaatcgtcggggcgatggcggttgtccgatgggcggctcggaagggccagcctgaaggatcgtggctggcgcgcatgctggcgcgcaaaccgcctatgctggttgcaatcgcactggccaacaagatggcgcggtcggcatgggccatgctgacgaagagggagaactaccgggatccggcggcggcatcagcttgatcgacgatcgagccgccggtccgtcggggatgtgaggagagcaacgaacagtaagggcaaatgatcgacaagatcgggaccaggaaaagcattcaagtgtacggagccacgagctcgcaaatctgatccgcacctgatccgcgcatctccataccggccccgcggcatgtgaagcgccgcaacagcgaggcctgacacatgaccgcaccgatcacatgccctcgacgtttgaaaatccccttgcatcaacgggggcatccacaca

SEQ ID NO: 5381 - DNA, 1306 bp, unidentified
  source 1..1306: mol_type = unassigned DNA; note = element_84120da
  misc_feature 1..2: note = core
  misc_feature 3..191: note = LE
  misc_feature 192..1151: note = CDS
  misc_feature 1152..1306: note = RE
  misc_feature 28..201: note = bridgeRNA
cttgtgtccggaaaatctgtcagaatgtgcgaacgggcggttgcgcaccaaccgcccgttgctggaactgagcccgttgcgcccaaaggccacagagcctgcaagtgagcgagggacagctccggtgtcttcctcaacccgaacagttgcaagggtttcgagcccgaaccgagcaaggaagggagtggatgatggcacaagttgatctcattgtcgtcggcatcgacgtcgccaaagacaaggtggatgcgtgcattcgcgcgttcaaattacggcagagctggccgagcacagcccagggccagcgcaagctggtgacctggcttcgcaagcaccaggtgaataaggcggtgatggaagcaagcggcggttatgagcgcgcctgggcccaggtgttgcgtaaggcggacatcgaggttcggatcgttgatcccaagcgggtccgcaacttcgcgttatcggctgggcgcctggccaagaacgatgcgatcgatgccgagatgatcgcctggttcgccgagaccttcagcgatgcgccgagccagaaacacgatgcagcacatgaggagctgcaggcgttggtgaaggcgcgtctggatctgatcgatgccaggatgcgcttagcaaatcaaagcgagcatgccgcatcgggattggttcagacggcgcatgcccgcatcttgaagagcttggccagcgagcttgccaagctcgaggccgctatctccgccaaaatcaagtccatgccggattttgccgagcgcgccgagatcgtcgagagtgtgccggggttggccgcaacgagcgcggcaaaccttgttgcagggatgccggaacttggccaggtgagcgaccagattgccgcggccttgatcggtgccgctccctatgacgacgacagcggaaagcggcgtggcgagcgccacatcaagggtggccgccgctgggtccgtaatgcgatttacatgccctgtgttggtgcagccacgcagaacaatcccgttctgaaggcctactatctgcgcctgattgccaagggaaaggagccaaaggtcgccatcatcgcctgcatgcgcaagctgatcgtcatcctcaacacgatgatcgcacgacgacagaaatgggatcccagccgttacgcgctgagctgagcgagtgcgcctaccgcgctcggtcctcgaccgagcgcatgccaagccaacagaccggtgagcgggcggggtcaaggccgtcagccgccgcaggcgggggcgccccagcgccagccttgaggccgcccgatcgccgggcgacttcgccacagttg

SEQ ID NO: 5382 - DNA, 1522 bp, unidentified
  source 1..1522: mol_type = unassigned DNA; note = element_8421bd0
  misc_feature 1..2: note = core
  misc_feature 3..246: note = LE
  misc_feature 247..1413: note = CDS
  misc_feature 1414..1522: note = RE
  misc_feature 15..226: note = bridgeRNA
cttgtatactcagaactgtaataatagtttgagtatagcttcctttctatctattgttataatttaattaagcactgtggatttgtgtcatatgtgtatagctttgactattataggagactcttaccacagttcttattttttaatgtcaatcagtaagttagcgcgagacgcttcatcacaagactacatgaataagaaatctgtgacttacccagtgctaaaactcaatttggaggtgtttttatgtacttgattggaattgatatctctaagtacaaacacgactgcttcatagctacagaagcgggtatccctatcaaagcattcagctttgacaacaatcggttaggtttcgacttatttcttgagaaattaaaatcattagatttgtcacaagaaataagaataggtcttgagtcaacaggacactatggatcaaaccttaaacagttcatcgcgtcaaatagctacacgtatctggaatttaacccttacttaacgcacatgttttcgaaggcattatcgttacgtaagacaaagaccgataaagttgacgcaaaaacgatttcaagtatgctaggttctattgactacaagaccttacatacaagattttaccacattaatgaattaaaacaacttgttagatttagacatgttcagatgatgaacaggtccaaagtgctcattgagatgaccaacatcttagatcgaatatttcccgaattcaaaccatttttcaacgaaagactcgctggtacagccattttcatacttaagaagttcaaatctagaagccgcatcagcaaacttcaacccaaagattatgaatctattcggacttattcgaaaggaagagtttcttatgtcagaattaaaaaacttaagaatcttgcccaatcatctgttggttatgaaaccaaatctgatctcttactgcttaaacactcgattaaacattatgaagacttatctttaacgcttgaggttcttgagagtgaaattttatcgctcatggaagatattcctcaaacacttacaaccatacctggtgttacaatgatctcagcagccattatcatcgctgaattaggtgattttaaaaactttacaaatcctgctcaaatcatttcattcgcaggactggatacatctgtgaatcaatctggaatgatggaaactagaggtcacctcgtcaagcgtggttctggattactcagaatgacgatttggcaaatcacattttctagtttacgacttaatcctacgctttatgattattatcaaaagaaacgagctgaaggtaaacatcataaagtcgccatggtgcactgtgctagaaaaatgattcgtacaatctacttcttaggtgtcaatcaattgacatttgatcattcacaattcaaataatcaaatgagggtgtagctacctcttattggttcataaacatcaatcagacttccatgtgaggtcttttactatttaatctcattaatcgcttgacttattatagtaagt

SEQ ID NO: 5383 - DNA, 1692 bp, unidentified
  source 1..1692: mol_type = unassigned DNA; note = element_8423a0d
  misc_feature 1..2: note = core
  misc_feature 3..304: note = LE
  misc_feature 305..1579: note = CDS
  misc_feature 1580..1692: note = RE
  misc_feature 41..298: note = bridgeRNA
ctcgtataatatttgtataagatcttaatgattttatacattttttaatatcttttcttttcatatcatatttataaagaagtcctagtgctataatgaagatagatatagctgaaggaaagtactttcactccttgcggtcacaccgcttatgaagcttgtaaacctgcttatcatatgtaattctttacccggttgttgtttgaatggccactactcattgaatccacgtgtccaggaaattcttatgtgcgaggctggaactgtatgataaggctaggacttctcttatatctaaaactaattgattggtggtgattttttgaatattcaacttaactctatttacgttggtattgatgtttctaaactatcaaaccaagtctttattactgactttaatcagtctttatcaaaatccttcagtgctcctaataataatcatggcgctgaattaattgagactaacttaattaattttctttccgatacattgttcactcatgtaattgtagttctagaatcaactggaatttattcagctcatattgcgacttacttatccgcttcagacaaactacttccttatcacattgaagtatactgtattaaccctaagatttctaaaaactatcgttctagttttgctgatatggataaaactgatcctaaagatgcttttatcctagctgatcttgcgagagttggtagaaccaaatctatgaatccttttaagggttctcaaaaacttgctcttcagcgtcttactcgacatcgtgttcatttggttaatctacttacgaaggaaaaaaattatgttctaactaatatcttcttaaagttctctgaatttggaaataaggattttaaatttacttccgatacttttagtaaaaccgctatttctatccttgaagaatactcttcacctgaagatatcattaatactccctttgatgatttagttgcctttatctctaaaactagtcataatcgttttaataatatcattgatgttgctgaattaattaaaaaagctgctcgtgcttcttatcgtcttgataaagctgcttatgagcctatcaatttcgcgatttcttctagtttagttcttgttcgttgttttgaagatgaaatcaaaaagattgataaatcaattgaacttctagtcaaaggtttctctcatcatgaatatctttctcttcgctcaatcccaggcattggtcctgttttcgcttcagggatcatttctgaaataggctctatacatcaatttgattcagaagaatctcttgcgaaatatgctggtattacctggcgtaagaatcaatcaggtaaattcgaagctgatgatactaaaatgactaaaactggaaatcattatcttcggtattatcttattcaagctggtaactctgttaaaaacaatatcccactttataatgattattatcataaaaagtttaatgaagttactactcatcaacacaaacgtgcactcgcactaacttctcgtaaacttattagattgatctatggattaatgagtaaaggtcaactttataataagaattactaaccgttgcctataattcataattcacctaactaagttaggtttcttatttatgcctagttcttaaaaaactagtcttttttattatttttatctcttgacatctttaccggttg

SEQ ID NO: 5384 - DNA, 1130 bp, unidentified
  source 1..1130: mol_type = unassigned DNA; note = element_8434b11
  misc_feature 1..2: note = core
  misc_feature 3..182: note = LE
  misc_feature 183..1115: note = CDS
  misc_feature 1116..1130: note = RE
  misc_feature 15..192: note = bridgeRNA
cttgtaactcgccaaagaccggtcggcgatctaggcttggccgttcggctgcagatgggagaccgtctcattctagggccgcaaagcccgtccctcagctcggctccccatctgcaagtccgttgaacccgaacagtcgcgtgggccgcctggcgagcccggttgcgcaaggaggggtgccgatggaattgtcattcgtgggaatcgatgtctccaaggaccgcctggacgttcacgtacgtccgagcggagaaatgttcgctgtcacgcgagacggcaaagggctcgagagcctcgtcgaacggctgttagagctgaaacccactttggtcgcggtggaggcgaccggaggtttcgaaaccattgtggctgcggccgttgccggcgcttcaatcccgctggcggtggtcaatcctgcccaaatccgcaacttcgcccaggcggccggcaaacgggcgaagaccgatccgatcgacgctgccgtgattgctcacttcgcggatgcgctccggccggagccgcgcgagctgcctgaccaggaagcgcgcctgctggccgaaatggtcagtcgccgccggcagatcatcgagatgaagaccgcggaaggccagcgtgagaaacgggcaagcaatgtccggatccgcaaaggtctgcagcgtcacatcgccatgctgcagaaggagctcgatgccatcgaccgagacatcgagaccatggttcgtggctcgccggtctggcgcgccaaggaggatcttctcgcctcggtgcctgggataggaaacatcgtcgccagaactctgctcgccgagctgcctgaacttggccggttgagccgtcgggaaatcgccagcctcgccggccttgcgccttacacccggcaatcaggccgctggcgaggcaagagcatgatcggcggcggccgagccagcgttcgcacagtcctccacatggccgccttggtggcgagccgctgcaacctcgccctcaagactttctaccagcgcctcctcagcgccggaaagccgaagatggttgctctggtggcagtcgcccggaagcttctcatcaccctcaacgccatcatcagagacaatagaccatggcaaaacgcttgacttcgaacacagtcg

SEQ ID NO: 5385 - DNA, 1434 bp, unidentified
  source 1..1434: mol_type = unassigned DNA; note = element_8436857
  misc_feature 1..2: note = core
  misc_feature 3..227: note = LE
  misc_feature 228..1418: note = CDS
  misc_feature 1419..1434: note = RE
ctgacataggtcgtagtggagagcgatgatgggcgtcgacctccacggggagaccggcacgccgctatccggcctggatgaccgttgcgcctagtgtccggcccccgaccttcggccgcgaacggtgattgggatccggcggctctgaccggtgatcggatacatcagctgacgtcgaccggagtgagcgggcacccctggtggtccgcggaaggaggccgcccaaggtggcgacgatcggcgtcgacatcggaggaaggacacatgctgtcgcgcgctgccgtgagggcaactcgaaggctgaccgggaaatcgtccgggtcagccagagccgggccggcttcgacgcgctcgatgcctggctcgagcggcagagcgagccggtgacactggtgacgatggagtcatcgggccactactggatgccgctcgcgagccacctccgccggcgcgaactgcccatcgcggtggtcaatccgctggcggcgaagtactttgccaagagccggctgagccgcaccaagtctgacccggccgatgcacggagcctcgccgagatggccatgcgcgacatgccgcctgcccgcgatccgctggccggggtcgagctgcgccaggcggcgcgcttcgcgatgaccctggtgaccgagcaggcccaggtctgccagcgcctcgtgcggctggtcgagctgggcttcccggagctcggcgagctgttcgacgatccgacctgccggacggcgcgcgaggtgctgcgcatcgccccgaccgcccgcgccgcgatccggcggcggacgtcgaccctcgccaacgccaacgccggaccgggccaccgccggctgggccaggccaaggcggtgcggctccagaccgcggcggcggactcgatcgcggtgcccgagctcgacgccgaggtgaccttcgaggtcggcctgctgctcgaccagtacgacctgctcgagcgccagatcgagaccgccgaccggcacgttgccgagcttctcgacggcgagctggcgcgtcggctgcagacgatcccgggcgtcgggccgtcgatcgccgccacgctgctggccgagatcgggcacatcgagcgcttcagcgacttcgaccagctgctcgcctatgccggcgtccatccggccgagcggagctcggggcgcaagggcgccagccccgagaccgcctggcacatgagcaaggcgggcaatgcccatctccgggcggcggcctatcggctggccgtcatcggcgtccagcacaacccggtcatcgccgcccactacgccaggaagcgggcggctggcaaatcaaagatgaacgccctcggtcactgcatgcgcaaggcgctcagcctggtctggggcgtctggcgcaacggccaggacttcgatcccaagtgggggctcgagtcttgacacgccgttatgggat

SEQ ID NO: 5386 - DNA, 1583 bp, unidentified
  source 1..1583: mol_type = unassigned DNA; note = element_843e796
  misc_feature 1..2: note = core
  misc_feature 3..550: note = LE
  misc_feature 551..1453: note = CDS
  misc_feature 1454..1583: note = RE
  misc_feature 15..258: note = bridgeRNA
tcattttacttccttgtatgataattaggaagttaatcatcacacgtttcctttcttttaatatcgtggttcaatacaattcagatactatggacttttgatttttttctgtagcttgactactcgactggagtgtattgccactacctttatctgaattgtttatcagctggatgttgccggagtgtttttcactcagagtacttatttctatcaagtctacgatgataatcgatggtggacatcatggtatcagactttatgaaagggaggtacaacctcatgaaaattttttgtaggcattgatattgccaaactcaaccatttcgccgctgcgatttcttcggacggtgaaatactcattgagccgttcaaattcacaaacgacgctgatggcttccaactgctggtctctaagctcgaatcattcgataagaacagcatcatcatcggtcttgagtcgacggcacactacggtgacaaccttgttcgataccttgttgctgagttctaccaagtgtgtgtgttgaaccccatcaaaacctgtcagatgcgtaagaacaatgttcgtaaaacaaagacagataaggtcgacacatttgttattgctaaaactcttatgatgcaggatgacctcagattcattaccttttttgatctcgatatgatggatcttaaggccttggggcgctttcggcagaaaaccattaagcaacgcacccgattgaaaatccaactgacaacctatgttgatcaggtattcccggagattcaatactttttcaaatccggtctgcatcagaatgctgtctatgctcttttaaaagaagcaccctctccaaaagagattgcttccatgcatatgactcatctggcaaatctgctcaaagtgaactcgcacggacactttactaaagagcaagccaaagaattaagagttctcgcacagaagtctgtcggtgccaacgacagcgctatatctattcagataactcaaaccattcaacaaatcgagttactggatagccaattagaaaagattgaagctgagatgacggatatcatgaaattcaacgattctgtcatcatgaccattcctggtatcggttatatcaatggtggaatgattcttggtgaaataggtgatattcaccgtttctccaatccaaacaagctgcttgcttttgcaggtctggatccttctgtttatcagtctggtaactttcaggctaagacaacaaggatgtccaaacgtggctctcgtgttttacgatatgcccttgtaaatgcagcttggaacgttgtcagaaacaacgcaaccttcaaggcttattatgatgccaagaggtctgaaggccggtctcactacaatgcacttgggcactgtgccggcaagcttgtcagagtcatctggaagatgctcactgacgaagtagaattcaacctcgaataagaggtctgtataccaatatcgatagattttgaaaaagcaccctaagggagctctattaaagttacccttttttaccaccgatatgaaaaagaaattttttgctaatttatggttgacttttcatagctgg

SEQ ID NO: 5387 - DNA, 1226 bp, unidentified
  source 1..1226: mol_type = unassigned DNA; note = element_8443127
  misc_feature 1..3: note = core
  misc_feature 4..185: note = LE
  misc_feature 186..1202: note = CDS
  misc_feature 1203..1226: note = RE
  misc_feature 32..190: note = bridgeRNA
catataaaggaactgcccttccgagctattgaagggtaagctggagtgaggagaagagacaaggtcgtcaaaagccgttgagcttctcgcaatgccaaggtctcttctcactccagcgattcccgagcttctttgaacaggtatcgttaacgcctttaacgaatatccaagggtaaatgaaactcatgaaaaatgcatcatccatcaacgtgtttcgagactgcctcagtgtcggtgttgatgtatccaaggctgaactggccatcgttgggctcacgccggatgaacactatctcaaacgcattggcaaccagatgaagacgattaaagcgtttctgcgccagctgcaacacagcggctaccgcggcaagatcatttgtgaatccacgggtcactatcatctcaagctggcgttggtttgccatgagctcggcttggagctgattgtgctcaacccgttgcaatcgagcaaacacagcaaggcccggatccgcaaaaccaagaccgatccgcaggatgcgctgaccctggcaacgatggcgctcaccgagccaaagctgccgcagccgacgcaactgacgcgcgccaaggcgttgattcgcttgaagatggggcagttggcctcggtggagaaacagctgcagcagtttaaccagagccgcgcacaatatgaagaaacctatgccgagctggggctgccgttaagcccgcaacagttggccttgcgcgagcatagcacgagcctgaaacggctgcgcaagcagctggagaaagagcttgagggcttattggcgcaggcactggctgacgatgaccgtctcgctgaactgcgccaaattccgggctattccaacgtggtcgccgggctcgtcgctagcctggatcgtcaggtcaaaagagctgattcgtggaccgcatttgtcggccttgatgtgagtgtgcgccagagtggtaaatggacaggacacggcaaactcaccaaacgcggcaacgcctatatgcgtaaacgcctgtttcaggcggcctggggtgcctgtctgaattacgactatgttcgggcttactacgaccagctaaaagcacaaggtcgcaagcatgtcgaagcggtgtgtatgattgctaggaagctgttgcgcatcgcctaccatgtagtaacgaacaagatacaatttgatccaaatattgcatttgctgaacactaagtcttgacaattcgctttaacagg

SEQ ID NO: 5388 - DNA, 1382 bp, unidentified
  source 1..1382: mol_type = unassigned DNA; note = element_844a76e
  misc_feature 1..2: note = core
  misc_feature 3..87: note = LE
  misc_feature 88..1113: note = CDS
  misc_feature 1114..1382: note = RE
  misc_feature 1125..1368: note = bridgeRNA
tgatggtgtggacggctccaccccgacggcatcgcattgtgccatgttggtgctgggtgacagccaacaaaggaaggagccgaccacatggagattacaacactcgggatcgatctcgccaagtctgtctttcagctgcatggcgttgacagggatggcgccattgtcctgcagaagaaggtgcgccgcggggcgcttctcgacattctctcgaggctcgagccctgcctgatcggcatggaagcctgcccgagctctcacttctgggcgcgggagatcgcggctctcggccatgacgtgcggctgatcccgcccgcatatgtgaagccctacgtgaagcgtcagaagaatgatgcggccgatgccgaggtgatttgcgaggccgtgacacgaccgaacatgcgcttcgtgccggtgaagaccgaagatcaacaggcggtcctcgtcctgcaccggtcgcgcgacctgctgatgcggcagcgcacgatgatcctcaacgccatccgagcacatctggcggagttcgggatgatcaccgcgcagggaccacggaaggttgtcgagctcgcccgacgcctcagcgacccggacgacgggctggacctgccagccgttgctcggtcggcgcttctgtcgctggccgcgcagctcgagagcctggcggacgagatcggcaagatcgaacgccatctcatggcgtggcaccggcagaaccaggcaagccagcggcttgagacgatcccgggtgtaggcatcatcaccgccacggccctcgcggccagtgtgccggatccgtccgtcttcaaatcgggccgtcagttcgcggcctggcttgggctcgtgccgcgacagaactcctccggcgggaaggatcggctcggtcatgtctcgaagatggggaacgggtatctgcgccgattgctggtcgtcggcgcgacctcggtaacccggcgcgcgccaaccaccgacagccggaccggggcctgggtcagatccctgcttgagcgcaagccaacgcggctcgtgaccgtggcgattgccaacaagaccgcgcgcaccgcctgggcgctgcttgcgaagggagagagctacagggccgcaccggccatctgaacgaaggaggacatggcggcgctccgaaggcaccgcgacgaaatgcaagggcagacgtgagtgatgatgatcgaacgggaccgctgccgggataccccgaggtgctggaagggcgttacagctcgatagtctgattgggaccaggcatgcggacttcatcagggccagcggtcagaagcaccgcgcgcacaggctggacacatgaccgcaccccgcgacgatcattcccagctcaaatcaacccttgcgcaaacggagccgtccacaca

SEQ ID NO: 5389 - DNA, 1422 bp, unidentified
  source 1..1422: mol_type = unassigned DNA; note = element_8450974
  misc_feature 1: note = core
  misc_feature 2..227: note = LE
  misc_feature 228..1409: note = CDS
  misc_feature 1410..1422: note = RE
  misc_feature 14..233: note = bridgeRNA
ctacttgtttcattgacgcaggatcggtgcccgcgcaggctcggtccaggtgtcggggttggtcgctctcaattgcggctgtccttccttcgggtcgtgactctcacatggcatgcgccgccccggcaccgcagggccggagaggctgaagaagggactgtgctgccggaagtagcggtgccctccgtgctcgaccaatcactggttcgacgacaggagcaggcaccgtggacggagcaacgacagcgggcgtggtgatcgggatggacccgcacaaacgcagcgtgacgatcgaggtgatgaccgccgatgagagcatcgtgcaccgcggccgctacgccaccgacgaggccgggttcaccgcgctgctcgagcacgccgagcaatggccacagcgggtgtgggcggtcgaggggtgcaacggcatcggccggcacgtcgcgacccgcctggtcgctgccggcgagcaggtggtggacgtgccgccgaagttgtcggcgcgggtgcggaccttcgccacggggcagggccgcaagaccgacgccaccgacgcgcactcggtggcgctggtcggtactcggatgtccgggttgcgcccggtcgtggctgacgcggaccgtgatgtgttgcggatcctggtcgaccgccgccgctccatcggggaggagcacacctacaagatcaaccagctgcatgcgcttctgctggaactggttcccggcggcgccaagcgcgacctgtccgccgctcaggcccgcaagatcctcaccggggtgcggccgcgggacgtggtgggcaagacccgtaagcgggtcgcgaccgagctcgtcgccgacctcgagcggctgtacgcccgcaagaaggccgcgaacaaggagctgaccgtgctgctgcgcgccaccggcacgaccctgaccgacctgcacggcatcgggccctccggggccgctcggctgctcgtcgaggtcggcgacatcacccgcttccctgacaagggccacttcgcgtcctggaccggtaccgcgcccatcgacgcctcctccggcgacaacgtgcgccaccgcctcagccgcggcgggaaccgcaagatcaaccgggtcctccacatcatggccgtggtccagctgcgcaacgccaccgagggcagggcctactacgaccgcaaagtcgccgccggcaagacccccaacgaggcgatgcgatgcctgaaacgacggctgtcagacctggtgtatcgggcactgcttgacgacctcagccgcggcgcggcgacgggcccgggaggacacacgggcaacggctctgactccagcgcgaccggctcacaacccgacaccggctcttcggacaagtcacttcccggacccgccaccaccaagcctacgaccggcatccccaaggcgtcttgacacagaagggagc

SEQ ID NO: 5390 - DNA, 1281 bp, unidentified
  source 1..1281: mol_type = unassigned DNA; note = element_8454c23
  misc_feature 1..2: note = core
  misc_feature 3..230: note = LE
  misc_feature 231..1271: note = CDS
  misc_feature 1272..1281: note = RE
  misc_feature 30..242: note = bridgeRNA
ctgacttgctttgatcgtgccagcacctcggttccgacgggggcgtagggtgcgagggaggtggccggctgggctctcacgctccttgcccactccggtgtggctctctcatagcgtgccggccggtcaccgcccgctgcggcgtggctcgatagaggcgtgcatcgcttcctgaaactcaggttgcccgccgtggtatcccaccacccggcaaccgaaggaagtgactcatgaccgtgatcatcggcatcgaccctcacaagagctcgcataccgcgacagcgctcggcgcggacctggccgaactcggcacgatccgtgtccgagcgacccgcgcgacaatcgaccagctgctgacttgggccgcaccgtgggctgatcggcgctgggcgatcgagggcgcccgcggactcgggcagctgctcgcgcaacgcctcgtcgccgcgggcgagagcgtcgtcgacgtccccgccaccctggccgcgcgggcccggctgctcgaaaccgggcatggtcgtaagaccgaccacatcgacgcccgcggcgtggcgctggtcgccgcccaacggcccgacatggcccctgtcactgccgacgaccacacccgcgtgctgcggttgctcgcggaccgccgtgacgagctgacccgggagcgacgccgcaccatgaaccggttgcaccggcacctgcgcgacctgatcgccggcggcgcgccgctgcacctgtccgccgcgaaagctgccggcctgctcgcgaaggtccgtcctggcgatgcggtcgagaccgagcgcaagcagatggcccgcgacctgcttgccgatatccgacggctcgacagggcgatcgccgacaatcgtcgccggtgcgccaccgcggtcgcctcctcgggcacgagcctgaccgagatcaccgggatcagcgacgtgctcgccgcgaagatcctgggacacgtcggggacatcggtaggtttcccagcgccgatcatctcgccagctacgccggcaccgcgccgatcgaggcctccagcggcgacgtcgtccgtcatcgcctgtcgcggcgtgggaaccggcagctgaacaacgccatccacctcgcggcgcatgtgcagacgatcttccccggtcccggtcgcgactactaccaacgccgactcgcggccgggaacagccgcaccgaagccctccggctcctcaagcgacagctcaccaaggccatctaccgcgtcctcgtcgccgatgccgtcacccatcccttcgtggtggccgcttgacatagaggcg

SEQ ID NO: 5391 - DNA, 1592 bp, unidentified
  source 1..1592: mol_type = unassigned DNA; note = element_84669b5
  misc_feature 1: note = core
  misc_feature 2..255: note = LE
  misc_feature 256..1461: note = CDS
  misc_feature 1462..1592: note = RE
  misc_feature 6..232: note = bridgeRNA
tcgtattatgaggtcagccagtttttactggttgacctctttcatttaagggggcttaccattacggtagccggggtagaacggccgaacccgtgggagatgtcatcccgtcgctaaaactgttcaccccctacttgtggaaaccatgtttaggctggttgggacaaaaggagatatcgcatcactagcgatgctgtggaactgcaagcagtcattggggggtgccggcaaaaatctttggagagggagaaatatatgaatccagtcattggtctggatatttcaaaaggccaaagtcaagggcaagtgtttttagataaaggtcaaccttacggtaagagtttttcattccttcatacccaagaaggacttcattaccttttaaacttgatcaacgatgtcactaaactatcaggtcattcacccactgtcatcttagagtctactgggcattaccaggctgctgttgtacagtttctggaggaacactctattatccttatcgtggtgaatccgctgatctcaaaccaagcgaaaaagtcttcttcgttacgtaaggttaagactgatgcggtagatgcctatcagctctgcgagctgtattacaaggaggagtttgatgcctatagacagagaagcgtacatttcttgaatcttcgccatctaacgaggcagtttgaatccctgacggatatgtatgttcaagcaaagttgcaatttcatgcgatcctcgatcaggttttccctgaatacaatggcatttttggagacctattttcgaaaatctccttactcttattacgggaattccctacagctgagtcgatcctggctgcaggagaaaacacaatcatggagagagtagcttgtatttgtacaagccgatcagagcgttgggccaaggaaaaagccgagcttattatagctgcagcaacacgtaatccttttcagaagacagcctatcaaagtcatctaatcagccttgaactttatatacgcctccttcttcagtatcaagagcatctttccagcttacaggaccagattgatgctcttgctgaagaagttgaagaatatgagattatccaatcgattcccggtatcggcaaaaaaatcgcagcaacgattctatctgaaatcggagaaatcgatcggtttactcacgctaagaaattagtggcatatgcaggagtagatccaagtgtatactcgtcagggaaattcacagcaacagccaatcgcattaccaaacgagggtccaagcgacttagacacgccttgtaccttgcggttctatgtgggctaagacgatcttgcaataaaaaattaaaggaattctacgacaagaagcgtgaagaaggaaaaccgtacagagtggcagttatagcatgtgtaaacaagcttctccattggatctatgccattttaagaagtaaacattctttccttgatttagcttaaatcccaagaaagatcaataaaagaaaagccttccactaagtttctggaaggatatttggcatgcgtatctttagtatatcatcgaattttaaggaatttagagataattattgacaagatattagctggtt

SEQ ID NO: 5392 - DNA, 1607 bp, unidentified
  source 1..1607: mol_type = unassigned DNA; note = element_846de39
  misc_feature 1..2: note = core
  misc_feature 3..266: note = LE
  misc_feature 267..1442: note = CDS
  misc_feature 1443..1607: note = RE
  misc_feature 14..245: note = bridgeRNA
ctcgtattatatagtagtagtgtttatagtccctctccaaggactgtatgctatacaaaacagtatgatatactgttggagatactgtggattggttaccatctcctaccacattgatggttttagaaaggctccgaccacagtctctttgtatatttgttaatcagttagataccgcatgacggtttatttagaacgaggttacaatcgcagagagtaccagtgggttccaaacagtgtcaaatacatttcaaaggagtattgctatgatttacgcaggaattgatgttgccaaggataagcatgattgctttatcacgaactcagagggtgaagtgctttttaaagcttttaccattccaaacaaccgggatggttttgatgagctctatcagaagatcgcatccgttaccgatgatttaaccaaagtaaaagtagggctagaagccactggacactacagttataacatcttgggatatcttcttgataaaggtctgaccacctttgttatcaatccgttacataccaatctttacagaaaaagtctcagccttagaaagacgaaaacggataaagttgatgcccatacgattgctacaatgctcatgtctgatgtgaacttaaagtcctactcagacacatcttatcataatgaggaacttaagtcactaacccgttatcgttttgataaagtgaaagaacgggcaaaactgaaatcctcggtttcacgtcttgtaacaatcctctttccagagctggagaaacttgttcctacccttcatatgacatctgtttatgcgttactggctgaatttccaagtgcatctgccattgctgattcacaccttacaaggctaacgaacctcttgtctactgcttcaaaaggacgctacggaaaagatactgctatcctttttcgtgaagctgcaaggtcttcgattggctctcatatgcctgctaagtctttggaactaaagcataccctcaagctcattcaggaaatctctgctgagattgatgaaatcgaagctgaaatcaagtccataatggacagtatccattcaccaatcttaacgattcctggtatcagctatcgcatgggtgccatgattattgccgaaatcggcgattttagtagatttgactctccagataaaattcttgcttatgccggaatgtctccttctacctaccaatcagggcagttagaatcatcgtattcccatatggaaaaacgtggctcccgctatcttcgctatgccttatataatgcaacaaagtatgtctgccattgggatccaacctttgctatctacttggagaagaaacgctccgaagggaaacactacaatgttgcactttcccatgctacaaaaaaactggtcagagtgatttatcaactggaaaaatcagggcagctttatctaaaagcagcttagttttgatatatgaacatctcctttttgagcacctataaagatgctctatttgtcatgcagttttcaatgttcattgaataatttccagtttattatctatctgaaatgcatttctgcaattcattcaaaaaatatcactttgggacttgacttttaatagttagt

SEQ ID NO: 5393 - DNA, 1383 bp, unidentified
  source 1..1383: mol_type = unassigned DNA; note = element_846e88e
  misc_feature 1..2: note = core
  misc_feature 3..83: note = LE
  misc_feature 84..1106: note = CDS
  misc_feature 1107..1383: note = RE
  misc_feature 1151..1370: note = bridgeRNA
tgatgtggtggacggcgcccgctcccggcaacgaattgccatagggtgatcgttgcgacgaatcacatgagggagccgtccacatgcaagttagcacgattggtttggatatcgccaagaacgtgtttcaggttcacggcattgatgctggagagaaggttgttgtgaggaggcagcttcgccgcggccagatgccgggatttttcgaggcgctgccggcgtgcctgattggcatggaagcttgtgcaagcgcccatcactgggctcgcgaattgaccaagctcggccacgaagttcggctgatgccggcgaaggacgtgaaggcctacgtcaagcgcaacaagaacgacgctgccgacgccgaggcgatctgtgaggcggttcgccggccgacgatgcgctttgtgcgggtaaagtcggccgagcagcaaggccagatgatgcagcaccgcacgcgcgatttgctgatgcggcaacggacccaggtgattaatgcgctgcgggcacatttggccgagctcggcattgcggcggcgcagggacgcgaggggatcaaagagttgctggcgatcattgcagacgaccgggatgagcggctgccgatagatgcgcgtgccagcctgctcgtgctggccgctcagcttcaggccctacagacgcttattggatcaatcgagaagcggatcatagcacagcatcgtgcgaacgcagacagcaaacgacttcagaccatccccggggtcggcctaatcggtgcgactgcgattgcggctacggtcacggaccccaaggcattccgatctggccgtgattttgcggcttgggtcgggcttgtgccgcgagaagattcgaccggaggcaaacgcaagctcggtccgatctccaagcagggcgaccgctacttgcgacgcatcctggttgttggcgctcattcggtactgcgccgcgccaaactccatccggagaagtatccttggctgacgcggcttctggcacggcgccccttcaaagtcgtggccatcgcactggccaataagatggcccgcatagcctgggcgttattggtcaagggcggaacctaccgacctcggctcgcagcagcgtgagaaggtcggcaattgacgagagcgaggttgcgtccgtgcgttcacaaaatgcaggggtgatgacgacgttgatgcgaaacggtcgagaccgtcgatcgggaaaacccgttaagtgccacgcgaggaaagaacgcgtgcttttggttgggacccgatcagcggatcacatcagggccagcagccattgcggctgcattcaaaggccgaatacatggctgcacccgatcgcctcgctaaaacgtcagattctccttgcaccgcgggcgccgtccataca

SEQ ID NO: 5394 - DNA, 1634 bp, unidentified
  source 1..1634: mol_type = unassigned DNA; note = element_84703c5
  misc_feature 1..2: note = core
  misc_feature 3..68: note = LE
  misc_feature 69..1229: note = CDS
  misc_feature 1230..1634: note = RE
  misc_feature 1267..1485: note = bridgeRNA
agatgctatggggcgagcggcgaggacaatggcaccatcgtcgctccagcgaatcaatggagcgccccatgccacagctgaacgatttgagcagatccctcataactctcgaacaagatgcaacactgatcgccgtgatcgagatgggccagtcgagttggctggtcgccggtattgtgcctggcgtcgagcgccatccgttgaagaagctcgcggtcgacgagagcgcattgctgaagctcctcaatcgttggcgagaggaagcggagcaggcaggacacaggatcaaacgcattgctgtcgctttcgaggccggccgggacggcttctggctggcgcgctggctcaggacgcgcggcatcgagacccacgtcattcatgcatcgagcgtagccgtatcgcgcgaacaccggcgcgccaagaccgatcgtctagacaccgagctgctcaaacgcgcctttctcggctggctgcgcggggagcgtgatcactgcaagatggtggcgatcccgacaaccaaggacgaagatgccaagcggcccaaccgcgagcgcgagagccttgtcggagagcaaagtcggatcgtcaatcgaatgaaggcgacgttgacccgactcggcatccgcggcttcaatcccaagctgaagaaggccgccgaacgccttgatggcttgcgcacacccgaggacgcgccgatcccgcccaacacgctggctgagctacgtcgcgacatggtgcgccggcggcttgtcagtgatcagatacggcagatcgagggtgctcgcctggagcgtcttgagcaggcgccctgtgatggcccacacgcaatggtgcgcctgttggcgcgcgtgatcggggttggcatcgagacggccgacatgctggtgcaggaggtgttgtcgcgaaacatgcgcgaccgacgggccgtagcgcggtatgccggcctcactggctcgcccgacgagagcgggcagaagcgccgcgagaaaggactggcccgttctggcaacgctcgggttcgacgaggcatgatccaattggcgtggcgatttctcatgttccagaaggacagcgccttggcgcagtggtttcgagcccgcaccgagaatgcccgcggcactcgcaagaccatgatcgtggccttggcgcgcaagcttctgatcgccctgtggcggctcgtgcgggacggcgtggtgccggacggcgtcattctgcgtcccgcacaatgactggaggacgcagaaggcacccaacagttttggcccagcctgtccacttgtgacaggtcgccgatgacggttcgaggtagcggtgacccgatggactccatggcttatcacgccgtaacagagaatgggtccgctgcttcggagcttcgcaccgatgcgcatgactgcatcatggttcgggtccttggacccaccgaatacaaggttgtggcgcgatagattcgcgctcgaacgcgggctcccctctgatcgtcatcttgctgacccagcccgactgcattcgatggtgtcgccgtggccgggtcgggacgaagaaacgggctttgagatcgaacaaagaaactgacgaaggaagaaaagatgggttgctctgctgaaactccttgacaaaaaaagccccataca

SEQ ID NO: 5395 - DNA, 1379 bp, unidentified
  source 1..1379: mol_type = unassigned DNA; note = element_8477b93
  misc_feature 1..2: note = core
  misc_feature 3..87: note = LE
  misc_feature 88..1110: note = CDS
  misc_feature 1111..1379: note = RE
  misc_feature 1146..1378: note = bridgeRNA
ataatgtaatggacccacccttttatacggcttcgcaatgagccatgatgaaagtgacaaactacatcaaataagggcaggtccacaatgaagattacaacagctggcttagatatagcaaaaaataagtttcatttttatggtgttaatcaagttgggaagaaagttaaaaaacgagtgctaactcgttctgaagtccttcctttctttagtacattggagccaactcttgttgtcattgagtcttgtggtagtgctaatcattggggacgaaagctcatagagcttggccatgaggtaaaattgatagcaccacaatatgttgttccttatagacgaaaaaataagaacgattttaatgatgctgaagcgatagcagaggccgctcaacgaagtaacatgacttttgtaccgattaagtcaatcgagcaacaagatatacaaatgttattgcgcattagagataggcatgttcaaaatcgagttcagctcggtaatcaaatccgaggtttacttgccgaatatggcttaattattccatctttgggaaaagccgcgttaagaaaagcattacccgagtttctagaagatgctgaaaatgaattaacagcttccagtcgagtcttattttcagagttgtatgaagaattacttcaacttgatgaagtgattaaagcctatgataaaaaagtagaaggcgtttcaaagttaaatgaaacatgcagtcgagctcaaacggttgtgggtattgggccaatcaccgctgcagctctttatggtgcaataggtgatgggcataattttgctaatggccgtcatttttctgcatggtgtggtttagttccaaagcagaactcgaccggaggaaagagtgttttgttaggaataacaaaacgtggcaatccttacttgcgaactttgcttaatcacggagccagaaccgttttaaaaaactgtgaaggaaaaaacgatagattgagcctgtgggctcaaaagctcaagaaagaaaaacactataatcaggcgtgtattgcggtagccaataaattggccagaatagtctgggctgtcatcagtaaagatgaagactaccaagcaaattacatttaagtagtaaaaacacagctataaaaatacagagttacaacactcaccatcagttgcgaaatgaatttgaacggataatagacagttaaactgtgctacttaaaaactactcctgtcattggctcaaagaagccgtcggaatgataaagttaagtagaagcagattgcatccaggctatgggattaatgcccaatgaataagccgaatatatgaaggcaataactattttattaactgctcaaaatcacttgcaaactgggtgggtccatat

SEQ ID NO: 5396 - DNA, 1266 bp, unidentified
  source 1..1266: mol_type = unassigned DNA; note = element_8480030
  misc_feature 1: note = core
  misc_feature 2..243: note = LE
  misc_feature 244..1104: note = CDS
  misc_feature 1105..1266: note = RE
  misc_feature 46..231: note = bridgeRNA
tcttaagttagcattctattaaaatcattaaattaagacctataaataagaaagaaccaaagagaggaataaggttattttatacgcagagactatgatctcgtcaacattgaaaatcccctctcttttctacacagatttcgaacagttccctgcctgctggcaggcaggtgtgaggcttcagacctcgattttaagtcgttgaaactcgcgtagtatgtcctttcaataaaacatttcattatgaataaagatattgaatattatggaattgacatcagccatctggtgtttgatgtaacagatcatattggggatcattaccaattcaaaaacagcacatcgggttttagaaagtttgtaaagctgctgggagaaaatagtcattgcgtgatggaggccacgggttattatcattatcagttggcctattatttactcgagagcggcatcagagtctcggtggagaatccattatcggtaaaacgttttatacagatgcgcctatcaaagataaagaccgataagagcgattcaagactcattgtggagtatgccaaacaagttgatttaaagttatggaggggcaactccaagcatcaactggaatgtcttcaaatgaccagactgcttactatatatacaaagcagagtaccatgctcaaaaataagatccatggagagctggtattgggtaatcccagtaaagcagttgtcagttctttaaagcgcagtttgaaacagatccagaaagagatgttttccctggaggagaagctattgaaattggtaacggaagttcatcaagaggttcttacacggctaaaatccattccaggaatagggaagaagacagccctgatgttggtggttcttacagatggttttgatcgttttaccagcgcatcagagttatgtagttatgcaggacttacaccggtcattcggcagagtggaagtagcgtaaatggaagaagtaggatcagtaaaatagggaatcagaaactaaggaacctcttgtttatgtgcagcttcaatgcgtgcaaacctgcctgccatcaggcaggtacaacaaggcttgtagagagatttacgagcgaatagtagccaagggaaagagcaaaaaactagcgctgatagcggtatgtaataagctgttaaaacaggcatttgccatcgcaaaatccggacttatctatgacgactcgtacagaagcactttaattaaaaactaagtagattttacttgttttttaccacagtact

SEQ ID NO: 5397 - DNA, 1421 bp, unidentified
  source 1..1421: mol_type = unassigned DNA; note = element_8483f6a
  misc_feature 1: note = core
  misc_feature 2..88: note = LE
  misc_feature 89..1132: note = CDS
  misc_feature 1133..1421: note = RE
  misc_feature 1191..1413: note = bridgeRNA
caatgggatggacgccccctcctctaaacggcatcgcagtgccacagtgagatgactatcacctcactgaattgaagggagcgtcaccatgaacggtagaacgatcgggttggatctggccaaaaacgtgtttcaagttcacggagtcgatgaacatggcaaggtggtgctgcgcaaacaggtgacgcgacaccaagtggctgctttctttgccaacctaccgccctgcctcattggaatggaggcctgtggcagcgcccatcactgggctcgcaagctccagagcatgggccacgtcgttaaactgatggctccccagtacgtcaagccctatgtcaagaccaacaagaacgatgctgcggatgccgaggccatctgcgaggcagtgacccgaccgaacatgcggtttgtgccgatcaagaatgtggaacagcaaagcgtgctggcgctgcaccgtgtacgtcagggttttgtcaaagcccgcactgcccaggcaaaccagatccgtggtctgctggctgagttcgggctgatccttccccaaggcatcggccacattgtcaaccaggctccaggactcattgaagatgtccgcaacgaactgcctggatcatttcgactgctgattcagcgcctgcttgatcatctgaaggcgctggacaagcaagtcagcgagctcgaaacgcagatactagcctggcaccgccaaagcgagctcagcaagaaactagagcaaataccgggcattggccccatcaccgccagtgcgctggtcgcctctctgggtaacgccaagaactttgatgggggtcggcaggtggcagcctggctggggctggtgcctcgacaacactccagcggagggaagcaaaacctgctaggtatcagcaagcgcggtgacacgtacctcagaaccttgctgattcatggtgcccgagcggtgatctttcatgcaacccgcaagacggaacctgatgcgacctgcaactgggtgaaccaggtggtcaaccggcgcaacaagaacgtggcggcggtggcgctggctaacaagaatgctcgcatcgtctgggcattgttggctcatgatcgtcagtatcaggcgggatatatccccaccaagctctgcgcctgataaaccgaccgagtggtcgccaccaagtcaagcaatagccatgggggggagtagaaccagcgattgctcaggcaatcatgaagtgatggtaagacaggtcagaccgtggttggcaaagcccgttccattcgcggcaccttaagtgcgagaaggcgattgaggcgtcaaccagcgtaacccatcagggacaatggcatggttccacgaacaaagtccgaatgtacgggtgcaatctataccttcacgctgtcatgaattgagcgcttggcaaactgggggcgtccatgta

SEQ ID NO: 5398 - DNA, 1572 bp, unidentified
  source 1..1572: mol_type = unassigned DNA; note = element_8485d45
  misc_feature 1..3: note = core
  misc_feature 4..280: note = LE
  misc_feature 281..1441: note = CDS
  misc_feature 1442..1572: note = RE
cacgtataatctaattatggtctaaatgacctatattagatccctttctatttatattttttatataactttttagggttataatatttaagcactgtggatttgtatctatttttttacagctttgactggttggaagtgacaactaccacagacttttatttttattggtaattagttagttaacgctttgacgttttatatcttacgtgaatacataaatagaagtcttgtgtaaaacatacagtgcattaatactaattaggaggtgttttttattatgtattttgttggtattgatatttcaaaatacaaacatgactgtttcatttgtactgaaacgggagaagtaattgaagaaaatttatctttcacaaacaccaatgaaggatttaatcaattacttaatttattaaaatctttagataataatcaagaaataaggataggatttgaggctaccggacattacggaatgaaccttaagcttttcctagaaaaaaataattattcttttatggaatttaatcctgctcttgttaaaagatttatttcaactcaaacccttagaagaactaaaacagataagaaagatgctatgcacatcactaagtatcttatatctgcggattacaaaccccatccaaaacaattttatcacaaatattctttaaagtctttatctagaatgagagaaaaattagttaaacaacgttcttattatgaagttcaaattactaatacattagatattatcttcccagaatttaaacctttctttaataatactttttctaaaactagcttatatattttaaagaaatataaaactcctgataaaatcaaaaatatgaaggattttgactctattagaaaagtatctcgtggtaaatttacttctgctaattttattaaacttaaagaacttgccaaaaattcaattggcgtttcaaatgatatatttgaaacagaattagaatctttgcttattcttctctctcaaatagaagttgaaattaataaacttgaaaataaaattgaatctattatcaaagaacttaatccaccaattttatccataaaaggaattggtactatttcttgtgcaggaattatttctgaatttggtgatttttctagatttaaatctgccgatgcttgtgttgcttttgctggtattgaacctagtatctctcaatcaggaactgaatcttacactggtcacatggttaaacatggatctgggcatttaagatattttcttatgaatgctgctgattatgtttttatgcatgaacctatattcacagaattctactataaaaaacgttctgaaggtaaatctcacagagttgcattaactcatgttgctaaaaaacttgttagaattatttataaattagaatccgaaaatatcacatttaattcaaatataaattaattggtgactaatttatatttatataacgcgacacaaagttttaaaaatttacatttttaaaatctttttggcgtgtaacaaaaatctttttaagatttttgatgaaattgacttgacttcttatagttagt

SEQ ID NO: 5399 - DNA, 1381 bp, unidentified
  source 1..1381: mol_type = unassigned DNA; note = element_8488c71
  misc_feature 1..3: note = core
  misc_feature 4..86: note = LE
  misc_feature 87..1121: note = CDS
  misc_feature 1122..1381: note = RE
  misc_feature 1147..1369: note = bridgeRNA
tgatgctgtggacggcgcccactcttcggcatcgaggtgccatagggtggttgcgttagagcaaaccacattgaggggagccgtccatgggcgaagttaacacgattggtatggatattgcgaagtcggtctttcaggtgcacggggtcgatgctgcgggctcgatcacgattcgcaagcgtattggtcgcgccaaagtgctggagtattttggcgagttgccgccttgcttggtcgggatcgaggcctgtccgtcagcgcatcactggggccgcgaactccaatcgcttggccacacggtcaggtttatcccaccgagctatgtgaaggcttacctcaaacgcagcaagaacgatgcgaatgatgccgccgcgatctgcgaggcggttgcacggccgtcgatgcggttcgtgccgatcaagacgacggagcagcagagcgctttgatgctgcaccggacccggcaattgctggtgcgccagcggacgatgttgagcaatgctttgcgcgggcacttggccgaactcggcatcgtatcggccaagggccgcaatggaacggcggagttgcttgagatcattgcggatggtgcggatagccgggtgtcgcccgcagtgcgcggtatcctcgaagtgctggcgcggcagtatggcgttatcggcaccgagatggcatccatcgacaagagcatcatggccctgcatcgcacctgtgaggcgagccggcggctggcggagatccccggtatcggtccggtcggcgctaccgcgctggttgccgagatcggcgactggaatgccttttcgtcggggcgcagtcttgcggcctggatcgggttggtaccgaagcagaacagcaccggcggcaaggacaggctgggcagtatcaccaagcagggcaatcgatacttgcggtggctactggtcgtcggcgcaatggccgtcatccgctacgcgcgcaagcacggcacccagaggcggccgtggctcgccagattgatggagcgtcggccaactaaggtggcggccgtggcgctcgccaacaagatagcacggatggcctgggccatcatggtcgggggcgagaaatacagggagccgcagctgccgctggcggcctgaagcagactagctggtagatcggcaacaccaattggcgagggcatgacgacgtaatgcagatacggttgttccggggatcgggagagcccgcttgggtcaacgcacgccttcaagagtgcgcgtttttgtttgggacccgatccgcgcagagcattagggccagcggccatatccagccgcaaaaacaggccggacacgtgaccgcacccgaccaatgctgcaaaacgtcagaaagtccttgccagggcgccgtccacacg

SEQ ID NO: 5400 - DNA, 1284 bp, unidentified
  source 1..1284: mol_type = unassigned DNA; note = element_8495232
  misc_feature 1..2: note = core
  misc_feature 3..237: note = LE
  misc_feature 238..1272: note = CDS
  misc_feature 1273..1284: note = RE
  misc_feature 17..240: note = bridgeRNA
ctgacttgtctactagggacagatgcgcgggtctgcagcccgtagcgtcagggcgccggttggcactggctcgcaaaccccttgccgccctgcgggttggctcatcaagagcgtgccaccgtcgaccggcgcccggccgtggcgtggctcaacagaggcgtgctcaccgatttccccaagtcaggctgcccgccacggcgtttccctgcccgtctggtggaaggaacctcgccgtccgtgatcacgatcggtatcgacccgcacaagtcgtccctgaccgctgtcgccctcgaccagaccggccggcagctggccgcccggcgcatcacgatcaacgccgcggcatacaagaccctgatcaactgggccgcccgctggccgcaccgccgcttcgccgtcgagggcgcggccggcctgggccgtggcatcgcccagctgctggccgccgccagcgagcacgtcgtggacgtcccggccaccctggccgcccgggcccgactcctggacaccggcgggtcgcgcaaaaccgatgcggcggatgccgccagcgtcgcccacgccgctatgcgtcatcagcggctacgccaggtcatcgccgaagaccagcacacccggctgcgactactcgccgaacgccgtgacgacctggcccgtgagcgagtccggctgctcaaccggctgcatgtgctgctgcgggatctgattcccggcggtgcagcactcgacctcaccgccgacaaggcagccgcgctgctgcgcggcatccgcccggccaccgccaccgacagctgccgccgcgacctggcccgagacctcatcgcagacctgcgctacctcgaccggcgcctgaccaccaaccaggtccacacccggcaagttcacgccgagacacactcgaccatcacccacatccacggtgtcggacacatcaccgccgcgaagatcctcggccacgtcggcgacatcacccgtttcccgaccgccgaccacttcgccagctacgccggaaccgcaccgctggaagcctccagcggcgaacgccgccgtcaccgcctcaaccccaccggcaaccggcaactcaacaccgccctgcacaccatcgcactctgccaagcccgcgacccaggccccggacggctctactaccagcgcaagatcagcgaagggaagacccccgccgaagcccgacgagccctcaaacgacgcctcaccaacgtcctctaccgacacctcctccacgatcagcgcaagcacctccccgccacgggttgacacacagaggcg

SEQ ID NO: 5401 - DNA, 1159 bp, unidentified
  source 1..1159: mol_type = unassigned DNA; note = element_8497aca
  misc_feature 1..2: note = core
  misc_feature 3..221: note = LE
  misc_feature 222..1145: note = CDS
  misc_feature 1146..1159: note = RE
  misc_feature 33..223: note = bridgeRNA
cttgtatcttggcaattgaaccgctgtgctgcaaaagagagcggctgcgagatcttgccggtggcggatgctgaccaagggtcaagcccgcgttgtagttggatcggcagccgcgcagttatttcaaactcgaacagttaccggagcgaccaggctgcgagcccaaattgggaacgcacagcctggccagctcgcatttacaagcaggagttaattaacctatgaacaaagcagttgtctatgtcggtgttgatgtatccaaagcttacctcgatatggcgtgggcgggacgctctcgccgctttgcgaacaataaaagcggattaagcgcgctgatgaaatggattaagcaaagtcctgtgcatttaatctgcgaggccagtgggggctacgagcgcgggttgctcgatgcggcagaacaaaacgcaatcaaactcagtttggtgcaagccaatcgggtgcggcaatacgcccgtgccgctggcatcctggccaagaccgatgaagttgatgcgcgtgtgctctgcgcttttggcagcgccatgcaacctaagccactggccccactctcagcgcagcaaaaacagttacgcgaattggaaacgcagcgccgacacctgagtcggatactcgttgcagagcaaaatcggctggcacagttaaacgataaagaactacagcgcttaactggcaggctcttagctgcgcttaagaagcaaatggctgcaatcgatgcgcggatcgccgccctcattgcgcaggaccagacgcttaatgaaaaggtccaaaagcttaccaccatagtgggtgtgggtacgcgcaccgccgtgctgctgctcgcgcaaatgcccgagctgggaacactcaatcgtgctcaagcagcagcgctggctggactggctccgtttaaccgcgacagcggcacgttacgtggcaaacgcaccatctttggaggacgccgtgctttgcgccgcggcttgtatatggccgcgctggtggccacgcgtcacaaccgcctcctgcgtgatttctatcagcgtctccgtaccaagggcaaacctcacaaagtcgccctcactgctgtgatgcggaaacttctccttgcccttaatcacaccgtcaaaccctctgcttgctgcgcttgaactcaagacagtta

SEQ ID NO: 5402 - DNA, 1619 bp, unidentified
  source 1..1619: mol_type = unassigned DNA; note = element_849c361
  misc_feature 1..3: note = core
  misc_feature 4..249: note = LE
  misc_feature 250..1488: note = CDS
  misc_feature 1489..1619: note = RE
  misc_feature 8..223: note = bridgeRNA
gttcgtaatataaggttagccagatatatctggttgaccttttttcatggggtcttattattacggtagtcggggcagaacgatgtgtccgtgggactcgatcccgtcagctaaactgttcaccccctacttgtataaacatgtttcaggctggttgggaccaagatcccgtttaacaagcgaacctatgacattacaagaagccttaggggataccgacaatttacattttataaggaggagtgttgtatgaatctagtcattggtctggatgttgctaaaggagtaagtcaagttcaggcatttttagataaaggtaagccttatcgtaaaagctttagtgtccttcataatgttgaagaattaaataatgtatttcttgtcttcttaaaagaaattgagactctgacagggaaaaagccctcggttgttttggagtcaacgggacattatcattctcctgttattcaatttttggaggaacatcaatatgtatacattatagtcaatccacttatctcttatcgagctaaaagttcgagtttacggaaagttaaaactgatgccattgatgcttatcatctatgtgaactttattataaagaagaacttgagccttataaaaaaagaggtgtccagctcttaaaccttcgcaatctaacaagactgcaagaaagtatttcaggagtatctgcacaaacaaaaatacagtttcactccttgttagatcaaatattccctgaatatgtgggtgtgtttggtgatttatattccaaagtgtccttgcaaacactattaaaatttccaacttcggaatccgttttaagtatcagcgaatctatattggaagatgaaatagcttcgctatgtaagagtcgttcttttgattgggcaaaggaacgggcgcaaaagctaaaagatgcagcatccagaaacccgtttcaaaacaacttattccaaagtcatatctttaatcttgagatactggtaacgataattcttcaataccaagagcacctatcgaagttggaagccgagatagatgcccttgccaaagaaattgatgaatataagattctccaatctatccctggtataggagaaaaaatcgctgcaacgattatctccgaaatcggtgaaatagatcggttcaatcacccaagaaagttagtcgcattcgcgggagtagaccccagtgtatactcctctggtaaatttacagcttcagttaaccgcattaccaaaagaggatctagcagcttaaggcacgctttatacatggctgtaagatgtgggatacgcgatgctcgtaaaaagaaaacgacagaggaagttatcccccgcaataaaagattgcgagaattttacgataaaaaacgaaatgaaggtaaacccttcagagtagcgatcattgcatatgtcaacaagctcttgcattggatttatgctgtactaaaaagcaaaacaaatttccaagatccagcttaataacgaaacatagctaagtaaagaaaaaccttccaaacaatactaacggaaggttatttggcatgtttagtttcaagtatatcatgaagagttttagttttttagtgaaaaatcttgacaactattagctg

SEQ ID NO: 5403 - DNA, 1420 bp, unidentified
  source 1..1420: mol_type = unassigned DNA; note = element_849e917
  misc_feature 1..3: note = core
  misc_feature 4..263: note = LE
  misc_feature 264..1292: note = CDS
  misc_feature 1293..1420: note = RE
  misc_feature 35..239: note = bridgeRNA
ctcctatgtttgcatagttagaaaatcaatctttcaaatatctatatttggatatcataaagtgaaaaagggtgagagtcgattcgcgactaaatgactcaggaagtacattgacgcagagataccgcctcattcttttttatcttttagagtctgaacagaatgtaaggaactacgcaggtcgtattatccagaatatccaaccaggagaaaagacgaaggaagattcatcactttataatattatttaaaattaagaagttatgaaagtattgaaacaggtattaggaattgatgtagcgcaaaaagaattggtagttactttaggaagactcaatgatgatttatcgattgaactgtgtgcttattctgtttttaaaaatacagataaaggttttttaaaactttctcaatggattgataagcttacagataaaacgaccaaagttcgatatgtaatggaagctacaggtgtttaccatgagaagttcgcccattatttagatgaaaaaaaagaggatttaagtattgtactgcccaacaaaatcagtaattatatacgaactcttgagatcaaaacaattacagataaaacgtgttctgaggccattgccagatttggactggaaagaaaactcgataattggaaaaaaccaaaagcgatctacagaaccttaaaacaacttacacgtgaacgccgtcaaattacagatgagagaaccatagtaaaaaaccaactgcatgccgaagaggcagaagcaatgcctcatatttcaagtattgaacgttcaaatagaaggatacattttttaaacacccttgagaaagaaattaagaatgagatcgaaagtagtataaaagagaacaaagaacttagtaaagacatcagtaatatctgtacaataccgggtatttcaattttgactgcagcaactgttattggcgaaacaaacggatttgagcttatacgcagtaaaaaacagcttacaagttatgcaggactggatgtaaaagaaaaactctcaggaacatcagtaaaaggcaagccgtcaatttccaaaaggggtaatagatatttaagaagctgcctgcatctgccagctctaagcagcataaaatgggatgataattttcgcgaccaatacagtagaatagtagcaaaacatggcatcaaaatgaaaggatgtgtagcggtacagagaaaattattggaactgatttatattctctacaaaaataaagcagtatatgataaagattttgaatcaaaaaaaaatagcgtgccagcataaaaatgcataaacacgctatacagtctagctctatggctgactaaggctacaaatttaataatataaaagataaataaccaagacagctaaaaataaaatttatatttattaggaaatcaacacagaat

SEQ ID NO: 5404 - DNA, 1536 bp, unidentified
  source 1..1536: mol_type = unassigned DNA; note = element_84a83e0
  misc_feature 1: note = core
  misc_feature 2..233: note = LE
  misc_feature 234..1523: note = CDS
  misc_feature 1524..1536: note = RE
  misc_feature 13..248: note = bridgeRNA
ctacttcttgaatggacgtacggcttcagcccggccaggctgggtcgaggtgtccggcggggtcgctctatctagcggctgcccacccgtagcacgggggtgtggctctgatctggcgtgcggcctgccggtcaccgtggcgaggctgtggctccagaggggtctgcccagctcgaagtagcgctgccctcctcgccgatatcagtcgaggtctggttcgaggaggcgaggcagtggcgcgggtgatcatcgggatggatccacacaagcggtcggcgacgatcgagatcatcgatgggcgggagagggtcctggcccagggtcgatacggcaccgacagtgccggctaccgggccatgctggccgccgggcggcggtatccgcagcgggtgtgggcggtggagggctgcaacggcatcggccggcatgtggcccaacggctggtcgccgacggggagaccgtgctggatgtgccggcgaagctgtcggcgcgggcgcgggtgttcgctaccgggcagggccgcaagaccgatccggtcgatgcccattcggtggccgtggttgcgctacgtaccaccggattgcgtcaggtcggggtggacgacgccacggtggcgttacgactactggtcgaccgccgcgactggctgggccgggcccgcaccgacacggtcaaccggctgcacgcactgctgctcgatctggtgccgggcggggcgaagaagcacctgtccgcgtcccaggcccgcacgatcctggccaccgtgcggtcgcgtgatgtggtcggccggacccgccgtcagctcgccgcggagctgatcaccgaactcgcggtgatcgacaggaagatcaagcaggcgaacgcggccctgaccgaactgatcgcggccaccggcagcagactgcagcagctcaacgggatcggcccgtccgtggcggcccggctgctcggcgacatcggcgacatcacccggttcgccagccgtaaccacttcgcgtcgtggaacggcaccgcacccctggacgcctcctccggcgaccaacagcgccatcgcctgtcccgggccggcaaccggcgcatcaaccgggccctgcacatcatggccgtcgtccagctgcgtcacgacaccgaaggccgcgcatacttccggcgtaagctcgccgcgggcaagactccgatggaagctatgcgctgcctcaaacgacgactctccgatgtggtctatcgacagatggccgccgacatgaaagcgagtccgggagggcactgggggacgactctgacatccagcgcggccgacccaaccccgacggtcgactcttcggacaagccacaacccggactcaccgtcgagcctacgccacccaccacacctgtcgaagccgatccggggccagcgcccacgccggccgccaagcaaccgcagacccgaacggccaaaccagcccgtcctaccgccttgaccagaacttcacgcaccacctcagcccatccgaggaagagatcttcgtccaaggcttgacaaagaggggagc

SEQ ID NO: 5405 - DNA, 1200 bp, unidentified
  source 1..1200: mol_type = unassigned DNA; note = element_84aa953
  misc_feature 1..2: note = core
  misc_feature 3..233: note = LE
  misc_feature 234..1175: note = CDS
  misc_feature 1176..1200: note = RE
  misc_feature 36..207: note = bridgeRNA
cttgtatggttttcctacaggtccaaaaccaaaatggacctgtcagggtggaggggcaaacgcgccttccggcctttcggcacggactgtgggagattcagccccaccctcaccacaacgccaatagagaatccatcggcagagcgtcgcccgcttcgaccgacgatatgttgcaagccagcgtctggtgagccctgacaagtcaaagattactttagcttggaggacgtaccatggcaaaggcagtcgaacccgttctgaccggtgtcgatgtcagcaaagctgagctcgtgatagctcgcagcgattcgtccggggtggaggccattagcaacgccgtgggcccgactagacggtggctgaagtctttgccacctggatcgaagattgccctggaggcgaccggtatctatcaccgccagcttgctaggttggcgcacgaagcaggctttgagctctatctgctggacggatacaagctcaaccattaccgcagtggcgtcggcacccgggcaaagactgatgcgtcagatgccaagctcattctccgctatctcaccaaggaaatggacagccttaaaccgtggatacctgcacatgatgccttctatcgcgtccaagggctgatgcgccgccgggcgtcgctggttcataccagagtagccctgagtcaaagtctgcaggacataccggagttgaagcaggccgccaaacagctagatgcgcatattcgccgagtagagctgctaatcgttcagcgattaaaacaagctatggcagatgtcggctggtggctcgatgccaagcgctgcaaggccatcgaaggcatcggcgacctgacggccatggcgctggccaacaccttccatcgcggccccttcaaaaccagtgacgccttcattgcgttcctgggcatggatgtcagagtcagagactcgggcaaacaaataggtcgacgcaagctcaccaagaaaggcgatcctgagctgcgccgactgctctacaacgccgcgatggcagcgcgaaaaacacaggcctggaaaagcctctatgaaacctatattgcacaaggactcaagccgacccaggcgttggtcaagctggccaggaaactggcccgcatcgcttttgccttgatgcagaaccaaaccacctatcaaccaaaaacagcctgaaaggggttgtggtgaaccatagaat

SEQ ID NO: 5406 - DNA, 1218 bp, unidentified
  source 1..1218: mol_type = unassigned DNA; note = element_84ac9ef
  misc_feature 1..2: note = core
  misc_feature 3..228: note = LE
  misc_feature 229..1203: note = CDS
  misc_feature 1204..1218: note = RE
  misc_feature 6..200: note = bridgeRNA
cttgtatctcgaccacagcctttcagtgaggctatggttcccgactgatcatcgggggagagagtacaagccgcacccacccttaagcttcgagcttgctccgtagattgcgctgtactcctccgtactcatccataagtccgaacggtatccagggcctcgagctcgcatcgacaaggttggacggatgcagtggcgatcattggagttcgttgaggagaaagcgacatgacagctgttgtcggcatcgacattgccaaacaaacattcgacatcgcgaccctgcaaagcaacggcaagtaccgcacgaaggccaaattgccgaacgatctcaaagggtttgagacgctacagcagtggttgctcaagcacgcagagccccaggcctggatcgtgatggaggccacgggtatctatcacgaagcgctggccgagtggctgttcaagcaaggttaccgcgtctgtgtgctcaacccggctcagccggccttctacgcccgtagccagttgcagcgagtgaagacggacaaggtcgatgccaagctgctgactgactatggcagtaggcatctggccgagctgcgcagctggcagccagaggctcctgagattcgtcgtttaagagcactggtgcaccgtttgaaagatattcaggagctggagcagatcgagcgcaatcgcttggagagcacccaggaaagtaaggtgagagactcgattcaatcggttcttgatcatttgaaaaagcagaccgatgaaacattgaaagcgatcaagcagctcttcgatgacaacgatgacctgcgtggcaagcgagacctgctgaccagcatcgacggtatcgccgacagaaccgctgcgctgttgctggctgagttgggcgatattcaacgcttcaacagcagcaaagcggtcaccgctttttccggcctcaaccccaggttgcaggagtcgggtaagcacaagggacatgtgcgaatttcgcgcatgggtccagcccgtttgcgtgcaggtctttatatgccagccgtctcgtccctgactcacaaccaggccattcgagaaatgggcgaacgtatgaaagccaagggcaaagccggcaagcagatcgcctgcgcggctatgcgtaagctgctgtgtatcgcttatggtgtgctgaaatctggtcggccttttgatccagcacttgctattgcgaggtgagcttcaagacggtat

SEQ ID NO: 5407 - DNA, 1452 bp, unidentified
  source 1..1452: mol_type = unassigned DNA; note = element_84b2b92
  misc_feature 1: note = core
  misc_feature 2..223: note = LE
  misc_feature 224..1435: note = CDS
  misc_feature 1436..1452: note = RE
  misc_feature 1..224: note = bridgeRNA
ccgttgccttcttcacgccctcacagagggcatttggacccaccggctccggtatgactgattcgccctgtcgttgatgatctgggaggtgttgtcaccggggtcggcggacctcggtgactgctgatagagatctgaccgaataccggtctgtccgtaacgtggctgccagcgtcgacgtcccgggtgggttctgagtccactgatcaggaaaggaccgacgttggacacaggcgcccggccgggcgtgttcgccggccttgacgtgggcaagaccaaccaccatctgtgcgcgctcgccccagacgggacccgggtcctcgaccgggtcgtcgccaacgacgagcccgccttacggcaggtcttcggtgccctcctcggcggcggcggtgaggtcctgctgatcgtggaccagcccgcgagcatcggggccctgccggtcgcggtcgcccgcgccatggggatcgcagtggcctacctgccgggtctggtgatgcggcgcctcgcggacctacacccgggggaaggcaagaccgacgcccgcgacgcgtgggtgatcgctgacgccgctcggaccctgccccacaccctgcgtctggtaggcggggacgacgagaccgtcgccgggctgggggtcctggccggctacgacgacgacctggccgccgagtgcacccggctgagcaaccgtgcccgggacctcctactgggcatcagcccagccctggaacgaactttggggcctcgcatcggccacccggccgtgttggctctcctcgcggcctacccgaccccggagctcctccgcggcgcgggccggcgccgcctcgcccggatcgtcaccccgctcgccccccggatcgccgaccagatcctcgagcagctgcaccttgcgctggccgcgcagaccgtcgtcgtccccggcaccgccgacagcggccgggtcctcgccgggatcgcccgggcgctgtccgcgaccctcaccgagcgccgcgcactggaccgggaactcaaggagcggctcgatgcgcaccctctcgccccggtcctgacctcgatgccaggagtcggggtcaggaccgcggtgaagatcctcaccatcgtcggagacgggtcagcgttcccgaccgcgggccacctcgcggcctacgccgggctcgcgccggtgacccgccgctcggggaccagcatccgcggggaacaccgcgcccaccgcgggcaccgggccctgaagtcgacgctgttcctgtccgcattcgcctccctgtccgatcccaccagccgcgcctactacgaccggaaacgggccgagggcaaacggcacaacgccgccctgatctgcctggcccgacgccgagtcgacgttctccacgccctactccgcacccggaccgcctatcgccagcccgcgtcgaccacccccgccgcggcttgacgaaggccatagagaca

SEQ ID NO: 5408 - DNA, 1436 bp, unidentified
  source 1..1436: mol_type = unassigned DNA; note = element_84b8ef3
  misc_feature 1..2: note = core
  misc_feature 3..129: note = LE
  misc_feature 130..1149: note = CDS
  misc_feature 1150..1436: note = RE
  misc_feature 1196..1436: note = bridgeRNA
agaatggaatgaacgtcccccacccgccagtgggatgacacaggtagcgaatccgcacaggccgacggtgccagagatacccaattgggagaagatgacaccttcccgcggcaaacaggaggaaccgagatgggctatacaacggtcggcgtagatatcgcgaagaatgtgatgcagatgcactgggtcgaatctgaaaccggtgaagtcatcaataggtcgatcaaacgggccgcgttcctcgaacactttgcgaaccgcgcgccgtgtttgatcgggatggaggcatgcggcggttcacagcactgggcgcggcggctgattgaaatgggacacaaggtgaagttggtgccggctaagttcgccaaggctttcaatatcggaaacaagaatgatgcggcggacgcgcgtgccatctggatggccatccagatgcccagcaagagcgtcgcggtaaagaccgaagcgcagcaggcggtactggcgctgcaccggattcggcgacagaaactcaagtttcgcactatgcaggtcaacagcctgcgcggcctgttgacagaatatggtgaagtgatgggcaagagccgcgccgcgctggacaaggcggttccgcatgtgctggccaggcttgccgaccggctgccggcgatgctgattgaatccctgcgcgagcaatggaacgatctcgagaacctggaccggcagatcgccgacatcgaacgccgtttgctgaactggatgaaagagaacaatgcctgcaaggcgattgcagagattcccggggttggtctgctgacagcaaccgcagcggtcgcgacgatgggagatgcaaagtcgttcagatcagggcgtgagttcgcggcatggctcgggctcgttccagcccaaacgggcactggcggaaaggtgcagttgttgggaataagtaagcgaggtgatacatatttgcgcacgctgctgatccacggggcgcgcagtgtgctgcatcacacgaaggacccaagtaattggctccggcaaatcagccttcgccgcccctcgaatgtcgtggcggtcgcgctggcgaacaagatggcgcgaacaatctgggcgatgctggcgcatgatcgcccgtatgaacgtgcgcatatcagcgtcaagcctgcttgactgctagaccttgcccatcatgtgggggagtcaattttatgagcaagtgaaacgtcaaagttgcgctggcaaacgtaagtgatgacgacacaggtcggaccgggactcgcgaaacctgggaataaccaagagcttcgagctcgcgttaagaatgaggagcgagtcagcggaattcataggggccagcggccggtcaggctgcaaaaaaggccgaatatagagctgcaaccctcctgtcagtcagaacgaacgcaaaaaaccggtgcaatcctgggggacgttcatat

SEQ ID NO: 5409 - DNA, 1541 bp, unidentified
  source 1..1541: mol_type = unassigned DNA; note = element_84bd0c3
  misc_feature 1..4: note = core
  misc_feature 5..280: note = LE
  misc_feature 281..1531: note = CDS
  misc_feature 1532..1541: note = RE
ctcactggtgcaccatccttaggtcatcaatcctcgaggggttggtgatgcgcccgaggtgccgcccggtcatcgcccagctcgctggacacggttgatgtccacgatgagatctgcgagatctggcggttccccgggacgtgccgaccgtcgacagggctgagcgccaaagctgcgtgccgcgagcgccgatcagtgagcgaaccggcagacacgtcccggcaccatcggcaccgtacgagggcgcctccccactgggactagcagcgaggaggctgacgtgaagtctgccagcaacaccctgcccgaccaagcaccccaagacctgaccgcaggcctggactgggcccgcgacgaccacgccgtgtcgatcgtcaacgaccgcggccgcgagattgcccggcacaccatcgagcacaccgccgccggactgatcgaactcgtggccgtgctcacccgcgccggctgccaggaggtcgcgatcgaacgccccgacgggcccgtggtcgacgcccttctcggcgccggtgtgaccgtggtcgtgatcagcccgaaccaggtcaagaacctgcgtggccggtacggctcggccggcaacaaggacgaccggttcgacgcctacgtgctcgccgacaccctgcgcaccgaccggtcccggctgcggccactggtgcccgacgcaccggaaaccgtcgcgctgcgccgaatcgtccgcgctcgccgcgatctggtcgcccaccgcgtggccctggccaaccaactgcgcgcccaccttcgcctggtcttccccggtgcggtcggcctgttccggcagatcgactcgctgatcactctggcgttcctgacccgtttcccgacccaggacaaagccgactggctcaccccgaccagactcggccggtggctgtcctcggtcggctactccggacgcaccgacccggccgcgttgcacgcccatctgaccgccgcaccccgcggcgccgccggcgaccagacggcgtacaccgcgatcaccgcatcctccgttgccctgctcaccgcgatggttacccagatcaaggctctggaagcccagatcagcgcccagctcgacgcgcacgccgaccaacacatcttcaccagcctgccccgctcgggccgcgtccgggccgcccggctgctcgccgagatcggcgactgccgagccaagttccccaccccggaagcgttgatctgcctggccggtgtcgccccgtccacccgccaatccggaaagatccgcgtcgtggcgttccgatgggcctgcgacaaacaactccgcgacgccgtctgcgacttcgccggcgactcgatcaaggccaacccctgggcagccgatctctaccgaagagccagagcacgaggtcacgaccacccccacgccgtccgggtcctggcccgtgcctggctgaccgtcatctggcactgctggcaggacggcgtgcgctacgacccggcagaacaccgggccctgcaacgcctcctcaaccaagatcaaaaaagggcggcttgacacagggctt

SEQ ID NO: 5410 - DNA, 1381 bp, unidentified
  source 1..1381: mol_type = unassigned DNA; note = element_84c6006
  misc_feature 1: note = core
  misc_feature 2..76: note = LE
  misc_feature 77..1096: note = CDS
  misc_feature 1097..1381: note = RE
  misc_feature 1106..1368: note = bridgeRNA
tgatggtgtggacgacctccacctaaccgggttcgctggcgtggcgtcgagggacgtcacgttaagggagcagaacatgcaagaggttgcagtcgtcggtctcgatctggcgaagaacgtattccaagttcatggggtggccgcagacggaagcgtggtgttccgacgccagcttagacgcggccaagtcctgagcttctttgacgagctgaaccggtgcctggtcggtatcgaagcctgtgcctccgccaaccactgggcgcgggggttgacctcgctgggccatgaggtgcggctgatgccgccagcctacgtgaaggcgtacgtgaagcgcggcaagaccgatgcggcggacgcggaggcgatcgccgaagcggtcacccggccaaccatgcggttcgtggccgtgaagaccacggctcagcaggcggtgctgatgttgcataagacgcgggatctgctcgtgcgccagcggacgatgctgatcaacgccttgagaggccatctgggcgagttcggcgtagtcacgccacaaggctcggctggggttcaggccgctctgcgtctgatcatcctcgagcgagatggcctaccggagttggctcaggcggcgcttcgcggtttagcggggcaacttgaggttctcggtcgagagatcgaagcgctggaacgccgcatcctgaactggcatcgcaccgatgagacgagccgccggctcgccaccattccggggatcggcccgatcactgccagcgccatggccgcgagcgcaccagatcccagcctgttccgctcgggccggcagttcgcagcgtggttggggctcacgccccgagcccatagcagcggtggaaaggagctccaggccggcattagcaaaatgggcgacggctatctgagacggcttctcgtggttggagccacagccgtcctgcgcatggcgcggcagcgaagcaccgggagcgattggatccgggggctgctcgatcggaagaaaccaaaagcagccgcagtcgcccttgccaacaagacggcgcggatcgcgtgggtgctcatggccaggaaggaaatctacgcgccgccggcggcagcctgagagatcggcaccggttccaccacaggaccggagccgtagatgtgagagtggtgagacgtgatgacgaaccggccgcagccggggatcggtgaaacccagggggtcagagcgcttcgagcgcgttgacgtgattagggagccgatccgcggacttggctgcgccgcccttcgggtcatcagggccagcagcttcaacccgctgcaatgacaggccgtatacatgactgcactcgaccgagcgccaacgtccatttccacccttgcatctcggaggtcgtccataca

SEQ ID NO: 5411 - DNA, 1452 bp, unidentified
  source 1..1452: mol_type = unassigned DNA; note = element_84c7c04
  misc_feature 1: note = core
  misc_feature 2..195: note = LE
  misc_feature 196..1437: note = CDS
  misc_feature 1438..1452: note = RE
  misc_feature 42..217: note = bridgeRNA
cgttaccttgtaggtagcccttgaagctttgcttctgaagggtgttggcctgttaggcccggcatggttattgcccccagtcatgaatgatccggggggtgttgtcaccgggcctgactggcattgggtgatcgctaataggggctcgactggaactcgtttcttggccgaacgtaacgtggatgccgagacgtgatgccgtggacagaccaaccgatctgcatggctgacgggaaactcatgattgagaattacgacagcgttgacgtgttcataggtgttgacgttgggaaaagcgaacatcacgcggtcgctctggaccgctccgggaaacgactttacgacaaggcgctccccaatgacgaagcaaaattgcgggccgtgatccagaagctcaaggtccgcggcaccgtgctcctggtcgtcgaccagcccgaaaccgtcggcgctctgcccgtcgctgtcgcgtatgacgaaggcatcctcgtcggttaccttccgggcttggcgatgcggcggatcgccgatctgcacgccagcgaagcgaagactgacgcccgcgacgccgcgatcatcgccgaggccgcccggaccctcccgcaggctctccggccgctgcgcgtcgaggacgagcagatggcggaactgtcgatactgtgcggattcgacgatgacatcgtcggtcagatgaccgcgaccagcaaccggatccgcgggctgctgatgcaggtccacccagctctcgagggggttctgggcccgcacctcgaccacccggccgtccttgacctgctgcagaaatacccgacgccgaccgcgatgaaagccgccggcctgaaccggcttggcacgcgcctgctcaagctcgcgccgcggatcgggcgccgcctggccgaggaaatcttccaggccctctccgaacagaccgtcgtcggcggcacccacgcgacgcgcgccgtgctgccccgcctcgccgagcaactggcaacgctccgccgccagcgcgctgagatcgccctcgaggttgaggagctcgtcgacgccaacccgctggaacctatcctgacgagcatgcccggggtgggcgtgaggaccgccgcccgcctcatcacagaggtctcgggcaaagacttcgccaccgccggccacctcgcctcctacgccggactcgccccggtcacccggcgatcaggatcatcgatccgcggcgagcacccctccagacgaggcaacaaagctctgaagcgagcgctcttcttctccgctttcgcggcgctcagcgacccggtctcccgcacctactacgaccgcaagatcgcccaagggaagcgccacaaccaagccctgatcgccttggcccgacgccgatgcgacgtcctctacgccatgctccgcgacggcacaatctatcaagcccaatcaccccctaccccttgacgaactacatagggg

SEQ ID NO: 5412 - DNA, 1411 bp, unidentified
  source 1..1411: mol_type = unassigned DNA; note = element_84de0f5
  misc_feature 1..2: note = core
  misc_feature 3..528: note = LE
  misc_feature 529..1350: note = CDS
  misc_feature 1351..1411: note = RE
  misc_feature 16..207: note = bridgeRNA
gtcctacctttcacgcgtgggtctgatccgatcgttcgtaggatcgaagggcccgggggctccgggtatggctgtaacggctgaaccgctggatggcttacgggacttggccgcccggagccccgcgacgactcgaccgccaattgggagacgcgactcgatcgctgctgtaggacaacgtcggcgaggtcgtctgcgggatcggtgtacgacgggctggcggaggtgaccgtggccgagatctgagccggggtggacatcggcaagacgcatcatcacaccgtggtgatcaacgcggaggcgagcgactcctgtcgcgccggatcctcaacgacgagacggagctgttggcgctgatcggcgaggtgctggcgttatccgacgatgtgctgtgggcggtcgatctcaaccatggcggtgcggccctgctgatcggcctgctcatcgcccgtgatcagcccgtcgcctacctcactggcctggcggtccaccaggccgcggccacctgccggggcgagggaaagaccgatgcgaaggacgccttcgtcatcgccgaccaggcccggtgatgagatcgccgtcgacttacgcaccctgaccacccggcgcctggatgtcgtcttcgaccgcacccggcagatcaatcgtcttcgggctcaactgctagagattttccccgcgttggagcgttcgttggacttgaccaacaaggggccggtgatgcttctgaccggctaccagactcccgcagcgatccgcgggacaggcacaaggcggatcgagacgtggctgaagaaccgcaaggtcaaaggcgctgccgcactcgcacgcaccgtcgtggaagccgcccaggcccagcacaccgcgctgcctggcgagcagttggccgctgccatggtggtccgcctggcgaagggagtggtggccctcgacggcgaaatcgccgaacttgatgccctcatcgagacccggtttcagcagcatccgcacgccgaggtgatccgcagcctgcccgggatgggggcaaggctgggcgccgagttcatcgccgcgacgggcggcgacatggacgccttcggcagcgcggaccgcctggccggtttcgtcggcctggccccgcagccccgcgactccggccgcgtcagcggcaacctgcgcagacctcgccgctaccaccgcggcccgctgcggaccatgaacttgtcggcgttggccagcctcaagtcctgccccgcgtccaaggcgtactaccagctaccagcggaagaggagcgagggaaagggacacaagcaggctctgctggccctcgcccgccgacgcgtcaatgttctgtgggcgatgctccgtgacagagagcgttacgacccttcactacccgtcgcggaggcggcttgacatcagcattgggaa

SEQ ID NO: 5413 - DNA, 1376 bp, unidentified
  source 1..1376: mol_type = unassigned DNA; note = element_84e6641
  misc_feature 1..2: note = core
  misc_feature 3..242: note = LE
  misc_feature 243..1271: note = CDS
  misc_feature 1272..1376: note = RE
  misc_feature 11..220: note = bridgeRNA
ctatgtttgttgttataacgaaaaacaataaattaggtttgctttagtgagaagaatgggagcagaagtgcaatcaaacagccgatcaggtatgtactgccacagatattgccccattctttttgccttttggagtctgaacagaatgtagggaatattgcagcgcattatatccagaatatccaaccaggagacaagacggagaagggttttcacttgagcagaacaaacccaacaaaaatatggcagacattgtaaaacagactgtgggcatagacgttgcccaggacgaactggtagtatcccttggacgtatgagccatgataccggtacagagattttcgcatccggcacctttgccaatagtcccaagggattttcggagctgctgaagtggacggacaagcttgccgcagtggggataggaacgggatatgtaatggaggccaccggcgtataccatgagaagctggcctacttcctgtccgaccatgggcgggaggttagcattgtgctccccaacaagatcagcaactacttcaggacactggaggtgaaaacggttaccgacaggaccgcatcgcaggccatatgcaggtttgggctggagaggaaactggagccatggcagaggcccaaaaggatattcagggaccttaagcagctgacgcgggaaagggaccagttggtcatggacaggacgtcattgaaaaaccagctccacgccgaacgctcagaggcatttccaaaccaggggagcatcaaacggataggcatgcgcatccatatgatcaacagccatgagctggagatacgtacggaaatagccggacttgtaagaaccgataccgaactgtccaaaaagatcgatgccattaccagcatcccaggtgtgggcaaactgaccgcggtaatcgccctggcagaaacaaacggttttgagcacatcaggaacaaggggcagctggtcagctacgccgggctggacgttaggctaaaggagtcggggacatcggtgaagggcaggcccaggatatccaaaaaggggaacaggcaccttcgcaaggcgatgtacatgcccgcactggcggcaatgaggttcaacgaactccataaagcactgtttgtcagactggtatcaaagcacggcataaagatgaaagcggcagtagcggtacagcgtaaggtcctggaactcatctatatcgtatataaaacaggcaaagccttcgaaaggaactatcaaagccccacaaaggatgggttataaaatagttagagcagccactataaaaatgaactgccctaatgaggctggctcaaagccgccttggatagaacaaaattaaaatatatttgataattaacacagaat

SEQ ID NO: 5414 - DNA, 1379 bp, unidentified
  source 1..1379: mol_type = unassigned DNA; note = element_84e8f7a
  misc_feature 1..2: note = core
  misc_feature 3..292: note = LE
  misc_feature 293..1129: note = CDS
  misc_feature 1130..1379: note = RE
  misc_feature 1138..1376: note = bridgeRNA
ttaatgagatggtcacccccatctcgtgtttgccccgaacaccccggtgacgtacgttgccggcgtgttcttctttgtggcggaggtcatcatggactctgtgacgctggtcggcatcgacctgggcaagcactcttttcacctgcacggccaggaccgcaagggccaggcggtgttccgcaggaagctcaaccgcaagcagctcgtcgagttcttcgccaagttccacccttgcacggccgtgatggaggcctgtgctggcgcgcactaattggcccgcaagctcggcgcgatgggccacgaggtcaagctgatctcgccgcagtacgtgcgcccgctcgtgaagggcaacaagaacgacttcatcgacgccaaggcgatctgcgaggctgcctcgcgaccgacgatgcgcttcgtgccgcccaagaccgaagcccagcagacgctgtcgatgctgcaccgcgtgcgcgaatcactggtccacgaccgtaccaagactgccaaccagatgcccggcttcctgctggagttcggtgtcagtctgcccatcggcttcaccgtcatcaagcggctgccagctctgctggccgagcatgaggatctgccaccacagctgatctcagtgctggagcggctgcacgaacacttcaagtacctcgacggccagatagctgaactcgagaagcaactgagccatcaagtccacgaggacgatctgggccaaaggctcatgacgctgcccggcgtcggccccatcaccgccagcgtgctctcagccgagatgagcgacggacatcagttcgccgccagccgcgacttcgcagcttcactgggattggtgccgcgccagtacagcaccggcggcaaggccacgctgctgggcatcagcaagcgcggcgacaagaacctgcggcgtctgctcgtgcagtgcgcccgagcgttcatgcagcgattggacaaataccccagcccgctggccgactgggtgcgctcgctgctcacgcgccggcactccaacgtcgtggcctgcgcactggccaacaagctcgcgcgcatggcttgggccttggcgcgcgcacacaccgtctacgagccgggtaagctgcgaccagagccgacaacgacctgaccaacgcttgaacacccaacgggttttgcgaccgctgtagcagtgatgacgtgaacggcccattcggcctggcaggcatcccgatataaaaatcggctcttgaagccgagggccttttaaggactgtcaggcgcgactctcatcgtggcgcggggatcgccgatccccatccagacgccggatagatttacgcaagccaccttcacttcagcctgccatcagcccttgcaaaagcgggggtgaccataga

SEQ ID NO: 5415 - DNA, 1162 bp, unidentified
  source 1..1162: mol_type = unassigned DNA; note = element_84e969f
  misc_feature 1..2: note = core
  misc_feature 3..202: note = LE
  misc_feature 203..1150: note = CDS
  misc_feature 1151..1162: note = RE
  misc_feature 36..208: note = bridgeRNA
cttgtcttatgaaaatcccgctgtttgcgcgatagtaggtccaccgtcagcaggtgaccgcccgctgacggtggaggggtcggatcgggatcatgccggccgtgctgggccgtgttagagtttgatcgccccttcttttccttgtggcctgaacggatacccggaggtcagctccggatgacaagcataggacgtggaaaagatgacccaatctagcgcagatacagtcggtgtcgatatctcaaaagatttccttgatgcaaatatccaccccagcggcgaagccagacgctttgccaatgatgccaaaggccatcgggccctgatcgcttggttgcgtggccgcaacgtgcaacgtgtggtcttcgaagcgaccggagcctatcaccgcgccttcgagcgaacactcagcgcagccggcctgccaatggccaagatcaacccccgccaggccagacgatttgccgaggccatcggacagctcgccaaaaccgaccccatcgatgccgccatgctcgcccgcttcggcgcgctcctcacgccgcagacccgcgcgccggtcagcgaaatcctcgatgagatgaaggaacttcataacgccaggcaggccttggtgaaggatcggactgccgccctcaaccgtcaagcgcagatgcggatcgccatcctcaagcgtttggcctcccagaggctgagacagatcgataaccaactcaaggcgatcgacgccgccctggccgccctacgcgacagcgataccgctctcaaagccaggtttgatatactcctgagcattcctggcatcggcgccactacggcgtttgccatgttgatcgagatgcccgagctcggcacgatcgagaacccgcaggcagcaagcctcgccggcctggcacccgtcgcccgcgacagcggcaaatggcgcggcacgcgctcaatccgtggcggcagggcaaacctaagacaggccatctacatgccagcgctcgtcgcaaccaggttcaaccccgacttcaaagccaaatatcaagcattaatcgctgccggaaaaccaccaaaaatcgccatcgtcgcgattatgcgaaagctcgtaatcctagcaaatgctctactcaaagcagggcgaaactggcaccctaaagccgcttgaccaaaacggata

SEQ ID NO: 5416 - DNA, 1396 bp, unidentified
  source 1..1396: mol_type = unassigned DNA; note = element_84eae3d
  misc_feature 1..2: note = core
  misc_feature 3..78: note = LE
  misc_feature 79..1125: note = CDS
  misc_feature 1126..1396: note = RE
  misc_feature 1125..1383: note = bridgeRNA
tgttggggtggacggcccccgacggcatcgctgtgccagaatgaggtcgttgaaggatctcaaacgagggagccgtccgtggacaagattacccgcattggcatcgacacgtccaagagtgtttttgtgctgcacggggtgaacgcggctgatgagccggtgctgcgtaagaagctgcgacgccggcagatgctggatttcttcaggataatggagccgaccaggatcgggctggaggcgtgcggggcggcccattattgggcgcgcgaattgatggcattggggcacgcggtgatgctgctgccgccgcaatatgtgaagccctatgtgcaacgcggcaagaacgacgccgccgatgccagcgccatctgcgaagccatgagccggccgcggatgcggttcgtgccggggaagacggccgagcagcaggcggcgctgatgctgatgggcgtgcgtgagcaactcatcgctcggcgcacgcaattggccaacatgatccgcggctatgccgccgagttcggcatcacggcagcgcgcgggctcgacaagatcgagctgctgttggcccggatcgcgatggccgccgacgtgccggagctcgccaaagagctgtttgccacgcttggcgagcagtatggcgaactcaggccgaagcttcgcagcatcgacgcgcaactcctggcttggcaccggcacaacgaactgagccggcggctggcacaggttccggcgatcggcccgatcggcgcgacgctgctggcgatgaaggtccccgatccccgcgccttccgaaccggccgggattttgcagcctggctcggcttaaccccgaaggaccactccactgccggcaagcaacggctcggggtcatcacgcgcgccggggacgaggccttacgcagcaccttggtgagcggtgccaccgcggtgatccagcaggtcagcaaggcgcgtggcaacccctcgccctggctcatagcgctcatcaaacgcaagccgccgaagcttgccgccgtggcgctcgccaacaagacggcacggatcgcctggaagctgatggtcagcggcgagccttacgactgcaatcatggcgctgcgtcacacacggtgggcaacgccgcataacatcttcaccggcaggcgcactggcgcctgctgttgaggccgaagcttgctcgagacggagcagatggcgtgatcgattcgatcccaagacgcgagacactccgagcgtcccagtggcctttccttaaaggtcgccttcctgtttggaactcgcgtcgcggaacccatcttggcagcggtcatgtgcgaccgcgatagaccggacatatgatcgcaatcgcttcgatccctacgctgtgccaaatcttgcaagccgggggccgtccacata

SEQ ID NO: 5417 - DNA, 1517 bp, unidentified
  source 1..1517: mol_type = unassigned DNA; note = element_84ec4e5
  misc_feature 1..4: note = core
  misc_feature 5..262: note = LE
  misc_feature 263..1507: note = CDS
  misc_feature 1508..1517: note = RE
ctcactggtgcaccatccttgtgtcggtgatcttggatggattgccgatgcacccgcggtgccgctgatctatcgccctgctcgctcgacactgttgatgtccagtgtgagttctgcggagatcagtggttacccgggccacgccgaccgtcgacagggctatgcgccaccgagcgccgcacagtgagcgaaccggcagacgtgacccggaaccagcacataagggtgcctccccactgggactagcagcgaggaggctgtcatgaagtctgcccgaaaaacccttccaccggaacccgacaacggactcacctgcggaatcgactgggcccgcgacaaccacgccatgtcgatcatcgataccaccggccgcgaaatcacccgccatatgatcacccacgacgcggccgggctgcgggaactgctgaccgtgctgaccacggccggcgtcaccgaggtcgccatcgaacgtcccgacggtcccgtcgtcgatgcgctgctgcaggcgggcatcaccgtggttgtgatcagccccaaccaggtcaagaaccttcggggccgttacggctcggccggcaataaagacgaccgattcgacgcgttcgtcctcgccgacaccctgcgcaccgaccgtgcccggctgcacccgttgctgcccgacgcaccgtccaccgtcgcgttgcgacaggcgtgccgggcccgcaaggacctcgtggctcaccgcgtcgcggttaccaaccaactccgcgctcatctgatgatcgtgttccccggcgcagttggtctgttcgccaacatcgacagtccgatcagcttgaagttcttgtcccgcttcgattcccaggaccgtgccgactggctctcggttacccgcatggccaactggctggccagtgtcagctacagcggccgcaccgaccctgccgagctctaccgccacctgcaggccgcgccgcgtggcgccgccggcatcgacggggccaccatcaccgccgcattcgtggccaccttgcacacgctggccgcccagatcaaagtcctcgatgacagcatcgccgaccaactcgccgcccacgccgacgcacacatcttcaccagtctgccccgctccggaaccttccgggccgctcgcctgctcgccgaaatcggagactgccgcggacgattccccactcccgacgccttgacctgcctggccggtgtcgccccctcgacccgccaatccggcagggtcaaacacgtcggattccgttgggctgcagacaaacaactccgcgacgccgtatgcgatttcgccggtgacagccgccgcgccaacccctgggcggctgacctctacaaccgagcccgcgcccgcggccacgaccacccccacgccgtacgcatcctggcccgcgcctggctctacgtcatctggcactgctggcaagacggagtcacctacgaccccgccaaacatcgcgccctccagaccctgctcaaccaagatcaacaccgggcagcttgacacagggcaa

SEQ ID NO: 5418 - DNA, 1578 bp, unidentified
  source 1..1578: mol_type = unassigned DNA; note = element_84f759a
  misc_feature 1..2: note = core
  misc_feature 3..282: note = LE
  misc_feature 283..1572: note = CDS
  misc_feature 1573..1578: note = RE
  misc_feature 50..287: note = bridgeRNA
cactgatattttctgtattgaagacgtcgatgatgcacccgtataccattgacgtcgacaccatcagatgcggaccgcgcggtgaccccacattccgctggcgcccacagggctgccctcgtttcctgacatgtcccgcgcgggccgcggcgagccgagaccgccgcatgacctaataggagcatggagcgataccgcggacccgaacaaccgcattctatcgcgccccgtcagtgtgccgtctgcccggtccaggcgagcacggaaagaacggagcgagacatgagaaccgaatcgacacccggcgcccgcgggccggtcttctgcggggtcgacacccacgccgactcgcactggctgtgcgtcctggactggaggggccgcaaggtcctgtcccgccagttccccgccgacgcggcgggctacgaggcgctcgccggggcgatcgcggcggccggggagccggcctgcgtcgcgatggaggggacgtcgtcctacggggcgggcctcaccaggcacctcgcgtcgctggggatgcccgtgcgcgaggcgctctccccggcgaggacgcagaggaggcgcccggggcaggggaagtgcgacgaggcggacgcggagagggccgcccgcgcggcgatgtccggctcagggctcgggacccccaagagccaggacgggtgggtcgacggggtgcgctgcatgctcgcggcgcgctccggggcggtgaaggcgcggacctcggcgatcaacaccgcgaggtcgctgctcaccaccgcgccggaagggctcaggtcgaggttccgcggcatgggagggccgaggctgatggaggagctcccctccgtgcgcgccgagggcgcgctgggcgccgcgctcggcgcgctggcggacctgtgggcggcggcgcgcgacgcggcgctcgacatggagctcgcgatcgaggcgtccctggaggagaactgccccgcgctgctggcgatgtacgggtgcgggcccgtgagcgcggccaagctcgcggtcgcggccggggacaacccgggcaggctgcgctccgaggcgtcgttcgcggcgatatgcggcgcctgccccatccccgcctcgagcggcaagaccgtgaggcacaggctcaacaggggcggcgaccggcaggcgaacagcgcgctgcacgagatcgcgaggcagagggtcatgcgcgaccccgagaccgccgagtacgccgagagggccagggggcggggaaagagcgacagggaggtcatgaggtgcctcaagcgctacgtggccagggaggcgtaccgggcgctgatgcgcccgcacgagatcaggaggcccgaggacgcctcggagctcgtggcggccaggcgcgcggcgaaggtcagccaggtgagggcggcgtccatactgggcaccagcgagaagtacatctcgatgctggagaggggccaaagggagctcaagcccataaggagggcctacgaggcatgggtcgaggccggacttccgctcgattgggacaggcaggccttcgaggccgagcgcaaaatggattctaaaaaacaccttgccaaataggagcgt

SEQ ID NO: 5419 - DNA, 1352 bp, unidentified
  source 1..1352: mol_type = unassigned DNA; note = element_84f8775
  misc_feature 1..2: note = core
  misc_feature 3..75: note = LE
  misc_feature 76..1101: note = CDS
  misc_feature 1102..1352: note = RE
  misc_feature 1077..1340: note = bridgeRNA
tgatggggtggacgccccccgacggcatcgatgtgccaaggtggaggtgttgagcaaccaccagaggaggcgtccgtgggacaggctagcacgatcgggctcgacattgcgaagcaggtgttccaggcccatggcgccgatgcgagcggtcgagtggtgtttcgcaagcgcctggcacgggccaaggtccttgagttcttcgcgggacaggtgccgtgtgttgtggcgctggaagcttgtggcggggcacaccattgggcgcgggagatcggcaagctgggccatacggtgcggctgatcccgccggcctatgtgaagcccttcatcaagcggcagaagaatgatgtggctgacgccgaggcgatctgcgaggcggcgcagcggccgagcatgcgttttgtgccggtgaagagtgaagcgcagcaggcgaacgcgcttgtatttcggacccgcgaccttctggtgcggcagcggacacagtgcatcaacgccttgcgcggacacctgaccgagtacggccatgttgtcccaaagggaaccgatcaggtcgatcggttggttgctctggtcgaggatgctgagtcagctctgccgaaggctgggcaagccatcttgcagatgctgatcaagacgctcgaggcactcggaaagcagatcgacgacctggatgctgagatcaaccggcgcgcgaaggccgaccccgtggcgcgccggctcatgacgatccccggcatcggcccgatcgcggcaactgcgatcaccgccctcgtgcccgcgccggagggctttcgcgctgggcgagacttcgccgcctggctcggcttgacgccactgcagaagtcgaccggtggcaaacagaagcttggggccatctcgaagatgggcgagcgaaccatccggcggctgctcattctgggcgccagctcggttgtgcgctgggccgtccatcgtggagcaacggcaggctcgtggctggcgcagatgctcgcgcgcaagccgcgcatgctggtcaccaccgccctggccaacaagaccgcccgcattgtctgggctctgctggtcaagggcggcacgtacaaggctccggccgcggcggcgtaagcccgccgcagctaccgaggcgtagggcgagcgcaaggagagcatggcgcaacagtcggcgagacgggatcgggaaaaccagtgtgcaccaacgtaccttgagtacgccgcgttgatctggacccgatccgcgaactcccatgcaggccggcggtccgtgaccgcgaaagaggccggacagatggcagcatccgactacgcgtcaccgcaatcctgaagttttcccttgccctgaagggggcgtccacaga

SEQ ID NO: 5420 - DNA, 1283 bp, unidentified
  source 1..1283: mol_type = unassigned DNA; note = element_8506cc8
  misc_feature 1: note = core
  misc_feature 2..252: note = LE
  misc_feature 253..1245: note = CDS
  misc_feature 1246..1283: note = RE
  misc_feature 45..243: note = bridgeRNA
cctttggattgaaataagctatttacatatactattattaaaagggggttgcaaggggggtgttaataacgctttaagtgtgcataattttaaatagcagcagggtgaactttcgccacatctagtagagaacttgtttgcgtattagtccctgctacttttttaattgcttcccggtccatctagaatttttgcttttatgcaacaaaggaatttgaccggagcaatcttttaaaaaccaaaatttgatgtatgcaaaaaactagttttacccttggtgttgatgtatctataaacacacttgacgtttattgtcttgaagtgcaaaagcatgaacgtatcttcaataattccagtggtttcaaagctttcagttctttttgtcggcaaaatgaaattgatcttaaagatgctattgtggttttagaatatactggtggttatgaatataagttattgcagtactgccagtcaaagaacatttcttttgtacgcattcccgggcttgccattaaacgttcgttgggaattgtaagaggaaaaaatgataaggtagatgcagcccgtatagcacaatatggcgatgaaaaatacaaggcgctttctcctgaaaagcctttaaatgcaagcatttcaaagctaaaggaactgcttgggttcagaaaaaaattaataagggaaaatgcttcttataaagcaactatcaaggaacgaaagcacatgtatgaagtcggtaatgataattttattattaaatcattaagtaaaaagcttaaggtaaatgaaaaagaaattgaatcaacagaacaacaaatagaagcagtagtacaagcagactatgaagtttataaaaactatttattgataaagtcaatcagaggcattggtaaggtgaatgcctggatgaccatagcctatacggaaaatttcagcagctttaagaatgcgagaagttatgcagtgtatgtaggtgttatacccttcgattaccaaagtggtaccagcataaggggtaagaaaagagtaagtcgtatagcaaataaagaattaaagcaggagcttaaccaggcagcaagatctgctatacaatgggataaggaaatgcgcgagtatgcaacaagaaagctgcgagataaggcttacggaattgtactaaataatgtcaagttcaagctaattttaagaatgtttgcgatagtaaagcgtggggaaaattatgtggacaactacacaattgcagcgtaaataaaaaataaatttggtagatttaatatcctagaata

SEQ ID NO: 5421 - DNA, 1215 bp, unidentified
  source 1..1215: mol_type = unassigned DNA; note = element_8508df6
  misc_feature 1..2: note = core
  misc_feature 3..209: note = LE
  misc_feature 210..1118: note = CDS
  misc_feature 1119..1215: note = RE
  misc_feature 12..191: note = bridgeRNA
cttatctgttcggattctgtcagtgtgggtgtcgagagccgacgtgggccaccgtgagagcctagatcattgccgatcgtcttggagccgggtgcccacgtcggtttctcccctgtatcgcccgaacagttgccagagtagccgctcgtagacataaggctgggcaggcgggggagctctcgacccttcaagcctaacggagtttgctcatgaacggcatcgggattgatgtgtgtaaggccatgttggatgtagccgtccaccacggcccttgcgcgcagtttcacaacacaccggcaggccatcgcaagctgttggcctggctggcaaaccaggaggtcggccagattgtcctggaggcctctggcggctacgagcatccggtgctggatgttctgtttgacgcgggttaccggatcgtgcgggccaatgcgcaccgctgccatgccttcgccgccgccaccggcctgccggcaaaaacagatcgtctggacgcgatgaatctggcttgcatggccgccacgctggagttgcttgcctaccaaccgatggaaccttggcggcggcgactgcgcgagtttgtgcgtgcccggcggcagctggtggcgctggcgacaagcgcagaccaccaactggagcaggtgacggacaaacccctgcgccgggtgctgcaggccaacatcaaccagatcaagaagacctgcgcacgcctggaacagcagattgccgaacaggtgcgccagcaaccacagttggaggcgctgcgctcgctcaagggcgtcggagcgaccctgcaagcggtgctcgccagctacctgccggagctgggcacccttgatgggaaggcgattgccaggctggtcggcgtggctcccatcgcccatgacagcggaaggatgcgcggggtgcgccggatccaaggcgggcgggccgaggtccgcaacgtgctgtacatggcgtgcctgtctgcgatccagcacgagcagcggatctgggagttttatcggtctctgcgggcacgcggaaagcccggcaaggtcgcggtcgtggcaaccatgcgcaagatgctggtcatcctcaacgcccgcgccagagacgcccaagccgcgccgacctgaatgtccatgtgcgggatgcggcgatggctgcagacacgcggccggcatgcacgtgcccgctgctggaacggccagagctccctgcacaacacagttg

SEQ ID NO: 5422 - DNA, 1436 bp, unidentified
  source 1..1436: mol_type = unassigned DNA; note = element_8515010
  misc_feature 1..2: note = core
  misc_feature 3..122: note = LE
  misc_feature 123..1157: note = CDS
  misc_feature 1158..1436: note = RE
  misc_feature 1189..1389: note = bridgeRNA
agatggggtaatcggccgagcgttctttgtggatagctgaagattttgggtactgcgcttcaggctgatggtggaacgaagtccgtggttacggcctcatgcatcagaaggagaagcgcagcatggattattttgctggactggatgtgtcagtcaatgagacgagcatctgcattgtggatgatacggggaggatcgttcgcgaagtaaaggtggtgagcgaaccggaggctctgctggcggtactgaagaacggggcctatcacttcaagcgcattgggctggaagccgggccgctgtcgcagtggctttacagcaccctcggcgaagcaaccctgccggtgatttgtgttgagacccggcacatgcgggctgttctgaaggcgcagatcaacaagacggatcgcaacgatgcccgcggcattgcgcagatgatgcgggcggggctttatcgtccggtgcatgtgaagacattgcgcagtcagaaactgcgcacactgctgacccatcgcaagctgctgcagtcgaaagccatcgccatcgagaacgacttgcgttcgaccttgcgcaactttggcctcaaggtgggcatggtcggagcagccaagttcgaggggcgcatcagagggctggtcgagaacctccccgatctgactacgctcgttgaaccattgctcgttgtccggcgcgtgctgcgcgagcagatcgccgtcctgcatcggcgtgtgctggccgtcgtccgtgtcgatgatgtctgccggcggctaatgacgatccccggtgttgggccggtggtggcgttgactttccgcgtcacggttgatgtgccggcgcgcttccgcaactccaaggcagttggggcggtgttggggctgacaccctgcaagtatcaatccggcgagagcgactacaccggcgcgatatcaaaatgcggagacgggatgatgcgcgtcatgctctacgaggcggcccagatcctgttggtgcgctcaacaaaatggtcctggctcaaagcctgggcgatgcagattgccaggcgccgcggcatgaaaaaggcgatcgtcgcgctggcgcgccgattggccgtcaccatgcatcgcatctgggttgatggcaccgacttccgctggacccggcaagaggttgtccgggcatgacaatgcaagatcaaacccaataggagaaacgagagctccaccgtgcggtggcatgatgtcccttgcgggacgatggatgaggtgagatcgcaatgtccgctggacccaccgtcagtctgacggcaagaccgaccaaaagattgttccgcctcgttctcgaatcccatgatggaagggccttggcgccgattccgaagagaagcacgagcccgcgagcgacatcgacaccgcagcagtggagagtctgaaagcacttgaccccaaccggccgattagaga

SEQ ID NO: 5423 - DNA, 1684 bp, unidentified
  source 1..1684: mol_type = unassigned DNA; note = element_851b8b6
  misc_feature 1..2: note = core
  misc_feature 3..275: note = LE
  misc_feature 276..1493: note = CDS
  misc_feature 1494..1684: note = RE
  misc_feature 14..295: note = bridgeRNA
ctgttacaataaataaggacgtataaaaccttgcatccgataaggatttacacgcacttgttatttaagttataatagaagcagtaattggactgacgactaagaccttgggacagagagcctgtaatcgagacagtcatccatgcttctgttatagcgttcggtttatgcaggttgagccacaaagtattgtgcgttcgtgtcaccaaacagattgaataggtagcaagtaaagtatggtatgttcaattaagaaaacgataggagaaacagttatgaatgcggtaggaattgatgtatcaaaaggaaaaagcacaatagcaataatgcgacctttcggagaagttgttgcatcaccgtttgatgttgcacatacagaaggtgagctgaacaatcttgtagcttttataaaaaaattgaaaggtgaaacaagagttgtaatggaggctacgagtcactattatgaaccaatagccgggtatctcaaagagcgtgggatattcgtatcggtggttaatcctgtacttattcatgaatttggaggaaacactctgagaaagcccaaaacagacccgattgattcagtaaagattgcaacatatgctttgacatactggcttgaattaaaggaatacgtttctcaggaaggtttgagaaaatcactgaaaatgttaaacagacagtatcagcagataagtaaggtgagaacaacgctgagcaataatttaatttcgcttattgaccgcacatttccgggcataaacaagctgtttacttctccaataagagataaggacggacatgaaaaatgggtggattttgtactgaaatttccgcataaagacagcgttgccaaacttacaccgggggtattcaaaaagaaatatcaaagctggtgcaaagaaaatgaatatcggtactgtgaatcaaaagcaatggaaatacattcattttcaagagaatgtgtgagttccgtatcacaaaataacgccgtggttctgttaattacacaagctgtatcaatggtcaattcagcgttggaaagctgtcatgcattacaggaagaaatgtatcagactgcttctcagcttcctgagtttgaaacagtaattggtatgtatggagtcggcaaataccttgctccgcagctcatggcagaaataggcgaccccagaagatttcacagcagaaaggcaataacagcatactttggatatgacagtgaaaacagggattcgggtatgaggaaaacatcttcaaatccgataactaaaaaaggttcgggcacacttagacgaacgctttttatcgtcatgtttgccttaattcagggcaaaccaaaagataaccctgtatacgattttttgctcagaaaaaagtcagaaggtaaacattattttacatatatgaacgctgccgctaataaatttttgagaatctattatgcacgagtcaaagaaacattaaaaatcaaagaagcagcattagaataatatatttttatgaaccgttgaattggcaaaaacttctttcatcatagcatgaagagtattttttgttgtcacactaaaattgcaaatacaaaaaatttagactgcttcggcagtctgtttgtcgtggaatttcgtcaattatgaaaattttgtgaaatttaagtttggggacttgacttttatttgcaggt

SEQ ID NO: 5424 - DNA, 1719 bp, unidentified
  source 1..1719: mol_type = unassigned DNA; note = element_851f081
  misc_feature 1..2: note = core
  misc_feature 3..67: note = LE
  misc_feature 68..1225: note = CDS
  misc_feature 1226..1719: note = RE
  misc_feature 1267..1483: note = bridgeRNA
agatgctatggggcggcggcgaggatattgcatccatcgttgctgatatgaaccgatggagcgccccatgcagaagttgaacgatctgagccgatcccggagccccctcgatccggacggcacgctgatcgccgttatcgaactgagcctgtcgagctggctcgtcgccggcatcgtacctggcgtcgagcgccagccgttgaagaagctcgcggtcgacgagagcgcattgctgaagttgctgcatcgatggcgagaagaagcggcgaaggcagggcatcgaatcaaacgcatcgctgtcgctttcgaggccggccgtgacggcttctggctggcgcgctggctcagggcacgcggcatcgaggcctacgtcatccacgcatcgagcgtggcggtgtcgcgcgaacatcggcgcgccaagaccgatcggctggacaccgagctgctcaaacgctcttttctcggctggctgcgcggcgagcgtgatcactgcaagatggtggcgatcccgacaacccaggacgaagatgccaagcggcccaaccgcgagcacgagagcctcgtcggagagcaaagtcggatcgtcaaccgaatgaaagcaacgttgatccggttcggcatccgcggcttcaatcccaagctgaagaaggccgccgaacgccttgacggcttgcgcacccccgagggcgagccgatcccgcccaacaccctggctgaactgcgtcgcgacatggtgcgccgccggctcatcagtgatcagataaggcagatcgaggacgctcggctggagcgtctcaagcaagcgcccaatgatggaccacacgccatggtgcgcctgttggcgcgggtaatcggggttggtgtcgagacggccgacatgctggtgcaggaggtactgtcgcgaagcatgcgcgaccgacgggccgtagcgcgttatgccggcctcacgggctcgcccgacgagagcggcagaagacgccgggagaaagggctgacccgttccggcaacgctcgggttcgacgaggcatgatccaattggcgtggcgatttctcatgttccagaaggacagcaccttggcgcagtggtttcgagcccgcaccgagagcgcccgcggcactcgcaagaccatgatcgtggccttggcgcgcaagctactgattgccctgtggcgtctcgtgcgagagggcgtggtgccggacggcgtcgttctgcggccggcataatgaacggaggtcgctgaaggacacccaacagtttcggccccggtcccgctggtgacgggtcgccgatgacggttcgaggtggcggagtcccgacgtgtttccttggctctcaatgccgaaagggagaatgggtccgccgcttcggagcttcgctgccgatgcgtatgactgcatcatggttcgggtccttggacccaccgaatacaaggttgtggcgcgactgatccgcgcccgaaagcgggctcccctctgatcgtcatcccgatcgcaccaagcgtgccgtcgtgctcgaagctgtcaaggtgtggcctggcaagctcggagcatgccgcaaggtcggcgcggcggccaaccttgacagctcctgcgcgcgacgacgtcagcgaaccgcgggtcgggacgaagaaacgggctttgagatcgaacaaagaaactgacgaaggacaaaagatttgccgctctggcgaaccccttgacaaaaaaagccccataca

SEQ ID NO: 5425 - DNA, 1478 bp, unidentified
  source 1..1478: mol_type = unassigned DNA; note = element_8532c47
  misc_feature 1..4: note = core
  misc_feature 5..250: note = LE
  misc_feature 251..1456: note = CDS
  misc_feature 1457..1478: note = RE
ctcactggtgtacctgtacaggttgagaggaagtgctggaaggggtagtcctctctcttccgtgtacctgtcgtgactgcctagtcggctggccacttcgatggcccgcatgagactgcggcacgacgggtgccgggaggtctctacgggctacaggaagatgcgccaagggtagccgcccagagcgccagtcagtgagcaacccgcaggacctcccgacacggacattgtgaaccactggaggttgtctatgagctattttgccggtattgattggggtggctcggagcatgcggtctgtgtcgtcgatgagactggcaagatcagcctggccatgcaggttaagcacgatgcgcaaggtttgagctcgttgtgccaacggttgcagcgctttgatgcagcattgccgatcgccattgagcggccctcggggctgctcgtcgacacgctgctgcaagcgggtttgaaggttgtgcccatccatccgaacgtggctaaggcgtgccgcccgcgttaccgcgctgccgggggcaagcatgacctgggcgatgcctaccttctcgccgatgtgctgcgtaccgatggacatcgcttccgtgcgctcgcgccggtcagtgatgccatccaggcacttcgcgctctggtgcgcacccgcgatgacttggttgcacagcgcgtctcgctggccaaccagctgcgtgcgcttctcgagagcttctggccaggcgcttgcaccgtgttcgcagagatcgactcgtccatctcgttggccttcatcgagcgctatccgaccccggcgagcgccgcacggttgggcgagaagcgcctcgccggttttcttgccgtcgaacagtacagcggccggcaaccggtcagcgcactgctcaagcgcttgcgggaggctcccgtgggacacgccggcgccgccgaaacggaagccaaaagtgaactcgtgcgcgccctggcacgcatcctctcgagtttggtgagcgagatcgcccgcattacctcgcgtatcgagcacgaagtcgcacagctggccgacggccagatcgtgatgtccttgccgcgcgccggccgactcaacgccgcgcagatcctcgccgagctcggcgatgttcgcgaacgcttctgcaccgccgatcagttggcagccgaggccggtctggcacccgtcacccatcaaagcggtaaaaccaaagccgtcgtcttccgatgggcctgcaatcatcaactgcgtcgcgccatcactacttgggccgacaactcgcgacacgggtgcgcgtgggccaaagctatctacgccagagctagatatcgcggctgccggcacccccacgctatacgcatccttgcgcgcgcctgggcccgcgtcctgtggcgaatctgggccgatagaaccctctatcaacccactcagcacaacggagctaagcctttcttgattgctgcctaacgtcgaggttgacacaggaagt

SEQ ID NO: 5426 - DNA, 1504 bp, unidentified
  source 1..1504: mol_type = unassigned DNA; note = element_8533aee
  misc_feature 1..2: note = core
  misc_feature 3..246: note = LE
  misc_feature 247..1440: note = CDS
  misc_feature 1441..1504: note = RE
  misc_feature 6..239: note = bridgeRNA
ctaatgggttctgccgatgcctctggcaggctcggtcctggtagcggccggcgggtcagcactctccgctactgaccctcgaggtctcgcggcagaccgtgcgcccgccggtcgtgaggaggcgtgaccgctgctgggatgacgtgcccccggatggtgcgggtgagcacttgaccattaggacgccgggagtcttccgccacgctgccgagcagaggtcgcgacgaggcgagggagaacggtgcgatgttgttcgtgggtgatgactgggccgaggaccaccacgacgtcgagatcgtcgacgagcacgggaaggtgctggcgcgaagacgactacccgaggggctggccggggtgacgcggttgcacacgctgctcggcgagcacgcaccaccggagtgggccgaccttgacccggccagcgcggccgcccaggtggtggtcggcatcgagaccgaccgtggcccgtgggtcggggcgctggtcgcggccgggtacaccgtgtacgggttgaacccgatgtcggtggccaggtaccgggagcggtactcgacctccggggcgaagtcggacaccgcggatgctcacctgctggccgagatcgtccgcctggaccgggcccaccaccgcccggtcgccggcgacagcgccaccggggaggcggtcaaggtgagcgcacgcgcccaccagtcgctgatctgggaccggacccggcacgtgctgcgcctgcgctcggcgctgcgggagttcttcccggccgcgatgagggcgttcgaggggctggacgccccggaggcactgcagctgctcgccctggcaccggacccggacaccgccgccaggctgtcccgggcaaagatcgtccgcgcgctgaccgccgcgaaccgtcgcgacgtgaccacccgcgccgagacgatccgggaagtgctgaccgcacccgagctgcgacgacctgccccggtgcaggacgcctacgccgcggtcgtggcctccgaggtagcgctcatcaccgtgctgaacacccagatcgagcggctcgggcaggtggtggacgagcattttggccggcaccgggacgctgacatctacaccagcctgcccggtctcggtgtgatcctcagcgcccggatcctcggtgagttcggtgacgaccccgaccgctacgccgacgccacgtgccgcaaggcctacgccggcaccgcgcccatcacccgcgcctccggcacccgaagtggtcctggccaggtacgcccgcaaccggcgcctcggcgacgccgtccagcagtgggccttctgctccatgcgcggatcgcccggtgcccgcgcctactaccagtcattgcgtgcccgcggcatcggtctccaaaccgcgctccgccagctcgccaaccgctgggtcggcatcctccacggctgcctccggcaccgcaccttctatgacgagaacaccgcctgggcccaccacctcagcaccgcggcttgacaccgccagaacctgtgatgt

SEQ ID NO: 5427 - DNA, 1332 bp, unidentified
  source 1..1332: mol_type = unassigned DNA; note = element_853dcd4
  misc_feature 1..2: note = core
  misc_feature 3..254: note = LE
  misc_feature 255..1292: note = CDS
  misc_feature 1293..1332: note = RE
  misc_feature 25..199: note = bridgeRNA
cttgtatgatcaaaattaataaaatattaccaaagagatcaagtaagctttaaccgtttattgggaggccgtcccgacctgaggactggtttttgttaaccagagcctgcttcgtagattggcccccgccctattcacccataccgtggagtatctgaggcttagagcctgtatacgcaaggatggtaggtgcatgtgcagggtcgggaaccaatgaacagtctactttctttaacccattcagacaaaccaatatgacaacctttaaaattaataaaaatgatcatgaatcaaagctatcgctacaagctggcattgatgtcggttctgaagaattgatcctggttgtccgcaagaacagtaagccattcgatccacaaaaattcaccaacacccccgctgaccgtgcccaattggttaagaaactgaccaaattgcctggtattatcgtctgcatggaagctaccggcatctatcatttcgatttggcaattgctctgtatgatgcaggcgtgttgctgatggtggttaacccaaaagcctcccataactttgctaaggtgttgatgaaaaacagcaaaacagatgctgtcgacgccaataccttggccgaatatgccgagagaatggactttgtcgcatggactcgcccatccgatgagaaaatagctcttcgctgtttttctcgtcgtatcaattcgttgaccggccaaaaagcggccgctaaaaatcatttgcatgcactaaccgcgactcaggaaaccccaaaagccgtattgcgcgatgccaaactggctatcactcaattgcaaaaacgtatcgaccgcttaacggcagaggcgctggtcttgatcgctaaatatcccgaactcactcgaattctacagttgctgatcggcatcaaaggcattgccgaaaccagcgccattgcgctcatgggcgaactgttattgttgccgccagacctttcccatcgggaatgggtgaagtttgctggccttgatcccaaggctttcgactcgggtaaaagcatccataagaagacacgtgtatccaaagccggtaaccgttatattcgcgcagccctttatatgccggccttgagcgcccatcaacatgacccccacgtcagggcttatttccagcatctagtggtgactaacggcaaagaaaaaatgcaggctctctgcgcggtcatgcgtaaattgctccatgctatccacggaatgctgaagtacgacaagcctttcgacaacacccgtttttatgcaattccggcatctgccggatagtcaaaaaccaacggaataagtttgactttgaacagagtat

SEQ ID NO: 5428 - DNA, 1388 bp, unidentified
  source 1..1388: mol_type = unassigned DNA; note = element_854387c
  misc_feature 1: note = core
  misc_feature 2..87: note = LE
  misc_feature 88..1119: note = CDS
  misc_feature 1120..1388: note = RE
  misc_feature 1159..1383: note = bridgeRNA
caatgggatggactcctcctccccttaggggcacgctagtgccaaactggagtttccacacaaccagttttgaaagaggagtccaccatgaagcttatccgcgttggggtcgatctggcaaagaatgtcttccagattcacggcgtagaccgctttgaaaaagcagtttggcgcaaaaagctcagtcgctccgactggctaaagaccgtgcttgcagccgtacctacttcgtgcgagatcggcatggaggcctgcggcagcgcccaccattgggcccgcctgctccaaaagcacggctaccaagtcaaattgatcgctccgcagttcgtcaagccctacgtcaagagcaacaagaacgacgccaatgatgccgaagccatctgcgaagcgatgagccggcccagcatgcgctttgtggccatcaagaccgttcatcagcaagacatccaggcgactcaccgcatccgtgcagaactctccagccagcgcatagccaaggccaaccagatccgtgggctgacatccgagtatgggctggttgcccccagagagatcgctcaattgcgaatagccataccccactggctggaagacgacgagaacggattaagcccccgttttcgccggctgcttgccggtctgtggcatgacttgctgggcctggatgagcgcataaaggagctggacagggaaatagcgctgattgccgcatccgatccggttgcaaagcgtctgcagcagttaaggggcgttggtcccatcattgcaacggcgatggttgccaacgtaggcgatgccaagcaattcaagaatggcaggcagatggcggcttccttgggattaacgccaaggcagaacagctcaggcggcaaagaacgcctgcttggcattagcaagcgaggcgatgcgtatcttcgaacgctactgattcatggcgctcgctcgatgataaggaccgccaaggccaaagatgacagcttgagcaggtgggtattgaaaatagctgccacacgtcatcagaacattgcggcggtggcattggcgaacaagacggcccggattgcctgggcaatgattaccaaggggtcagcttaccggcccgagcttgtagcagcttgatcgttagactgaaagagtaaacaagaaggagtgtccagccgcgattgcaaggcaagttgttgatggcatacaggtcgaaccggcactagcagaacccgagaatgtccgtggcgtcatagcccgaagaagcgatagggagctggtgcgcgaatagcccattatggtccagtgctctaaagggagcgcagcagttagagaccggatatacgtgagcagtcgtaccaaaaagccaaaaaccaaccacttgcaattgaggaggagtccatata

SEQ ID NO: 5429 - DNA, 1406 bp, unidentified
  source 1..1406: mol_type = unassigned DNA; note = element_8543f06
  misc_feature 1: note = core
  misc_feature 2..275: note = LE
  misc_feature 276..1100: note = CDS
  misc_feature 1101..1406: note = RE
  misc_feature 1186..1400: note = bridgeRNA
taatgggatggtccgccgcctttacccagccagtagctgcggtataagaggcacacggaggaggcgtcccatggaactacacacgatcggcatcgatcttggcaagacagtgtttcatcttgttggtctcaacctgcgaggcgaagtagtggtgcgcaagaagttctctcggctgcagttgttgcgcttcacggcgaaccggcagatccagttgatcggcatggaagcctgcggcggctcccattttctcggccgtgcgctgcgagaacaggggcatgaagttcggcttgattccggcgcagtatgtgaagccatacgtgaagacgaacaagagtgactacatcgacgccgaggcgatagcagaggccgtgggccgacccacgatgcgttttgtgccgatcaagaccgatgatcagttggatctccagtccctgcatcgggtgcgcgagcgctgggtgatgcgtcgtacagcagtggtcaaccagattcgcggcttgttgctggagcgaggcattactctgcggaagggacgatgccatttggatgcagcgttgccagggattctggaagacggcacgagcaagctgtcgggcgcggtgcgcttgctgctggcgcaactgaagctggaactggatcagttggacatacggctcgaagaagccgatgcgctggttcagaagaccgcacagcagagcgaagtctgtcgacgcctggatgcgattcccggtatcggaccgcttacggcaacggcactggtcgcagccatcggtaatggagcggcctttcgcaagggccgggagttcgcagcctgggtggggttagttccgcgcgagcactcaaccggaggcaagcaaaagctgctcggcatcagcaagcgcgggaactcctatttgcgacggttgtttgtacaaggtgcacgagccgtcctgcagtttagagagaagcagtctcccggcctgagtgcatggttggcacagcttacagcgcgtacccactacaacgtcgccggtgtggcgttggccaataagctggcgcgcatggcctgggccgtgctctccacaggcgaagcctatcggccacctgtcctggcctgcagatgacgcctggccgaggccaggcttggaaatcgcatgcgcgattcccacatccgcagcccagctactactacgagttcatattttcctgccaggtctgctggcgaacaatgagatggcacaacggtcgaacccggcgctctgaaaacccgtatccggaagaagtcttcaagactgccaaactaatggggagaagaacgcagcgcattccatcctggccaggagctacagctccaacgaaggccgcatacatttgcgcagaccaacctgtcactttcacttttcgcttgcaacagggcggcggaccataca

SEQ ID NO: 5430 - DNA, 1188 bp, unidentified
  source 1..1188: mol_type = unassigned DNA; note = element_8544b89
  misc_feature 1..2: note = core
  misc_feature 3..195: note = LE
  misc_feature 196..1182: note = CDS
  misc_feature 1183..1188: note = RE
  misc_feature 16..202: note = bridgeRNA
cttgtattatcctcccgtacagaaagaaccggccagttctttctgtcaggcagtccacatgccgtacccggccttaggccacgagcctgtattgtagatccctgcagtggactgccccttctccacaagtgacaaaccggacagtatcatggaccggttttcccggtaacccgcattcacaaggttggtttcactatggaacaggaacttcactttattggtatcgatgtctccaaagctaagctggatgtcgatgtgctgcgacctgatggccgtcaccgcagcaaaaagtttgctaacacccctaaaggtcacaatgagctgctcagctggcttcataatcacggcgtggcaccagcccatatctgcatggaggcgaccagcacctatatggaagacgccgcggcctgcctcagtgatgccggtttcaccgtctccatcatcaatcctgcgctgggtaaagcctttgcgcagagcgaaggtctgcgcagtaaaaccgatgctgtggatgcccgtatgctggcagagttctgccggcagaagcgcccggcagtctgggaggcaccgcatccgctggagagcgcgttacgggagctggtactgcggcatcagtccctgacggacatgcacacgcaggagctgaaccgccgggagacggcgcgggaagtgcagatgccgagcattgatgcgcaccttctgtggctggaagcggagctgaagcgactggagaaacagataaaggacctgacggatgatgacccggatatgaagcaccggcgaaaactgctggacagcataccgggtataggtgaaaagacgtccgccgtgctgctggcgtatgtggggctgaaggacaggttcggtcaggcgaggcagttcgcggcgttcgcggggctgacaccgcgtcagcatgaatccggaagcagcataaacagggcaagcaggatgagtaaggcaggacatgtctcgcttcgcagagcgcggtatatgcccgcgatggtggcgctgtacaaaacggagtggggaaaagcgttcaggagtcgtctggaaaataacggtaagggtgcgaagctgataatcggagcaatgatgcgtaagctggcgcaggtggcgtatggcgtcctgaaatcaggacgcccgttcgatgccactctgcacgagaaaaatgcttgcgtggcataacagtat

SEQ ID NO: 5431 - DNA, 1232 bp, unidentified
  source 1..1232: mol_type = unassigned DNA; note = element_8555d16
  misc_feature 1..3: note = core
  misc_feature 4..251: note = LE
  misc_feature 252..1217: note = CDS
  misc_feature 1218..1232: note = RE
  misc_feature 27..207: note = bridgeRNA
cttgtatggtgtagcggggtgagtcgtgttgagctggagggcgctggggtgacggacagattcccgtttctgccattgccttggacagactgcgaaagtgctctgcaccccgtgcccaaggtcgataaggaatgcaacggccgcgcaagcggaccgtcgatcgctctgcaagcttacgtgtgcacggcctcaccccagcgctttgagcgtagtacacccgcgaacgagggaggtcaagatgagtgaagtcgatgagtgaagtcgattgtttcgccgccgatgtgagcaagcgcgagctggtgattgcgatttatccgggtggagtcggcgtcaaacgcatcgccaaccaggaagctgtgatcaacgcctggctggacacgctgccggccggcagcgtgatcgccatggaggccaccggcatctatcaccgccggcttgccgacttggctcatacgcgcggcttggtggtctatgtcgtcaatccccgcgatgtctactacgacgtacgtggtatgggcgctcgtggcaagaccgatccgagtgacgccaagttgctggcgcgctacgtggcccatgagcggatgcatctgcatccttatctgccgccctccgcactgtgcgagcgcttggttacgctgctcgaacaccgggcggtgctggtgcgcacccgccaagcactgactcagagcttggctgaattgcccgccctcggccgcgagaaacgcaatctgttcaaggccgtggctgcactgctgagcgggatcgatcgcgagctcgcggcgctcggctgcgccgatccgctgacggcaaccttggtcactcgcctcaaaaccatcagcggggtggagccgctggtggccagcctgctgtgcgctttgttcaagcgcttcgcctttcgccacgccgacgccttgatcgcctatctgggattggatccgcgccccgatgaatccggccagcattcgaggccgacgccgcctgtccaagcgcggtcaccccgagtggcgccggttgctgatcgcagccgccatgtccgccgcgcgtacccaggcttggcgcgattacgtcaacctgcagcgcgccaaagccctgcccgccactgcagtgcatgtcatcctcgcccgcaaaatgctgcgcacggccttctgctgcgcacggccttcgccctgttcaagaatggacaagacttcattcccccaagtgctcaacccacttgacaccaaccatagaat

SEQ ID NO: 5432 - DNA, 1344 bp, unidentified
  source 1..1344: mol_type = unassigned DNA; note = element_85585a4
  misc_feature 1..2: note = core
  misc_feature 3..81: note = LE
  misc_feature 82..1098: note = CDS
  misc_feature 1099..1344: note = RE
  misc_feature 1106..1340: note = bridgeRNA
ttaatgagatggtcagcccggcgagaacctcggcgagtctaaacttgccgaggcactctctttaccgaaggaggatctctcatggctaccgtgacgcttctgggtatcgacatcggcaagaacactttccacctgcatggacaggacgccaggggccatcaggtgctgcgtaaaaagctcaaccgcagccaattgctcccttatctggcgcagatttcgacctgcaaaattgccatggagtcctgcggcggttctcagtggcttgcccggaaaatcaaggagcaaggccatcacgtgcagttgatcgcaccgcaacatgtgaaggcctatgttaccggcaacaaaaacgacttcattgatgccgaggccatttgtgaagcggcctcgcgccctagaacccgttcggtccaagtcaaaaccgtagaacagcaggtgctgtgcactgagcaccgactgcgcaagtccttggtcagtcgacgcaccgccgtcatcaatcaggtgcatggatttctcctggagttcggcgtcatctttcccgccggatacgccgcccttgatcgggtctcgggcctgatgcaaagccgtgaactgcccatccgcttgataaacgccattgaacgcatgctcgaagatattcggcagctgactggcgagatcaaaagactggatgtcgagatcaagcaaagcctcgtccaaagcgacgccggccaacgcctgcaaagcatccccggcatcggccccctcatcgctagcgctctggtggccgatgtcggcgacgcttcggttttcaaatcgtcccgcgacttcgccgcctcgttggggttggtgccgcgacagtattcaacaggtggcgaaacggtcctcctcggcatcagtaaacggggcgataaatacctaagaagcctgctggtacagggcgcccacaccgttttgtaccgagtcgatcaccgaaccgacgccctcggcaggtgggccaaaaacctgctcgtccgcaagcctctgaacaaagtggcctgtgccctggcgaacaaaatggccagaatcatctgggtgttattaaccaagggcggcacctacaactcacagcttttggcttgatccgtacgcttcaccaccggcttttgcgacgtcagttgctgatgacgataaacggcagacatcctggctgaaaacctgataagcaaaagagctttggaaggctgaagcctttttcaaggacaggcaggagcgactactcatcaagggccgagcgctatccgtgctcacactgagcccgaatacattagcgcaagctcgatttaccgttcatccgtgctgggcggcagaaggtgggctgaccataca

SEQ ID NO: 5433 - DNA, 1402 bp, unidentified
  source 1..1402: mol_type = unassigned DNA; note = element_855b90e
  misc_feature 1..2: note = core
  misc_feature 3..118: note = LE
  misc_feature 119..1150: note = CDS
  misc_feature 1151..1402: note = RE
  misc_feature 1162..1397: note = bridgeRNA
agatgccgtaatgggccggccttcgcgagcatagccagattgggtggctgtccctcagaatgatggtgttgaaacggagtccgagcgatcggctccaagcatcatgagaggaacagccatggagcattatgcgggaatcgatgtctcactgaaagagagcagcgtgtgcgttgtggacgcgaccggaacgatcgtctgcgaggtcaagatcgccagcgagcctgaagcactggtccgctatttcgacgaactggaattgcctgtcagccgcattgggctcgaagccggtccattgtcgcaatggctgcatgcggggcttgtcgccgccggacgcgctgccgtgttgctggagacgcggcacgtgaaggcggggctgtcggccatgacagtcaaaaccgaccggaaagatgcgcgtgggatcgcccagttgctgcggatgggatggtaccgtccggttcacgccaaatcggtgacttgcaaggatacccgggctcttctcgttggccgcaaacttctgcaaggcaagcttctcgacgtcgaactgagcatccgtggaatcctgcgcggttacgggctgaaggtcggcgaagtcagtcgtggaaggtttgaggcgcgcatccgggaattgatagcgggccacgccactctggagacggtgattggcgcgatgctggtggcgcggacggcgttgtggtgcgcgttcaccaagctccatcgcgagatgctgaagatcgcgcgcgctgataaggtctgccggagattgatgagcacacctggcgtcggcgccttggtcgccctgacctatcgctcggcggtggacgagccgatgcggtttggaaaatccagtacggtcggagcctacttcggacttacgcccaaaaagtatcaatccggcgagactgatcgagatggcggtgtcagcaaggtcggcgacgccatggtgcgaacggcgctgtttgaagcggcgcacatcatgctgacgcgggcgacccgcttctcgagcctgaagtgctgggcgctcgacgtggcgaaacgtcgaggcatgaagcgcgccaaggtggctcttgcccgcaagttgggcgtcgtgctccatcgcatgtgggtggatgcgaccgagttccgttggagcaaggctgccacggccgcataggaggtagagcaggttcggagcgagccgaaacggcaccgcttctacagaggtcccgtcgccgggacgagagcttggcaaggtcgtgtgtgatgctgtgaatgcttcggcagatcacgcttcttagattgacctgtcagcttaaggatctgatggcatggtgtggtggccttcgcgctgaccacggacagaagcatgatcctggcgatgagatgtcgttcagaggggacttgacgaacgaaggcccattacaga

SEQ ID NO: 5434 - DNA, 1591 bp, unidentified
  source 1..1591: mol_type = unassigned DNA; note = element_855db92
  misc_feature 1..4: note = core
  misc_feature 5..261: note = LE
  misc_feature 262..1440: note = CDS
  misc_feature 1441..1591: note = RE
  misc_feature 22..246: note = bridgeRNA
ctcctatctttaagtcgttgcatttttgagcctcttatcgaatgcttatggatgcaatgcagattctggcgggcagggttgccgacatggcatgtgagagcgctgcttctcgtaaaggagtctggcaacctgccccattcgggcgaggccgcggataagctggatgaggccggcccctgggccgttcctcggatctcttctaggaggttgcggtcccgggtgcggtagcaggagcccgccgcccatcggaagggagaccccatgatctacgcaggtgtggacatcgccaagatggaccacgtgatcggcgccgtcgacgagacgggggccgaggtcgccaggcccatggccttcaagaacaccgaggccggcttcgagaggtgcatagcgtggctcgagtccgtcgccgagtccgaggacgacgtcttcgtcggcatggaggccaccggccactactggatggcctgcttcgcctacctcgtggccgcgggctacagggtctgcgtcgtcaaccccatgcaggtgcacgccatgcgcaggctcaagggcctctgcggggtgaagaacgaccggatagactccgccctcatagccgagacgctccggcagggcgattacgaccagaccgggctcgccaccgacgaggtgcaggcgctcaagcggctcacgcgctaccatcaggggctcaagcaggagctcgcgaccgtgaagacccaggccatctgcgtgctcgacgcctacttccccgagtacgcgggcctcttctccgacatgttcgggaccgcgtcgctcaaggtgctcgccgagtgccccacgccgtccgaggcgtcccgcaagcggacgtcctcgatagcgaggctgctctcggagggctcgcacggcaggctcggggccgagagggccgccgagatcaagtccgcggcgaagtcgtcggtgggcatcaggctcggagaggacgccgcgccgttccagataaagacgatggtcacccaggtcgagttcctgaaccggaccatcgccaaggtggagcgcgaggtcgcgtcgctgctggagaaggtcgagcccaacatcaccaccgtccccggcatatccacgacgacgggcgcccagatcgtcgccgagatcggcgacgtcaagaggttcaagggcgccgcctcgatcgtgaagtacgccggcctcaactcgggcgtcgacgagtccgggatgttttccgccgagggggttcccataaccaagcacggctctccctacctgcgaagatcgctctggctcgccgcgaaccgggcgcgccagtacgaccccaggctcaaggccttctacgacaagaagcgccgggaggggaagccccaccgggtggcggtgaccgccgtcgccaggaagctgtgccacgtggtctatgcggtcatgcgcgacggggagccctacgacccgagcaagtagggcggcccgattgcggcctttcccacatcgccgcggcgatgcgccccattgcgcccaaaagcattcgatattcggctttcaaaatgcagattccagtaaattcgaaactctcaattctttacggtttcgcccttgacttcatatagctggt

SEQ ID NO: 5435 - DNA, 1280 bp, unidentified
  source 1..1280: mol_type = unassigned DNA; note = element_8560622
  misc_feature 1: note = core
  misc_feature 2..189: note = LE
  misc_feature 190..1158: note = CDS
  misc_feature 1159..1280: note = RE
  misc_feature 29..198: note = bridgeRNA
ttgtatgaagcgacaggagcatagtgaggggtgacgggggtcggttcatgacaccgcccccgttgcgaccggaagcccgcagccgtcttggatcccaaaccgcgaatgagcttggagctccggtcgcttcttccatacccgaacagttgcctgggcacgagcccgcatcagcaaggaaggggtacgaagatggctatgctttcgttttgcggaatcgatgtgtcgaaggatcgtctcgacgtcatggtgttgccggagcaccaaagcttcgcggtgcgcaatgacgcctccggttgggccgaactgatcgcgcggttgcgccgcttcgcgatcgcggcgatcggtctcgaggcgagcggagggtacgagcgcggcgcgatgcgcgccctgctcgctgccggcatgccggcgcgccgggtcaatccgctcaagctgcggcagttcgcgcgagcgagtggggttctggctaagagtgatccgctcgacgcgcgtgtgatcgcgaccttcgttgccatcatgccgacgcagccggcgcagcctcgcccgccggcaatcgaacggctggccgagatgctggcggttcgccgccagctcagcgccgagaaggtcgccgccgagaatgcctccgcactgctggaagatgcgatgctgcagcggttttctcgccgccgcatcgcaaggctcgcggccgatatcgacatgctcgaccaccacctggtcgagatcgtggaaaccgatgccgcgctcgcccatcgctaccagctgctcacctccatgccgggcgtcggaccggcgttggcctgcacgctgattgcgctgctgcccgaactcggcaccatgagccgcaaacaagtcgctgccctcgtcggcgttgcgccttacgccttcgacagcggcaagcttaaaggaaggcgttgcatctggggcgggcgcgcgcccgtccgtcaggtgctctacatggcagcaatgagcgcgggcaattggaatcctgtgctcaaggcgttccgccagcgcctcaaggccgccggcaagctgccgaaagtcgtcatcgttgcggtcatgcgcaagatgatcaccatgctcaacgcgatggttcgcgacgacgttgtttgggccgaccatcttcacggtcggcacactgtgccgaccgcttggtagccactgcgctgattgatttgggcgggtcaaggccaaagccgcgcctagcgcgggggcgcgaagcgccagccttgacgcgaccaaatcaatcagcgatcgccccgcgacaaaatgacagttgc

SEQ ID NO: 5436 - DNA, 1385 bp, unidentified
  source 1..1385: mol_type = unassigned DNA; note = element_85615d4
  misc_feature 1..3: note = core
  misc_feature 4..87: note = LE
  misc_feature 88..1113: note = CDS
  misc_feature 1114..1385: note = RE
  misc_feature 1087..1372: note = bridgeRNA
agatggggtggttgccgccctccccagacggcatcgcaatgtgccaggatagtggtctgagaaccacatagcggagaggacggcgagatgaaggatacgataatcggggtggatttggcaaagcgcgttttccaactccacggttcgacgacgactggacacgtgattttccgcaagaagctaacgcgcgaacaatttcggcggttcatggctgaacatcccccctgcctggtggtgtttgaggcctgcggcagcgccagctactgggcgcgcgagatggctaagcttggccatgatgccaagctcattgcgccgcaatacgtccggcctttcgtgaagcggcaaaaaaatgatgcggctgacgccgaggcgattgtgatcgccgcgcgccagcctgagatgcggttcgtcttccctaagacggaggatcagcaagccaaggcgatgttgttccgcggccgtgagcgcctcgttcatcagcgtaccgaactggtgaacgccctgcgggcggtgctctatgagtatggacatgtgtttcctgccggtatcggtcatctcaagcggatcgaagcgctgtttgacgaccctacctgcgacctgccgatcctgatcatcacggaatgccgtgaccttctggcgcagattgccgagaagactggcaggatcgacgcgaagacgaaagctctgaaggcgctggccgcagagactgatacggcgcgccgtttgcaaacgatgccgggtgttggccctataactgcgctggcggtcgaggccttcgcgccggatatggctcagttcaaatctggccgggactttgcagcttggctggggctcgtgccacgtcagcattccactggtggcaaggcaaggctcgggcggatatcgaaagccggtcaaactgatatcaggcgccttctaattatcggcgcgatgacaaggatcatgggacgcgcacgacacaaggtgccagccgagagctggatcgggcggaaattggcgagcaaaccgaagatgttggtcgggatcgcattggccaacaggatggcgcgcgcgatctgggcgatgctgagaaaaaatgaagattacagagatccgacgctggcggcggcatgacttccatgttgtgatcaccacagcgacggtgccaagggggtgtgagaagacgacgatctgaatgggcaaaacgatcgaacagatccggattcggaaaaccagttgaactctatgggcaccaagcccgttacacagatttggacccgatccgctgatcaccatcccggcccgcggcttctgaaagtgccgcacatcgaggcctgacagaagttcgcactcgatcacatgccaataaggtcaaaacttcttgcactacgggcggcaaccacaga

SEQ ID NO: 5437 - DNA, 1439 bp, unidentified
  source 1..1439: mol_type = unassigned DNA; note = element_8566a05
  misc_feature 1..2: note = core
  misc_feature 3..227: note = LE
  misc_feature 228..1424: note = CDS
  misc_feature 1425..1439: note = RE
  misc_feature 9..223: note = bridgeRNA
gctctaccttccttttgggttcgtcccagccattcgtagggttgtggcacccaggggaaccgggtgtggctttcatgcggctgccgtccgtggctctgtgggcttggccgcccggttccccacgacgactcggccgccgattgggaagtgcgagaaggtcgctgtgtagagcaatgccggcgaggtcgtccgtggtacgcaagacaggaacgacctgatggagagcgatgagccggatatgggcggggaccgactgcggcaagacccaccaccacacgctggttctggacgtcgagggcaacacgctgctgtcgcggcgggtggcgaacgacgagccggagcttctccagctggtcgccgacgtcctggaccttgccgacggtggcgcggtgacctgggcgatggacatgaccggcggtgaaaccggcctgctgatcaacctcctggccaaccacggccaggagctcctctacatccccggcgtcgcggtcaaccgcgccgcagacagctaccgaggccagggcaagaccgacgcccgcgacgcccacgtgatcgccgaccaggccaggatgcggcgcgacctgcttcccgtccgcctcgacgacgagggcatcatcgaactgcggctgctgaccgagcaccgtgcagaccttgtcggcgagcgcacccgcgtcaccaatcggctccgtgccctgctgaccagcatgttcccggcgttggaacggaccttggacctcggcaacgccggcccgctgcggcttctgaccggctaccagacaccagcggccattcgccgatccggcaccaagcggctgacgacctggctccgcaaccgcaaggtctacggcgcggaggcgctggccgccaagactgtcgaagcggctgagcggcagcacaccgccgtcgccggagagaaagccatcgcccagatggtccacaccctggccgaggaggtgatcgccctcaacgagaagatcgcggagaccgacaagctcgtcgagggacggtttcgggagcacgaactcgcggaggtgatcacctcgatgccgggcgtcggctccaccctcggagcggagttcctcgccgcaataggcggcagcctggccgctttccccactgcggatcgccttgcggccttcgccggagtcaccccggccccgaaggactccggcaaggtcagcggcaacctccatcgcccccagcgataccaccggggcctccagcgggtcttctacacctccgcgctcatcagcatccagcgcgacccaaactcccgcacctactacgaccgcaagagggccgaaggcaagcggcacgtccaggcagtcctcgcactcgcacgccgccgcgtgaacgtcctctgggcactcattcgtgacggacggtgctaccaaatcgcacctcctgtcaccgaagcggcttgacatcagcattgggaa

SEQ ID NO: 5438 - DNA, 1347 bp, unidentified
  source 1..1347: mol_type = unassigned DNA; note = element_8568464
  misc_feature 1..2: note = core
  misc_feature 3..78: note = LE
  misc_feature 79..1092: note = CDS
  misc_feature 1093..1347: note = RE
  misc_feature 1080..1334: note = bridgeRNA
tgttggagtggacggcccccgacggcatcgagtgtgccaggctgtgatgttgaacaacgcagccaagggagccgcccaatgacgattatcaggattggcctggataccgccaagcatgtctttcaggtacacggcgtcgacgagaacgagcaggtggtatttcgccggcagcttgggcgcagcgagatggagaggttctttgccaagctgccggcgacccggatcgggctggaggcgtgcggcgcctcgcattactgggggcgcctgttgcgcgggctggggcacgaggtcgtgctgatgccggggcaatacatcaagccctatgtcaagcgcggcaagaacgacgcgatcgacgcggcggcgatctgcgaggcgatgagccggccggggatgcgctttgtgccgatcaagagcgcggagaaccaggctgccctgatgctgctgagcgtgcgcgatttgctggtcaagcagcgcaccatgctgatcaacgcggttcgcggccatgccgcggagtttggcgtgatcgcggccaagggccggggcaacgtggccgaactggtgcaacgagcgcatgccgaggaggccggcgtgccggccctggcgctggcgctgctcagggtgttagcgaggcagctcggtgcgctcgacgtcaagctgaaggggctcgaggccaagctgatgacgctgcacaggcaagacccggtcagtcagtgtctggcgacacagcccgggatcggtccgatcggcgcggtcagcttctcgctcaaagtacccgatcccaaggcgttcggttcggggcggcactttgccgcctggctcggtatcacaccgaaagagaattcctccggtggccgacaccggcagggtcgcatcagccggcaaggcgatgaaggcttgcgccgtctcttggtgcttggcgccactgccgtcatccgctttgccaagtcaggccgggcctcgccctggctgatcaacttgctggcgcggcggccgcgcaaggttgccgccgtggcgctggccaacaagatggcccggacgctatgggccatgatggtgagcggcgaagtctaccgccggccgcttgcggcctaacccgctcacgatcgcgatgcaacctggcgcttgcacggacagcagcgagatgggcaatcggtcgaaccgaggatcggaacaccccgctaaaccctgtggggccccaaccccgctaggatgtttgggatccgatccgcgtaatccatctgggccagcggtcgatccgaccgcacacacaggccggacacatgaccgcaatcgaccagacccgtcccagccgcaaaaagtccttgcacagcgggggccgtccacaca

SEQ ID NO: 5439 - DNA, 1390 bp, unidentified
  source 1..1390: mol_type = unassigned DNA; note = element_8578dcd
  misc_feature 1..4: note = core
  misc_feature 5..82: note = LE
  misc_feature 83..1108: note = CDS
  misc_feature 1109..1390: note = RE
  misc_feature 1159..1379: note = bridgeRNA
atgatgatgtggacgaccccaccctaacggcatcaagtgccaagacgtggtcgccggagcgccaccaacggggagaccgtccgtgaagaagtttatccgaattggcgtcgacttggcgaagaattttttccaggttcatggaattgtccgcgaaggggcggaggcggtgagccggaagttcacgcgaacgaagttcagggagttcttcttgagcgtcgctccttgccgggtgggcatggaggcgtgcggatcggcgcattattgggcgcgcgagctgaggtcgatggggcacgatgtcgtcttgatcgcgcccgcctacgtcaagccctatgtcaagcgcggcaagaacgacgccgccgacgcggccgcgatctgcgaggcgatgtcacggcccgacatgcgtttcgtgccgatcaagagcgcggatcagcaagccgcgctgatgctgcacaagacgcgggaactgctggtcaagcagcgaacgatgatcgtcaacgcgctgcgcggtcatttgtcggagttcggcttgatcgccgccaagggcatccagcgcgtccatgagttggtcgctctggccctgggcgaggaagggcttcccgaggcggccagacaagccgcggccctgttggcggaacagagcgagcaactggaggggacgatcgacacgttggaaaagaaaatcgccgaaaccagcgcgaaatatccgatggtccgcttgttgaaggaaattccggctatcggacctctgatcagctccgcgatggcggcgagctatcccgatccgggcgtgttcgcttcgggtcgcgatttcgccgcttccctcggcctgaccccgagccagcactccagcggaggcaaggaaaagctcggctccatcaccaagaaggggaatcggtatttgcgcaagatgctggtcgtgggctgcacctcggtgctgcgcgtggcccataaatacaaaggcgcgttggccgagtggatcgtcgcgatcaaggccaggaagccggagcgcgtcgccgccgtcgcgctggcgaacaaactcgcgagaatctgttgggcgatgctgtcgacgggcgaaggattccgtgaagagctctacaccagggcctgaaaacggctcggcgagacaaaagaggctatcgacaaggagttcaatcgttcaaagtttggcaagcgccgagacgtgatgatcctaaacggtcgccaccgaaaatcgaggacaccccgacactcgtcatgaacatccagttcgtcgcaatgatagggaccaagattgtcggatatcatcagggccagcggattgtatccgcgccaacaggccggacatatgaccgcagccgaccatgaagatcaaaacgtcaaaatttcgcttgccaaccggggccgtccacat

SEQ ID NO: 5440 - DNA, 1439 bp, unidentified
  source 1..1439: mol_type = unassigned DNA; note = element_857a28c
  misc_feature 1..2: note = core
  misc_feature 3..137: note = LE
  misc_feature 138..1157: note = CDS
  misc_feature 1158..1439: note = RE
  misc_feature 1198..1439: note = bridgeRNA
gaatgaaatgaacgtctcccaccctcgcgatccacgagcgtgggaggctcaggaaggtggatcctcacgggccgacggcatcagagtgtccaagaggaagatcattgaggtcttcacaggcaaaccggaggatcctcatgaagcttacgccagttgggattgacatcgcaaagtctctgtttcaggtccaccacgtgaatatggaaacgggtgaggttgtgaataaggcaatcaagcgcgccggattcctcgagtattttgcaaaccggacgccatgtctgatcggcatggaggcatgtggcggctcacagcactgggcacgcgagttggagaagatggggcatcaggttaagttgatgccggcgcgcttcgtcaaggcgttcaacatcggcaacaagaacgacgcagcggatgcgagagcaatatggctcgcagtgcagcagccatgcaaagcagtcgcggtaaagaccgaggatcaacaagccgtactggcgatgcaccgaatgcgccagcaactggtgaaggtccggaccatgcagatcaacgcgctgcgcggtttgttgaccgaatacggtgaagtaatgggcacgagccgtgcggcgctcgataaagggatatctggagtgctggagcggctcgctgagcgcctaccggcgatgctgatcgacacgctacgtgagcagtggaatggtctggcgaagctggacgaacagatcgcgacaatcgagaggcggctgagaacatggatgaagcaagatcgggcgtgcgcgactatcgctgcgataccaggaatcggattgctcacggccaccgcggcggtggcaacgatgggagacgcgaaggtgtttagatctgggcgggaattcgcggcatacatcggattggtaccgaagcagtcagggtcgggaggcaaggtcaatctgcagggcatcagcaagcgcggcgacacgtatctgcgcacgttgctgattcacggtgcgcgcagtgtgttggcaaacgcaaaagatcccggaccatggattgagcaaatcagaaagcgtcggccaccgaatgtggtgatcgttgcgttggctaacaagatggcacgaacgatttgggccgttcttgcacacgaaaagccgtacgagaagacctacgtgagtgcaaagccggcatgatgggctttgccgcgtagaagatcaacgttctgcagaggggagaactgtcgaaaggttgcgcaggcgttttgcgtgtgatgacgaaccaggtaagaccgtgactcgccaagcctgaactggtcgtagagtctcgagctcgccggaggaatgaggcacgagtcagcggatttcatcggggcccgcagcgggagtaccggctgcaagaaggccggatatagagctgcaacccatcctgtccgtcaacgcacaagaaaacctgcacaaacgggagacgttcatata

SEQ ID NO: 5441 - DNA, 1245 bp, unidentified
  source 1..1245: mol_type = unassigned DNA; note = element_857cf2d
  misc_feature 1..2: note = core
  misc_feature 3..240: note = LE
  misc_feature 241..1230: note = CDS
  misc_feature 1231..1245: note = RE
  misc_feature 21..176: note = bridgeRNA
cttgtatgtttaacacataaggcttgttaaggttattacagttatcggggaaaccgtaccctcctggaggcagtaaaatctgacctcgtgtgtagataggttccccgcctcattacttatctcgaagagtatcaagaagctgtataacagacttcgcattacaaggaagagaaagtaaaaaatgcgaggtcgggaaaccgataacgagtatgacaagtgtttagatgatagggaatccttatgtgccacgtcggaatcgatatcgctgcagcttcatttgacatggttgttcgcaagggcgaccagaacgaaaaggtcatcaccttcaaacaatcagcggcaggctttgattctgcaattgaaaaattgaaggggtgtaaaccaatttcgatcgtgatggaagctacaggcatttattatttcgatctcgctcgggctttaaataaagcgggcctacccgtctgtgtgatcaatccaaaaagctttcgccactttgctgagctgaggatgaagaccaccaaaacagatagcgttgatgctgcattgctggctgattttggtcaatgcatgaaacctcggcagtggattgctccagacgattctgcggtggctctccgagatattggtcgacaaatcaatcggttaacacaccagaaaacgcaagcaaagaaccggcttcacgctttgcaggctaagtccaacactcaagcgtttattatcgatgacgaagttgatggtatcgagcatttagagcgccgaatacagcgactgacacaagcggctaaagatcaaatcaaaggttccgagagtctatcgactcctttcacgaatttgacctttgccaatggggttggtgaagcgtcggggctagctatactcgctgagttgatagtactgccacgctgtttgaaagcacctcaagtggctcgatatgcagggttagatgtgcggttaacgcagtccggcacgagcgtgaacaaacccggccgcctgaacaaatcaggaaatagctacctgaggtcggcgatgtatatgccggcattgagtgctagtcgatgcgatcctaatgcgcgcgctttttatgagtcgctagtggcgcgtggcaagaaaaagaagcaggcaattatcgccatcatgagaaaatatttgatggggatttgggcttgtattcaaacaggaaagcctttcgacgcttcacttttattcagtgaagctcacttgaaaggttgactgagaacagagtat

SEQ ID NO: 5442 - DNA, 1411 bp, unidentified
  source 1..1411: mol_type = unassigned DNA; note = element_8580d38
  misc_feature 1: note = core
  misc_feature 2..92: note = LE
  misc_feature 93..1124: note = CDS
  misc_feature 1125..1411: note = RE
  misc_feature 1180..1403: note = bridgeRNA
caatgggatggacgcccccacctctaacggcatcgtgatgtgccaaagtggagatgtctatcaaccacttgaactgagaaggagcgtccaacatgaaggttactacagcgggaatcgacctggctaaaaatgtgttccaggtgcatggcgtggatgagcacggcaagactgtgctcaagaagcaactcaaacgcgatcagatggcggcgttttttgccaatctgccaccttgtctgattggcgtggaggcctgcggcagcgcccaccactgggctcgaaagctccagagctttggccacaccgtcaaactgatggctccccaattcgtcaaaccctacgtgaagaccaacaagaacgatgcggctgatgcagaggcgatctgtgaggccgtgcgccgccccaatatgcgctttgttccggtcaagaacgtcgaacagcaagcggtgctggcgttgcaccgtgtgcgccaaggctttgtgaaggcgcgcaccgcgcaggccaaccagattcgcgggctgctcagtgaatttggcttgatcatcccggtgggcattgtcaacatcgccaaacgggtgcccgagttgattgaggatgccagcaacgagctgcccggttcgtttcggttgttgattgaccgcctgatggatcacttgaaagaactagacacccaagtcgacgaaatggaggcgcaggtggtggcttggcaccgtgccagtgcgaccagtgtcaagctacagaagattccaggaatcggtccgatcacggccagcgctctggtggcttcgctgggcgatgccaagaactttgacagcgggcggcaagtggctgcctggctgggtttggtacccaggcagcattccagcggcggcaagaatgtgttgttgggcatgagcaagcgtggcgacacgtacttgcgaacattgctcatccatggtgcgcgtgcggtcattcgggcggcacaagccaagcccgataaggagggatggttgcacaagctgctggccaggcgcaatgccaacgtggctgcagtggcgttggccaacaaaaatgcgcgcaccgtgtgggccttgctggcgcacggcaggcagtatcaacccggctatggtgttgcatgcgcagcgtaggcggctaagaagttaaagcctacgcaatccgataaacgagacagagagtattaccaccgattgcttcaagcgatcatgaagtgatggcacaacaggtcagaccgtgaccgacaaagctcgcctcagctgcggcacttcgagtgcgtcttagcgattgagccgtcggtcagcaaatcccatcagggacagtgaccaaaagtcacaccaaaagtccgaatgtacgggtgcaatctttaccttcgcgtcatcatgaattgagaacttggcaaaccgggggcgtccatgta

SEQ ID NO: 5443 - DNA, 1356 bp, unidentified
  source 1..1356: mol_type = unassigned DNA; note = element_85822ad
  misc_feature 1: note = core
  misc_feature 2..73: note = LE
  misc_feature 74..1099: note = CDS
  misc_feature 1100..1356: note = RE
  misc_feature 1104..1346: note = bridgeRNA
tatgggatggcccgcccctctcgggagcgatcggttaggatcgctctgtttcgaaagagagaggaacggaccgatgtcgatcttcgtgcttggtattgatcttggcaagaacgtgtgcagcctcgttgggctggacgagacaggcgcggtggttctgcgccgacgtcttcgtcgcgatggcgttgcggatttcgttggcaccttaccggcttgcattgtggcgatggaagcctgctgcggtgcgcactacctgggccgcgtgctcggcgctgctggtcacacgatccgactgatgtcgccggaatatgttcgcccttatgtgaaggcgaacaagaatgacgaccacgatgccgaggcgatcgcggaagccgcgacgcggccgacgatgcgcttcgtgccggtcaagagcgagccgcaatcggacatccaggccttgcatcgggcgcgctcgcgcctagtgacggaacgcacggcgctgatcaatcatctgcgagcgctgttgctggagcgcgggatcatagctccgaaggggcgcaagcagttagaatctcagctggcagtgtttgcggacgaggccgatccccgactatcgccacgcatgcgccggctcattgaggacctgcgcgccgaatggcgcaaccttgatgggcggattgccgccttcgatgcggagttcgtggcaatggcgcggaaggacgaaatggcacgccggcttgcgacgatcccagggatcggcgtcatcaacgccacagcgcttgttgccgcagtcggtgacgcgcgcagcttcgggcgcggccgcgacctttccgcctggctgggcctgaccccgcggcaggcgaccaccggaggcaagccgagactgctcggcatatccaagcgcggcaaccgatatttgcgcgcgaacctgatccatggcgcgcgtgcggtgctgccgcgcatcacggctcaggacaccccgctcggccggtgggtccgcaatctatcggagcgaacgcacaagaatgttgtcgtggtggcgctggcggccaaactggcccgcatcgtctgggcggtgctgcgcaagggacaaggcttcgatccggcgatcgcggcggtataggcaagtcaagggcttcggccacagagctggagccacaactatctgcgagtggtgagaagaagatggcctgacagtcgaacggcagcctggaaacctggacccactgaacggtcgatcgagaccgctgtgattatgaggaccaggctgcgcggatctccatcttggccggggagcaacgaccccgagaccggatacgttgacgcagactgataagagcaatcttcaaaataccccttgcagacggggcgggccatacg

SEQ ID NO: 5444 - DNA, 1201 bp, unidentified
  source 1..1201: mol_type = unassigned DNA; note = element_858567f
  misc_feature 1..2: note = core
  misc_feature 3..232: note = LE
  misc_feature 233..1198: note = CDS
  misc_feature 1199..1201: note = RE
  misc_feature 27..207: note = bridgeRNA
cttgtatgttcatctacggcaagcgtagtagtggacgcttatcgggcggagggacgagcgccgcatctgacggcaagcacgtacagacagtgggagagatgtcccgccttcacccccgagcaccgatgaggaatccttcggaccgcgtccgtcacggtaccgaccatatcctgcaagcctgtgcccaggtgaccccgacaagcccttcaaccatagtccggaggtgctcatcgtgacaagtcagaccgaatccccccgctttggcatcgacgtctccaagcgctggctggacatcgccgagtacggccgctcgccggtgctgcacatcgacaacaccgcccaggccatccgcggctggctgcgcaccttgcccccgggcgcctgccacatcgcctgcgaatccaccggcacctaccaccgcgcgctggtcgagctgctcatcggcgccggtcatcgggtgtatctgatcgacggctacacgctgtccagataccgcgacacgctgggccagcgtgccaagaccgatcggcacgacgcggggctgatcgcccgctatctcgcccacgaaggggcgcgtctgcgcccgttctcgctgccgccccgtgcggtgaccgacctgcgcgccctgttgcgccgtcgcgccaccctggtgcgttgcctgggccgcatgcgtcagagcatggaggagctgcccggcttcacccgccaggtgcgggccgtcaccgagcggatccaggcgctgatcaaacggctggagcagcgcatcgccgcgctgatcggcaccagcggctggggcgacccgtaccggcgcatcctgaaggttgaaggcatcggcacactcaccgccgccggtctgtgcgccaccttccaccgcgccccattcggccgggccgatgccttcatcgccttcctcggcctggatgtgaccgtgcgtcagtcgggcacccagcgcggacgcggggtgctcagcaagaagggcgatgccgagatgcgccgcctgctctacaacgccgccatggccgccagccgatccagtacctggcagcccttctaccagcgcatgctccagcgcggattcagccgcacccaggcgctggtcgctctggccagaaagctcgcaagggtcgccttctcgctaatgaagaacgcctccgactacgtccctcaacaacacgaaaacgcttgcgctcaaacatagaat

SEQ ID NO: 5445 - DNA, 1627 bp, unidentified
  source 1..1627: mol_type = unassigned DNA; note = element_858664b
  misc_feature 1..3: note = core
  misc_feature 4..113: note = LE
  misc_feature 114..1139: note = CDS
  misc_feature 1140..1627: note = RE
aagatgccatgtgagggggacctccccggcgtcggtcgtagcagtatctacgacatgcgggcttagggaacggtcccttgtcccaatttggtaggagctcgaggaggtccctcatgagcatcgtaggcgcatttgacgtgcatcgccgccagctcacattcgagtacctggactccagcaccggggagctgaagcgtggccgggtgatcccggccgaccgacagcatctgcgcgcgtggctggcccggttcgacgggcagggcgaggtccacttcgcgctggagggctgcaccggctggcggtacgtgacggaggaactgctcgccgccgggatcaccccgcacctggccgagccggccggcaccgccgcgctgcggggccgcaagcggcacgccaagaccgacaagaccgattcccggcacctgcgggtgcacctgctggccggggacctgcccgagtgctggatcccgccggagcacgtgctggaggcgcgggccaccgtccggctgtacaaggacctgctcgatgagcgcggcgcctggcatcagcggatcgccgccaccttgttccaccagggcgtcccggtgatcggctcgatggccaagcctgagggccgggccgcggttgagcaggtggagctgtccccggccgggcggcaggccgtccagaccgggctgcgccagatcgaccggctcaccggcgagctggacccgctgcgccgccagctgggcatgctgtcgcgccgccagcccggctgcgcggcgctgcgtgccactcagttcggcgtcggaccggtcacctcggtggcgatctgggccgagctcggggatgtccgccggttcgccaactccggcgatgtggtccgccacaccgggctggacatcaccgtgtactcctccgataccaagcgctccgccgggcacctgtcccggcagggaccgcagctgctgcgctgggcgctgtatgagtcggccaagtgcgccgcccgcccggccgccccggattacggctactacaccgcggcccgggaccggcgcaccgccgggctggccaccttgtcggtggcccgcaagctcgcccgccgctgctaccacaccctgcgcgaactcggggaggaggcactgcggcctgccgcgtgagccggcccgcccgccccgccgccgcgcccgcaccgatgaacttgcggccggctcctgccaccagcctgctgcccgggccctgacctgggccagcctccaaagaatgagcggccgcaaccccccagccggggcacccgatcacgcatcatgtcgccggagccaggcagaacggctccgcgcaccgagataaggctgggcgcccggcacggcgggagccgccgaacgcggccatcccaccccactgcccggcggagagaggtgcaccccaatgacctgaccacacccggatctgcttcctcgccgtcctatggtcggggccggatggcccggcgtcaaggtcgttcgtccgcggggcgctccaccttgacccccgggccatccggcccgcgtaatcggcagctatgagcaagcaggcagacaaccagtcacccatggcccgcaaccccccgatgagcgctccgtcttgaccgggccggggcctcacagat

SEQ ID NO: 5446 - DNA, 1569 bp, unidentified
  source 1..1569: mol_type = unassigned DNA; note = element_85891dd
  misc_feature 1..3: note = core
  misc_feature 4..244: note = LE
  misc_feature 245..1420: note = CDS
  misc_feature 1421..1569: note = RE
  misc_feature 3..223: note = bridgeRNA
cttgtattatatatttgtagtatttaagcccatccccaagggctttgatgctatactgttggggatactgtggactggttctcacctcctaccacttgatggtttaaataaggctccagccacagctctctgtatagttgttgatcagttagataccgcatgacggtttatgtagaacaaggttacgctagcagtgagtaagtggtcctaaacagtatcaaatacttttcaaggaggtctcactatgatctacgttggcatcgatgtcgctaaggacaagcacgattgctacatttcggactctgatggagtggaactttatgcgcctttcataatctccaataccaaagaaggatttgaagatcttttcttaaaaatcaagcaggtcactgatgatcttaccaaagtaaaagtagggcttgaagccaccggtcactacagttacaacatactcggtttcctgctcgacaaggatcttaatgtttccctcattaaccctctccataccaatctgttcagaaaaagtctaagccttagacagaccaaaacggataaagtcgatgctcgtaccatttgtatgatgttgtcttccggtatggctcttacgccctactcaaaagaatcataccacatggacgagttaaagtcactaacaagatatcgttttgataaagttcgtgaacgtgctaagctaaaaacttcagtcacaaggcttgtaactatccttttccctgagctggagaaacttgtccccacacttcatatgaagtctgtttatgcgcttctttatgagtttccaggagcccatcacatagcttcctgccatctcacaaggcttaagaagcttctttcaggcgcttccaaaggacgttatggcagagatgttgcgatcacttttcgtgacgctgcaagaaactccatcggctcaaatatgcctgccaaatctcttgaactaaggcatacgatcgatctgatcagaaagttggatgaagagatcaacgagatcgaagcatccataaagatgatcatggatgatatcgattcaccgatactttcgattcctgggatcagttatcgcatgggagctatgatacttgcagagcttggtgatatcagaagattcagttctccggataagatccttgcttatgctggtatgtctccttcaacttaccagtcaggtcagctgacatcctcatactcacacatggagaaacgtggttccagatatctgagatatgctctgttcaacgcaacaaggttcgtctgcaactgggacgaagcatatggtgaatacctggcaaagaaacgtgctgaaggcaaacactacaatgttgcgatatcacatgctgccaagaaacttgttcgcctcatctatcatcttatgatgacaggagaaacatacataccagctgcttaagcttctttctttgttctttaagcatcctcgtggatgctgttttgtcatgcagttttcaaggttcaaaactatactttaccgcttattcagactaacttcacagcagcggaaggattcgtcatatttacccttgacttttaatagttagt

SEQ ID NO: 5447 - DNA, 1528 bp, unidentified
  source 1..1528: mol_type = unassigned DNA; note = element_858a54c
  misc_feature 1..2: note = core
  misc_feature 3..253: note = LE
  misc_feature 254..1480: note = CDS
  misc_feature 1481..1528: note = RE
  misc_feature 51..231: note = bridgeRNA
cttatattaggtctgttgcagatattcctattggagatcatgtttatgtgacaccgatttcaagagcttgctggaatgaggaccatcttcgcctgatccctctgacgaggatcaaccacagactgtcccgtccagtaagagaacggatctgaggttcaatagaaagttgtccctttgttgaggacttatataaggcaaactttccgttcaaagctattggaatcggcagaacacaaccaaggaggaacagagagtgaagcgatactatgtgggagtggattgggctgatgaatttcaccaggtatgggtcagcgatgccgagggcaacaaagtagccgagatgacggttgagcagagtccccagggcatgggcgagtttggccgttggctccatgaacgtcaggcagaacagatagagctgtgggcggccattgagaagccccaggggcggattgtggattttctgttggatcacggggtggtggtctatccggtcaaccccaaggccctggatcgggccagggaccggtttcgcatgagccaatccaagagcgattccttcgatgcttatgtgttggcgcaatttcttagaaccgatcatgttcatttgcgcgctcttgagcccgactccgagcaggcgcaggagcttaagatgctcacccgggatcaccaccggctggggcggcacaagactcggctccttaatcagatcgaggtgacgctcaaagagtattaccctcggccgctggaagtcttttctgatctggaagcgaagatcgccctggattttctcgagcagtatcccaccccacgggctctgtctgagcttacccgcaggaagtggaaccgctttgccaagcgtgagcaccatctcggcgagcagcgctgtaaagagctgtgggagaagcttagccagccgcaacttaagattcccgagcacgtagtcagagccaaggcgcagctgcttttggtgctcgtcgctcagcttaaggcattggctcaggcggtggagagctacagcgaggaggtccaacgttttttcgcctctatgccggcagctaaactcgttaagacgctgccgggaggaaaaagtggcaccaccgtacccatgctttgggctgagctcggtgatgccaagagtcgatgggaatccttcaggcaccttcaagccgaggcgggtgcagtgccggtaaccaaagccagtggcaagagccgtgtcgtacagtttcgttttgcctgtaataagcttttgcgctacgcctcgtactggttttcgtttaactcgctcaatcgctgtgagtgggcaaacaaatactatcgcgaccaacgggccaaaggacatcgtcatccccaagcgcttagggctttggcagcgaagtggttgaaaattattttcatcatgtggagagacgataagccgtacgatgagaactatcacttggcgaacatcgcccgtcagacgatgcgccaggcggcatgaaaaaaaatcaaaaaataaaaaaggggcttgacaagtctcatagaaagt

SEQ ID NO: 5448 - DNA, 1432 bp, unidentified
  source 1..1432: mol_type = unassigned DNA; note = element_858c18b
  misc_feature 1: note = core
  misc_feature 2..137: note = LE
  misc_feature 138..1157: note = CDS
  misc_feature 1158..1432: note = RE
  misc_feature 1192..1432: note = bridgeRNA
atggaatggacgcctcccaccccacgagtggtggaagcgatgaacagacacacatactcactcacggaccgaccgtatcggtacggtcggaacggaagatcattgaggtcttcagagccaaccggaggaggtctgccatgaaccatacggccgtaggcgtcgacattgccaaaagcgtctttcaggtgcactgggtcgacccgcacacaggtgaagttatcaaaaaggcagtcaggcgagacaggtttctcgactacttcgcgaaccgggaaccttgcctgatcggtatggaggcgtgtggcggtgcgcagcattgggcacgccagttcacgaagatgggtcaccaggtgaagctgatgccgccgaagttcgtcaaggcgttcaacatcggcaacaagaacgatccagcggatgcgcgcgccatctggatggccacacagatacccagcaagccggtcgcggtcaagacagaaacgcagcaggccgtgctggcactgcaccgcatgcggcagcaactggtgaagttccgcacgatgcagatcaacagtctgcgaggcctgctggccgagtacggcgaagtgatgggcaagagccgcgaggctttggacaaggctataccgggaattctggcaaagctgtcggaccgtttgcctaccatgctgatcgatacgatgcgggaacagtggagtggtctgacggggctggaccggcaaattgccgggatcgaacaacgcctgcaggcatggatgaaagacgacgtcgcatgccaggcaatcgcggccataccgggcgtcggcttgttgagcgccacggcggctgtcgtgaccatgggcgacgcgaaggcctttcgctccggtcgggaattcgctgcctggctcggcctggtgcccaaacaaacgggctctgggggcaaggttcaactgctcggtatcagcaagagaggcgacacctacgtgcgaacgctgctgatccacggcgcccgtagtgtgctgcgacatccagacaaggccggcgcatgggtcgagcagctcggcaaacgccgaccgttcaacgtggtaatcgtggcgctagccaacaagatcgcaagaaccatctgggcacttctcgcccacgacaggcagtacgggagggagtacacgagctcgaaaccgctttaaagagtttgcggtgcccaggagctgttctcacaggtggcacgttcacaggttgcgttggcaatcgcgtgcaatgacaagataggtcggaccgggactccctaaacctgggtatgacgaagagccttgagctcgacacggaaatgaggtgggagtcagcggatttcatcggggcccgcagccgaatgattggctgcaacaggccggatataaagcagcaaacgccacatcaagtcatgcatacgaaaaaccttcgcaaaaagggaggcgtccatata

SEQ ID NO: 5449 - DNA, 1418 bp, unidentified
  source 1..1418: mol_type = unassigned DNA; note = element_858f280
  misc_feature 1: note = core
  misc_feature 2..90: note = LE
  misc_feature 91..1131: note = CDS
  misc_feature 1132..1418: note = RE
  misc_feature 1188..1410: note = bridgeRNA
caatgggatggacgcccccacctcgtaacggcatcaatgtgccaaagtggagatgtcaatcaaccactgaaccgagaaggagcgtccgacatgaagattactacagcgggaatcgacctggccaagaacgtgttgcaagtgcatggtgtggacgagcacggccgggcggtgcttaagaagcagctcaagcgcgagcagatggcggtgttcttcgccaacttgccgccctgcctgataggcatggaagcgtgcggcagcgcccaccactgggcgcgcaagctacagggctatggtcacacggtgcgcctgatggccgcgcagttcgtcaagccctacgtcaagaccaacaagaacgacgcggccgatgccgaggcgatctgcgaagccgtgcgccggcccaacatgcgtttcgttccgatcaagaatgtcgagcagcaggccgtgctgtcgctgcaccgcgtgcgccaaagcttcgtgaaagcgcgcaccgcccagggcaaccagattcgcgggctgctggccgagttcgggctgatcatcccggtgggtatggccaatattgccaagcgcgtgcctgagctgatcgaggatgccagcaacgagctgccaggatcgtttcgactgttgattgaccgcctgatggaccatttgaaggaattggataggcaagtcagcgagctggaggcgcagatcgtggtctggcaccgcggcaacgctgccagcagcaggttgcagaaactgccgggaatcggcccgatcacggccagcgcgctggtggcctcgctgggcgatgccaagaacttcgacagcggacgtcaagtggccgcctggctgggtctggtgccccgccagcactccagcggcggcaagaacgtgctgctgggcatgagcaagcgcggcgacgcgtacttgcgtacattgctcatccatggcgcgcgctcagtaattcaggccgcccaacgcaagagtgagcctgacactgggagttggctgcataagctgctggccagacgtaacgccaatgtggcagcggtggcgctagccaacaagaatgcacgccgcgtgtgggcgctcttggcgcacggcagagagtttcgcgctaactacgtgcccgagatggcttgccggtagactgaaaacaggatcgaacagcaaaacccgatagccgagaacaaaggagtatccccaccgattgcttcaagcgatcatgaagtgatggcacaacaggtcagaccgtggccggcaaagctcgttatagctgcagcacttcgagtgcgtctagccgattgagccgccggccagcaaatcccatcagggacagtggccaaaggccgcatcaaagtccggatgtacgggtgcaatctttaccttctagccttcatgaattgaaagcttggcataccgggggcgtccatgta

SEQ ID NO: 5450 - DNA, 1466 bp, unidentified
  source 1..1466: mol_type = unassigned DNA; note = element_8591366
  misc_feature 1..2: note = core
  misc_feature 3..168: note = LE
  misc_feature 169..1215: note = CDS
  misc_feature 1216..1466: note = RE
  misc_feature 1238..1461: note = bridgeRNA
agatggggtaacgggcgccggcaagcgaggcgctcactcgctagggcgctggcatggcgcgctcgcgagcggcttgcttggcggcgaggtggtcgtccctcaaagtgatggtgtctacgaatcggagtcgggcactgggcctgctccaagcatcatcgagggacgaccatggaccattatgcaggaatcgacgtgtcattggaatattcgagcgtgtgcgttgtggatggaagcggcacgattgtgcgcgagggcaaggttgtgagcgagcctgaggggctgatcgcgtggtttgggtcgttgggattgcagctggtgcggatcgggctggaggccggcccgacgtcgcaatggctttatgccgggatgaagcaggcgggacttgcgatggagctgttggagacgcggcatgtgcgcgacgcgttcaaggcgatgccggtcaaatctgaccgcaacgatgcgcgtgggattgcgcagctgatgcggctgggctggttccggccggtgcactgcaagtcgatcggagcgcaggagacgcgtgcggtcctgacggcgcgcaagctggtccaatcgaagcttcacgacgtggagatgagcatgcgcgggatcttgcgcggcttcggcctgaaggtgggcaagaccacggcgagcggctttgccgggcggatcgaggagctggtggctgggcatccgcacctggaagcgattgcggcggcgctgcttccggtacgagcggtgttgctgcgtgaattcaacggcttcgagaagcgcgtgcggatgatggcgcgcgcggatgcgaacgccaagctattgatgtcgacgccggcggttggaccgatcgtgtcgctcacctacgcttctgccgtcgacgatccggcccggttcaaatcgtcgaaacaggcgggatcccatttcgggctcaccccgaagaagtaccaatccggcgagaccgaccgcaccggccggatcagcaagatcggcgacgccgcggtgcgcgaggcgctctacttggcggcccacgtcatgctgacgaagccggtcaagggctgctcggagctcaagagctgggcgatgcgcatcgccaagcgggccggcatgcgcaaggccaaggtggcgcttgcgcgcaagctcgccgtgatcatgcatcgcatgctcgccgacggacaacctttcaacccagccgccaggaccaaaccagtcgcggcggcggcataacgaggagaacacgcggttttcgggcgggtcacgacaccaggccttccccgaagcgaagtcccatcgctgggacggcggatcaggtcaggccgccatgcgggctgtggcatcgaccacgcatccgtagattggccgacctatcccctacgtaccccatcaggcgacggccttgcgccgatcccgtacagaagcacgttcccagcgactggatgacgcaaaaaagggattgacttatcgaggcccgttacaga

SEQ ID NO: 5451 - DNA, 1609 bp, unidentified
  source 1..1609: mol_type = unassigned DNA; note = element_8596d48
  misc_feature 1..2: note = core
  misc_feature 3..275: note = LE
  misc_feature 276..1484: note = CDS
  misc_feature 1485..1609: note = RE
  misc_feature 12..295: note = bridgeRNA
ctattacaatatatttggacaggaaagccgggcagccagtccggctttccctccatctcgtgcctaagctacaatgagaggagcaactggctgaccaatcactccttgggcttgtatgtccgtgtgaaagactgttagccatcctctcgttgcagcgttcgatttaagcaggttgaaccaccggatgtcggagagttcgtgtcacacaatagattgaatcggcagcgagaaaagatggattccggttgcagattcttgatattggaggaatgtgaatgaactgcgttggcatcgatgtttccaaaggaaaaagcatgattgccgtcatgcgccccttcggagaggtggtgatttccccctttgaagtgcagcacaccgccagtgaactaagcgagttggcaaagctgctcaaaagtctggacggtgagacccgtgtggtcatggaatccacgggcaattaccatacaccagtggcttggctgctccacgatgcagggttttatgtctccgtagtcaatgcaatgctggtgcatgactacgggaacaacagtttaagacgagccaagacagacaagaaggacgctgtgaagctggccaactacgggcttgaccactggcttacgctgcccaggtatgtcccggaggaagatacccggctacttttgaaaaactgctaccggcagtaccagcaatattccaaggtacaaaccatgttgaaaaacaacctgatttccttgctggatgccgtattcccggaggtcaatcgactgttcaatagctcccaccgtgccgatggaagtgagaaatgggtggatttcgtctcgaccttctggcattgccggtgcgtttcaacattgtccctcaaatctttttctgccagatacctgaaatggtgcagaaaacatgggtactatttcagtcaggagaaggcgtttgaaattcattccaaagcgcaaagctgcattagcgttatgccccgaaatgagacaaccaagctcttggtacaacaggcaattgctcagcttaaggcaacctctgctgcactcgccgcactcaaacaggagatgcagtctttggccgctgccttgcccgaatatcccgtggtcatggaaatgttcggcgttggttctacgctcggtccgcagctcatggctgaaattggcgatgtgcgccggttccactccaaaaaggctttggttgcctttgccggcattgacgcacctccttgccagtctggcaaaatggacatacacagccgcagcatctccaaacggggttccgccgctctgcgcagaactttgttccttgtgatgggcatttatctgcaaagcgcccctttggacgaacccgtgtaccaattcatggacaaaaagcgttccgaaggaaagccttacaaggtctacatgatggcttctgccaacaagttcctgcgtatctactacgcctcggtaactgcttatctaaacacactggcgcggatctgatctcatactgaacacctctctggcccaccgccgtttcaattttagagcgctcagcggtctggcttcgtgtggccttttttctaacttgaaatcttgaaattcctacttgactttcattagcaggt

SEQ ID NO: 5452 - DNA, 1574 bp, unidentified
  source 1..1574: mol_type = unassigned DNA; note = element_8597a62
  misc_feature 1..2: note = core
  misc_feature 3..279: note = LE
  misc_feature 280..1455: note = CDS
  misc_feature 1456..1574: note = RE
  misc_feature 36..256: note = bridgeRNA
cacgtataatccaattatcagttgatgattggattttttcctttctcccaggttcttctgggtaatctaatctctatctgatatatttattaaggcgctgtggatctgtgtctatttttttacagctttgactggtatgaggtgactcagaccacagcttttcgtctattactgttaatcagtttgttaacgctctgacgtttctatttacgtgattacacagccggattctctgtggaagacagcagcgccaaatcttatattttaggaggtactaccatgtcccagtactttgtcggcatagacatctcaaagtacaaacacgactgctgtatcatcaatgcagccgatcagagtatcgttgccaaatttaccatccaaaacgataaggatggcttcaacgaactactcacttctctccagtccctgtcaacccctgaggacataagaatagggtttgaatctacagcccattatgccctcaaccttgaactcttccttgagaaagcccaccacagctttatggaagttaatccagttctcattagcgagtacaagaagtctacttctttgaggcggacaaagacggattccattgactgtgaatccatagcccgttggttaatgaccatagagtacaaaccccattcaaaaggattttatcatgcctactcattaaagtcattaacgcgtttaagagatcgcctcattcgccagcgttctttttatcttgttaagattactaatgttctggatcacacttttccggagttcaaaccattctttcaggaacgtttcagtaagacagctttatatcttctcgaaaactatggttctgcagaaaagatggcacgtatgaattccgcttcgtatgatattctcagacgtatttctcatggtaaatttacgcctcagaagtttatagaactcaaagcacttgcggcaaacactgttggtgtgaacaactccatcttcgacacagaacttacctgcctactaacgctttataaagaggctgccaaacaggtttctgtcctcgaatcccagataatcgagctaattgaagaagtacatccacactatatgtcaatccccggtataggtcctatttctgccgctgtcatctacgctgaatacggagatatatcaaacttctcatcaccggcacagatgcttgcttttgcaggcttagaacctgggatcagtgagtctggaacagagtcccataagggaagaatggtaaagcgaggttcttcccaacttcgatatacgcttatgaattgcgccttaccgctgatccgcttcgatgtaacctttgcaacctactacgcaaagaagcgatccgagggaaagccacatcgcgttgccatttcacatgtcacgaagaaattggtcagagtcatttttgcattggagaggcagaacactgactttgtagctaccgctcttcgctgacataaataactatttctgctgcaccatctgaaatacggtgtgttcagatggcttatttgttgtacacttttttactgaatcaaaaatcttcaaaaagtacttgactgtttatagtttgt

SEQ ID NO: 5453 - DNA, 1447 bp, unidentified
  source 1..1447: mol_type = unassigned DNA; note = element_859dbdc
  misc_feature 1..5: note = core
  misc_feature 6..233: note = LE
  misc_feature 234..1430: note = CDS
  misc_feature 1431..1447: note = RE
  misc_feature 1..237: note = bridgeRNA
cccccgttaccttcttcgtgggccttgaagcaaggctcctggtcgctgggtccggtatgacttactgcccctgtcgtgtgcatgatccgggggtgttgtcgccgggcctggtggcgttggttgaccgctgatagggacagggccgcctgctgggtaggtctcttcgtaacgtgggtgccggcatccttcgcctgatctggtgaccaggttggttcgatgtgaggaggcagtctgtgagtcgcccggagtacggcgtgttcctcggtctggacgtgggcaaggaagaacaccacgcctgcggcctggatggcgacggtgaacgggtacacgacaagccgctgccgcagtcggaggcgaagatccgcgccgtgttggaggccttgtcggcacacggtccggtgctggtgatcgtcgatcagccggcctcgatcggcgcgctggcagtgaccgtcgcacgtgacttgggcattgacgtggcctacctgcctggcttggcgatgcgccggatcgccgacctgcaccccggctcggcgaagaccgacgcccgcgacgcctacatcatcgccgaagccgcccgctcgatgccgcacgcgctgcgccgggtcgacaccggcgacgaagcgctggcagatctggaagttgtcgtcggctacgacgacgacttggccggcgagggcacccggatcgccaaccgcatccgcggtctgctcacccagatccaccccgcgctggaacgcgtcctgggtcccaagatccagcaccccgccgtactcgagctcctgacccggttcggcggcccccaaggcctcgccggcgcgacccggcgccagctcatcaccgccaccaagacccgcgccccacgctcctacgacaagctcgtcaccgccgtccagcaggcactgaccgagcagaccgtcaccgtccccggcacccgcgccgccgaacatgtcctgccccggctcgcggccgctctggccggcctgctgaccgaacgagccgacgccgcccggcagatcgaggagatgctcgatgcacaccctctttccaaggtcctgacctcgataccggggatcggcgtcaggaccggagcacggattctcctcgaggtcggcgacggcaccgcgttccccacccccggccacctcgcggcctacgccgggctcgcacccgtgacccgccgctccggcacctccatccgcggcgagcaccccagccgcggcgggaacaaacaactcaagcgggctttcttcctcgccgcgttcgccgccctgtccgaccccacctcccgggcctactacgaccgcaaacgagccgccggcaagaaacacaacgccgccctcatatgcctcgcccgacgccgaatcgatgtcctccacgccatgctccgcaccggcaccctctaccaacgcccaaccccgtcagccgcttgacgaaatccatagggaca

SEQ ID NO: 5454 - DNA, 1153 bp, unidentified
  source 1..1153: mol_type = unassigned DNA; note = element_859e295
  misc_feature 1..2: note = core
  misc_feature 3..208: note = LE
  misc_feature 209..1150: note = CDS
  misc_feature 1151..1153: note = RE
  misc_feature 8..182: note = bridgeRNA
cttgtgtgtttccggcatgctattctttcgaggaaacgaaggaaggtgatcgagcggcacttgagcgatgaattcatccgctcgcctaggagctggatcacttccttcgcccctcgattggttcgaatagttgcaggatcagactcgcatgggccgcgatcgcacacaagttggaacctgacggggatccactacacgcactccccctatgaaaacctcaccccttcgccacgaaattggcgtcgacgtcgccaaggaccatttggacgtgttcgacggctccactcactggcaggtcgccaacactcccgccggcatccgctctttggtcaagcgcctccgggccaaagctccgctggagcaattccgcctcacctgtgaatcgacgggtcgttacggccatcggctcgccaatttggcgctcaaagcccacctgcccgtctccatcgctaatgcccgcgcggtgcgcgactatgccaaggcaaccggcaggctggccaaaaccgaccgcatcgacgcctcggccatcgccgctttcgcccgcaccgtcgatccgcccactctcgggcccgcttggcatgaacatcaagccttcgtcgaattgcatgcccggatgcaggccctcatcgcccaagttgcggcacagaaggccagtttgcatcaataccacgccccccagatccgtgcggaaatccgcagtgagatcgctctgctggagcgccgcgtcgccaactacgagaaaaagctcgaagcgaaagtgaatgcttcggcgaccatggagcgccgtaaaaagcggatgatcgccatcaagggcgtaggcaaacgcaccgcactgaccttgctttcagtcgtgtcggaactcggcacgctcaaccggcgtgaagcggcggccttggttggcctggctccaatgaaccgggacagcggcaagctgcgcgggaaacgctgcatccaagcggggcgagcgcgggcacgccatgcgctctacctcgcggcgctctccgcttcccgctaccaccccaacctatcgcctttttatcaacgcctccgggcggcgggcaaatccgccaaaatcgctttgtgtgctgtcgctcgcaaactgatcatccagatcaattccgcactcaagccactcagcgcttcaacatagttg

SEQ ID NO: 5455 - DNA, 1359 bp, unidentified
  source 1..1359: mol_type = unassigned DNA; note = element_85a2065
  misc_feature 1..2: note = core
  misc_feature 3..73: note = LE
  misc_feature 74..1108: note = CDS
  misc_feature 1109..1359: note = RE
  misc_feature 1110..1349: note = bridgeRNA
ttatggaatggcccgtccctttctccggcatcaagtacgatgctggtgtcaaaaacgggaaaggaatgagctaatgtctataacaatcctcggggttgatctgggaaagaactcttgcagcgttgttggagtcgacacgaccggtgctgtagtcgttcgtcgaacgatgcgccggcaaacgctggtcgaatatgtgacgaaacttccggcctgtgtagttgcgatggaagcatgctgcggcgcccatcacctgggccgcctgtttgtcgcgcaaggtcataagatccggttgatgtcaccggaatacgtccgtccatatattaaagctcagaaaaacgatgaccgcgatgctgaaggaatcgccgaagctgcctcacgaccgacaatgcggttcgtcgaactcaagagccaggagcagttggatattcaaacgctgcatcgtgtgcgctcgcgcctcgtggcagaacgaaccaacctcatcaatcaactacgcgcgatcctgctggagcgcggggagatcttcccggccggccggcggaaattcgagcttggcgtggatggcatgcttgtcgatggcgatcaaacattgtcaccgcgtatacgccagttagctggcgatttacgtaccgaatggagagaactcgacgcgaaaatcgcggcgttgaatggcgaatttgtcaaactgtcacgcaatgatcccgcagcttgcaggttgacttcgatccctggcgttggcgtgctcaacgcaacggccctggtcgctgcggttggcgatgcaagtaattttgccaaggcccgggacctgggcgcctggctcgggttggttccgaaacaatccagcacgggaggtaaggctcggctgctcgggatatccaagcgtggcaacacttatttgcgcactctactcatccacggcgctcgcgcggctttgccatcgctgtcacaaagcgatacgccactagggcggtggctgaaggcaatgatcgagcggggcgtacaccgtaacgccgtagtggtggctttagccaacaagctggcgcggatagcttgggccatcttgcgcaaggaagcgcgctttgaacgcagttacccggtagccgtggtttaacgagatcagcgctgcgcatagttcgcgcagtccaacggggtttgcaggaaggatcgaagagatggcctgacagtcgaacggcgttcggaaatcccgatcaaaaaaatggcacattcgctgccggcatgcttatggggctctgaacgtgcggatatccatcttggccatgggcttgctcatgagaccgtatacgttgacgcagactgttcagaatgccgtaaaatcctcttgcagacggggcgggccatacg

SEQ ID NO: 5456 - DNA, 1577 bp, unidentified
  source 1..1577: mol_type = unassigned DNA; note = element_85a8e57
  misc_feature 1: note = core
  misc_feature 2..246: note = LE
  misc_feature 247..1455: note = CDS
  misc_feature 1456..1577: note = RE
  misc_feature 6..225: note = bridgeRNA
tcgtattatgaggtcaaccaattcttactggttgatccttttttgttttggttggaggattgaaggtggccgggtcgaacgtacctgcccgtgggacttgatcccgagcgctataatgttcacccctacttgtcatgaccatgattgaggctggttgggacatggatcccgtatcacatgcgatgctatggagcgacaagcaaagtcataggggctaccggtaaattcacatcaaggagagatcgaatgaatcctgtaatagggctagatatttcaaaaggagaaagccatggacaggcctttttagatcggggaaaacctttcagagggacctttcaattcgctcatacacgagatggacttttgcaattgcttcaagctattcatgatgttgagcgcgaatctggtcaacgtccaacgcttattcttgaagcgaccggacattatcaaagtcctgttgttcaattcttagaggagcaccagtatgtttacatcgtgattaacccgctcatttcaaatcgactaagaaaaacaaatctccgtaaagtaaaaacggatgctgccgatgcttatcttcttggtgagcttcactacaaagaagagttcgaaccgtttagaaaaagaggcgtgcggttacttgatttgcgctatctgacgcggcaatttgaatccttctcgaagatgtgcgtgcagactaaattacaattccaagctgttttagatcaagtattccctgcctacaagggcgtctttggggctatgtattcaagtgtttcactgcgattattatatgaattcccaacatcgtactcggttttgcaatccgatgaagagacgattaaaacgaagattaaagcacttctcccatctaaacgagggcgttcagagaactggattaacgaacgcgctcagcggatgctagatgctgcaaaacaaaatccgtttcaacaaacactatatgcaagccacttaattaatttgaagatcttaatctcaattattcttcaataccaagagcatctcgctgaattggaacagaacatagatgccctggcaaaagaaattgaagaatatgatttaatccagtcgattcccggtattggccataaaattgctgcaacaattttatccgaagttggggaaatcgaccgatttgatcatcccaaaaaactagtcgcttttgctggaattgatccaagtgtctttgcttcagggaaattcacagcaactcgaaaccgaatcaccaaacgtggttcacgacaacttcgttatgccctagttatggctgtacagtgcggactgattcgttcacgtaatacgcgcctgaaagagttctacgaacgtaaaagagctgagggaaagcctcacaaggtggctctagttgcatgcgctaataagctagttcattggttacacgccattctaaaaagcaaaaagacctttcgtgatgcataacaaaaaaccattggtataaccttccaagtcaagttggagggttatttgacgtgcttatttttcaatatatcatatgaactcagttaactttactggtaatgttgacaagctattagctggta

SEQ ID NO: 5457 - DNA, 1410 bp, unidentified
  source 1..1410: mol_type = unassigned DNA; note = element_85b3cf0
  misc_feature 1..2: note = core
  misc_feature 3..82: note = LE
  misc_feature 83..1117: note = CDS
  misc_feature 1118..1410: note = RE
  misc_feature 1195..1405: note = bridgeRNA
tgatgtgatggacgccccccttacggcgtcaaatgcgccaaactaaaggtgcgaaaccttagttaacaaaggagcgtccgtcatgaatattaaagttgttggcatcgatttagcaaaaaatgtttttcaaatctgtgtacttggtgaagataactctgtcattaaaaacagaaaagtcttcagagataaactgctgcatgaagtacgtcagttcccaccaaacacactgattgcaatggaagcctgcttttcatccaattattggggggaaaccattcaaaacatgggatatcaggtaaagctgcttccggctcagcatgttaagccgatggcgcgtagacaaaaaaatgatgccaacgatgcactggccatctgtgaagccgcttttcgtccgaacattcatgctgtgccaattaaaacgcagcagcagcgggatatcaaagcgttacgcactgtgcgaaacactctggtcacacgtcgcaccgcaaccgttaatcaagtgcgtgctttagctgcagagtatggtgtcattttccctaaaggattaaaagcgttgcagcaagagctgccggcagcactggaagatgccgataacggtttatcaatggtaatacgcagtctgctacaagggttgtatgatgacatcaagatcatctccagagatatcgattcgttaactgatgagttaacacagctagcaaagcttcaccctcgctatcaggctctgcttaaaatccccggctttggccctattgtctccgccagtgtacttagcgagctgggaacgggtgaacagtttaccaatgggcgacaattttctgcgtggtgcggcctggttccccgccagaacagtagcggagggaagtccacgctgatgggcatgaccaaaaacggcaacagagaactgcgaacattgttgatccatggtgccagagcagtgctacggttcgctgcaaagcgtcaggatgcaatggggcgttggcttaacggactggtagcccgacgaggaaaggttaaagcaattgtggctctggcaaataagctcggcaggatcgcttggcggatcataaccggagatgaagagtttcaggtaagccgggcatttaaaacggcatgaacacagagtaagaaaagcaatagaactgtgtaatcaagtgattagacaggaacataaagaggtataaacgtcacccgagagtttgcaaaccttgatggaaaaacggttatccgtcccggcaagagcctgagaacaagacgaggcatttgatgccgtgtgggtgtgaaggcggccgggttcggatctcatcatggcgcagggcgcattaatgaatcgccctacttaaagacgccggatatatgtcagcgaaccgatcttcaatcaggagttgcaaaacacggggcgtccatata

SEQ ID NO: 5458 - DNA, 1657 bp, unidentified
  source 1..1657: mol_type = unassigned DNA; note = element_85c30ef
  misc_feature 1..2: note = core
  misc_feature 3..289: note = LE
  misc_feature 290..1561: note = CDS
  misc_feature 1562..1657: note = RE
aatctccattccgccgccaagcggcggcacaaatagtaatgaaagtattcacaaacctttacttccgtgaaataataacttcaagaagctacactacaaagcacgggaggaggagttgtaaattctttctcgttttagacagcattgtaatcagtgtaagttctgcctgttcaagcacaaataagtggctctataagaccgtacactaagaattgttttaacgcctaggttaaattgtgtggcagaacagtcaatggcttctttacttaatttcgaaaggagcatgactatgaaagttatctaccaaacctgttgtggtgtcgatgtacataaatcttttctcgttgccacaatcattaaaacaacttctggtgttgaacctacctatcagaagaaacgtttttctacttttaacaattctattcttgaattcaaacagtggctgattgaaaatgaatgccgcgacatttgtatggaatctaccggcaagtactgggttcctgtctttaatcttcttgaagaagatatcaatgtcacgattgccaaccccaaatgggtaaaagcggtaaaaggtaataaggatgatacgaaagactccaaatggattggaaatctgtttcggcttggacttgttcccggcagttacattccttgtaaaccgatacgtattctaagagaatacacacgctatcgttacaaaatggtttgttgccgttccggtgaaaagaatcggtatcagaatgcgctcactgtatgcaatgtcgcattagactctgttgtatctgatatctttgggaagtcatccacatccattatagattacctacttgaacagtctggcaattcaatcaaccacgaagaaatcgcatctaaactccttaaaaagctcaaggagaaagaacctgctgttattgaatccattgaaggatatcagatgactgatacccaaaaatatcgtatgcgcctcgtccgcgcacatatggattatatcacagctgaaatccaagatatagattctcagatagaatttttgatttcttcccatgctgattttgaaaatgctatccagtttctctgtaccattccgggtgttaaacgtgatagtgcaattactatcatctccgaaataggtattgatatgtctcagttttcaagtaacaagcgtctttgcagttgggctggattaactccaggtaataacgaatctgctggtaagaagaaatctgttaggattacacgtgctggagtatacctcaaacctgcattggtgcaatgtgcccatgcagccgtaaaatccgacaaatccccttactataaaaagaaatatgaatctcttttaaaacgccgtggcaaaaaaagagccattattgcaattgctcgaatgatcctcaccgccatttatcaaatgctgtctaatggtgaagtatggaatccaagcgatatttataaaattgatatgccggttaccttagttgaaaaacaaaaggaaaaggccatcaagcaagccaagaaacttttattacgtgaaggggttattactgaatcacaattactttcttgagctttttaaaaataaatagtccctatttttaagctaacacctgatagcttgtttaagtgcgccattttctggctgccctctactttctttcacact

SEQ ID NO: 5459 - DNA, 1636 bp, unidentified
  source 1..1636: mol_type = unassigned DNA; note = element_85d5ea1
  misc_feature 1..3: note = core
  misc_feature 4..123: note = LE
  misc_feature 124..1317: note = CDS
  misc_feature 1318..1636: note = RE
agtaattatgtaagaaaagcatagcgcaggagctgcggtcatccccctttacggagggccgaaattttaattttaagcgataactttaagtttcgcaatgattaacaattaaaaagctgcgctatgccaagaacaaatttgcaaaaacaaaatgactttagcggtcaggatttttatgttggacttgatgttcacaagcgatcatggtcagtaacgatccgaagcctgggtattcaggtaggtcacttcacgcagcctccgggtgccgaaggtttgtatgattatttacagcgaaactttccaggtgggcactatcattcagcatatgaggccggcttttgcggcacttacgctcatgaggagctttgtaaactggggatcaataatatccttttgcatgccgctgatatcccggtgacagacaaacaaaagaagaataaaacagacctgcatgacagtcgtgctattgccgaacaccttgagcggggcaatttacatggcattcatgtattgagccgtgaccagcaggaattgcggggcctgttccgattacgtcagagtaaagtagctgacatagtgcgaagcaataataagctcaaaagttttctgatgtatcatagtatagtgataccggaaacagtatcaacaaccgggtttttatccgttaaggttttggattggttagccatcgaattgagcagcatggcaggtacgctaacattgcagcaatatatagcagatttaaaatatcagcgggagcaattatacaggattaccaaatcattacgtacggagatcctgatcctgcataaacaaacttatgaaagcctgctttccgtccctggcatcgggagtattacagcgatgggtttaattgccgagctggcagatttcagtcgtttcgatgacgccgataaatattccagttaccttggtttatgcccatgggaagatagttcgggcgatacggttaaaaccaaagggatgcagccccgctgcaacagccatttgcgcccattgctgatagaggcttcctggaaagcgattagtaagtcccgcagcatgtttgcctattacagcaaacatgccggaaaagacagcaaaaaggcgattgttaaagtagcccgtaaactggccatgatcgccaaaggcgtggccataagcggaaaaccttaccaggaagattatctgaagcaaaagcaacaggaataccaaaaaatgaaggctctgaaagcggaaaggttttcttcaggcatcgcagaacagcatataaataaacagccaggcactgaactgtatgtgcccatgcctggctgatatgcattatccggctgtaatatccctggctggttgctcctcagcagagccgcttccgtttcttacagcatcgtaaaattattaaaacagattcagtaataataaattacagctcgaaaaaacacaaaggggaaaacgcagtttaaaaacggtaattaattacattacgaagtattcgtaccccttttttattccatacaattacttgcggcataagatcgcacatagcagtttgagactttttttattactgaaaataaattatatctttatgtgaagacaaaatctcactcttgtcagctgtgcttttctacatagc

SEQ ID NO: 5460 - DNA, 1282 bp, unidentified
  source 1..1282: mol_type = unassigned DNA; note = element_85d8916
  misc_feature 1..2: note = core
  misc_feature 3..242: note = LE
  misc_feature 243..1268: note = CDS
  misc_feature 1269..1282: note = RE
  misc_feature 59..222: note = bridgeRNA
tccattagactatgtaagtgtagaaaatattgtataatgggacacagatctttaatatacaaccgaatagagagtcgattaagtctaatgctcctcaaaagaaaaatttatattgcgaataagacccgattctctatgatgattaaagctatatagtgttaccatcgctcataagagcgattattaatggaggaagctcatatcatcactcattcggtacaaaaaaagaaaggagtcccatcatgacaaagaacgttcattttgtagggcttgatattgcttgtgatgattttgcagcaagcatatatcaatccccaaaagaatcaataatcacaaaagaaggtatcaaaaatatcttcgagggatttaatgtgtttgttttatggctcaaagaacatggtttaagtaaaacaaactctattatctgtatggaagcaactggtgtctatagtgaagccattgctcactatttagtaagtcaaggttttagagtaagcgttgagccgccacttaaggttaaacgtgcctttgatccaataggtcataagacagacgccgttgacagcaagcaaattgctgaatatgcctatagatacagcgatgagcttagattttggaaacctaaagatgaaatcatggaaaaaacaaaacatcttttgaccgctagagaacaatttgttaaacaaagtacagctatacaaaatgctatgaaatcttacgaaaagcatattgttcaagtgtctttgatagtgaaagttcatcggcagactctaaaagaaattgaaaaacacattactgaaattgacaaagaactagatagaattatacgtcaaaacccaagtatctctaagatggctaatcaactaaaaagcataccaggatatggattgcttttatcagcaagcttaataactcttaccggtgcattcagtgatatatctcattataaaactttggctgccttcctgggcatatgtccttatcaacatcaaagtgggaaatctgtatacagacagcctcacatgagaccattcggtccagcatacccgcgtaaactgcttactcttgctgctcgctctgttgcaactcacaatgatgttttcaaaaagtactatgtgcgcaaacttgctgaaggtaaggataaaaagcttgtacttaataatatttcgaataaattaatcaagttagcttgtgcattgataaagaatgattctcgatacacagctacctatcgttctgtaaatcctatgttcttagatatatcttgacaaagtcatagtgt

SEQ ID NO: 5461 - DNA, 1398 bp, unidentified
  source 1..1398: mol_type = unassigned DNA; note = element_85dfa92
  misc_feature 1: note = core
  misc_feature 2..88: note = LE
  misc_feature 89..1114: note = CDS
  misc_feature 1115..1398: note = RE
  misc_feature 1167..1390: note = bridgeRNA
taatgggatggtcgcccccttctgagacggcatcgatgtgccaaagtggagttgtgacacaaccacttgaacgaaaggggcgaccgagatgaagcttacgacgattgggattgatctggcaaagaacgtgttccaggtgcatggggcggacgacacgggacgggcggtgctgaagaagcagctcaagcgggcgcagatgctgcccttcttcgccaggctcacgccctgccggattgggctggaggcctgcggcagcgcccactactgggcgaggaagctccaagcgctgggccacacggtgcaactgatcgcaccgcagtacgtaaaaccgttcgtcaagcggaacaagaacgacgcggcggatgccgcggcgatctgcgaagcggcgacgcggccggacatgccgacggtgccgatcaagaacgccgagcagcaggcgatcctgagcgtgcatcgtgcccgacaaggcttcgtcaaggcgcgcacggcgcaagccaatcagatacgcgggctgctggccgagtacggcatcgtcttgccacaggggataggccatattgcccaacgggtgcccgcgatcatcgaagacggcgagaacgacctgcccggcggcttccggttgctcatcgcgcgcctgctcgatcacctgaaggaactcgaccgccaggtcggcgagctggccgtcgaaatccagttgtggcatcgacagaacgcggccagtcagaagttggcggcgattccaggcctcggcccgctttctgccagcgcgattgcggcctccgtcggagatgtgcgcaacttcaagaatggccggcaactggccgcctggctgggcatcgtgccccggcagcactcgaccggcggcaagccgacgcttctgggcatcagcaagcggggcgatgcgtatctgcgcacgctgctcatccacggggccagagcggttatccgaatagcggaacgcaaaccggatgccgacccctggctcaaggcgctgctggcgcgccgcaacaagaacgtggcggcggtggcgctggcgaacaagaacgcgcgcacgatctgggcgctcttggcgcatgaccggcagtacgatccgcactacgcgatcgtggcatgaagaaccctgcggcgtagcacaaagcccggaaccggcttcgaaaggagaacctccaccgattgcacaggcaatcacgacgtgatggcaagacaggtcagaccggggcctcgccaacctgcgaaaagtcgggcgcttcgagcgcgtgagactgataaggacggggccagcgtattccatcagggacagaggcttggggcctcgatcaaagtccggatctatggccgcaatctctacctacttgttctcaccaactgatcgcttggcaaaacgggggcgaccatcta

SEQ ID NO: 5462 - DNA, 1347 bp, unidentified
  source 1..1347: mol_type = unassigned DNA; note = element_85e1258
  misc_feature 1..3: note = core
  misc_feature 4..79: note = LE
  misc_feature 80..1099: note = CDS
  misc_feature 1100..1347: note = RE
  misc_feature 1122..1336: note = bridgeRNA
tgatgatgtggacgcccccgcccaacggcggcgctatggtgccgatccggctgcccaaccagcgagaggagcgtgcgcaatgatgatcaagacgattggactggacctggcgaagagcatctttcaagcgcacggcgtcgatgagagaggagcgacggtgctggtgaagaagctgcaccgcaagcagatgctgccgttcttctcgaagcttccgccgtgcttgatcggcgtggaagcgtgcggaacggcccatcactgggcccgaactctttcggcaatgggccacgaggttcgcctgatcccgccgtcctacgtgaaggccttcgtgaagcgcggcaagagcgacgcccttgatgcccaagcgatttgcgaagcggttcagcggccgacgatgcagttcgttccggtcaagaccgtcgcccagcagggtatcctcatgactcatcgtgcgcggtccttgctggttcgtcagcgcacgtcagccgctaacgcattgcgagcccacctggccgagctggggcttgtcgccaatcccggcgtcgctaatctggcaaagctcgccgagcaggcattggccgaggacgcgcttccatcgtttgctcgcgctgcgcttgttatcatgcaccgccagatcgttgtcctcggacaggagatctcggagctggaccgccagatcgccgcttggcatgccgagagcgaagcgagccgcaggctcgctgcgatccctggcctgggcgttgtcaccgccaccgccatcgcagctaccgtgactgatccagatcagttccgctccggccgtcagttcgccgcgtggctcggactgacgccgcagcagcaatcgaccggcggcaagacaaggttgggcggcatctcgaagcaaggagatcgctatctgcgccgattgctcgtcgtcggcgcgactgccgttatccggcatacgaaggacaagccgacgccgatggcgagttggatcaggacgctgcttgagaagaagcctttcaggctcgtctctgtcgcgctcgccaacaaactcgcccggatcgcatgggtgctgctgacgcggaaggagacctaccgaccccagcaactcgccgcttgagaggacgatctaggagacaacccgaattggtgacggcagtcgatgatgagtgacgatcgagccaacgacgaggccaacccgcgtgattcaatgcgctctagcagcgcgccagtttgatagggacctcgtcggcggatttccatcagggccagcggcagacattccgccgcacaaacaggccggacatatgaaagcaaccgatcaaatcatcccgacataaacgccttgccaaagggggcgtccacata

SEQ ID NO: 5463 - DNA, 1431 bp, unidentified
  source 1..1431: mol_type = unassigned DNA; note = element_85e3d48
  misc_feature 1..2: note = core
  misc_feature 3..120: note = LE
  misc_feature 121..1149: note = CDS
  misc_feature 1150..1431: note = RE
  misc_feature 1185..1384: note = bridgeRNA
agatggggtaatcggccggcagcttgtggatagctgaaggaattgggtgctgcgcttcaggctgatggtgaatacgaggtccgtggtcacggcctcaagcatcagaaggagaagcgcagcatggagcattttgctggattagacgtatcggtcaagcagaccagcgtctgcattgtggatgacaccggcgggatcgtgcgggaagtgaaggtggcgagtgagccggaagctctgctggcggtgttgaagaacggcgtctaccacttcaagcggattggactggaagccgggcctctgtcgcaatggctgttcagtgcgctcgccgaagcgggcttgccggtaatctgcgtcgagacacggcacatgcgggtggtgctgcaggcgcagatcaataagacggaccgcaatgacgcgcgcggcatcgcacggatgatgcgggtaggactttatcgcccggtgcatgtgaagacgttacgcagtcagaaactgcgcatgctgctgacccatcgcaagctgctgcagtcgaaggctatcgccatcgagaatgacctgcgcgggactttgcgtaacttcggcctcaaggtgggcatggtcgggaaactgaagttcgaggcgcgtatcaaagagctcgtcgagaagctccccgatttggccgtactggtcgaaccgctgcttgtcgtccggcgcgtgcttcgccagcagctcgccatcctgcaccgtcgcttgctggccatcgtgcgggaggatgaggtgtgccggcgcctgatgacggtccccggtgtcggcccggtggtggcgctgacctatcgcgctactgtcgacgtacccgcgcgctttcgtaactccaaggcggtcggggcagtgtttggactgacgccgtcaaaatatcaatcgggcgagatcaaccgatccggcgcgatatcaaagtgcggggacgagatgatgagggtgatgctctacgaagcggcccagatcctactggtgcgctcgacgaaatggtcctggctcaaggcctgggcgatgaagatcgccaggcatcgcggagtgaagaaggcaatcgtagcgctggcgcgccggctggccgtgatcatgcaccgcatctgggttgacggcaccgagttccgttggacccgggaggtcgcagcataaaaaccgagcagaaccaattgcgataggagaaaatccgagctccaccgagcgatggaatgatgtccctcgcgggacgatggatgaggtgagttcgcatgtccgcttggacctgccgtcacctgacggcaagaccgaccaaaagattgttccacctcgtcctcgaatcccatgctggaagggcccgagtgccgattccgaagagaagcgcgagcccgtgagcgacatcgacactgcagtggtggatagtctgaaagtgcttgaccccaaccggccgattagaga

SEQ ID NO: 5464 - DNA, 1426 bp, unidentified
  source 1..1426: mol_type = unassigned DNA; note = element_85e5cff
  misc_feature 1..2: note = core
  misc_feature 3..124: note = LE
  misc_feature 125..1144: note = CDS
  misc_feature 1145..1426: note = RE
  misc_feature 1184..1426: note = bridgeRNA
gaatgaaatgaacgcgtcccacccgcgaacgtaggagcaaggcaggtggatcctcacgggccaacggcattgatgtgcccaggtggaaaatgcacgcatttcccggcaaccggaggatccgaagatgaatgctacgccagttggagttgacattgccaaaagcgtctttcaggttcactacatcgatgccgaaaccggcgaaatcgtgaacaaggcgatcaagcgagggcagtttctcgaacacttcgtaagccgtgcaccgtgcttgatcggtatggaagcctgcggcagtgcgcatcactgggcgcgacagctaacgtcgatagggcacgaagtgaagttgatgcccgcgcagttcgtgaaggcattcaacattcgcaacaagagcgatgcggcggacgctcgggcgatctggttggcagtccagcagccatgcaaggcggtggcgataaagacggagatgcaacaggcagtgttgatgatgcatcgtcagcgtgagcagttagtgaagttccgcacgatgcagatcaacggcctgcgcggaatgttgagtgagttcggtgagacgatgggcagaggtcgagccgctatgtgcaaggcgataccggatgcactcgcgagagtcgaagcgcggttaccgaaggtgctgatcgacacactgcgcgagcagtgggctcgagttgggacgctggatgaggaaattgcgacgatcgagcggcgactgcgcgaatggcagaaggacgacaaggcggtacgggcggttatcgagattccgggtgtcggtttgctaacggcgacggcagcagtcgcaatgatgggtgatccaacagcattcaaatcagggcgcgagtttgcggcatgggtgggattggtgccgaagcaattcggtactggtggcaaggtggatcttcgcgggatcagcaagcggggggatacgtatctccgcaccttgctgattcacggcgcacgagccgtgctgacgaattcaaaggaacctggaaagtgggtcgaggatatgaagaagcgacggccaccgaatgtggttgtagtcgcgttggcaaacaaaatggcgcggacgatttgggcggtgctcgcccatgatcgtccgtaccagaaagggtatgcgagtgtgaagccggtatgagcgggcgacacggctcggaaaactaacttttaatacagggtggacgtcgaaaggttgcgttggcaatcgtgtgagatgacaagacaggtaggaccgggactcgctaaacctgaattacgcaccgagcttcgagctcgtcggaggaatgaggggcgagtcagcggatttcatcggggcccgcagctgtggaatcggctgcaataaggccggatatagagctgcaacccatcctgtcatgtgggagcacacggaaacctggcgcaaacgggacgcgttcatata

SEQ ID NO: 5465 - DNA, 1423 bp, unidentified
  source 1..1423: mol_type = unassigned DNA; note = element_85ec5c9
  misc_feature 1..2: note = core
  misc_feature 3..130: note = LE
  misc_feature 131..1159: note = CDS
  misc_feature 1160..1423: note = RE
  misc_feature 1187..1421: note = bridgeRNA
agatgtaatggatgcctccccctacaggaccggcagcggggcgcttcagaagggagtccccgcttgatccggacggcatcaaggtgccaaggtggaaatttatccacggtaaggacaaggaggactcgtcatgcaggttacaacttatggactggatttggcaaaaagggtcatgcagctgcactgggtagacatggagaccggtgagattcatcgcaaacagatgaagcgtcgggcacttctggagtttttcgccaatcggcaaccgggcatcgtggccatggaagcctgtgggagtgcgcattattggggccgggaattacgcaatctcggtcatgaggtccatctggtagcagcacaatttgtgcgccctttcgtgaagaccaacaaaaacgatgcagcggatgcggcagccatctgggaaaccgtacagcgtcccgatatgcgctttgtggcggtcaagagtgaagagcagcaattcgtcctgtcgctccaccgtatccgggagcaactcatcaaggtccggacgatgcaggtgaatcagatccggggcttgctctatgaatttggtgccgatctgccgcaaggtcggcagaagggcctgaaagaagtgccggatgcattggccgatctggaagaattcctatcgcccatgttcctggacactgttcgccagcaattaaaacggcttgaacagatggacaaggatattgcggatatcgaaaagtgtttggcgctgtggaagaaagatcaggaagcggtgaagcgattgatggcgattcccagcgtgggactgctcacggcaaccggcaacatcgccaccgtgggcgatatggaatcctttcggtcggggcgggagtttgcggcttttctgggattggttccccgccagagtgggaccggtggcaaggttcggttgctgggcatcagtaaacgtggagacagctatctgcgaaagctgctcacccacggagcgcgggcagtggtgaatttccagatcaagaaccgaaatccctggatggacaagctgctctgccgacggccccacaacgtggttgtcgtggcacaggccaacaagatggccagaacgatttggtcgctattggtgcgagacactatctacgacgcgaatcacgcgacgataaaaaccgccgcatagtacggtattacagaattgttgaacttcaacataaggagttgcgcaggcggataaccgattgatggcaaaacaggtcagaccacgggaaagagaacctgaggggactatgtcctaataaggacgctttagagatgaggactttcccggcggatttcatcagggtcagcaggattaacctgcattaaagaccggatataaggcagcaaccgacctcaatatgccagacatcgaaaatcaccttgcgaacatggaggcatccatata

SEQ ID NO: 5466 - DNA, 1307 bp, unidentified
  source 1..1307: mol_type = unassigned DNA; note = element_85ec888
  misc_feature 1..2: note = core
  misc_feature 3..67: note = LE
  misc_feature 68..1084: note = CDS
  misc_feature 1085..1307: note = RE
  misc_feature 1086..1301: note = bridgeRNA
ttaattagatggtccgcctcacccctattctaaaattagggtaggctaatcaaagaggcgaaccatcatgttattaattaaagttcttggaatcgatttaggcaaatctacttttcaccttgttggtcataattcatcaggccaggaaattgttagaaagaaactttcccgggctaaattacttgcttttatttctaagctcccagaaaccctcgtagcaatggagtcatgtggcggttcccactggctggctcgtcaatgcataaactacggtcatcaagtcaagttgatcccgcctcaatacgtcaaaccctacgtcaaaacaaataaaaatgattttattgatgctgatgctatagctgaagctgcaacacggccttcaatgcgttttgtgagtgttaaaagcgaagaagctcagataatttctgtaatccaaagaatcagaacaagttatattaaagagcgaaccgcctgcatgtcgcgtatcggggctatattgttggagtttggcatgagccttcccaatgggcatggctatatgaaaaaactctttcagtggcttgctgagcaaaagactaaactacctcagctgttaatgagagaactttctgagcatcacaatcattatatgcaactgaatcgtaaaatcgccgagcaagacaagaaacttaaagcgatagtgaatcaaagtgaaagagcgcaattattaaagtcgataccaggcataggcgatttagtagcgagccgatgtttatccgatatagctaatccaggagatttcaaaaatggtcgccacatggcggcctggatagggctagttccccatcaattttcaacgggtggtaaaactaacttgctgggcatcagtaaacggggcaataaagcattacgaaccctgtttatacatggtgctagagcgttgctatctaaaccggatttagtggtaagatactttggctgctggatagttgaattaatggcgagaaaaccatttaatgtcgtcacagtcgcactcgccaataaactagcgcgaatagcttggtctgttatgaccaccaaccgagcatttgagaaaagagtttaatctgagtttgcaaatgagaaagaagatgactaaacggtcagaccactagattgaagacctgacataaaaaacagcaactagtatgctttgggctttttgaggacaatctagcgcggatctcatcgtggagcaggcgttaggcctaatgaagactccgaatacattagcgcaaaccaacctcgttatcgaaaatatcatttgcaataacgaggcggaccataca

SEQ ID NO: 5467 - DNA, 1375 bp, unidentified
  source 1..1375: mol_type = unassigned DNA; note = element_85ef341
  misc_feature 1: note = core
  misc_feature 2..280: note = LE
  misc_feature 281..1363: note = CDS
  misc_feature 1364..1375: note = RE
  misc_feature 1..290: note = bridgeRNA
cagtaagaatgtctgtgtcagttctcatcatcatgcttgctgttttgttcgcgcggtgagatcactgatgcagtgaagactttccggctacctgactcacactctgatcgaccagaaatgtgtctttccctggacccgtcggttgacggaaagtacttcatgcgaggcttctcctcaccgatgcgcgtgactcaagaagggcctgacgtcttgtctccttactgtcctgtccgggttatcgtcaggagaaatgacgataagttccagaaaggattaggctatggcgaagactaaatcagttcgcccaccgtttgtcgtgggcggcgttgatacgcataaggacctgcacgttgctgcagtagttgatgaaaacaaccgcgttttaggcagtgattttttcgcgacaacccggcagggatatcggcagatgctgacatggatggcatcttttggaacggttgcccgcatcggagttgaatgtaccggttcttacggcgctggcttgctacgccacctgcaaaatgccggcatcaccgtgctggaagtgactgctccggataaaatggaacgccgcaggcgtggaaaaagtgacacaattgatgctgaaagtgccgcccacgcagctttctcattgatacgcactgtcacacctaaaacacgaagcgggatgattgaagcactccgcgttctgaaagtctgccgaaaaacagccgttgcagcacgtcgtattgcgctgcaaatgatccagatgaatatcgtttcatctccggatgaactacgtgatcaattacgtaatctgacccggatgcagctgattcgaaccctggccgcatggcggccggatgtgacggcgtatcgtaatgttcaggatgcttatcgtattgccctgaaatcgctggctcgacgatatcttgaacttcacgatgaaatagcagacctggatatcatgatcgcgtcaatcgttgatgagctggcacctgagctgatcaagcgtaacgctatcggctatgaatccgcttctcagctgctcatcactgcgggtgataaccctcaacggctgcagtctgagcctggcttcgcggccttatgcggagtcagtcccgttcccgtctcatcaggaaaaacaaatcgccacagactgaaccgtggtggagatcgcgcagcaaatagcgccctgcatatcatcgctataggccggttacgtacagatacgaaaacgcaggagtatgtcgcgaaaagagtcgcggaagggcactcaaaaatggaagcgctgcgctgcctgaaacgttatatcgcacgcgaggtcttcacactgcttcgcaatcaaaatcggcagattaacagcactcaaataacgacttgacacttagaaggg

SEQ ID NO: 5468 - DNA, 1261 bp, unidentified
  source 1..1261: mol_type = unassigned DNA; note = element_85f839a
  misc_feature 1..2: note = core
  misc_feature 3..251: note = LE
  misc_feature 252..1247: note = CDS
  misc_feature 1248..1261: note = RE
  misc_feature 31..193: note = bridgeRNA
tccttgtatgttgccttggtgccaaggaacagttccgaggttcatacaaatatgtttccggggaggccgatcgctcctgaaggcaggacttgctcctgaccttgtctgtagagaggtcccccgcctcattgcccatcacgaagagtaaccagaagccgacaagccggacttcgtattacaaggttgtgacggcataaagtgcgaggtcggggaaccggggcattttactttttttcgcgaaggtgggaagcatggctcttgttgtcggtgtggatatcggttctcagactgcgcctatggcttggcgcaaggatgggaaagcggctggaacctggaccatcgaacagagcgccaaaggccatccgctggcagtgaaaaagctgctcagcctcaagccagaccttatcgtcatggaagccacggggatttattacctggacctggccatcaagctgaccaatgccgggttgccggtcgcggtaatcaatccgaaaagtgcacacaactttgccaaagtcatgctggctaacagcaagaccgacaagatcgatgctcaactgctggccgaatatgcagaacgcatgacgccaagagtatggacggcacctaccgcgcagatgctggagttgcgtgccctcgggcgccatttgaaccgtttgacagggcaccgtacgcaggccaaaaacgagctgcatgcactcaaggcgacccaaaccacctcatcgatgctgatcgaggatgcagaacaagccatcgtcgcttttgacaagcgcatcgaccgtttccgcaaggccgcactagagctaattcttcagagttctgagctgagcgtaagttacaagtgcatgatcgcagggccaggtatcggagaggtttcagccatcgccatgctggccgagttagcgacgttgccgccgactttgaaatccaatcaggtcagccgccatgcggggctcgacgtgcggctgacccaatcaggcacaagcctgaacaaacccggacgcatgagcaaagcgggaaacgcttacctgcgcgccgccatgttcatgcctgcactaagtgcaatgcgctgtgatcgctatgtcaaagcattctttgatgggctggtggcgcgaggcaagaagaagatgcaggcgattggcgccatcatgcgcaagtacctgaccggtgtctgggcctgcatccgcagcggtgagccatttgatacggccaagctttttagtgaaaagcatctactgaaagcttgactgtaaacagagta

SEQ ID NO: 5469 - DNA, 1663 bp, unidentified
  source 1..1663: mol_type = unassigned DNA; note = element_8605b96
  misc_feature 1..2: note = core
  misc_feature 3..359: note = LE
  misc_feature 360..1523: note = CDS
  misc_feature 1524..1663: note = RE
  misc_feature 103..332: note = bridgeRNA
cttgtataatataatcaacgactaaaattaatatattatacttacctttctccattaattattttattcttatttttaaaaattttggtttaatggtaccgttattttatatttaattttaattaacataattttactttgaacattattcattgtataattattgtattaactctgtggacttttattttttaccttagggctttgacctttttttggagattattgccacagttttagcttaattggttattagttagatagggcttagactctttatatccagcaaggttacaatgctaaaacttagtggaatcgtcacagtcgttaaaataattatttaaaggagttgatctgttatgatctttatcggcattgatattgccaaatcttctcactttgcttctgctgttaactcagatggtgaagtgtttatcgaacctttcaaattttctaataatgatgaagggtttcaaaaatttattaatacttttagtaattttaatatttctgattgtttagtaggtcttgaatctactggtatttatggggacaatcttactgcatttctttttgacaaaggttttaaaattggtcgtattaaccctattcaaaccgattcacttcgttcttctaatattagaaaaactaaaaatgataagattgatacattcttaatcgctcaatgtcttatgttaaaacattatactttagttactcaaaaggatattgaactaattaagcttaggtgcctttgcagatttaaatcagacgtcttaaagtctcaatctaaagctaaaactcaacttgttaattgcttggatattgcttttcctgagcttgccaatttctttaatggcaacttacatatcaaatcttcttatgccttactttctaaatatcctactgctaaaattattgctaatgtcaaagttaaaactttaacaaatttattatattctgcttctaaaggtcattttaaagaagataaagcaattagccttaaaaatcttgctaaacgctctattgctatggacaaccctgctatcggtactcaaatcaaaatgttaatcgagcaaatccaaatgctccaaaaacaaattgatttgctcgatatcgatatctccaatatcatggaacagctagagactaccatttcttctattccaggcattggtatttggttaggtgccatcattattagtgaaattggcgatatcaatcgctttaattcacctaaaaagttattagctttcgctggacttgatccatctgttagacaatccggaaacttcaatgctacaaacactaaaatgtctaagagaggctctaagcacttgcgttatgcaattggtcgtgcttctcaactaataatttggaatgatgataccttctaccaatattatagcacgaaattggctcaaggcaaatcctatttaaatgcaattggtcatgtttctcataaattaactagagttatatttaaattactaaaaacaaacacaacatttattaaaagttaacaaattttcaatgttcatatttacaaacacacattcggtcatttttatatattaaaaatggcttattaagcatgctcttttttacgttaaaaattttttaaaaatttttttagaaaaactattgacaattaatagttagt

SEQ ID NO: 5470 - DNA, 1321 bp, unidentified
  source 1..1321: mol_type = unassigned DNA; note = element_8606be2
  misc_feature 1: note = core
  misc_feature 2..82: note = LE
  misc_feature 83..1060: note = CDS
  misc_feature 1061..1321: note = RE
  misc_feature 1084..1273: note = bridgeRNA
gaatggaagggacttcccctggatatgcacctgattaactcttgtgcaatcatggggtaaacatagcccggagggattcgttatgaccatcactactatcggtatcgatcttgctaaaaatgtgttcgctgttcatggggttgaccaaaatggcaaaaccgttctggtgaaatccagagtaacccgcgcagctcttcccgggctgattgcaagtttaccgccctgtgttatcgggatggaggcgtgctccggggctcattactgggcaagactgtttctgcaatatggtcatgagccgcgtctaatggccgctaaatttgtatctccataccgcatggccggtaaatcagggaaaaatgatgcagctgttgttccagttaaggacgagagccagcaggcgatgcagtgtctgcatcgtacccgacagggttttatcgaagagaaaacagcaacatataatcgtcttcgagggttgatatcagaattcggcgtcattgccccacaaagtacagatgccctgcggcacatggtttctgcgctgaagagctctttacctcttcaggttcagcaatgtgtagatgatttactggaacacgttgatcgcattgaagctaacatcactgaatatgaccgaattttgtcccgcatagccaaaacagatcaccgcagtcagcggctgatgaagctaaaaggagttggtcccacaactgcctgtgctctggttgcctgtatcggtaatgcacatgattttaaaaatggacggcaactggcggcctggctggggttgactccatcacaatacagtagcggcggaaagtcgaagttaggcaggataacaaaagccggtgattcgtatctgcgaacgcttctggtacagggggctcgttcagtactgattggcgctgagaaaaggactgactcattcagtcgttgggtctgttcactggtcgaacgcagaggatactggcgcgctgttgtggccatcgccgccaaaaatgcaaggctgtgctgggcatcattgcattacggtgatgatttcaggctgtattcagccagctaaagcaggcatcaaccgtatgaccatctgatctgcaactcgttgatgataaagggttagaccccgtgaggtatatctgattattgtacaggatatacgtatccgcttaacgaacaagagcctcacgcgcgtctttcatcagggtccgaatcgataacgattcattatggccgtttatagtaccgcagtctctcccctttatttttaactgtagtgcagacaaaccattaataccgacgttgactgttcggggaagcccttata

SEQ ID NO: 5471 - DNA, 1480 bp, unidentified
  source 1..1480: mol_type = unassigned DNA; note = element_860e9b5
  misc_feature 1: note = core
  misc_feature 2..262: note = LE
  misc_feature 263..1465: note = CDS
  misc_feature 1466..1480: note = RE
  misc_feature 9..237: note = bridgeRNA
cgttatgttttctgcggtcctgcaagagggctgctggcctccgggcccggcatgactgttcccccctgtcgaacggatgacctggggggtggtgtcaccgggtctgggaggcgccgttggagacgctgatgagaggtccgactaccgcctggcctggcgcaatgccaggctgcttgcaggcggcaggtctgcataacgtggatgcgcgcatacgacgccaacgccctggccagcaccgcatgaaccccttcgggaggatgggttggactacaccgacgatgcgggcgtcttcctcggcctagacgtcggcaagagcgcccatcacgggcacgggctgaccccggccgggaagaaggtcttcgacaggcaactgcccaacagcgagcccaagctgcgggccgtcttcgacaaactgaccgccaagttcggcaccgtgctggtgatcgtggaccagcccgcctcgatcggagccctccccctcacagtcgcccgggacgccggctgcaaggtcgcctacctgcccggcctatccatgcggcggatcgccgacctctacccgggcgaggcgaagaccgacgccaaagacgccgcggtgatcgcggacgccgcccgcaccatgccgcacaccctgcgctcgctggaactgaccgacgagatcaccgccgagctgaccgtgctggtgggcttcgaccaagatctcgcagccgaggccacccgcacctcgaaccggatacgcggcctgctcacccagttccatcccagcctggaacgtgttctgggcccgcgcctggaccaccctgcggtgacctggctcctggaacgctacggctcccccctcgccctgcgcaaagccggacgccgcaagctggttgaggtgatccgacccaaggctccacgcatggcccaacggctgatcgacgaggtgttcgaggcgctcgacgagcagaccgtcgtggtcccgggcaccggcaccctcgacctcgtgatcccgtccctggcccgttccctcgcggccgtccacgaacagcgacgagccctggaaacccaaatcggccaactgctggaggcccaccctctttccgcggtcctgacctcgattccgggagtcgcggtcaggaccgccgccaccttgctcgtcaccgtcggcgacggcaccagcttccccaccgctgcccacctggcctcctatgccggccttgccccgacgaccaagtcgtcggggacctcgatccacgccgaacacgcacccaaaggcggcaaccgtcaattcaaacgcgcaatgttcctgtcggctttcgctgcgctgcacgatcccgtatcccgcacctactacgaccgatgccgggcacggggcaagacccacacacaagcactgctccgcctagcccgccaacggatcaacgtgctgttcgcgatgctccgcgacggcaccttctaccaacccaaaaccccccgcaccgcttgacgaaagacatagagg

SEQ ID NO: 5472 - DNA, 1353 bp, unidentified
  source 1..1353: mol_type = unassigned DNA; note = element_8611e6e
  misc_feature 1: note = core
  misc_feature 2..79: note = LE
  misc_feature 80..1111: note = CDS
  misc_feature 1112..1353: note = RE
  misc_feature 1127..1350: note = bridgeRNA
taatggaatggtccctcccttccgcccccgactgaacgcctaccctttcagtcgggggaacctctcggagaccgccaccatgaagactgcaaatctaacgctcaccagtgtcgacctgggtaaaaactgcttccactttcatggtcaggacggctccggcaacaagctcttcagctgtaaggtttcacgtaccaaggtgttcgagttcatcgcccaacttccagtgtgtaccttggccatggaagcctgtggcggggctcactacatgggccgattcgccgccagctgcggccatgaaccacggttgatcgccgcacagcacgtcagtcctttcgtcaaaagcaacaagaacgattttgccgatgccgaggcgattggtgaggcagcaagccggcccgcgatgcgcttcgttgcactcaagactgaacaacagcaggcactgtgtttgctcaacggtatccgcgatgcattcattcacgaccgaacggcaacctccaatcgtattcacgcttatctgctggagttcggtatggcacttcagcccagcttcgcgacgatcagaaagctccccgtcatccttgaagaactgaaggcgccccccttggtgattcgcctgctgcaggatctgcatgcacatttcgtttatctggacgggcggatcgacgcattgaccaaggaggtgaggagccaggccgctgaagatgatctagcctcgcgcttgatgactatcccgtgcgttgggccgatcacctccagcgtcctggctgcaactatcggcgacggcaagcagttcaaatgtggccgggactatgcagcgtccatcggactggtgcctcgacaacatacgaccggcggacgaccacgtttgctaggaatcagtaagcgaggcaatccgaatgagcggcgcttggcagtgcagtgctcaaacacgttcatcctgcatcttgaccgacagactggcgcgctagctgactgggtacgcaagatgctggttggacaccatcgaaacgtggtggtttgtgcgctggccaacaaactggctcgaattgcctgggcattggcccatacccatggaatttatgaggcaaggccaagcgtgctgaacgcctgaccctgccgttaccaagcaccacccacctggttttgcgatgctggataacagatgacgtaaacggcctaccgacctgatgaaaaacctgggctcccacacggttttagaaaccgtacaaatattcaggatcatcaggcgcgatttccatcgtggcgcgaacttgggtttgacgccgaatagattgcggcaagccgcccacatcatccagtaatcagtattgcagaaacgggagggaccataga

SEQ ID NO: 5473 - DNA, 1429 bp, unidentified
  source 1..1429: mol_type = unassigned DNA; note = element_861570c
  misc_feature 1: note = core
  misc_feature 2..79: note = LE
  misc_feature 80..1144: note = CDS
  misc_feature 1145..1429: note = RE
  misc_feature 1192..1420: note = bridgeRNA
taatgggatggtccggccgtgctcttgcctcccgtcagcaagtaagctggcaggaggcgccaaatgaaaggagcacgccatgattgagaagcttagcagtgtgatcgcggtgatcggcatcgatatcggcaagaactcgttccacgtcgtcggcctcgatgggcgtggggcaatcgtgctgcggcagaagtggtcgcgtggccaggtagaaacgcggctttctaacatgccggcctgcctgatcggcatggaggcctgtgtcggtgctcatcatctcagccgccggcttaaattacttggccacgatgcccggctgatgccggcgaagtacgtccgcccttactcgaagggacaaaagaacgacttccgggatgcagaggcaatcgccgaggcggtgcaacggccaacgatgaagttcgttgccaccaagaccgcggatcagctcgatctgcaggcgctgcaccgtgtacgagagcggttggtcagccagcgcaccggcattatcaatcaaattcgcgccttcctgttggagcgcggcattgcggtacggcaggggatacgtttcttacgcgccggcttgccaggtattctggctacgccgcccgacgtgctgtcgccacggatggcgcgggtcattgaggaactggctgacgactggcgccggctcgatgagcggatcgagggcttatcgagcgagattgaggcccttgcgcgccaggactccggttgcgagcggctgatgagcgtgcccggcatcgggccgaccatctccagcgcgatggtggccgcgatcggcacgggcgaggccttctccaaaggccgcgacttcgccgcatggcttgggctcgtcccgcgacagatctcgaccggggaccgcacaatcctcggcaagatatcgaagcgtggcaatcgctacctgcgcgttctgttcgtccaggcggcgtgggttgtgctgatcaagcccaagagttgggagcgttacgggctcaaggcctggatcgaggcagccagaaagcggctgcaccgcaacgtgctcgcgattgcgctggccaataagctggcccgcatcgcctggagcgttctggcttggggccggaacttcgaggcgagaaagactgatgatgcggccgcccaatctgtttgatcgtccagcccaagatgaggaacacgcaatgatgtaacccgttctctacccgccgaggtctgcgagaggacgagacgagatggaggatcggtcttcccggcgcccgcgagcactggtgacccaaatggcccgctgaggtctgtccgctaatgagatcgcaggcgcgctgatttccatgatggcccggagcccaacacgctccaatcaaaggccggatacattgatgcaagaccgcttgccaccaactcgacgaaaacctctggcgacgcacggccggaccataca

SEQ ID NO: 5474 - DNA, 1684 bp, unidentified
  source 1..1684: mol_type = unassigned DNA; note = element_8622965
  misc_feature 1..3: note = core
  misc_feature 4..316: note = LE
  misc_feature 317..1609: note = CDS
  misc_feature 1610..1684: note = RE
ttaaccttccattcctttccgcctgcggctccaaggcacacatagtaatgaataattcttgtttgtgcaggcatcttattttatattttaattgaaggagtcttacactacaaagcacggcgaggtgagttgtagattcttgcaactcgttcaagtcaaaacagtatattaaccagtgcaaggctgatcttttcaagcacacatgagtatgtcttttaagtctgcagattaatcattgacttgagtttaatcttttagtgttgatcagtcagtcactgagctccttctctatattcttataaggagccttttgtttatggagattgtttaccctagatcttgtggtgttgacgtgcacaaatctttcattgttgctgttatctgcatctctgaatccgtcaaacccaagtacattaaaaaaagattctcaaccttcaataaccagctcattcaattcagggattggcttattgaaaacaactgtcaaaatgtatgcatggaatcaaccggcaagtactatatccctgtatacaatgcattagaaggacatatttctaatgtcgttgttgccaatcctaaatgggtcaaggctatcaaaggtgagaaggatgacaataaggatgccaaatggattgctgacctctttaaatttggtattgtcagatccagctatatccctgaaaaggatatccgcatcctcagggaatttacccgctatcagtataaacttgtcaatatgcgttcttctgaaaagaatcgtttccaaaatgctttgactactggaaactgtaaacttgatattgtttttagtgatatctttggtaaatctgcttccgctattgtcgatactattttatcaaataatccatatacaagtgaagatattctttctaaagttcatgccggttgtaaagcatctcatgaagacatcctaagtgctgttgaaggtattcagctaaatcagtttcaaaaggctagaattcgaatcgttcagaaacatatggaatatctagattctctacttgatgaaatacagcaccatatcgacttgatggttgccaactacgaagaatacatacagcttctttgtacaataccaggaatcaatagaaaatctgctattaccattatctctgaaatcggcactgatatgtctcagtggtcctctcatcgcaaacttgctgcatgggctggattagctcctggatgtaatgaatcagccggcaaaaagaaatcagttaagatttcaaaagctggtgtttatcttaagccttgccttgttcaggttgcacatgctgccgtaaaagataagaactgcgattactacgcagacaaatttaacaagatatctaaaaggcgcggtaagaaacgagctatcattgcgattgcgagaaaaatacttattgctgtctatcaccttttaaaaactggtgaagtatttaacccaacagatatggcagatgttgaaacaacaaagaagcaacgaatcgaatacgtaaaaaacaatttacgaaatgccttcaatcagctcagccgcactggcttgtctgaagcagagattctacaactcatcagaaaagaatctacgaactcacctcaaatagaatagccatccatttggggaaaggggctttatgcacttttttagggtaaaatttgttttctctttcaatttttattcaga

SEQ ID NO: 5475 - DNA, 1401 bp, unidentified
  source 1..1401: mol_type = unassigned DNA; note = element_862f3e4
  misc_feature 1..2: note = core
  misc_feature 3..78: note = LE
  misc_feature 79..1119: note = CDS
  misc_feature 1120..1401: note = RE
  misc_feature 1117..1388: note = bridgeRNA
tgttggggtggacggcccccttacggcatcgctgtgccagaatgaggtcgtgagaggctcaaacacaggagaccgtccgtggaccagattatccgcatcggcatggatacgtcaaagcacgtcttccagctgcacggggtgaatgccgccgaggagccggtcctgcgcaagaagctgcggcgccaggacatggtggcgttcttcacgaagctgccgccaaccgcggttgcgatagaggcctgcggcggctcgcaccattgggcgcgcctgctgcaagcgttaggccatcaggtgaagatgatcgcaccgcaatttgtgaagccatatgtcaagcgtggcaagaacgatgcggctgatgccaaggcgttgtgtgaggcgatgagccggccaagcatgcgctttgtgcgggtcaaaacggcggagcagcaggcagccctgatgctggtaggcctgcgcgatcggctgatccgtcaacgcacccaactgacgaatgcgatccgcggctacgcggccgagttcggattagttgcggcgaaggggctggtgaagatcgagccgctcttggagcgcattcgagaggatgacacgctgccggctctcgcgcgggagctgtttgagatccacgcgcgggagtacacgcaccttcaggcgcagttggaggagatcgacgacaagctgatggcctggcaccgcgccgatgagcgcagccgacgcttggccgagatccccggggtgggcccgatcggtgctacgatgctggtgatgaagacacctgcccctgaggccttccggtccgcccgccactttgccgcctggctcggcttgacccccaaggatcattcgaccgccggcagggtgcggctgggggtgattacgcgggctggtgacgaggccttgcgcagcgtgctggtggtcggcgccacggctgtcatccggcatgctcagcggagccagaccagggcgtcgccctggctcatcgcgctgctcaagcgcaagccgccgaagctggcagcggtggccctggctaacaagatcgcccggatcgcctggaagctgatggtctccggcgagcactacgctgcgcggattggtcccgtcggatcgggtggtgcggcgtagattgcggctcggcacggtgagccgatgacctgccctcgtgcggagccgatgacggaacttgcaaggtgacgaggagatggtgtgatcgatcgatccagatcccgagacactccgaatgtgccactggccctttgaggtcgcgaaagtgtttggaactcgggtggcggaacccatcttggccagcgttcatgtgcgagcgcgacaacaggccggacatatgaccgcaagcgatccgatcaaactatatacaaatcttcttgcgaggcgggggccgtccacata

SEQ ID NO: 5476 - DNA, 1569 bp, unidentified
  source 1..1569: mol_type = unassigned DNA; note = element_8630582
  misc_feature 1..2: note = core
  misc_feature 3..260: note = LE
  misc_feature 261..1436: note = CDS
  misc_feature 1437..1569: note = RE
  misc_feature 8..227: note = bridgeRNA
ctcgtataattaaatagtagtagtttttaacgttcctctccaagaacggcagaaatctgctatactgtaagaagatactgtggatcagtttttttcacctaccgcaagacggtttacgggaggctctgaccacagcctctttgtctgtttgttaatcagttagtttccgctcgacggattataaagaacgaggttacaaccgcaaagagttatgtggtatcttcacacagtatcattaatttcacaaaggagtaactcttatgatctacgttggtatcgacgtttccaaagataagcatgattgctgtatcttatcttccgacggacaagtccttttgaaaccgttttccattctcaataatctcgacggctttaattgtctttactcagctatctgttcttatgaagaaaatcctgacaaaattaaagtaggacttgaagccaccggacattacagtttcaacattttgggctacctgctggataagaatctgaattgtttcctcttcaatcctttacactctaatctcttccgtaaatctcttactctcagaaagaccaagacggataaggtagactccgttattattgcgaaaatgcttttgtctgaggtggactcaaagccctactcaaaagcattataccacaatgagcaattaaagtcactttctcgttatagattttctaaagttcgcgaaagagttatcttaaaacaacaactctcgagattagtcaacattttgttccccgaactggaaaaactcgtcccttcaatacatctttcttccgtgtatgtacttttagaagaatttccgtctgcctctttgattgcctctgctcatttaacaagaataactaacttattatcaaactcttcaaaagggcattataagaaaaataaggctatcgaaatccgtaaagccgctgtctcttccgtcggttgcgttatgcctgctaaatccttagaattaaaacataccattcatcttatccgtattctttccgaagaaatcaacgaaatcgaattgcatattcaggaaatcttaggcaaaatccaatccccgataacttccattcccggtttaggatttcgcatggcgtctgtaattctttcagaaatcggagacttttccagattcgattctccggataagatccttgcttttgcaggcgtttctccgtccacttatcaatccggcaaacttgacaacgcctatgctcatatggagaaacggggttcccgttatttacgctacgcactttataatgccgctatctatgtttgtaattgggacaaaacctttgccaattaccttcataaaaagcgttccgaaggtaagcactactatgttgccatttcgcatgtaattaaaaaacttgtgcgagttatttatcatctccaactaaccggagatgtttataaaaccgtcgtttaacccttcctatcttaatccttgttgttgagcagcctcaggggtgctcattttctcttactcttttttgcaatttgtaagtttgaaaaaatttctttcttaacattgcttttttgcttgacttttaatagttagt

SEQ ID NO: 5477 - DNA, 1416 bp, unidentified
  source 1..1416: mol_type = unassigned DNA; note = element_86372f5
  misc_feature 1..3: note = core
  misc_feature 4..79: note = LE
  misc_feature 80..1132: note = CDS
  misc_feature 1133..1416: note = RE
  misc_feature 1139..1403: note = bridgeRNA
tgatgtagtggatggcgccctcggacggcatcgaatgagtcaaaataggcttagtgaaccttgagaggagccatccaccatgaataagattacgacaattggacttgatatcgcaaagaatgttttccagcttcatggaattgatgcggacgggcaagtcgtcctgcgaaaatcgttacgacgcgggcaggttcggccgttcttcgagaaacttgctccctgtctgatcggtatggaagcttgcgcaacagcccatcattgggcacggacgttgatagcaaatggccatgatgtccggctgatccctccgagctacatcaagccatacttgcgtcgacaaaagagcgatgctgccgatgccgccgctatttgtgaagccgtcacgcgaccatcaatgcggtttgttccagtcaagagtgaaaaccaacaggcgacattgatgctgcatagcgcacgcgagctccttatctctcagcgtaccgcgctcatcaatgctttgcgtggtcattttgccgaacttggcattgtcgtacctcagggggctcacaacgcacgacagctaatagccattctggaagatgataaaggacacacctcgcaagcagttcgtattgcacttggaccgctagcgacagccttgatagagatcaaggggcagatcgcaaagcttgacaaggcgatcctcgctgcgcatcgcaacgacgatgtcagtctccggctttcgacaattcccggaatcggccctgtcatagctacttgtctttccgccagcgtgccggacgcaaagctgtttgagggcgggcgagagtttgcagcctggttgggccttgttcccaggcagcattcaacgggtggaaagccaaggctgggctccatttccaaaatgggcaacagacgcatgcgcaagcttcttgtcgttggggcacatgctgcgctttacaggatgaagaatggcaagacccagtccccattggcggagtgggcgcaaaccctgttggcgaaaaaacccttcaaactcgttgcggtcgctctcgcaaacaagattgcgcgcgttgcctgggcgatcatggcgcggaatatacaattccagctggactttgtgcctgatcaccgggcgctgacttcagtgtaggcatgtagaagcgaagaagctctgcctttcggggcaccacagttggcggagtgacgatggtatgatgtgacagcaaagcggaatggaccgcacgagccgaagaacccgtggtgttgtcttgcgcatcaacagcgcgacaatgtgatagggatcggttctcgcggacaacatcagggccagcggtcatatcgtgccgcataaacaggccgaagacatgactgcacccgacccgcaaacctaaaacatcaccaaaatcatattgccaaacgggcgccatccagaca

SEQ ID NO: 5478 - DNA, 1396 bp, unidentified
  source 1..1396: mol_type = unassigned DNA; note = element_863b683
  misc_feature 1: note = core
  misc_feature 2..87: note = LE
  misc_feature 88..1122: note = CDS
  misc_feature 1123..1396: note = RE
  misc_feature 1137..1387: note = bridgeRNA
caatggaatggacgcctccttcctcctgcattcaggcgtataactatgtgatagttcgtcttcatcataattaaaggggaaaccgccatgagtaacgcaactctgattggtatcgatctggctaaaaatgtattccatatgcatgctgttgataacaaaggtaaccagataaaagcgttgaagctttctcgtcttaaactcgaggaatatctgcaccgtagtgagcctgttattgtcacaatggaagcctgcgccagttcgcatttctgggggcgactctgcatatcactggggcatgaggtacggttgatttccccccagtttgtcaaacccttcgtcaaatcaaacaaaaacgatcgtaacgatgctcgtgctatctgcgaggcggcgcttcggccagatatgcatttcgttcctgttaaaacagttgaacagcaggcagtattgagtctgcatcgcatccgcgaagttctgacaggacagagaacagccactataaatcagctcagggggctattgtgtgaattcggacttccggcccctgtcgggcgtagcggtttatacaaaatccttcccgcattactggaggaattgagtgaattctcgcccggatttctcgtgacctgcatcagccagcaatgggagcatttgcaacaactggagcagcatattaacgatgtgacacatcagatcgagacgcatgccagacaatctgatgttgcccgccgcctgcagaccattccgggaattggtccgattacggcttccgcgctggatgccaggcagtttcgggcaggtcggcagttggcagcgtggctcggtctcgtacccagacagcattcgacaggaggaaaacctgtgttactgagaaccagcaagcggggagactgttatcttcggcaactatttgtgcatggagcccgggccgttatctcagccgcacagtgcaacgaggggaaaagagataagaccatcaccgggtggctgagcagaaaacatatcaatgtggcagtggtggccatggcaaacaggaacgcccggattgcgtgggccgttatcgcttacgaacgcacctatgatacacagtttcgtgaacagcttgctgacagattgttggcctgaacagatgaaggccccccttcccggattgctacaggtgattaactgacataatggcgcagacaggtcagaccggtgctggaacatcccgtggagttcgatagtcaggagctttccgctcaagacttagcggtcgtttgggagccagcaagcagattccattatgggcagcgtacgataaactgacgcacaaagagcccggatatacgactgcgatcttcactgccggcaccagaatggcaacaattacctggcaaaacaggaggcgtccaatata

SEQ ID NO: 5479 - DNA, 1311 bp, unidentified
  source 1..1311: mol_type = unassigned DNA; note = element_86407fb
  misc_feature 1: note = core
  misc_feature 2..67: note = LE
  misc_feature 68..1090: note = CDS
  misc_feature 1091..1311: note = RE
  misc_feature 1102..1297: note = bridgeRNA
taatgggatggactacctccaccctctgcgcttaactgaataaaatacattcagcgggagaataaccatgactatcaaatttctgggtatcgatttggctaaaaatgttttccagctttgtggactgaatcaggccggaaaaccggtatacagtaaacgggtttcgcgaaagattttgctccagaccgtggccaacatcccggcttgcctgattggagtcgaagcttcaacaggcgcattttactggcaacgtgagtttgaaaagctgggccataatgtcaaagttattagccctcagtttgtaaaacctttcgtccgggggcaaaaaaatgacgggaatgatgcgcaggctatcggcattgcccttatgcagccgacgatgcgatttgttccccccaaaagtccggagcaacaggatattcaggccctccacagagcccgacaacgcattgttaaccatcgtacagcaactgtctgtcagatcaggggattattactggatcgggggttcactattggtgcagctatttccagagtaaagcgtgccgttcctcttattattgaagatgttgagaacggattaagtaccaggatgcgtaaaacagtcgctgagctctttgatctgtttatggatttgggacgtcgtattactttctttgataaagaaatagaggccatattcagacagtccgaaccctgccagcgtattgcaaaaataaaaggtattggtcccaaaacagcgacagctgtggtagctgctataggaaaaggctcagaatttaagaatggccgccactttgccacctggctcgggcttgtcccacgacagtattcgagcggagacagacaggtacttatgaatatgactaaaaaaggcgataagcatttgaggaccttgtttatccatggggccaggtccgtcgtcagggttgcagagaataataatgatagtgcaatgaatcagtgggttaatcaattaaaagaacgaagaggcgctaataaaactactgttgcagtcgcaaacaagaatgcccggattgtctggtcgattttgaaaaataatacagaatatcaatctgttgtgatttaaagcttgccggaaaaagttgcagagtattgaaaaatggtgacaggttgcacctgcacaatcggaacctgactattatattggcctcagaggccgtccagttgttgaggcgattgtgtgcggattacccatttgggcacaggtcagtatccctgatgccggatagatgtaagcaacaacctaaaaccagattcagtacttgcaaaacggaggtagtccataga

SEQ ID NO: 5480 - DNA, 1138 bp, unidentified
  source 1..1138: mol_type = unassigned DNA; note = element_8643357
  misc_feature 1..2: note = core
  misc_feature 3..166: note = LE
  misc_feature 167..1123: note = CDS
  misc_feature 1124..1138: note = RE
  misc_feature 15..181: note = bridgeRNA
cttgtatcttgccgatggtgcttccaaaccgactcatgcagcccggaacaaccaggggcacagaagcccgcccaatagcacagggcgcgtgagttggaccgttcttccggaacccgaacggttgtccgagaagagttcgcatagacaaggatgggagtggaagaacatgtttgaagcaccgttcctcggcatcgacgtctcgcaagacgctctggaaattgctagcagtagctccgaaacgacttggcggtgcaccaacgacacggcgagcatcgaaacgcttgcgacgcaaatacaggcccttaggccaacgcttgtcgtgctcgaggctactggcgggtacgagttcgaagctgcctgcgcattgcaggcggttgggctcgctgtggccgtcgtaaacccgcggcaggcacgtgatttcgcccgctccatgggtctgttggccaagaccgacagcctcgacgcgacgatgctggcaagcttcgctcgtgtcttgaaccagcatccgcatcgcgaacgttttatcaagccgctcgcgaacgccgacctgcagcgcctgcaggcgctggttcttaggcggcgccagcttgtaggcatgctggtgtccgaacgacagcgattgggacaagctcacgtgtgcgctcgggcgagcattaagagcacgatcgatttcctcaaagcccagattgcggatctcgagcgggagtcgggcgagcacgtacgtcggcatcacgccgagcttgcctccgtcctggggagcgtgcgtggcgtcggcccggccacgatctccacgctgctggccgagctgcccgagctgggtacgctttgccggcggcgcattgctgccttggtaggcgtggctccgcttaaccgcgattccggacgcatgcgagggcggcgttcgatttggggtggcagagccgaggtgcggcgagcgctgtacatggccacgctggttgcagtgcgtcacaacgccgtcttcaaagctttttacgggcgcctggttggggccggtaagccgaagaaggtcgcactcgtcgccgccatgcgaaagttgctcaccaccctgaattccatcgccaaatcggggttgcgctgggacgacgctcttcattctgtttgacattcaagacggttg

SEQ ID NO: 5481 - DNA, 1313 bp, unidentified
  source 1..1313: mol_type = unassigned DNA; note = element_8646a2f
  misc_feature 1: note = core
  misc_feature 2..76: note = LE
  misc_feature 77..1099: note = CDS
  misc_feature 1100..1313: note = RE
  misc_feature 1113..1311: note = bridgeRNA
atggacacctccccataatcggcttcagtgagccatgctgtaagagcaaaccaacagcaaaatgaagaggtgtccaatggaacaaattatcggaattgatctggcaaagcgagtctttcaggtgcatgttgcttctttttcagggcaaacgcatatcaataagatgatttcacgggataaacttcccgcgttcattgcgcagcaaccaccttctctgatagtgacggaagcctgcggtagcgctaatttctgggccagaaagtgccttcagtatgggcatgaagtaaaacaaatcagtccacaatatgtctccccattcagaatgggtaataaaaacgataaaaatgatgctattgcaattgttgaagcggcttgccgctcaggaatgcgttacgtgccgggtaaaagcatcagacagcaggatatgcagtgtctgcaccgggtgcgccagcgtttaatgaaaaaccggaccgcactgattaatcagatacgcggcctggcacttgaatacggtatcgccatgccggaaggcgcacataaagtcacgtcatgtttgccgggttatctggaagatgcagaaaatgaactcaccacgctcagtcgagagctgttccaggagatgttgttggagctacaggacagccagcaacgcattaaaacgctggatgtacgcttgaaacagatgaatgcacaaaacgaggatacactgcggcttgaaaatattccgggtgtcgggtcactgggtgcatcggcactgactatagccctgggcgatagcaaggattttaataatggtcggcatttcgccagttatttggggttagtgcctggtgagcatagcagcggcggtaaaaccagactgcagggaataacgaagcgtggagatggttacctgcgcggcttgcttatccacggtgcccgctccgtagtttatcgtacagttaatctcccggatgagcggtgtagccacctccagagatggctgaagggtataattgcccggtgcggtgtgaataaggccgttgtggcactggcgaacaagaatgcccggatagcctgggctctggtaaaccagaaaacggactatattaccaagtaacaatttgatttataagaagtccaaatagttgatgtactgacaggtagaaccgactctctgtaaacctgacaaatagctcggccatagcaagccctggcaataatgaggccagagagtacggatgttcatcagggctcacgaagccggatatatgtgtgtgactactttgtcagaaaaagatctgcccgtgcttgcactgggtcggtgtccatat

SEQ ID NO: 5482 - DNA, 1501 bp, unidentified
  source 1..1501: mol_type = unassigned DNA; note = element_8648c50
  misc_feature 1..2: note = core
  misc_feature 3..285: note = LE
  misc_feature 286..1482: note = CDS
  misc_feature 1483..1501: note = RE
  misc_feature 110..285: note = bridgeRNA
agcatgggccaccccgttggggtggttatgcgaccctgaaactctgtcagagatcaaaatagctcggtggtatcaggggtgcgcagttggcgctgctagaatctcagtcacaacctggctcggcagctaaggccgcaatgtctttggtgcgtttctgcccgacactaagcatggctccggtattggcgattgtgtagatggtggcggccgttgtcctggaaaggagaacggcccgaccccgctggggagattgagcagtttccgccaaccgggccgctgaaggcgatggccgattggctgaagcaatgcgggatgcgaactgtcgcgatgcaatccaccggagtctattgggtcgcggtatacgacattctggaacaagcgggtctcgaagtgtacctggtgaatgcccgggacacgaagaatctgccagggcgcaaaagcgacgtacaagagagccagtggctgatgaagctgcacacgtatggactgttgcgaaattcctttcggccctcgcaggagatccgcacgatgcggacgtattggcggcagcggaatgatctggtgcggagtgccggtcggcacatccagcggatgcagaaagcgctgactcagatgaacatccagttggccaatgtgttgagcgatttgagtggagtgacaggacaagcgatcatcaaggccattctcacaggtgaacgcaatgcgcataagctggctgagtttagggatccccgggtgaaggccagtaaggaacagattgcgctgagtctggagggcaattggcaaccagatttgctgtttgtccttaagcaggagcaggatggctatgagttctgccagaagcaaatggccgagtgtgatcgccagctccaccagtatctcgaacagagagaggatcgcagtcatggtgccggtttgccgaaagagaagcggaaagggcggctcacgaaaaagaaggggaataagccgcagttcgacttacgccaagggttgtttcgcctgaccggtacggacctgacccggatcgactgcattgatgtcatgaccgcgacgaccgtcattagcgaagcaggatgggatatgagcaaatggcaaaccgagaaccactttgtttcctggctgcggctgtgcccggacaatcgcatcagcggcgacaaggtcattgggaaagggcggctgcccaccaataatccggtcagtatcgccttgaagatggcggccagcacattgcggctaagcaaaacgtatctaggagcgcaattccgtcgattccgaaccaggctaggggcccccatcgcaatcaaggccatggcggccaagctggctcgcttggtctaccgcatgctgcgctacgggatcaaatacgtcgaccaaggagcggcggcctacgaagcgcaacaccggcaattccagatcaagcagctcaagtacaaagccgccagcctcggataccaagtgaccccaataccggccgcggcctaacaaccaggagtttctgggg

SEQ ID NO: 5483 - DNA, 1463 bp, unidentified
  source 1..1463: mol_type = unassigned DNA; note = element_864bf70
  misc_feature 1..2: note = core
  misc_feature 3..227: note = LE
  misc_feature 228..1442: note = CDS
  misc_feature 1443..1463: note = RE
  misc_feature 7..228: note = bridgeRNA
ctaatgggggtcgaccatctcgctctttggggtgaggatggttccgagccgctggccggtcagcactcgtcgagcctggacgttgagtcctagtcctagatcgtgcgccggctggtcggtgaggagaccgtcgatggctggtgggatggcgtgcctcgagcactgaaccattagggagctgctggtcgcctcgggctcggatccgacaacgacccaggaggtgccagatgcgtgtgtttgttggtcatgactgggcggaggcccaccatgacgtgctggtcgaggacggtgatggccgccggctcggcggcggccgcctgcccgatggcctggagggcatcagccggttccacgagctggtcgcaccccacatcggagatccatcggaggtggtcgtggccaccgagaccgaccgcggcctgttcgtcggcgcgctggtcgcggccggctacacggtgttggcggtcaacccgatgtcgacgtcgcgctaccgcgagcggcacacgacctcgggcgcgaagtccgatcccggtgacgcccgggtgctcgccgagctggcccgcaccgacagccacaaccaccggccggttgccggcgacaccgagatggccgaagccgtgaaggtcctggcccgggcccaccagtcattgatctggacccgccagcgtcagctcaaccagctccgctcgacactgcgcgagttctaccctgctgcgctcgaagcgttcgctgagctgggccacagcgatgccctggccgtgctcgccgtcgcgccgaccccgacgctgggacggcaggcgtcccggtcgaagatcgcgtctgcgctgcgacgcggcggcaggcaacggcgcatcgacgaacgagccgagcagatccaaacggcgctgcgcaccgaccagctcaccgcaccggctctggtgagcgaagccatgggctcaacggtcaccgccctcgtgtcgatcgcaggggagctcaccgcccagatcgcccgcatcgaggccgagatggccgagagttttgatcagcacccggacgccgagatcatccgttccctgccaggactggggatgatcctgggcgcccgggtgctcgcagagttcggcgatgacccgaaccgctacgcagacgccaagtgtcgcaagaactacgccggcacgtcacccatcacccgagcctccggcaagagcaacgccgtgctcgcccgctacgcccgcaaccgccacctctcagacgcctgctacctctgggcgttcgcgacgctcacctgcagccccggagcccgcgccttctacgaccagcaccgagcagccggcgacacccacagccgagcactgcgagccctcgccaaccgcctcgtcggcatcctccacggctgcctccgccaccgaaccctctacgacgagcacaccgcatgggggcaccgcagccaactcgccgcttgacacctacggggcgtgggatgt

SEQ ID NO: 5484 - DNA, 1244 bp, unidentified
  source 1..1244: mol_type = unassigned DNA; note = element_864f235
  misc_feature 1..2: note = core
  misc_feature 3..245: note = LE
  misc_feature 246..1226: note = CDS
  misc_feature 1227..1244: note = RE
  misc_feature 6..212: note = bridgeRNA
cttatgtgtcgattctcctcggaggttgggggagaatcgccgactgatcatcggtgggaacggggagacgccgtcgggctcctctggcttcgcgcctgcgccgtagattcgcgcccccgttccgttttatctgccgcaagctgcaacggtatcttaggcccgcccctggcgtgagcctgcacgtgtaaggatcggcttggcggatcttcgatggtcggacacctgaaccgaacgaggattggctgatgacagaatccatgattggcatcgacgtggccaaggcaacctttgacgtggccgcgccgctggaaccgaagggcaagtaccgcaccaaagcgaagttgccgaacacgcccgccggcttcaccttgctgagcgactggctggatcgccacgtgccgggagcggcggtgtgcatggaagcgacgggcgtgtatcacgaagcattggccactttcctggtcgagcgcggcgtgaccgtttacgtggccaacccggcccaggtcgccgcctatgccaagagcgagttgtcgaggaccaagaccgatcatgccgatgccaagctgatcgcccgctttgcgatggcgcagttgcaggtgggcaccaccttgcggccgtgggtgccgcccacgcccgcccagcgcaaactgcgcgccctgatccaccggctgaacgatctggagggcatgcgccagatggaacgcaaccgactggacgtcagcgatcaggcggtgcgcggctccatcgccgacgtgatggagacattggacgcccagatcgcagagctgaagaaggaaatcgacaaccacatcgactcggatccggacttacgccgcgatgccggcctgctgacctccattccggggattggcgagctgacggcggccttcatgttgggctgtgcgggcgacctgcgccggttcgacgacccgcgcaagctcgatgccttcgccggcatgaatcccgccatccgcgagtcgggcaagtgggtcggtcaaagccgcctgtccaagctcggtcacgccttgttgcgcgccaagctctacatgccggcgatgacggcgatccgccacaacgtcgccgtgcgcgccttgttcgatcgactggtcgctcgcggcaagccacgcaaactggcgctgggtgccgccatgcgcaagctgctccacctcgcttggggggttatccgctcaggtaagaatttcgaccccagcatcgcgcttgcctgacggacggcaagacggtat

SEQ ID NO: 5485 - DNA, 1372 bp, unidentified
  source 1..1372: mol_type = unassigned DNA; note = element_865082e
  misc_feature 1..2: note = core
  misc_feature 3..86: note = LE
  misc_feature 87..1109: note = CDS
  misc_feature 1110..1372: note = RE
  misc_feature 1080..1359: note = bridgeRNA
agatggggtggttgccgccctccccagacggcatcgcagtgtgccaggatgtggtcggataggccacaaagcggagaggacggcatatgaagaatacaataatcggagtggatctggcaaagaacgttttccagctacacggcacatcgatgacgggcgaggtaaagttccgcaagaaactggtgcgtggccagtttcttcgcttcatggcggatcaggctccggcgctggtggctatggaggcttgcggcagtgcgcattattgggctcgtgagctggctgcgctcgggcacgaggtcaagctgattgctccccagtatgtccgtccctttgtgaagcgccagaagaacgacgctgccgacgccgaggctattgtcactgcggcccgtcagcctgatatgcgcttcgttgagccgaagacggtggagcagcaggcgagagccgttctgttcagtgcccgcgaacgtatcgttcatcagcgcacggaattggtgaacgctttgcgcgccgtactctacgaatacgggcaggttgttccgctcggcatcggtcatgtcaagcgcatcgagcagatgatcgaagacgtcgatctgccggcgatcgtgcgggaagaatgctgcgatctgctggggcagattggtgagaagacggcccggatcgaacagaagacgaagaagcttggcgagctttcaaagcaaagcgacaccgcccgccggcttcagacaatgcccggcgtgggcccgctgaccgcgttggctgtcgaggctttcgcgccagcgatggaaggcttccgctgcggtcgggattttgccgcgtggctcggcctcgtgccacgacagttctcatctggcggcaaggaacgacttggtcgagtatcgaaagccggtcaggctgatatccgacggcttcttatcatcggcgcaatggcgcgggtgaactgggctagccgaaagcctccgacacagggaagctggttgtctcgtatgctgagcaaaaagccgagaatgttggtggcgatcgcgctggcgaacaagatggctcggaagatatgggccatgctaacaaaacaggaagattatcgagatttgacggcgggcgtaacggcgtaagccgatgacggacaacgccgacaaaggtgtgagaagtcgatgacctgaatgggcgaatgatcgaaatgatctggatagggaaaaccagcttatccctttgagctgaagaaaactcggattaaagatttggacccaatccgcagatcaccataccggccagcggcctctgaaagcgccgcgcaaaaaggcctgacagaagaccgcactcgatcacacgttcagacagtcaaaaaacttcttgcgcaacgggcggcaaccacaga

SEQ ID NO: 5486 - DNA, 1323 bp, unidentified
  source 1..1323: mol_type = unassigned DNA; note = element_8658120
  misc_feature 1: note = core
  misc_feature 2..82: note = LE
  misc_feature 83..1060: note = CDS
  misc_feature 1061..1323: note = RE
  misc_feature 1084..1273: note = bridgeRNA
gaatggaagggactcccctggatatgcacctgattaactcttgtgcaatcatggggtaaacatagccccggagggattcgttatgaccatcgccacaatcggtattgaccttgccaaaaatgtgtttgctgttcatggtgttgaccacaatggcaagaccgttctggttaaatccagagtaacccgcgccgctcttccagagctgattgctggtttaccacccagtgttattgggatggaagcatgctccggcgcgcactactgggcaaggttatttcggcagtatggtcatgagccgcgcctgatggctgctaagtttgtatcgccttaccgcatggccggtaaatcagggaaaaatgatgcagctgatgctcaggctatctgcgaagcggttcgtcgcccacatatgcggtttttaccggttaaggatgagagccagcaggctatgcagtgtatgcaccgcacccgacagggttttatcgaagagaaaacagcaatatataacagattaagaggcctgatatccgaatttggtgttattaccccacaaagcaccgatgccctgcgccgcatagtttctgaacagaaaagttatttaccgcttcaggttcagcaatgtgtcgatgacctcctggaacatattgatcgcattgaagataaagtttctgaatacgaccgaaccctgtcatgtatggccaaaacagatcaccgcagccaacgcctgatggagctgaaagggattggtcccacaacggactgtgcgttggtcgccagtattggtaatgcacatgattttaagaatggccgtcaactggccgcctggctgggactgacgccatcgcaatacagcagtggcggaaagtcgaagcttggcagaataacgaaggctggcgattcgtatctgagaacacttctggttcagggggctcgttgggtctgctcactggtcgaacgcagaggatactggcgcgctgttgttgccatcgccgccaaaaatgcaaggctgtgctgggcatcattacattacggtgatgatttcaagttgtactcagtcagctaaagctcgaagcagtagtataaccatctgacctgcaactcgttgatgataaagggttagaccccgtgaggtatatctgattatagtacaggatatacgtatccgcttaccgaacgagagcctcacgagcgtctttcatcagggcccaaatcgataacgattcattatggccgtttatagtaccgcagtctcttccctttatttttaactgtagtgcagacagaaaccgtaaacaccggcgttgacatgccggggaagcccttata

SEQ ID NO: 5487 - DNA, 1355 bp, unidentified
  source 1..1355: mol_type = unassigned DNA; note = element_8661dbd
  misc_feature 1..2: note = core
  misc_feature 3..74: note = LE
  misc_feature 75..1100: note = CDS
  misc_feature 1101..1355: note = RE
  misc_feature 1076..1345: note = bridgeRNA
tgatgatgtagacgccccccgacggcagtgatgtgccaaagtggttttgtgtgaacctacattggagagcgtccatggatgaaattagcactatcgggctggatctggcgaagaatgtgtttcaggtgcacggcgcagatgcatctgggcaggttgtcatccgaaagcagcttcggcggggtcaggtcctcgcgtttttcagatcgcagctgctttgtgttgtagcgatggaggcctgctcaggggctcatttctgggcccgtgagatcgagaaactcggccacgtggctcggttgatccctcctgcctatgtcaagccatttgtgaagcgccagaagaatgacatggcggatgccgaggcgatttgtgaagcggcacagcgcccgacgatgcgctttgtcgcggtgaagagtgaggaaactcaaggcgcagcggccgtgtttcgtgtccgcgagcttctgatccgacagcggacacagacgatcaacgccctccgtgggcatctggcggagttcggcgaggtctcgccacaaggggcggcaaatgcacgtcggctcatcgcgctggtcgaagacgagggagcggccctgcccgcgacgatgcggtcggcgctgagtgcactggtggcggtcctcaatcacctcgaagaaaaaatatctgaacttgacgctgagatcgcctgccgcgcccgcgaaaacgacaccgcacgacggctgatgacgatccctggcattggccccctgattgcgacggcgcttgccaccttggcaccaccgcccgagatgtttcggcgtggtcgcgactttgcggcttggttgggcctcactccgcgacagcattcgacgggtgggaagcaacggatgggggctacaacaaagatgggagagcgatctttgcgcaggctccttatcataggcgccaatgctgtcgtgacgtggcgatcacgcaacggggcggcaccagggtcatggctggctggaataatcgcgcgcaagccaacgatgttggtaagggttgcgctggccaacaagatggcgcggatcgtctgggcattgttggccaaaggaggagtataccgagctccggctgcagtggcgtaagccgtttgtagctgagagacgtcggagcggaggaggtcagaggaaggtatggcgcaatagtcgtgagacaggaccgggaaaaccagattgcgacagagtgctttaagcacgcggttttgaattggacccgaccctcgaacaccatacgggcccgcggcatgcgaaacgccgcatcagaggccggacacatgtcagcacccgactgcgcgcgaaatgccaaccaaaaaaacctcttgcgttaggggcgtctacaca

SEQ ID NO: 5488 - DNA, 1195 bp, unidentified
  source 1..1195: mol_type = unassigned DNA; note = element_866cedc
  misc_feature 1: note = core
  misc_feature 2..216: note = LE
  misc_feature 217..1185: note = CDS
  misc_feature 1186..1195: note = RE
  misc_feature 33..198: note = bridgeRNA
ttgtctctcaaatttatgttttactgtttgggaagctgggatcgagccccgggatggccatcccggggctcgcgcggcaaagcgcccgtacaggaataggtgtcaacgaccgacttcatgaagggactttgccgctccagcttcgcatcgcttgctgacttgaatgggctatccgtcggacacgcccgcagacaattcgaagcatggagcccgattatgatggcagaacccaccgaaatccagtccatcctcggcctggacgtctcccgcgacaccgtcaccctatgcgacggtagacgccacaccgtaaccgtcgccaatgaagccgatgcgctgcgtgccgccctgttgccctaccagggcaccgccacgctcgccgtctgcgaggccaccggcggctatgaggacatcctgcttggtgtgctcttggaactggccattcctgcccaccgcgccgaccccgccaaggtcaaggcctatatcgcatccttcggcaagcgcgccaagaatgatccgatcgatgcccgctggctgtcccgctatggccgcgaccgtgccaccacactgccccgctggcaaccggctgatcccactcagcagaagctcgagctgctcgttgcccgacgtctcgaccttgtcgccatgcgggtgcaggagcagaaccgcctgaaagccccgcgcagccgcctcatcgccgacaatatccgcgaccatctcgccgaactggagcgccatatcgaagccctcaatgccgagatcgacaccctggtcggcgaaagccgcgatctggcactgcgagcccaacagctgcgttcggtgcccggtgtcggacctgtcctggcgccgctgctcttggccgtcatacccgaactcggcaccctcaaccgccgccaggtggcaagccttgccggtgtcgccccgcatcccaaagacagcggcaaggccaactggcaccgcagcaccaccggcggacggcgccagatccgaccggcgctcttcatcgccgctctcgctgcctgccgcggcgacaatccgctcgctgtcgcctacaaggcgctgctcaaggccgcaaaacccaagcgcgtcgctctcacggccatcatgcgcaagatcatcaccatcgcaaacgcccgcgtcagagacgccgtgcgacaccaaaatgaaatagggaagatcaacgcataaactgacttgg

SEQ ID NO: 5489 - DNA, 1235 bp, unidentified
  source 1..1235: mol_type = unassigned DNA; note = element_867e834
  misc_feature 1..2: note = core
  misc_feature 3..221: note = LE
  misc_feature 222..1211: note = CDS
  misc_feature 1212..1235: note = RE
  misc_feature 53..214: note = bridgeRNA
atggtaagtttgcattagtaaaaatagattaataatttggttaaaaaaatcaaccaaagagcaaaagcagcaggataaaggcagacgcttcactgatactaagatatcgccccggattttattcccctgctgctgttttcttccaaatccggatagaacattgttggtaaaacttttaccatggtggatcagaagaaaacctctttaataaagaatttgttatgtcaaaattatcaaaaaaagtgattggtgtagatgtaggagcaaagtttttaacggtaagttttacggataatgtaaatcaagatcaggtttttaatatccaaaacaatcaacgctcgattttatcgtttctcaagaaatttcccacagaagattattgtttggctatcgaagccacaggtaattatagtagtcgcatactccatctttctttggataatggttttgaatcaagtttgattaactgtatgtctgttaaatatttttcaaggatgaaaaatatcatcagcaaaactgatgcagaagacgccaaagtcatcagactttatggagagatttttcgtccggaagtttatattcccaaaagcatcgagattgaacatcttgaccaagaaataaaacttctgaatgatctcgaggaagagaagcgacggtattcggtaaagctaaagtcacttcgttacaatcctcagctcaatcccaacacggaaaaacattatgaaaagagattaaaacaattagataaagaaatacgggaagtagaaatgaggcttccacaacttcaagatgaagaatttagagaaataaaaggtttgatacaaagtgtttcgggaattggggaaaagacctcccttcaactgatgaccgctacatctggttttaaaaattttgattcatcgaaatcactcgtaaaatattttggattggctccacgtatttatcaatcaggaaagaaatcatattctcccggtaagtgccgtacatccaaaacgcacattagaagtttgctatatgtttgttcctggacggcaataaaacataatacgcagtgcaaagaactttatctgcgactattggaaaaaggaaagcctaaaaaacttgcattaattgcagtttgtaacaagttactgaggatttgttttggtgttgtgaaaaacaaaactgcatatcaacaaaattttcaaaaaaactttaaaattttaacctgaataatttgcatagtaacatagaac

SEQ ID NO: 5490 - DNA, 1200 bp, unidentified
  source 1..1200: mol_type = unassigned DNA; note = element_8683b04
  misc_feature 1..2: note = core
  misc_feature 3..177: note = LE
  misc_feature 178..1197: note = CDS
  misc_feature 1198..1200: note = RE
  misc_feature 40..200: note = bridgeRNA
tcctttagatttgttttttgaaatttaagtagatttatgattgagaaaggaagcaaaagtaaactattcgttcctctgagcttgagactcatatcctgattaagactttagcttccctttcatcaaagactcagatagaaatttgggcttgagacccgttattaaggagttgagcttatgatgaatttctcaaatcatttgttgaatcgtaaaaacaaagttatgaaaaacattattatcggaattgatatcagcaaaaagactttagatatctgcgtaaaagaagaggctattaattattttactattgaaaatgaaattaatgacattactcgtttttttaaaagatatgctaaagaaaatgtaattctggcaatggaaaatacaggcagatacaactggaatatctttgaagcattggaaaaatttaactttaaggtttatgttatatcagctctgcatatcaaaaaaagcattggtcttgtcagagggaaaaatgataaaatcgatgcactgcgtatctgcagtttcattgagaaaaattatcaggagaacagagaatggaagccgagctcctcttctataaaaaaaataaaaatactattgacagaaagagctttaagaataaaaatcaaaaaacagcttatggttcagcagcatgactacaaattaatgaaaggtattgggctggataaagagttaaaaaacttaaacatcaaacttattaaaagtattgaggcacaaattatgattattgaaaatgatattgaagctataatcctaaagaatgaaaatctaaaccaccagcagaaattgataaaatctgttcctggagtgggtcaagttttatcttggacattattatctaaaacagaaggttttacagttataactgatccaagaaaaatggcatgctacagcggagttgtgccttttgattttcaatctggaacatcattaaaaaaaaggcccggagtatcaatgcttgctgataaaaacctaaagactgttttacacatggccgcaatgagtgcaattagacttgataatgacttaagaaaatattacatccgaaaagttgatgaaggaaaaaacaaaatgagtgttttaaacgctgtgagaaacaaaataattcatcgagtttttgcggtaataaaaaatcaaacctcttatcaaaaagatttggttttatcatagaaa

SEQ ID NO: 5491 - DNA, 1159 bp, unidentified
  source 1..1159: mol_type = unassigned DNA; note = element_868635d
  misc_feature 1..2: note = core
  misc_feature 3..148: note = LE
  misc_feature 149..1147: note = CDS
  misc_feature 1148..1159: note = RE
cttctgtatctcgagtttgctaacttaaccccgtcagccacctttgccgaggttgctgacggggcggtgtatggcgtctgagccttgtggcatgaccacgttttctagcgagccagcaccgtctctcttcatcgtctcgaacagttgaatgcggccggtctggaccgcggagcagaaggaagagggtatgaacaaagtatcacacgagcagatcatcggcatagacgtcagccgcgattggcttgatgttcattgtctgccggagactcgtaggttgcgactcccaaacagcgatgagggccacgcgcagcttgtttgtctggcacaatcaacgcacgcgcttgtttgtttcgaggcgactggagggcaggaatggcgtctgtggaccgcgctggatgcagccggtatcgcgactcggcagttgccgccagctcagatcaaagccttcgctgccagccgtggcacacgcgccaagacggatcggatcgatgcggaactcattgcgcgattcatggcatttcgaccagacgcagggcgcgaactgccacatgggaaattgcgccttctcagagccttggcatcaaagcgtgcgcaacttgtcgagacgcgcaagagacttctggcgcagatcagggcgcatgagaagttgggaacggatgggattttcactgaagttgatgctgagctgagggagctgttggatcggcagatcggtacattggaagatcagattgcgcagaccatcgctgccgatcagggccttgcaaaaaccgctgatatcttgcgttctgttcctgggatcggccccgttgccagcactattctgatcgcggaaatgcccgaactgggccaactctcgggagaacaagctgccgcgctcacgggtctggctcccattgctcacgacagcgatgcgatgcgtggcaagcgcgccattggtgggggtcggcgacaggtacgacacgtcatgttccaagctgctctcgtcgcgagtcatcacaatccgcatctcaagatcttcgcagatcgtttgcgtgacgcaggcaaaccacacaaagtcatcatcacagcagtcgccagaaagcttgttacaatcgcgaacgcactcctcaaatctcggcaaaactggtcggctcaaaccgcctgagaaatacagttg

SEQ ID NO: 5492 - DNA, 1592 bp, unidentified
  source 1..1592: mol_type = unassigned DNA; note = element_8686520
  misc_feature 1..3: note = core
  misc_feature 4..298: note = LE
  misc_feature 299..1516: note = CDS
  misc_feature 1517..1592: note = RE
  misc_feature 38..274: note = bridgeRNA
cttgtactatagagttaaattaacaagctccaagccaacagactcgatctttgacaatcacataggaatcctggggcagcttggataaatattctcgtagaggcagggggcttcgaccacctccttgggaagctttagctgtcctgaaataaagagtgaagccccacccatacgagaggactcgaatgagcacgttgtgaatgcagctttctgcatgttgcgagttacgcgcaaggttgagtggctcgtaagggttgcgggaaccctgcctaaattctaatgaaggtgaggatgcaaaatgttttacggtggcattgatgtggcaaagtaccgccacgaggtgtgccttcttgatgatgccggtaatgtcgtgctgcagatgcacatagacaacaaccagaagggaatgaacaagttcctgcaggcgctggaaaggctggatattgaacctgacagcgttaagttctgcctggaggctaccggacattactggctccccatttactgccacctaagtgaactgggattccagctccatgtcatcaaccccatccagtcggatgccctgcgcaacctctatgtgcgcaaggccaagaccgaccagaaggatgccctgctccttgccgatttgctgcgattaggtcgcacccctacaaccaagctcccatctgagacggtcctcaagctgcagactctctcccggctgcgctttgagttcgttcgccaagtcggcggactcaaaaacagggtactcggtatcctcgaccggatctttccggaataccccggctgtttctcagatgtctttatccggacctccagggagttgctcaagtcttaccccgaaccggaagaactagctacagtggacctttccgagttggccgctttcttaaaagagcattcccgcggccgtctcggtgaggaaagggccaaaaagatccagtctctggccaaaggtacttttggcattaccctggccctggacgcttttgctctccagctgcgtttactgctcgaacaaatcgaattcattgaagagcaggtaaaggttatcgaggaggcaattaacgaggtcatggaggagctccgtcctgacagggatactccctaccgccacgttattgaaaccatccccggtattggtcccgtcctggctgccgcaattatcggtgagataggcgatgtttctcgcttcccaaacgcccgggccctggtggcctatgccgggttggatgcttctgtcagggtctctgggctgtttgagggtacccgcaaccggatgtccaaacgcggctcccctatgctgaggaacagcttgtggctgtctgccgttttagcccggcgcttcaaccaggaattgaaggaatactacgagctaaaatgcagccagggaaagcattcaagcgttgctaccggggctgttgccagaagacttgtgcatttgatctacgctctttggaaagaaaaccggccatacgatcccaattaccagtggtccccacctagaaagtaattttttgccaggattcacaggattcttatgtgattgtcaaagatctcttttagcctattgacttttcatagcacgt

SEQ ID NO: 5493 - DNA, 1452 bp, unidentified
  source 1..1452: mol_type = unassigned DNA; note = element_868acbf
  misc_feature 1..2: note = core
  misc_feature 3..242: note = LE
  misc_feature 243..1445: note = CDS
  misc_feature 1446..1452: note = RE
ctcctaccatgagttcatgtataagaatatgtattgtggtattttaagattgtagattgaaccatggaaaggcgggaggacttacttcttcctgggtttttgaatccttacttcagtgtgtcccatgccttcctaaaccatgataagttgattggatcgttgaatccttgttacgatggaggattggttggggaggcgctgtttctctgctttttccatcttatgacaggaggtgtgaaaacatgaacgagacatcttttagtggttttctgggtatcgatgtttcaaagaacaagtttgatgcctattgcatagatatcaagggagaaaagtatttttatctttcctgtccaatggacagaaagggttttgaaaaactggtaagccgcctggaggcattatctataccccaagagagccttctgatcggcatggagtcaaccgcctgctatcacatgaatctgttctcgttccttcttgcagagggatatacggctgtcctaatcaatcccctgctcatttccaacttcgtaaagatgcagctcaggaagaccaagacagacaagaaggatgcccttgttatcgcacagtatctcttgatgcatatggacacattgacacagacaagcatctcctctcacgtctccgatcttcgggatttatctcgtcagcgggagagtctgctcagccagatgacggctctgaaatgtgatatgaagcggctcttaaccattacgtttccggagctggagaaactgacgggtgtttttacgaagtctgctctgaggcttttgagctgtttcccgtctgctcatgccattgtccaggcagacccggcagagataaaccaacttctcattgatcactccaggggaagaaactctgcgacgactgcacaagccattatccaggcggcccgttcttcggtcggaacgacaagtccttcaagggagttgatcctcaaacagaagaccgatgtactgattcatctggaaggtcatttaaaagaactgacgaccatgatgattgagttatgtcgctctgacatgggagatgacattgatatcatgacttctctgcgggggattggcgagaaaacggcaacaaactttctggtcgagatgggaggtgatatccggaagtttaaagaccacaaaaagctgattgccatggcaggacttgatcctgccatctaccagtccggcaagcacgatgggaaaggtcgaattaccaaacgcgggaatcggcatctcaggagggtgatttggctcatgactatcagggttatccagttcaatgattgtttccgacaacactatgacagaagaagacaggatggccttcctttcaaaaaggcggtcctggctactgcccataaactcctgaggaccatttttgccatgcttacacaaaggacaactttttgttatgagacgaactcatgatagttga

SEQ ID NO: 5494 - DNA, 1355 bp, unidentified
  source 1..1355: mol_type = unassigned DNA; note = element_868b049
  misc_feature 1..2: note = core
  misc_feature 3..74: note = LE
  misc_feature 75..1103: note = CDS
  misc_feature 1104..1355: note = RE
  misc_feature 1107..1344: note = bridgeRNA
ttatgggatggcccgcccctccggcgacggagcgtgtagcgtcgccgacgcatgccaagaaaaaggagcacgtcatgatcgtagtgacagtggggatcgacctggggaagaacagctgcagcctggccgggctggacgctaccggtgcggtgctgatgcgccggcggctgtcgcgcggcaagctcgtggcgttgctcgctcggttgccgccgtgcatggtggcgatggaggcctgctgcggggcgcatcacctcgggcgggtgttcgcgggccagggccacgaagtgcggctgatggcgccggaatatgtccagccctacgtgaaggcgcagaagaacgacgaccgcgacgcggaggcgatcgccgaagcggcgacgcgaccgaccatgcggttcgtcgcgctgaaatcggaggcgcagctcgaccagcagacgctgcaccgggtgcggtcgcggctggtgaacagccggacgcggctgatgaaccagctgcgggcgatcctgctcgagcgcggcatcacggtggcgaagggccggcggaccctcggcctcgcgctcggggcgctgctcgacgacgaggcttccggcttgagcccgcggctgcgcgagctcgtcgacgagatgcgccgcgagtgggccgagctcgacacccgcatcgcggcgctcgaccgggagttcgtcgaggcggcgcggcgctcggcaccggcgcggcggcttgcgacgatcccgggcatcggcgcgctcaacgccaccgcgctgaccgcggccgtcggcgaggcggaggacttcgcgaagggccgcgacttcgcagcctggctcgggctggtgccacggcagatgaccaccggcggcaaggcgcggctcggcggtatcaccaaacgcggcaatgtctacctgcgcacgctgctgatccacggcgctcgcgcggcgctgccggggctcagccgcggcgataccgcgctcggcgcctggctgcgtagcctgctggcgcgcgcccatgtcaacgtcgtggtggtggcgctggcggcgaagctggcgcggattgcctgggcggtgctgcgcagcggcgccgactacgaccgcggcgccggagcggcggcgtagcgcaggaacgcccgagcgccctcgctcgggcgacgatgtctgcaggtggtggatcgagatggcctgaaagtcgaaccgcggcccggaaccctggtttaaaagatggcgccgagacgccgcgacttttgtgagggctgggacgcgcgaagctccatctgggcggggagctgatgctccgatgccggatacgttggcgcagactgcaacggcagcatcgaggaaatcagcttgcagacggggcgggccatacgt

SEQ ID NO: 5495 - DNA, 1355 bp, unidentified
  source 1..1355: mol_type = unassigned DNA; note = element_868d750
  misc_feature 1: note = core
  misc_feature 2..67: note = LE
  misc_feature 68..1096: note = CDS
  misc_feature 1097..1355: note = RE
  misc_feature 1102..1345: note = bridgeRNA
tatgggatggcccgccctcttcccccaaggcactacgctgatggggcaaccggaagggactggcgacatgcagatcgcggtactggggatcgacctgggcaagaacagttgcagcgtcgtggggctggacgccaccgggcgagtggtcctgcgacgacgcctgcaccgggacggggtcgtcaagctggcagcagggctaccaagctgcatgatggcgatggaagcgtgctgcggagcgcatcacctcggccgcaagctgagtggacagggccatcaggtccggctgatgtcccctgaatacgtacgtccctacgtcaaggcgcagaagaacgacgaccgggacgcggaggcgattgccgaggcggcgacgcggccgacgatgcggttcgtcgcgctgaagaacgaggaccagctcgacatgcagagcctgcatcgcgcgcgcgaccggctcgtgggtgagaggacggcgctgatcaaccagatgcgcgccatcctgctggaacgtggcatcattgttccccagggacggcgcaagctggaggtggctgtcgagaccctgctggcggcagagcaggtctgcctcagcccgcggaccaggttgctgatcgaggaccagcgcgcggagtggcgcgagctggaccggcgcatcgaggccttcgacgaggagttcgcacgacaggcccgcacggacgagcgtgcccggctgctgaccacgatccccggcatcggcccgctgaacgccaccgccctggtggccgcgatcggcaaggccgagacgttcgagcgcggccgggacctggccgcctggctggggctcgtgccgaggcagatgacgacaggcggcaagccgaagctgctggggatcagcaagcgcggcaacgtctacctgcgcaagatgctgatccacggtgcccgcgcggccctgccgacactgtccaagggcgagacgccgctgggcggatggctgcgagggttagcggcccgtgcgcacaggaacaccgtggtggtggcgcttgctgccaagctggcgcggatcatctgtgcggtgcttcgcagcgggcaggggttcgagatgcaggctgcgacggcgtcgtagcgcacgagatcggccgcaagcgctcacccagcgcgggcggctgacgaggtctgcgggtggtggaagcgagatggcctgacagtcgatcggcgttctggaatcctggctcaaaaaatggcgctcgacgccgatagttttatgaggaccagaacgcgcggatctccatcttggccggggcattgctccgagaccggatacgttggcgtagactgatcagactgggtcgcggaaaacgcttgcagacggggcgggccatacg

SEQ ID NO: 5496 - DNA, 1666 bp, unidentified
  source 1..1666: mol_type = unassigned DNA; note = element_868eeff
  misc_feature 1: note = core
  misc_feature 2..367: note = LE
  misc_feature 368..1351: note = CDS
  misc_feature 1352..1666: note = RE
  misc_feature 13..298: note = bridgeRNA
cctgttactataaatttgtccctgttcatggcatccagccataagtatgggacatctcgttgcctaaactgttagaatgggaggggtaatggtctgactcaaacctccaagggcttcaacgcccgtaagaaagtcagtcagccagcctcctgttcgcagtgttcgatttgtgcaggtagaaacatcagtgagatgtgttcgtgtcagcaaacagatggaaccggcaatgggtaaggatggcgtcatccattgcagattatattgacaggagtttgaacatgaacgcagcaggtattgatgtttccagcagaaagagcacagtcgccgtcctccgcccattcggagaagtcgtgaggctgcctttttgatgtcagtcacagttctgaagatctggccgggcttgcccggcagctcaaagacgcttgacggcgagacccgcgtggttatggagcacaccggccgctactacgagccggttgccaacgtactgcacgaggccgggctgcacgtcagtgcggtcaatcctctgctcatccgggagtacggcggcaattcgctccgcagggtcaaaaccgacaaggcagacgctgtgaaaatcgctcgctatgctcttgacaactgggccgatctgcgggactatactcccatggatacgattcgttatgacctgaaaacactcaatcgccagttccaactggccagcaagcagaaaaccgcaaccgccaataacttaatcgccttgcaggagcaatccttccccggcatccgcaaatgctttgacagtcctgtacgccaagacggtacgcagaaatgggtggacttcacctacaccttctggcacgcggactgtgtccgaaaacacagcctgaacgccttcgcagagcgctaccgcaaatggtgcaagcggcacggctacattttcaagcaaagcaatgccgaagaggtgtacgcacttgccaagtctgccgtaacactggtttccagctccgaggtgacaaaactgctggtgcaggaggccgcaaaccagctcaccggcatttcgcactccgttgaaacataccgggctgaaatgaaccgtctggcttccatgctgccggaatatcccgttgtcatggagatgtacggcgttggggagtccttcggcccgcagctgatggccgagattggagacattcgccgctttgagcacaagaaatcccttgtggcctttgccggtgtcgatccgatgccgaatcaatccggcgagaagaatgttcgcagtaaccgttcctcgaagcgcggctcaccgtatcttcgcaagacgctattcaacatcatgggggatttacctcagatgctcgccagccgatgagccggtgtaccagttcctcgaccgcaagcgggtcgaagggaaacccttctacatctacatgacagccggtgcgaacaagttcctgcggcgctactacgccaaggtgcgagattatctcgccacactggatggcttgcctcctgtggacatggattccaccggcctcagccaaccggactgacatctgaatattcggacatttcaggccagcgtttttacggtggcctttttgctgtgcccctttttttcttacctgccgcctgcaattttttcttccgtcaagctcatctttgggcttgactttttatttgcagg

SEQ ID NO: 5497 - DNA, 1388 bp, unidentified
  source 1..1388: mol_type = unassigned DNA; note = element_8693524
  misc_feature 1..3: note = core
  misc_feature 4..88: note = LE
  misc_feature 89..1117: note = CDS
  misc_feature 1118..1388: note = RE
  misc_feature 1088..1375: note = bridgeRNA
agatggagtggttgccgccctccccagacggcatcgcaatgtgccaaggtcgtggtgttgaaagccacacaaagaggaggacggcgagatgaaggatatgatgatcggggtcgatctggcaaagaatgtttttcaagttcatggggcgctgcacacgggggagattcagtttcgcaagaagctgacgcgaacgcagtttcccgtgttcatggctaagcaggagccaagcttggttatcctcgaggcatgtggcagcgcacattattgggcgcgcgagatggaagcgcttggacatgaggtaaaactcatcgcgccacagtatgctcgcccgttcgtgaagcgccagaaaaacgacgctgccgacgccgaggcgattgtcatcgcggctcgccagcccgagatgcgcttcgtggagcctaaaacagtcgagcaacaatcgcgcgcggcagttttccgtggccgggaacgcctggtgcatcagcggacggcggatgtgaacgccttgcgggcgctgttgtatgagcatgggcatgtgtttcctcaagggatacgcagtcttaatcgcatcacagcgcttgtagaggataagactgccgacttgctgtcattgatccgcgaggagtgcttggacctgctggcgcagattgcagagaaaacggcgcgtatcaacgaacgcaccgcgaaactcgagtcgctggccgctgagtcagacagggcgcgcaggcttcagactatgcccggtgttgggccactgacggccatcgctgtagaagcgtttggacctgatatggcgcagttcaaaacgggacgtgactttgcggcttggttgggtctggtgcccaagcaacattcttcgggaggcaaagaacgtttggggcggatgaccaaggccgggcaagctgatataagacgtctcttgatcattggggcaatgtcgcggctgggctggctcggacggcgcacaattacggagggcagctggctatcacgattgttggcgcgcaagcccaagatgctggtcgctatcgcgctggccaataagatggcccggcaaatctgggcgatgctgacaaagaacgaagattacaaggatccggcgctggcagtcgcggcatgatgctcttgttgaactgctagcgacggtgccaaggggagtgtaagaagacgacgacctgaatgggcaaaacgatcgaatagatctggattgggaaaaccagttagggcctacgagctcagagctcgctcaacagatttggacctgatccgctgatcaccatcccggcccgcggcttttggaagtgccgcatctcgaggccttacagaagaccgcactcgatcactcgccaatagggtcaaaaaattcttgcactacgggcggcaaccacaga

SEQ ID NO: 5498 - DNA, 1303 bp, unidentified
  source 1..1303: mol_type = unassigned DNA; note = element_869e6d0
  misc_feature 1..3: note = core
  misc_feature 4..210: note = LE
  misc_feature 211..1176: note = CDS
  misc_feature 1177..1303: note = RE
  misc_feature 36..197: note = bridgeRNA
cattgtatattatttaatcattatatttttgcataaagtttcaacatcagagtgtggaataaggccgattgctcattgatcatgtagatcgtaagatatgttcagtccccacacttttacatcagaaaccggatagttcaatgggctttgaccccgcatttgcaatgatggctcaagatgtatagatgtttaatataaaatattaagaccatgacttacgttggaattgatgtcagcaaagcgactttcgtagttgcttattcttctgctaaaggtagtaggacaaactctttcaagaatactatcaaaggtattcatgagtttatccaaaccatttctgtagcggaacatcactgtgttttggaagcaaccggtaattatagttccttactagtttacctgctttcagaagcgggtatagctgtcagtcttgagaaccctctaaagattaaaaactttgcccgtgttatgctctccatcaccaagactgatgaaatagacgctcgcttaatcgccatgtatggtgagaagatgcagccggcaccttacaagttgcgtagtgatactattcttgtcttaaagcaaaagcggacggtcatacgtcagctcaagaaacaactcgtagcaactgggaacttgaaaggttccatggaggcacttccattctttgatcctaaatgcaagaaaacaattgaaaggacaatcatctttcttgaaaaacaaatcaaagagttggaagaagaattggcttctctggcgcaaagtgaatacaagaaacagatggatttgcttacttcagtcaaaggtattggtgttacgctggcagccgcactaattatggctacgggaggcttcacctattttgataatgccaaacaactcacccggtacttgggcttgtcacctacttaccaacaatccggtacgtcagtcaatgtcaaaggtcacatcaatcgtaacggtgattcttccttgcggagccaactttatgtggcggcttttgcatctttacgatgtaatactgaatgcaaggcatgttttgaccggttacgatctaaaggcaagccaggaaaagtagcgctcattgcagtcgctaacaaacttataaggcaagcctttgctattgtcactcaagaaaaactctatgtagatgggttcaagcctgagaagccataaagctcctgcggagggaacgccatgcggcaaggggctgagcaggcagccccgacgagcctctttaagtgcgataattgcataactatgctaattatagttaatcatattcgattttcttattatagtt

SEQ ID NO: 5499 - DNA, 1432 bp, unidentified
  source 1..1432: mol_type = unassigned DNA; note = element_86a14ee
  misc_feature 1: note = core
  misc_feature 2..217: note = LE
  misc_feature 218..1417: note = CDS
  misc_feature 1418..1432: note = RE
  misc_feature 1..221: note = bridgeRNA
cgttacgttcttcgtggtccccgacggggactgctggcctccaggctcggtatgacttgagccccttgtctgtcatgatcgaaaaggtggtgtcgccgagtctggtggtactggttgaccactgatagaggaatgaccacctgtgggtaggtctgcgtaacgtggatgctggcggctggtgccaggcaggtcagctcgcaacgagctgaggatgaccatgacggtgagcaccgacgcgatcgccgtgttttgtggcctggacgtgggcaagggccagcatcacgcgaccgcgctgagtccggatggaaaacgcctgcacgacaaggcattacccaataccgaacctggcttgcgggagctgttcaccgcgctggctcaacacgggccggtactgatagtggttgaccaaccggcctcgatcggtgccctgcccctggcggtggcccgcaccgtgggctgtcagattggctatcttcccgggctgacgatgcgccggctcgcggacctgcatcctggggagagcaagaccgacgcgcgggacgccttcgtcatcgctgacgccgcacgcactttgccacacacgctgcgctcgatcgacaccgatgacgagaccgcggccgagctgacgatgctgaccggcttcgacgaggacctcgccgccgagtccacccggcttcggaaccggattcgcgggctgctgacccagatccacccgagcctggaacgcgtgctcggccgccgactcgaccatccgggcgttctggcgctgctggaggcctttcccacaccgacgacgatggccgcagccgggcgtgatgcgttactggaggtggtcaaaccccatgcgccacgcatggccgagcgtctggtcaccgacgtgctcaccgcactcgacgaacaaaccgtcgtggtcgccggcacgtccgcggcagcgaccatcctgccgcacctcacgagctcgttgcgatcgatcctccaccaacgcgacaccgtcgccgcgcaggtcgaacacctgctggaggaacaccctctttcccaagtcctgacctcgatgcctggcatcgcggtcaggaccgccgcccgcatcctcgtcgagatcggcgacggcagcggattccacaacgctgcacacctggccgcctacgccggcctcgccccggccacccgccgttccggcagcagcatccgcggcgaaaacccctcccgccgagggaacaagcagctcaaacgagccctgtacctctccgccttcgccgccctgcgcgacccccaatcacaggcctactaccagcggaaacgcagcgaaggcaaacaccacgtcgccgcactaacctgcctggcccgccgccgcgtcgacgtcctgttcgccatgctccgcgaccacaccctctaccaacccacaccgatcaccgcttgacctcacccatagagg

SEQ ID NO: 5500 - DNA, 1573 bp, unidentified
  source 1..1573: mol_type = unassigned DNA; note = element_86b79e0
  misc_feature 1..2: note = core
  misc_feature 3..268: note = LE
  misc_feature 269..1441: note = CDS
  misc_feature 1442..1573: note = RE
  misc_feature 3..245: note = bridgeRNA
cttgtaggatgttttcagaagaaaaaacatccatttccctttcttttttatatcgtggttcaatacattcagatactgtggacttttgatttgctacctgtagccctgactactcgaaggagtgtattgccgctaactgtatctgaattgtttattagttggatgtgccacaggagtttatcctcgagtacttatctcacgcaagtctacgatgatacggattggtggacatcacggtatcagactttaggaagggaggtacaacctcatgatctatgttggcatcgatattgccaaactcaaccatttcgcctcagcaatctcgtctgatggtgaagtaatcattgagccgttcaaatttacaaatgacgatgatggcttccaaatgctggtctcgaagctcaattcgcttgacgcagagcccgacagcatcatcatcggtcttgaatcaacggcacactatggcgacaaccttgttcgataccttgtcgctgaaaatttccaggtgtgtgtgttgaaccccatcaagacttctactatgcggaagaataacattcgcaaaacgaagacagataaggtcgacacatacatcattgctaaaacacttatgatgcaggaatcttaccgctttatcactttctatgaccttgatcttatggatctcaaggtcatggggcggttctaccaaaagaccatcaagcaatggactcgactgaaaattcagtttactgcctatgttgatgaggtattcccggagctccagtacttctttaaatccggtttgcatcagaaatctgtctatgccatcctgaaggaggctcctacaccagaggccatcacttccatgcatatgactcatctcgccaatctgcttgtgaaaacctcgcacggccacttcacaaaagagaaggccaaagaattaagagttctcgcacggaagtctgtcggtgcatccgacagcgctctatctattcagataactcacaccattgcacagatcgagttactggatagccagttgaatatgattgaagaagagatgactgagatcatgaaattcaatgactcagttatcatgaccattctgggtatcggttacatcaacggcggaatgataatcggtgaaataggtgatattcaccgtttctccagtcctggtaagctgcttgcctttgcaggtcttgacccttctgtatatcagtcaggcaactttcaggctcgcaagactaagatgtcaaagcgtggatccaaagtactgcgctatgctctgataaatgcagctcacaatgttgtaaagaacaacgccaccttcaaggcctactatgacaccaagatggcagaaggccggactcactacaatgccctgggacattgtgctggcaagctcgtcagagtcatctggaaaatgatgacagacgacttggaatttaacctcgactaagaggtctgtataccatatcgatagatttgcttaaaagcgcccaactgggagccttattaaggttacccttttttaccatcgatagaaaaaaagaattttctgctaatttagggttgacttttcatagttggt

SEQ ID NO: 5501 - DNA, 1224 bp, unidentified
  source 1..1224: mol_type = unassigned DNA; note = element_86c0eeb
  misc_feature 1..2: note = core
  misc_feature 3..109: note = LE
  misc_feature 110..1177: note = CDS
  misc_feature 1178..1224: note = RE
gtcgtacatttgtatatagttaaacaattgaattatttttacagaatcaagcatggaccaaggcagaaaattcgttggttttagaaaccgttaaaaacgttccgtccccatgctttgcatctcaaaaccggacagttcgttaggccatatagagcccgtgtttgcgacgatggtttacaagatgtatttttcacttaaattctttcaattatggtttatatcggtatcgacatcagcaaaggcagttttgttgcagcttatccgtcagcgagcggctaccgtaccaatactttcccgaacacgatcggcaggagttcgcaagttcatcgttacactctctgcctttgaacatcattgtgtcatggaagcaaccggaaattatggttttctgctgctgtatctgctacatcagggtggtattgccgtcagtctggtaaatcccaagcagatcaagcattttgcccggatgatgatggccgttaccaagaccgacgagaaagacgcctgcatgatcgccatgtatggggagaaaatgaatcctcctatctacaaaatgccctcgcaagctatcattctgctcaaacagaagaagaccgtaatccgtcaactgcgtaaacaacttgtcgcatcgaagaacctgcgtggatcgcttgtcgtactgccttatcgggacaaagcctgtgtgcgggcattggacaagaccattgactttctgaccaggcagatcgaacaactcgaagcggaactggccgacatcgcatcatccgagttcgacaagcaactcaaagctctgacatccatcaaaggaattggcattacgcttgctacggcactgatccttacaaccggaggatttacctacttcgacaatgcaaagcaactgtcccgcttcatcggaatatgtcctacctaccaacaatcgggaacatccgtaaatatcaaagggcatataaaccggaatggtgatgagcatttgcgatctttgctttatgttgcttcttggacggccttgcgctacaacgctgcctgtcgggaatgctatctccgattaaaggccaatggaaaaccatccaaagtcgctctgatcgcggtggcaaacaaactcgtcagacaggcttttgccattgctactaccgattcaacatatgttgatgggtttgtctcgactaaaaaataatctctcgttcatttttttatctttttacttgtttttttatacagttc

SEQ ID NO: 5502 - DNA, 1353 bp, unidentified
  source 1..1353: mol_type = unassigned DNA; note = element_86c3c09
  misc_feature 1..2: note = core
  misc_feature 3..70: note = LE
  misc_feature 71..904: note = CDS
  misc_feature 905..1353: note = RE
  misc_feature 1100..1343: note = bridgeRNA
ttatggaatggcccgccccaactctccgacatcgggctacgatgccggtgcttacagagagggacgagccatgagcattgtgatgatcggtatcgatttaggcaagaacagctgcagccttgcagcgctcgatgagcgtggtgctgtggtgcttcgtcggaggatgcggccggccagcatcgtagaattcgtcgcaaaacatgcgccatgcgctgtcgcgatggaggcgtgctgcggggctcaccatctcggtcgccagctgcttgcccggggccacacggtcaagctgatgccgccggagtatgtgcgcccctacgtgaaagcgcagaaaaacgatgaccgcgatgctgaggcaatcgcggaagcagcgacccggccgaccatgaggttcgtcgagttaaagacacaggaacagctcgacatccaatcgctccaccgcgtccggtcacggctggttggagcgagaacgacgttgatcaaccagatgcgcgctattctgcttgagcgcggcatcacagtcgctcaggggcgccgcaagttcgagaaggcgctcgacgagatgctggccgacaaagctttgcttgctcctggacggttacgggaactcatgaccgatatgcgcgccgagtgggctgcactcgacggccgtattgatgcgttcgacctggaatttgcccagctcgcgcgaacggacgacgtggcgagacgcttaacctctattcccggtgttggcgctctcaatgcgacagcgctcgttgcagctgtcggcagggccgaagccttcgatcaggccagagatctcggcgcatggctcggcctcgtgccccgtcagcatacgaccggcggaaaaccccgcttcttgggattagcaagcgaggcaacacataccttcgaacgcttctgatccacggcgccagagccgcgttgccaggtctggcaaaggccgaaacgccactcggagcatggctgcgtgggctacaggcgcggtgccatcctaacactgtgatcgtcgcgctcgccaacaagctggcgcggatcgcctgggtgatcatgcggagagaggcggtgttctcgacccgcaagctcgcaaccacctgatgatattggtcaacggcaaatgcgccgcctgacctacggaatgtctgcgggaggaattttgtagatggcctgacggtataccgacgtcccgacagcctgactaaaaaaatggcactcgatgccgtgagctttatgaggcctggggcgtgcggctctccatcttggcaacggctctgccgctatgccgtatacgttgatgcagaccggtcagttgccacttgaataaaaccccttgcagacggggcgggccatacg

SEQ ID NO: 5503 - DNA, 1338 bp, unidentified
  source 1..1338: mol_type = unassigned DNA; note = element_86d6f60
  misc_feature 1: note = core
  misc_feature 2..103: note = LE
  misc_feature 104..1108: note = CDS
  misc_feature 1109..1338: note = RE
  misc_feature 1121..1333: note = bridgeRNA
gaatgaaagggacttcccctactcgaagcgggttttggcccgcacggcatcgaagtgccaagattgagtttgcatgttcaatctgataacgagaggggaagtcatggagaagattactactgtggggatcgatctggcaaagagtgtgttctcgctgcacggggtggatggtgcggggcaggtgatgttgcgacgcacggtgcggcgcgatcagctggtgaaggtggtggcggggttgtcgccttgtctgatcggcatggaggcgtgctcgggggcgcacgagtggggccggcggttccaagagcacgggcacacggtgcggctgatggcgcccaagttcgtggctccgtacaggaagagcggcaagaacgacggcaatgatgccgaggcgatctgcgaggcggtgagccgcccgaacatgcgctttgtgccggtgaagagcgccgagcagcaagcggtccttgcgctgcaccgggtgcgccagggctggatcgaagaacgcaccgcgaccatcaatcggctgcgcgcggtgttgaccgagttcgggatcgtgctgcccaaccgcgcgccgcatgtgcgccgcggggcacaggctgccgccgaggctctgcctgcactcgcgcgccgggccgtggaggagttgcgcgcccatctcgcattactcgatgagcgcatcggcgcctacgaccgggagctgcaagcccaagctcggcaaagcgaagcggcacaacggctcatgcagatccgcggtatcggcccgctcagcgccgtggcgatcgtcgccacggtgggtaacgcgcgtgactttcgctccggtcggcagttcgcggcctggctggggctcaccccgcgccagcattcctccggcggcaagacccgcctggggcacatcagccggcgcggcgatgcgtacctgcgctgcctgctggtgcaaggggcacgctcggtgctgctcaccgccacgcgccacagtgatcgcctgtcgcgttgggtcctatcggtgcaggctcgacgcggctatcacaaggcgctcgtcgccatcgccgccaagaacgcacgcatcgcctgggcgctactgagcaagaatcaaacgctgcgagccgcgtgaccgagttcacttccttgccagactgcactcgttgatgacaaacaggtcagaccggcgtccggacactccgatcaactcggcggcagcaataccatgccgactaacgtatgggaaccgggcgcgcggctttcatcagggccagagcacacattcgctcgcaaataggccggttatagttccgcagtcgatcctgttcacatcagccttgcagttccggggaagtccttata

SEQ ID NO: 5504 - DNA, 1427 bp, unidentified
  source 1..1427: mol_type = unassigned DNA; note = element_86de056
  misc_feature 1..5: note = core
  misc_feature 6..224: note = LE
  misc_feature 225..1412: note = CDS
  misc_feature 1413..1427: note = RE
  misc_feature 1..228: note = bridgeRNA
cacccgttaccttctttatggccctagatgagggctcctggctgctgggttcggcatgacttagtgcccctgttgttgatgatccggggggtgttgtcaccgggcctggtggtgtcggtagatcgctgatagggacacggccgcaggaacgtctgcaggtctcttcgtaacgtgggtgccgagtactgatacctcgctggccaggacgacgaaggaggtgcgggttgagctacgaaatcttctgcggactcgatgtcggcaaagcgacccatcacgcaaccggtctcgatggtgatggcaaccgtcttgttgaccgggaaatcgccaacgatgaaacggcccttcggcgagtgttcaccgagttgaccgagcaaggcaccgtgttggttgtcgttgatcagccgtcatcgatcggtgcgctaccaatcgctgtcgctcgggcgatgggcattgaggttgcgtatctgcccgggttggcgatgcggcgcatcgctgatctgcatccaggcaatgccaagactgacgcccgcgacgcctacgtgatcgctgatgctgcccgcaccctgccgcacaccctgcgccgggtcgacctgggcgatgagtccctagcggacctatcggtgttggtcggtcacgatgacgatctcgccgaacaagccaccgccgtcagcaaccgcatccgtgggctgttgttgcagattcatcctgcatttgaacgggttctcggcgaaaacgccgcacacaaagcggtgctcgcggtgctcgtaaagttcggtggcccgaccggaatcaaagcggcaggcaaggccaaagtcggacgagtactcaaagccggagcaccgcggatgggtgaaagactcaccaatcagatcttcgatgcgctcgccgaacagaccgtcgtggttcctgggaccgccgctgccgagaaggtcctgcctcggctcgctgagcagttactcgggttgcagcaacaacgaaagcaagtcgcgactgaggtcgaggaagcactcgatgctcaccctctttcccgggtcctgacctcgatgccgggagtcggtgtcaggaccgccgccagaatcctcatcaccgttggagacgccagctcgttcccaacggccggccatctggccgcctatgccggcctggcaccagttacgcgcagatccggatcgagcattcgcggtgagttcccatcacgaagcgggaacaaggacttgaagaacgcgctgttcctgtccgcattcgccgcgctgcgcgatcccgccagccgggcctactacgaccgtaaacgagccgaaggcaagaaacacaacgccgcgatcatctgcctcgcccggcgccgaaccgacgtcctctacgcaatgcttcgcaacaaccaggcctacatcccccaaacgccacaagcggcttgacgaaagacataggga

SEQ ID NO: 5505 - DNA, 1462 bp, unidentified; identical to SEQ ID NO: 133
  source 1..1462: mol_type = unassigned DNA; note = element_86e4f09
  misc_feature 1..6: note = core
  misc_feature 7..241: note = LE
  misc_feature 242..1399: note = CDS
  misc_feature 1400..1462: note = RE
  misc_feature 11..236: note = bridgeRNA

SEQ ID NO: 5506 - DNA, 1402 bp, unidentified
  source 1..1402: mol_type = unassigned DNA; note = element_86eb8c6
  misc_feature 1..3: note = core
  misc_feature 4..262: note = LE
  misc_feature 263..1303: note = CDS
  misc_feature 1304..1402: note = RE
  misc_feature 32..234: note = bridgeRNA
tctcctatgtttgtgtcaagcaaatgtaggagacattttttgttttatagatttgctgtatttagtgaaaagagggagagcctagggctgtcttagtagcttttttagcatactgatttttagagatggccttcctctttttcgcttcctaagacagaacagaatgtaaggcggaattacagtccagcttgaatatccataaggagacaagtccaagggaagtttcactattgatttttcagtttcacatcaaaaaattaacatgaaaacactcaagcaggtcgttggcattgacgtcggtagtaaggaactggtcgtatgctttggcaagatcttttccaatctggataaaaagctgtgccaatatggtaatttccgaaactcggataaaggtttgataaagctttacgaatgggtacagacccatacctgtgaggatagtcctcttcattttgtcatggaggctacaggcgtttatcacgaaaagctagcctattttctggaaagcaaggggtgcaatatcagtattgtcctgccaaacaagatcagcaactatttccgtaccttagagatcaagacgataacggatagtacctgctcggaagctatcaccttatttggcctagagcgcaacctggagttgtggcgcaagccagaccccacctataagcgtttgaagcagctgacccgggagagagaccaattggtacaggaacgtactgctgtcaagaaccagctacatgcagaacaggcagaggcagaacccaatgaaaactctataggacggataaaggaacgcatagcagtactgcaaagacaggaaaaggaaataatgaccgagttaaagctcattgttaaggagagttccttactcaaaaaacaaacagataacctgaccacaatccctggaattggactgctgacagcagtaacagtattggcagaaacgaatggatttgagatgatccgaaataaaaagcaactggtaagctatgccggcctggacataaaggaaaaacagtccggaacatcgatccagagcaaacctaccatatccaaacggggcaacagatacctgagaaaatcccttcatttacctgcattggccgccataaggcatgatgaacattattctaatacatttacaaggcttgtttcaagaaatggcatcaaaatgaaagcagcagtagctgtgcaaaggaaacttctagagctgatgtttataatttataaaaacgaacagcggtatgatccacaataccatctccaaaagtatcagaacgaaaaagtagatacaaattagggcggccaaaaacggctaccctaaacaggctggcaatagaccgcctaaaacccgaaattacaaaaaaaagataaaattgacttgtatattaacacagaa

SEQ ID NO: 5507 - DNA, 1400 bp, unidentified
  source 1..1400: mol_type = unassigned DNA; note = element_86f3d65
  misc_feature 1..2: note = core
  misc_feature 3..85: note = LE
  misc_feature 86..1126: note = CDS
  misc_feature 1127..1400: note = RE
  misc_feature 1169..1389: note = bridgeRNA
tgatgaggtggaacgacccgctaccgaagcatcagagtgctaagaactggtcgttatttcaacgccacagggtaggagccgttccatgaagcagattaccaccatcggcctggatttggccaagcaggtttttcagatccacggtgccgacgccgagggttctccaattgtcaatcgaaagctccgccgcgcggaggtgctgcggttcttcgagaagcagcctgcctgtctggtcggaattgaggcctgcggcagttcgcactactgggctcgcgagatcgctgcgcttggtcacgaggtgcgtctgatcccgccggcctatgtcaagcctttcgtcaagcgtggcaagacggatgccgccgacgccgaggcaatcagcgaggcagtgacacgcaaaaccatgcgctttgtccccatcaaaacggccgagcaacaggcggcagcgatggtgctgaagacgcgcagccttcttgtccgacagcaaacccaggcgatcaatgcgctgcgcgctcatctggcggaattgggcatcattgccgccatcggtacgacgagggttgcagggctgatcgagatcgtacgcgatgcgaccgatgctcgcttaccgaaggctgcgcgcttcgcgttgacggccgtagccgatcagatcgaggctttgatccgacagatcggtgatctcgatcgggagattgtcgccggggcaaagcgcgatgaggatatgcggcgtctggccactataccgggcgtcggtcctatcacggcggcgtcaatcaaggtgcttgttccagatcccggcgggttcaaatccggtcgtcacttcgcagcttggctgggattgacacccaggtcccattcgagtggtggcaaggagcggttgggaggaatctcaaagatgggcaatccggagctccgctcattgcttgtcctcggcgcgagcgccgtcctgcgatacgtgcgaggcaacgacaaggcgccgaaatggctgagcgcgcttctgatgcgccggccttataaggtcgtggctgtcgcgcttgccaacaagatggcacgggtcatatgggcgcttttgaccaagggcgggacatatcggggcatgacgccggtaaacggtgcagcaaatgcttgaaccggaagtcggctaaaacgaactgtgcggcgcggtagccggcagaggtgaggtgcaaaaagcagacgatgattccgtgggacgaaatcccgaggcgagagaggccgctagtgtcaacgcgctcaaagcgcgtgccgttgattagccactcgtatcgcgaacttcatcgaggccagcggcccaaagccgcgctcaaaggccgaacatatgaccgcaccattcccgcgtgatcaaatgtctgaaaaagcccttgcaaagtgggtcgttccacata

SEQ ID NO: 5508 - DNA, 1370 bp, unidentified
  source 1..1370: mol_type = unassigned DNA; note = element_86f44b9
  misc_feature 1..2: note = core
  misc_feature 3..251: note = LE
  misc_feature 252..1286: note = CDS
  misc_feature 1287..1370: note = RE
  misc_feature 27..238: note = bridgeRNA
ctcctatgtttgtataagttataatttgctttatctcaaatattatcttagccataaagtgaataagaatgagagttgaataaaaatccaatagttcaaagaaacatattcggcgcaagaaacgacctcattcttttttatcttttagagtcagagcagaatgtaaggaattaaaaacctcatttaatatccagaatatccaatcaggagaaaagacgaaggaagatatctcacttaaaaagtaataaaagatgaaagtattaaaacaagtagccggtatagatgtgtctcaaaaagaattagtagttactttaggttgtctatatgaagatcaaactataaaatttctagcttataaggtatttaaaaacacagatgttggaatcccattattgattaattggattgaaaaacaaagtgttgaagatcaggaaattcactatgttatggaagccacaggggtttatcatcagaagttcgcttattatcttgctgagaataataaaaaggtctatatcgttttgcccaataaaataagtagctacctaagaactcttgatataaaaacgataactgataaaagttgttctcaggctattactcagttcggtcttgaaagaaaattaaatcattggaaaaaacctgatcagacttataatgagctgcaacagcttaccagagagcgcgatcaaattgttcaggagcggaatgtgataaaaaatcagcttcatgcagaaactattcaagcttctcctcatttaaaaagtatagaaagaatgcaagctcgtatgaatttgctcaatgctcaagaaaaagcaataaagaaagatatcgatactattatcaatactaatcctgtgataaaacaattgatagaacgacttacaacaataccgggagttggtgttttaactgcggttactgttttgggagagaccaatggctttgaactgattagaaacaagtctcaattatcaagttatgcagggttagatgttagagaaaaacaatctggaacgtcggtaaaaggtaaatcacggatatcaaaaaaaggaaatagaatgttaaggaaatgtttgtttttgccggctttaacaattgtgaagtgggatgataacttcaaagaagtttatataagactcacttcaaaacatggaataaaaatgaaggctttagtagcaatccaaagaaaaatattagaattgatctatattctttttaaaaatgaaaccgtttatgacggtaaatataaatcaaaaaatagcgtgaaaactgagatagtatagcacgctacagagtctagctctaggccgacttaaaaaacaaatttacaaaaaaatataaatattatttgcagattaacacagaat

SEQ ID NO: 5509 - DNA, 1371 bp, unidentified
  source 1..1371: mol_type = unassigned DNA; note = element_86f89fe
  misc_feature 1..2: note = core
  misc_feature 3..211: note = LE
  misc_feature 212..1183: note = CDS
  misc_feature 1184..1371: note = RE
  misc_feature 41..217: note = bridgeRNA
cttgtattagcgcgccgggttaggatggtcatgttccgtgaggaatggcccagcctgggtggccgcccaagctgggccgccgatcgatcggatcgatgcccaccgaagcctttagggctgcgtttcgtagcaagatcgcggtcggcacttcatcgggacccgcatggttgaacgaacttcaggttcgcataacaagggagggtcgaggaaggtggccaagcgtatcacgatctgtgccgggatcgataccggcaaagagaagctcgacgtggcagtcgatggcgccaccgagcagttgcgggtcgataacacggcaagaggccaccaggcgctggtggagtggttgaagtgccgcaaggtgaagagagtcgggatcgaggcaagtggaggctacgagcaggcggtcgtcgccgagctgcggcgcaagcggttcgtcgtcatcttgtttcagccaaagcaggtccgcgcctatggcacgtttcatctgctgctggccaagaacgacaagatcgacgcggcgctgattgcgatgtgcactgccgcggtcaagacgatccatcctgcaccagatccgcggctgcagccctttgccgagcatctgaccatgatcgaccagatcacagaagacatcgcaagactgaagaaccggcttgagagttgccgcgacaagcggattcaaggggtttggaaggtgcagatcgcgctcctagccaagtccaaacgagccgagttcaaggcgcttctggcggcgatccgcacccactccgatctcgccgcacggctcgatctgatctacagcgtcgccggctgcggcctgccgactgcggctgccgtcctgatcagaatgcccgagatcggcaacatcacgcgcgaacgagcctcagctctcagtggactggcaccttacgacgacgatagtggcaaacgctccggtgcccgtcacatcgaaggtggccgtgagcgcttgcgttgggcgctctacaacgcggctcttccggcatcatcccgctggaacccgcagatcaaggctctctatggtcggctgatcgccgccggcaaacctcataaatgtgcgctggtcgcctgcgccagaaagctgctcgtcacgatcaacgccgtcgtcgcccgcggaactccctgggtggcccaggtgcctcaactcgccaagctgcccgccgcctgaccgcgtttctttgttcgatcaggcgaccgtttcttcgtcccgacctgccgccacaacgacgccgcgcgcggcggccgtcaaggctggccgtcgctctgctctcgcctagcacccgctgccgctaggccacgccttgacggtcgcaagcgcggcgtcatgctcaaggcaatcgggcgctttaatggttg

SEQ ID NO: 5510 - DNA, 1378 bp, unidentified
  source 1..1378: mol_type = unassigned DNA; note = element_86fbe0a
  misc_feature 1..2: note = core
  misc_feature 3..212: note = LE
  misc_feature 213..1184: note = CDS
  misc_feature 1185..1378: note = RE
  misc_feature 41..218: note = bridgeRNA
cttgttttagcgcaccggactagaatggcctcgttccgtgaggaatggcccagctcgggtggccgcccgagctgggctgccgatcgatcggatcgatgcccaccgaagccttgagggctgcctttcgtagcaggatcgcgatcggtacttcatcgggacccggatggttgaacgaactttaggttcgcacacacaagggagggtcgacgaagatggccaagcgtatcacgatctgtgccgggatcgataccggtaaacgtaagctcgatgtggcacttgatggcagtttggagcggcttcaggccgataacacgccggatggctataaagtgctggtggaatggttgcagcgccacaaggtcaaacgggtcgggatcgaggcgagcggcggctatgagcaggctgtcgtcgccgagttgcggcgccagcggtttgtggtcgtcgtatttcagccggcccaggtgcgcgcttatgccgtgttccagctgcagcgcgccaagaacgacaagatcgatgccgcgccgattgcggcctgcaccgccgcggtcaagaagatccacgcagctccggatccccgcttgctgccatttgccgagcacctgacgatgatcgaccagatcaccgaggacattgctcggctgaagaaccggatcgagagctgccgcaatatgcggctccagaagctgtggaaggaggatatcgctcgcctggccaagcgcgagaaggtcgaactgaaggcactggccgccgcaatccgtgagcatcgcgatcttgccgagcggctcgacttgatcaacagcatcgatggtatcgggctaaagaccgccatggtcattctggtgcggatgcccgagatcggtcagatcacgcgcgagcaagcggccgcgctggctggcattgccccttacgatgacgacagcggcgatcgcaccggcgttcgtcacatcgccggcgggcgtgaacggctgcgacgtgcgctctttactgcggcgctgccggcgtcatttcgctggaatccgcagctcatcacgctctatggaaggctgatgggagcaggcaaggaacacaagcgcgcattgatcgcttgcgccagaaagctattaatcttcgccaacacagtggtcgcccgcggcacgccttggcagacaaaaccgcccgagatcgcgagggctccggctacctgatggcgtttctttgttcggccgaagcaccgtttcttcgtcccgacctgccgtcacaaagacgccgcgcgccgcggccgtcaaaggctggccgtcgccctggcctcaactccatctccgctgccgccaggccacgccttgacggccgcaagcacggcgtcatgctaccctcagcgatcgggcgaatctaatggttg

SEQ ID NO: 5511 - DNA, 1359 bp, unidentified
  source 1..1359: mol_type = unassigned DNA; note = element_870158a
  misc_feature 1..3: note = core
  misc_feature 4..85: note = LE
  misc_feature 86..1105: note = CDS
  misc_feature 1106..1359: note = RE
  misc_feature 1128..1347: note = bridgeRNA
tgatgcggtggacggctcccacccgacggcatcgattgtgccatggttgtgatgttcaccaaccacgaggaatgggagccgccctatgagcgaagttatcacgatcggtctcgatcttgcgaagaacgtgtttcaggtccacggcgtcgatgcggagggtgtggtggtcatccagcggcagttgcggcggtcccaggtgctgccgttcttcaagaagcttgggccttgcctggtcggcatggaggcctgcgccacggcgcatcattgggcgcggcaactgatggggctgggccatgaggtcaagctgatgccgcccaactacgtgaaggcttacgtgaagcggggcaagaacgacgcggcggacgcggccgccatctgcgaggcggtgacgcggccgaccatgcgcttcgcgtcggtcaaggacaccgagcagcagggcatcttgatggtgcaccggacgcgggagctgctggtgcgccagcgcaccatggcggtcaacgccctgcgtgcccacatggcggagttcggcatcgtcgccccggttggcgtgccccaggtcaagaagctcctcgccatcatcaatgatcccgacgatgcccggttgccgccggtcgcgcggagctgcctggaagcgctcgcgcggcagttcctgtcgctggatgctgagatcaatgccgccgagaagcacatccatgcctggcaccgctccaatgagacgagccggcggcttgagaccattcccggcatcggccggatcacggcaagcgcgctctcggcctcggtgtcggacccatcggtgttccgctcgggccgcgagctggccgcctggatcggcctggtgcccaaacagaactcgaccggcggcaagcaacgcctggggcgcatctccaagcagggcgatccctatctccgctggctgctggtggccggggcgctatcggtcatccgtcaggccgagcggcgcgggacagcctctccctggctcgccgggatcatcgctcgcaagccgaccaaggtggccgccgtggcgctggccaacaagaacgcccgcatcgtctggagcattctcatggggggcgagggctaccgcccggcaaccgcatagggaacacaacggagagaacttcagcagtttggcagggtgaaggggaggtaatgcacaatcggtcgcaccgagggccgggacaccccgtttgggtcagggcgcacaaagcgcgtgcttttgattgggacccggccccgcggatcgcatgagggccagcggtcagagaaccgcgtcaacaggccggacacatgactgcacccgaccaatccgcaccacctccaaaaaaaccttgccaaaagggagccgtccacaca

SEQ ID NO: 5512 - DNA, 1380 bp, unidentified
  source 1..1380: mol_type = unassigned DNA; note = element_870afa8
  misc_feature 1..3: note = core
  misc_feature 4..88: note = LE
  misc_feature 89..1105: note = CDS
  misc_feature 1106..1380: note = RE
  misc_feature 1124..1367: note = bridgeRNA
tgatgtagtggacgacgcccgctcccggcatcgagtgtgccataggggtgatcgttgaacaacgaatcaccggaggggggtcgtccacatgcaggttagcaccatcggcgttgatctcgccaagaacgtgttccaagtgcacggcgtggatagtgcgggcaaggtcgtcatcagccgtcagttgcggcgcaagcaggtcatcgacttcttgagcaaaattcctgcttgcctggtcggcatggaagcctgcggaaccgctcatcattgggcgcgcgaagtctccaagcttggtcataccgtgcgtctgatgccgccgagctacgtcaagggctatgtcaaacggtcgaaaaacgatgctgccgacgcagccgccatctgcgaggccgtgacacgcccatcgatgcggtttgtgccgatcaagtcggccgatcagcaagccttgctgatgttgcatcgaacgcgggatcttttaatccgtcagcgcacgcagctgatcaatgcgctccgagcccatcttgccgagttcggcctcgttgcggagacgggacgcgaaggtctcgcgcaccgtgccgcgatcatcacggacgagcgtaatcgcgaagctcttccgtctgcgatgaaacaggcgttgcaggccattgtcgatcaactcgctgctctggaattgcgggtcggggctctggatcgcgccattcacgctcatcatcgtgccaacgatatgagctgtcgcctcgagactgtgccgggaataggcgtgatcggggctacggccatcgcttccacggttacagacccgagtaccttcaaatccggtcgggattttgccgcatggatcggacttgtgccgcggcagcattcgacgggtggcaaggagcggctcgagggagatcgctatcttcgacggttgctagtcatcggtgcaacagccgttgttcaacacgcccggcggcatccacaaaagtatccctgggtcatgaggctactggccaaaaagccggccaagctcgtcgccgttgccgttgccaacaagatggcgcacatcgcttgggcgatcatggccaagggaggacactatcgagcgccggagcttgctgcagccgcctgaagaggcttggcaatgggagcgtgaggcgacggcggagcaagataatcgaattgcgagggtgatgatggcgtgatgcgaaacggtcgagccgtcgattgggacaacccgtttctgggtcatggccgtcaaagcccgtgcttgtgattggggcccgatccgcggactacatcagggccagcggtcatggtgccgcgcaaacaggccggacacatgacttgcacccgaccgcgagccgaatgtcagattcttcttgcaatgcgggcgtcgtccacaca

SEQ ID NO: 5513 - DNA, 1424 bp, unidentified
  source 1..1424: mol_type = unassigned DNA; note = element_8711229
  misc_feature 1..2: note = core
  misc_feature 3..127: note = LE
  misc_feature 128..1168: note = CDS
  misc_feature 1169..1424: note = RE
  misc_feature 1187..1419: note = bridgeRNA
agatggggtaacgggccggccggaagccctgacctcttgaggttgggtggtcgtccctcagaatgatggtgtcatcagcaacggcgtcaggtgttgggcctgcgccaagcatcaccgaggaacgaccatgcagcactatgcaggaatcgacgtctcattggaaacctccagcgtttgcgttgtggacgcgcagggcaagattgtccgggagacgaaagtggctagcgagccggaggcgctgatcgcctggtttagcaaacacgaggcgcctatggagcggattggcctggaagctggaccgttgtcacagtggctctatgcagcgatggcgaaggcgggcttagcggtggagctgcttgagacccgccatgtgcgcaccgccttcaagatcatgccggtgaagacagacaagaaagacgcccgcgggattgcgcaattgatgcgcctgggatggttccgctcggtgcattgcaagtcgctgccggcccaggaagtgcgcgcggtgctgacggcgcgcaagctgctgcagggcaagcttcacgacgtcgaaatgagcatacgggggatcttgcggggctttggattgaaggtgggcccgacgacgccgaggacctatgctccgcgagtccaggccttggcggaaggccaccccacgctcgaggtgatcaccgaggcgctattgaaggcgcgtggggtcctggccgacgaactgcgcggctttgagcgccgcgtacgcaagatggcccgcgacgatgaacgagctcggcgtctgatgaccacgccagggatcggcgtgctcgtgtccctgacctatgtctcggccatcgacgagaccgaccggttccgatcgtctcggatggttggcgcccacttcggcctgacgccgaagaagtatcaatcgggcgagacggactacaccggacgtatttccaagatcggcgacgccagcgtccgaaccgcgctctacgaagcagcgcaggtcatcctgaccaaaccggtcaggggatcagatctgaagacctgggcgctgggcgtcgccaagcgcgccggtatgcgcaaggcgaaagtagccctcgcgcgcaagctttccgtcgtgctgcatcggatgctgcgcgaccaaaccgacttcgtcacccacaaggccgcgccaattatggccgccgcctagaccgagaggagacgacacatcttcgggcgggccatcaccatcagccctcccagctcagtcccttcgccgggacgatggatcaagttaggccgcagagtctgacgcagctcgcaagatgactgcgcttgttgagataggccagcttatcctctccgaccccatagagcagcggccttgcgtcgactgcgtacagaagcaagaccccggcgacaggatgaagcgcaaaagggattgacactggaaggcccgttacaga

SEQ ID NO: 5514 - DNA, 1439 bp, unidentified
  source 1..1439: mol_type = unassigned DNA; note = element_8717048
  misc_feature 1..2: note = core
  misc_feature 3..227: note = LE
  misc_feature 228..1424: note = CDS
  misc_feature 1425..1439: note = RE
  misc_feature 9..223: note = bridgeRNA
gctctaccttccttctgggatcgccccagccattcgtagggttgtggcacccaggggagccgggtgtggctttcatgccgctgccgtccgtggcttaggtggcttggccgcctggctccccacgacgactcggccgccgattgggaagtgcgagaaagtcgctgtgtagagcaatgccggcgaggtcgtccgtggtgtgaactgcaggagcgaacgactggagcacgatgagccggatatgggcggggatcgactgcggcaagacccaccaccattgcgtggtggtggattccgaaggcgaccgactgctgtcgcggcgcgtggctaacgacgagatggagctcctccagctgctgggtgatgtcctggctctcgccgatggaaagcggaccacctgggccgtggacatgaccggcggtgagcccggcctgctgatcgcgctgctggtcaaccacagccaggaacttctctacatccctggacgcgtcgtcaacagggccactgacggctaccgcggcgaaggcaagaccgacgcccgtgatgcccgggtgatcgcggaccaggcacgcatgcgcagggacctgctgcctgtccgtctcggcgacgaggcagtgatcgaactgaagctgctgaccagctaccgcagcgacttggtcgccgaccgcacccggacggtcaaccgcctccgctccacgctgaccagcatgttccccgcactcgaacgcgccctggacgtcaccaacgccgggccgctcgtgctcctgaccggctaccagaccccggccgctctccggcgcgtcggcaccaaacggctgaccacctggctgaaccaccgcaaagtcaagggcgcccagaagctggccgagacagccgtcgaggccgccgggcgccagcacaccgccgtcgccggcgagaaggcgatcgccaagatggtccacaccctcgcgaaggaggtgatggtcctcaacgagaagggcaacgaaaccgacaagctcatcgagggccggtttcacgaacacgaactcgccgaagtaatcgagagcatgcccggcatcggatccgtgctcggcgccgaacttctcgtcggcatcggcggcgatctcgaaggatttcccaccgcggaccgactcgcggccttcgccggcctcgcccccgcgccccgagattccggcaagagcagcggaaatctccaccgcccgcagcgataccaccgacgacttcaacgagtcttctacacgtccgcgctcatcagcatccagttcgacccgaactcgcggcgcttctacgaccggaagagagccgaagggaagcggcacacccaggccgtgctcgctctcgcacgtcgacgcgtcaacgtcatatgggccctcatccgtgaccgacggtgctaccaagttgagtccccggttaccttcgcggcttgacatcagcattgggaa

SEQ ID NO: 5515 - DNA, 1384 bp, unidentified
  source 1..1384: mol_type = unassigned DNA; note = element_8724cf0
  misc_feature 1..3: note = core
  misc_feature 4..82: note = LE
  misc_feature 83..1117: note = CDS
  misc_feature 1118..1384: note = RE
  misc_feature 1136..1370: note = bridgeRNA
tgatgcggtggacggcccccgagcggcatcgcagtgccaggctcgcggctgttgaggtctgcgagcagaggagccgtccactatggagattaccacgattggtttggacatcgccaagcgcgtgttccaggcgcacggagttgacgccactggccacgcggtgctgcggcgcaggttggggcgcgccgaggtgctggatttcttccgtgcgctgcggccgtgccttgtgggcatcgaggcctgcggcacggcgcatcattgggcgcgcgagatccgggcgcttggccacgaggtgcggctgatcccggcggcctacgtgaagccgtacgtcaagcgcggcaagaccgatgcggccgatgccgaggcgatctgcgaggcggtgacccggccgacgatgcgcttcgtgccgatgaagacggcggaccagcaggcagtgctgatgctacaccggacgcgggatctgctggttcgccagcgcacggcgctcgtgaacgcgttgcgcgggcacctggccgagttcggcatcgtggcgccgcaggggatcagccgcgtcgcggagctgctggcggtgctgctcggggaggatgaggccacgttgccgccgctggcacggcaggcgctgcgaggtctggcggcggaactggaagcgctcggcaagcgggttgaggagatcgaggcggcgatcgtcgcctggcacaaggagaacgaggcgagccgacgcctggcggctgtgccaggcatcgggcctatcaccgcgtcggcggtcgtcgccacggtgggcgacgtgtcgaacttcgcctcggcgcggcacttcgcggcctggattgggctcgtgccgaagcagaacagcaccggcggcaagccgcgacagggcggcatctccaaggccggtgaccactacctgcggcgcctcctggtgctcggggcgaccgcggtgatccgccatacccgcatcaaggcacgggagggctggctcgcggagctcatcgagcgccgcccgacgatggtcgcggccgtcgcgcaggccaacaagacggcacggatcgtctgggcgctgctggcgcggggtgagagctaccgcccgcagcggggattcccgcagcacgcgggcgcataggcttcgacagttccccgccggaggtcgccgcgaccggcgggtgcgtgagggcgatggtggcgtgatggcgaaccggtcgaagccgggaccaggcagaacccgccaagcgtttcgcgcctcagagcgcgcaaatctgattgggagccaggtcgcggattgcatcagggccagcggccgtgtgccgcgcagacaggccggacacatgaccgcacccgaccgcggcgccaatcgtcaaatcgcccttgcgtcaaaggggccgtccacaca

SEQ ID NO: 5516 - DNA, 1384 bp, unidentified
  source 1..1384: mol_type = unassigned DNA; note = element_8731e47
  misc_feature 1: note = core
  misc_feature 2..89: note = LE
  misc_feature 90..1097: note = CDS
  misc_feature 1098..1384: note = RE
  misc_feature 1155..1379: note = bridgeRNA
caatgggatggacccctccccactcctacggcatcgagtgccagactggagatgtgaagcaaccagtcacggaatgaggaggggtggccatgaagcttactcgcgtgggtgtggatttggccaagcaggtcttccaggtgcacggtgtggatcgggcggagcgcccggcttggtgcaaacgtctgaagcgcagccggtggatcgcggatctcgagcgcgacgtcgagccaggttgcgagattggcatggaggcctgtggtggcgcgcaccactgggcgcgggttctgcagagcaagggctaccgggtgaagctgatcgccccgcagttcgtgaagccgtacgtgaagacgaacaagaccgatgcgaacgacgctgaggcgatctgcgaagcgatgagccggccgagcatgcggttcgtggcggtaaagacggttgagcagcaggatctgcaggcagtgcatcgcgtacgctcgagcctgatccgggagcggacggccaaggcgaaccagctgcgcggactcgtctatgagtacggtctggtcgcccctcgcgagatcagctccctgcggcgtgcggtgccgcagtggctggaggacgcagagaatgggctcacgccgcgctttcgggcgctgctgtctggcctgtacggcgacttgcggctgctcgacgatcgtgtacgggatctcgatcgagagatcgcagcaatcactcgcgagcacgagcctgtacggcgactcatgcagatcagcggtgttggcccgctgaccgccagcgcgctgtacgcgctggtcggcgatgcgaggcagtaccgcaacggtcgtgagttggcggtggctctgggactgacgcctcggcagcacagctcgggcggcaaggagaagttgctgggcatcagcaagcgcggcgacaagtacgtgcgcaccctgctgatccacggcgcacgctcggcgctgcgcacggcgccgggcaggggatcggatcagtcgctgggcactggcactggcggagcgctcacatacgaacgtcgcggtgacggcgctcgccaacaagaccgcccgggtcgcctgggcgatgctgcgccacggaacgaactatgaaccagggagcgtggtgacctgacgctacgtgccccgactgatcgaggaacaaatcaccgcggttgcgagcactccgaaagatggcgaacaggtcgagccggcgtcggaataccctgggaatgtccgcgggccagaagcccgacaaagcaatgaggagccgacgcgcgaatagcccatcgtggcccgacctcggctgatcgaggtcagacagaggccggatatacgtgagcagtcgtaccttgtcgccagaaaacggagtgctagcaaagtggggtggggtccatata

SEQ ID NO: 5517 - DNA, 1622 bp, unidentified
  source 1..1622: mol_type = unassigned DNA; note = element_8739fca
  misc_feature 1..2: note = core
  misc_feature 3..81: note = LE
  misc_feature 82..1110: note = CDS
  misc_feature 1111..1622: note = RE
  misc_feature 1387..1616: note = bridgeRNA
tgatgagatggacgtcccccagttccggcgcggcagcgccatttgacggataggacgttttttcatcagggagattgtgcgatgtcggcggcgttcatcggtctcgatctggcgaagtcggtgtttcaggttcacggcgttgatgcccagggcaaggttgttgtgacgaagcgtctgcgccgggacgcggtgctggcgttcttcgccaacctggcgccatgcgtggttgggatggaggcgtgtgccgggtcgcacttttgggcgagagagatcgcccggctcggccacacggtgcgcctgatggcgccgcagtacgtaaagccttatgtgaagcgtcagaagaacgaccgggccgacgctgaagcgatctgcgaagcggtgcagcggccgagcatgcggttcgtggcgatcaagagcgaggagcagcagagcaccctggcgatccatcgggtgcgcgagacgctggttgctcagaagacgcagctgatcaacgcgctgcgcgcccacctcgccgagttcggcatcgttgcaccgcagggcgccggcaaggtcgagcagctgaccgccgtggtcaccgacctggaggatacccgggttcccgctctggcccggagcgctcttcagggtctggttgaccagctgcgcgacacggaacgccgtgtcgaggaactcgacgcccggttggccaggcaggcccgggaggacaaggtgtgccagcggctgaccacgatcccggggatcgggccgatcacggcgaccgctctgacggcgacggtcggcgacgccacggtcttcgagtccggccgtcatctggcggcctggctcggcctggtgccgcgccagaactcgagtggcggcagggagcgcctgggcggcatctccaaggcaggcgacggttatcttcgccggctgctggtgcatggcgcgcgggcggtgatgcgctggcacggcaggacttcgccctggcttgccgggctgctgaagcgccgccccgtcaacgtcgcggtggtggcgttggccaacaagctggcgagcatcgcctgggcggtgatggcgcgcggggaggactaccgcaagcctgacgcggcggccgagctggcacaggggtgaagcgatgatgacccaagcaccccagctcgcaatcccgaccagcagcagaatagcgccgtgctcgctccggcaaggccaagccgcctccggcggtggccctggcgggccagccttgccgtccgctgtgcgcggcgctcttggaaaagacaggtcggggcgaagaggtggtcccgccgatcgaacaaagaggttggcatcaggagaaagaacggaatgagacagtgccgcaggcttggcagccgttccggcgccgaaggcggtacatcaggctctccttcggtttgcgagggcgattgacgacgtgatgacatgacaggtcggaccgggatcggccaaacccgtgtgcaacagcgagcggcagagctcgacagcgtgattgggtgtcgatccgcgcatctcatcagggccagtagcctacggggctgcgtcaacaggccgaatagatggcggcaaccgactctccaggtcgcaacgttgcaaaaagcgcttgcaaggcggggaacgtccataga

SEQ ID NO: 5518 - DNA, 1386 bp, unidentified
  source 1..1386: mol_type = unassigned DNA; note = element_873c8e0
  misc_feature 1..2: note = core
  misc_feature 3..86: note = LE
  misc_feature 87..1118: note = CDS
  misc_feature 1119..1386: note = RE
  misc_feature 1145..1374: note = bridgeRNA
tgatgcagtggacggctcccacccggaggcatcacgttgtgccaaaatggtggttcctctgaaccacagggaaataggagccgcccatgaacgaagttatcacaatcggtgttgatcttgcgaagaacgtttttcaagtccatggcatcgatgccgagggcgcggtgattgttcgccggcaactgcggcgttctcagatgctgcctttcttcaagaaacagccgccttgcctggtgggcatggaagcgtgcgccacggggcatcattgggcacggcaactggtggcgcttggccacgcggtcaagctgatgccgccgaaatatgtaaagccatacgtgaagcggaacaagaacgacatggcggatgcggaggccatctgcgaagcggtgacacgcccgaccatgcgatttgcggcgatcaagacagtggatcagcaatcggttctgttgctgcaccggacccggcaattgtttgtccgtcagcgcccatcgctgatcaatgccctgcgggcccatctggctgagtttggcattgtcgccggtgttggccgcaatgggcttgagcgcttgttacaggtcattgaggatggtgatgacgaacgggtgccgccgacagcgcgggactgccttttggccttgcgcgatcagcttgaaatggtgaagcatcaaatactcggtgcggaccggcatatccttgcctggcaccgctcatccgaggtcagccagcgcctcgacgatatccccggcgttggccccctgattgcgtcggcactggtcgcctcggttcctgatccgcatgccttcaagtcgggccgtgacctggcggcctggatcggactggtgccgaaacagaactccaccggcggcaaggatcgcctcggtcatatctcgaaagcgggtaatcgatatttgcgaacgatgctcgtggtgggcgccctctctgtgatccgccgggccaagcaacttggatacacacgccggccctggcttaccaagttattggaacgacgaccaacgaagattgccgctatcgccttggcgaacaagaatgcccgtacggcctgggcgatgatggcccatgggactttttacgaggagcctcaatccgaggccgtttgaaacacgcgcggacgttgcctgcgcatcagaggttggaaaggacaccagacgaataatgcaccgagcggtcgatccgaagaccgggacactccattttagccaatgcagcaaagagactgcgtgcttctgataggaacctgatctgcggagagcattatggccagcggccatgtacccgtgccgcataaacaggccgaacacatggcagcaccgaccagcgttgtatttaagtcaaattagtccttgccaacagggagccgtccacaca

SEQ ID NO: 5519 - DNA, 1550 bp, unidentified
  source 1..1550: mol_type = unassigned DNA; note = element_874034a
  misc_feature 1..2: note = core
  misc_feature 3..238: note = LE
  misc_feature 239..1441: note = CDS
  misc_feature 1442..1550: note = RE
  misc_feature 3..217: note = bridgeRNA
cttgtattatagagtagtagtttttagtgacctctccaaggtcatgtgctacactataagggatgctgtggattggttcattcctcctaccgcaagacggttttaagaaggctccaaccacagccccctgcagttttgttgatcagttagataccgccagacggttgatgtagaacaaggttacaaggcagggtgttctgtggatacagcatcaaatttattatccggaggttctcttatggtttgtgtcggtatcgatgtctcgaaggacaagcatgactgtttcatcctatcctcggaaggggaagtgctggcagacgtgttcaccatccccaacagcatggagggatttcaactccttctggaaaagatccgtggctgcgtttctccccaagacagcataaaagtaggacttgaggcgaccgggcattacagctataacctcttggggttccttcttgactgcggcctggcaacctatgtcttgaatcccctgcacaccaatctgtaccggaaaagtctttccttgcggaagaccaagaccgaccgagtggatgcgcgtaccattgcggctatgctgttgtccgatgtgggcctcaagccctacacgaacacagtataccacaacgaggagctaaagtcactcacaagatacagatttgataaagtcagggaacgtgccaagctcaaacagtctgtctcccgtctggtctgcatcctgttcccggagttggaaaagctggtgccatcgctccacatgaaatctgtgtacgcccttctggaggaattcccgggtgccaagcagatcgctgtagccaaccttactcgattgaagtttctgctggctggcgcatctaaaggtcgctatgggcgggaagtcgcggtggtcatccgagaggccgccagagcctctattggctcttttatgcctgccaagtccctggaactgcggcataccattcgtctcatccgggaactggacgctgaaatcgaagacattgaaggctctatccaatccattatggatgaactgcaatctcctattaccaccattcccgggcttgggttccgcatggccgctatgatcctggctgaggttggcgacttcgctcgctttgattcgccggacaagctccttgcttacgcaggtttgtccccttctacctaccaatccgggcagctcaacaactgttatgcccacatggaaaagcgaggttccagatacctgcgctatgccatctacaacgctacaaagtacgtctgctattgggacccaacctttgccgcatatctcgccaagaagcgttctgaaggcaagcactacaatgtggctttgtcccacgctgccaagaagctggtgcggctcatctacgctatggagaagtccgggctaccttaccaaccggcaaacgccgcttatatcttctctctcatcctttgacttaggtgccctcacgggtgcctgttctcccatactcttttttcgtcttgcattccaccttcccttctgtactttttttcattttccctcttgacatctaatagttagt

SEQ ID NO: 5520 - DNA, 1215 bp, unidentified
  source 1..1215: mol_type = unassigned DNA; note = element_87464c2
  misc_feature 1: note = core
  misc_feature 2..212: note = LE
  misc_feature 213..1184: note = CDS
  misc_feature 1185..1215: note = RE
  misc_feature 35..202: note = bridgeRNA
tcttaagttagcattttataaatttaactaataaatcagaaagcacaaaagagaggattaagattattttatacgtagaagctaagacttcgtcaacattgaaaaccccctctcttttctacccacatttcgaacagttgtttgaggcttttagacctcgtttttaagtagtagaaagtaaagtagattgtcctttcgcaaaaatttttattatgaataaaagtacaaattattatggtattgacattagcaaagatgtgtttgatgttacagaccaaaaagagacccattatcaatttataaacgattctaagggctttaaagagtttaagaaattgttagataaaaatagccattgtgtgatggaggcaactggttattatcattataaattagcatatttcttacttgagaaccgagtgttggtttccgtagaaaaccctctatcggtaaaacgatttatccagatgaaactatccaagataaaaacagataaaagtgactcaaagatgttatgtaaatatgccgaaaaagcagatttaagattgtgggaaggagaaagtaaacaacaacaagaatgcctacaaatgacccgcatcctgagtatttacacaaaacagagtactgcgataaaaaataaaatacacggagaagttgttttgggagtgccaagtaagatcgtgatgagttcattaaaaaggactttaaaatcgatcgcaaaagaagtgaaaatgatagaagataagttgctggaattggtaaaaaaagagaatcaagagttactcactttattagaaactatacctggtattggaagaaaaacaagtctaatgttattggttttgactgatggatttgaacgtttttcaagcgcatcagaattatgctcctatgcagggttaaccccagtaatacgtaaaagtggaagtagtgtgcatggacggcctaggataagtaagataggcaatcaaaagttgcgaaatttactttttctatgcagttttaatgcctccaaatacaacaaagcctgtaaggcactttacgatagaattgtagcaaaaggaaaaagcaaaaagttagccttgattgctgtttgtaataagttgttaaaacaagcttttgcaattgcaaaatcgaggctcccttacgatcaaaactacagaagcaaattatcggtaaattaatcagattttacttgtttttagccacagttct

SEQ ID NO: 5521 - DNA, 1284 bp, unidentified
  source 1..1284: mol_type = unassigned DNA; note = element_874af79
  misc_feature 1..2: note = core
  misc_feature 3..209: note = LE
  misc_feature 210..1235: note = CDS
  misc_feature 1236..1284: note = RE
  misc_feature 5..169: note = bridgeRNA
ctcgtatagtaaggaggtccgattcctgggtgatggtgaggacgcgatgacagctgcggcaccgaccgcgtagcgaagattgtcccccatcatcccgggtcggccagagcgtgaaccgtatcgtgtggcttcgaccacgtatcacgagcgcacgtcacggccgcccgtggaatcgctctcgtccttcgccgcgtggaaaggagccccctgtgaccgatgcatcgccctctctcttcgtcgggatcgatatcgccgcgaaaacgctcgctgccgcctggctccgccccggtgaggcggtcagtcgcccgatcaccctcgcgcaatcgccccacggatttgccacgctgcacgagcgccttggccagaccggctgtccgccgccggagacccatgtcgtcatggaagcgactggctcctattggattgctttggcgacgacgctggtccacatgggctaccgggtgagcgtcattaatccggcccaggcacatcattttgcgaaggcgctgctcaagcgtgcgaagaccgacgccattgacgcacagacgctcgcgcagttagcagcattgctccaacccgcgctctgggcaccgcctcctaccgtctattatgaagtgcaacaacgccttgcccagcgcgatgccctcctcgatgtgcaacggcaactgatgaatcagttgcacgcgctgctgttcgctcccctcgtcgtcgcttcggtcaaggcgcgcatggaggagttgatcgaaacgctggggcagcaaatcagggcgctcgacgctgaggtgcgtgaggcgctcgctgccgatgccgcctgggctgcctcggcggcacgcctgcaaagcattaaatgtgtcgggttgatcacggcggcctggctgctcgtcacgacgctcaacttcacgatctgtccgacccccgaggcggccgtcgcgtacgccgggttggccccgaacccctacgaatcggggaccagcgtgcgcgggcggaggcgtattgggcatacggggaacgggcggatgcgcacggcgctctatctcgcgacgctcagtgccgcgcagcacaatcccgtcatcaaggcgttctatgagcggatgcgcgctgcgcgcaagccagcgaaggtggcgcgctgtgccgcggcgcgcaagctgttacacatcgcgtgggcggtcgtgcgcaacgaggaagattttgacccggcgtatgcgcagcggcatgttcagccactggcagcatgaaggaaatgccggagccggtcgcttcaagacttgacaagcgataccgtat

SEQ ID NO: 5522 - DNA, 1428 bp, unidentified
  source 1..1428: mol_type = unassigned DNA; note = element_87598ee
  misc_feature 1..2: note = core
  misc_feature 3..221: note = LE
  misc_feature 222..1412: note = CDS
  misc_feature 1413..1428: note = RE
ctgatataccgccttgtgaggtcgatgattctcttcgacctccgcggggagaccggcacccggctatccggcagatgaccgttggagctagtgtccggcccccgaccttcggccgtgaacggtgattgggatccggcggcagcgaccggtgatcggatacatcagctgacgtcgaccggaggagcgggcacccctggggtccgccgaaggaggctggcctgatgacgacgatcgggatcgacattgggggccggacgcacgtcgcggcccgctgccgggacggccaggcacgggccgaccgcgagatcctgcgggtcagccagaaccgggccggctttggggtgctcgacgcctggctcgcgcggcaggccgaaccggtgaccctcgtgacgatggagtcgtcgggccactactggatgccgctcgcgagccacctgcgccaccacgacatcccggtcgcggtggtcaacccgctcgcggcgaagtactttgcgaggagccggctcgcccggacgaagtccgaccctgccgatgcccggagccttgccgagatggccatgcgcgacacaccagcggcccgtgatccgctggccggcgcggagctgcgccaggcggcccgcttcgcgatgaccctcgtgaccgagcaggcgaaggtctgccagcgcctcatccgcctcgtcgagctcgggttcccggagctcggcgagctgttcgacgatccgacctgccggacggcccgggaggtgctccgcatcgcccccaccgccacggccgcccgccgacggcggacatcgaccctggccaacgccaatgccggtcccggtcaccggcggcttggccaggcgaaggcggagcgcctccaggccgccgcggccgactcgatcgcggtgcccgagctcgacgccgaggtcgccttcgaggtcggcctcctgctcgaccagtacgacctgctcgagcgccagatcaccgacgccgaccggcgggtcgcagggctcctcgacggcgagaccgcccgtcggctccagaccatcccgggcgtcggaccctcgatcgcggcgaccctcatcagcgagatcggagacatcggccggttcgacgacttcgaccagctcctcgcgtacgccggcgtccatccggccgaacgcagctcgggcacgaagggggcgaaccctgagacctcctggcacatgagcaaggcgggcaacgcccacctgcgggccgcggcgtaccggatggcgctggtcggcctccagcacaacccggtcatcgccgcccactacgcgcggaagcgggccgccggcaagtcgaagatgaacgccctcggccactgcatgcgcaaggcgctcagcatcgtctggggcgtctggcgcaatgggaccgacttcgaccccgactggggggtcgaggcttgacaagaccctatgggat

SEQ ID NO: 5523 - DNA, 1514 bp, unidentified
  source 1..1514: mol_type = unassigned DNA; note = element_8767d0d
  misc_feature 1..2: note = core
  misc_feature 3..251: note = LE
  misc_feature 252..1493: note = CDS
  misc_feature 1494..1514: note = RE
  misc_feature 7..246: note = bridgeRNA
ctaatgagagttaacgggtcggccgtcgtccggcagactcgggtctggtagccgccggcgggtgagcactctttccgactgggctgtaagtcctgtgaaaagaccgtgcccctgccggctggccgggagagttgatcgctgatgggatgtggtgcccgcccggcatgtggcgtgagcactgattcattagtccgctgatagttctcccgcaggctgctgatggtgtccggcactggaggagggagagggcgttgcggctgttcatcggggatgactgggcggaggaccatcatgatgtggagctgatgggcggctcggggcggcggctgggcaaggcccggctgcctgaaggcatggccggaatggcccggctgcacgccatgatcggcgaggcgcttggtgaggacgccgcagacgctggcccgggccaggtggtgatcgggattgagactggccgtggcccgtgggttcaggcgctgatcgcggccgggtacacggtgttcgcggtcaacccgctgcaggcggcgcagtaccgcaagcggcacgcggtgtccggcgccaagagcgacgccgccgacgcgcatgtgctggcggacatggtccgcaccgattcccaccagctgcgcaccgtggccggggacagtgcccaggcggaggcggtcaaggtggtggcgcgggcacacaagacgctgatctgggaacggacccggcacatgcagcggctgcggcacgccctgcgcgattacttccccgccgcactggaggccttcagtgacctcaccgcccccgacaccctggaactgctggcgcgggccccggacccggcatcggccgcgaagctgactgccacgcagatcaccgccgcgctcaagcgcgcccgccgccgccgcatcccggcccgggcagcagcgatccaggccgcgctgcgcggtaagcacctgggccagcccgccgtggtcaccggcgcctacgccgccacggtccgcgccgcagccgcggtgctgaccgtgctcaatgagcagatcacggtgatggaagggcaggtggaggcctattttggcccgcacccggacgctgagatcatcacctcccagcccggcctgggaccagtcctcggagcccgcgtgctcgccgagttcggcgacggccccgcgcagtacgccaacgctaaatcccgcaagaactacgccggcacctcgccggtcacccgcgcctccggcaagaagaaaaccgtgatggcccgctacatccacaacgaccggctcatcgacgccctcacccgccaggccttcgccgccctgaacgcctcccccggcgcccgcgcctactacgaccagcaacgcgcccgcggcgccagccactacgccgccctccgccagctcgccaaccggctcaccggcatcctgcacggctgcctcaaaacccgcaccccctacaacgaggccaccgcctggccgcagcacgccgcgaagacagggaacgctgccgcttgacatccaagccccatgggatgt

SEQ ID NO: 5524 - DNA, 1144 bp, unidentified
  source 1..1144: mol_type = unassigned DNA; note = element_8770a77
  misc_feature 1..2: note = core
  misc_feature 3..222: note = LE
  misc_feature 223..1134: note = CDS
  misc_feature 1135..1144: note = RE
  misc_feature 37..201: note = bridgeRNA
cttgtgtctctcgaatcatgcaggatcgggctgacgggtgacccgggtcatgaccggatcacccgttgcggcggaagcccgtacaccccttggcataagcccgtggatgagcaaggaactccgaccgcatcttccacagcccgaacggttgctagggttcgaccccgcaccagcaaggaagggatcagaagatgacacaaattgcactgcatgtcggcatcgatgtgggccaaggagcgactggacgtggccattcgggaaacaggggagttgttcgcagtcgacaatgacgaagccggttatgcggcattggtcgagcgtctgtcgggtcgggcgatcgccgccgtcggccttgaggcgagcggcggctatgagcgggctgtgctcaaggcgctgtggcagaaaggcctgccggtgcgtcgcatcaatccgcacaggctgcgccaattcgcacgggcggccggcgtcaacgccaagaacgatcgcctcgatgcacgtgtgatcgcccgtttccttgcgacgttgccggtgcatccggtggagtttgatccaagtctggagttggtgatcgaactggtcaccgcgcggcgccagctccaagccgagctcagccgtgtcaacaaccagctcgaacacgtgcgcgatgccgctctcaagcgcctggccaagcggcgagcgacccggctcagtgccgacatcctgttgctcgacaaacgcatcgcccaagccatcgcggccgaccatgccctggcacggcgcgaccgcctgctgcgttcaactcccagtgtcggcccggtcctgagtgccacactgatcgcacagctgcctgaactgggccgcttgtccaaccggcggattgccgcccttgtcgggctcgccccctacgaccacgacagcggcaagctcaaaggcaagcgatgtatctggggtggccgcgagccggtccgcaacgtcctctatatggccgcgctcagcgccggagtgcataatcccgtcttcgccgctttccgccagcgcctgcgagcgaaaggcaaggtggcaaaggtcgccatcgttgccgtcatgcgcaagctgatcacaaccctcaacgccatgatccgggacgacaaaccttggaacccggcttgcgtctgaaacacggttg

SEQ ID NO: 5525 - DNA, 1420 bp, unidentified
  source 1..1420: mol_type = unassigned DNA; note = element_87732b6
  misc_feature 1: note = core
  misc_feature 2..407: note = LE
  misc_feature 408..1406: note = CDS
  misc_feature 1407..1420: note = RE
  misc_feature 12..239: note = bridgeRNA
ctacttagcattggcggcagggctcgttcccggccaggatcgggtccaggtgcccggcgggaggctctccagcggctgcccacctggactttggtgtggctctttaatggcttgcgtcccaccgggtgccgtgcgggcgtggctgaaaaggggcgtgccctagctcgaagtagcggtgccttcccgcacggacacctactcgttcgcacgcggaaaggaacacactcttgccggtcatcatcggaaccgacccgcacaaacgctcggccaccatcgaggtcatcgaccacgacgcaaagattctggccaccggacgttacgacaccgacaccgacaccgacaccgacaccgacggctataccgaaatgctcactgccatagagcgtttcccggatcgggtgtaggccgtggagggttgcaacggcatcggccgacatctggcgcaccgcctggtgcatgacggtgaaaccgtgatcgacgtgccggcgaaactgtcagcgcaggtgcgggtcttcgccaccggcaacggtcgcaagaccgacccggtcgatgcgcactcggtcgcgttggcagcgttgcgggcaccgaatctgcggcgggtgcaggccgatccggagctggtggcgctggggatgctggtcgatcggcgagacgagctgggccgtgctcgcaccgaaacggtcaatcggctccatcgactgctgctggaactggtgcccggtggcgccaagcgctggttgtcggcgggccaggcccggaccctggtccagacctgcacggtcgacgattccgcggcgcggatccggctacgggtcgtgctggagctgatcaccgatctcgaggtcgtcgacgcccggatcaaggccgcgaacaaggaattacggcagctggttaccgcgaccggttccacactgatggagctgcccggcatcggcccggctggcgcggccaggctactcgccgacgtcggcgatatccgccgcttcgctacccgagatcggttcgcgtcctggaacggcaccgcgcccttggacgcgtcgtcgggagatcagaaacggcatcggctctctcgtgccggaaaccgcaagatcaaccgggtcttgcacatcatggccgtcgttcaacagtgcggctacggcggcgggcgtgactacgtcaagcagaagaaagccgagggcaagacctcgaaagaagcactgcgctgcctgaaacgacgcttgtccaacgtcgtctacagtcggatgctcgccgatgcacaccgcaacgagaaggcaagtccgggagggcaatcgggggcgcatcctgactcctgcgcgaccggctcgaccccgtatgccgatccttcggacaagccacaacccggacccgccgtccaccagcttatcgaactaccaactgctacttgacactaaaggggagc

SEQ ID NO: 5526 - DNA, 1383 bp, unidentified
  source 1..1383: mol_type = unassigned DNA; note = element_877dc15
  misc_feature 1..2: note = core
  misc_feature 3..218: note = LE
  misc_feature 219..1211: note = CDS
  misc_feature 1212..1383: note = RE
  misc_feature 6..208: note = bridgeRNA
catttacttttgcactattcaataacacgaaaaatcgtgtatctttgaaaaagaagagttgcagtgcactaatttttggactagtctttcatgactataggctgaatcagactgcaactctaactttcggagaatttagccagttagaattttaggcattaaggcctgttaaatgtattagctacttctcctttttgtttaactataaatgcaaaagtatgaattattctcattttgtaggtcttgatgtgggaaaaaagtcctttgatgccagtctggtgtctttagaccaggaattaagtcatcatacctttcccaatacccctgaaggtatcgaagaattattacattggataaaacagcatggagtggaagttgaaaccgcccttttttgtgcagaaaacacgggtagttacgtgatcgacttgtgtttatccagctatcagtaccattttcccctggctcttgaatgtcccttgacaataaagaaatcgattggcttgcaacgtggcaaaaatgaccggatagatgcccgccgaatagcccagtatgccagtttgcattaccgtaaactcaggttatatgaattacctgataaagatttggtcaggttgaggaactggctggttataagggataacctggtaaaacaaaaagtatcttccctgaaattgctggaactgacccgtgaaacttccaggctggcagatctgatggttcccatgacttttttagaaaaccagatctgtcaaataaaagagaaaatctcttatgttgaagaggagatggaaaaaatcatcacggaaaatattactctttctacaaattaccagttactgacaagtataaaaggtataggaccggttaatgctattgtacttttatgtgtcacggataattttcaacggttttctgacccgcgaaaatttgcctgttattccggggttgctcctttcgagtactcatcgggaacttcgataaggggaaaaacaaaaacttctcatttagcaaacagggaagtgaaagtatacttgaccagggctgccataacagctattgcctgggatccacaaattaaagcgtattataaaagaaaaatagcagagggaaagcacaaggcatcggtcatcaatgcggtcagggcaaaaattattgcaagatgttttgccgttattaaaagaaagaccccatttgttacattaagtgcataggtgaatcaaatgcgtgaaggaaagattatttttcttttcgaaagtctctcacaaatcacgagatttttgaaaagaaaaagaagctgtgcggggggggaagaaaagaaaatcgcaataaaaataaattttatcacgattttctgagttaaaaatttggttgagacttagaatt

SEQ ID NO: 5527 - DNA, 1298 bp, unidentified
  source 1..1298: mol_type = unassigned DNA; note = element_877e626
  misc_feature 1..2: note = core
  misc_feature 3..270: note = LE
  misc_feature 271..1071: note = CDS
  misc_feature 1072..1298: note = RE
  misc_feature 1072..1292: note = bridgeRNA
ttaattagatggtacgcccctccattccactaaactcgacagtagcgggtaaggaaaggtgaccatcatgaacagcactcatattattggtatagatttagcgaaacatgtctttcatctagtcggccatgattgttcaggaagagagactttccgaacgaagttaacccgacagaaaacgcttcagttcctttctgctcacgatgctgccattgttgtaatagttgccactggtttgcacgaaaatgtcaggagtatggacatcaggttatgttgattctcgcacagtacgttaaaccatacgtcaaaacgcacaagaacgacttcattgatgcagaagctattgctgaagcagctacgagactaaagatgaggtttgtttctccgaaaagtgaacaggctcagatcagtgtagttattcgcaagctccgatctggctatataaaagaaagaaccgcctgcatgaataggattggctccatgcttctggagttcgggatcagctttccaagaggtcatcatcagatgaagaatctttttcaatggttggctgatcataacgaagtcgtgccgcccttgctaatcctcgaactaagaaaccagcttgatgactacaacctgttaaataaatggattaaagaacaggaagaaaagctagatcgtgtaaacaaagataatgagctgatggctattttacaaagtgtaccaagtatagggccaattaccgcttcctgctgtttatctgctgtcgcagatcctcaagactttaagaatggtcgcaactttgctgattggctaggcttagtcccataccagtattcgacgggaggaaagccacgaatgcttgggatctccaagcgtgggaataaagagcttcgcgaactatttattcatgctgcacgagccgtcatgtggagagatgtgtcagcagaaaagtgttttggctcttggttaatcgagctaaaacggcgaaaaccatttaatgctgctcttgtagctttgacaaacaaactcgcgaggatagcttggtcagttatgatgactcgcaagacctttgagataagaacctaattagatttgcagatgatatttaaagatgacagaacggttagaccatcagattgaagaccttgtggacataacagcattcatagtgctttcacgtttttgaggacaatctggcgcggatctcatcgaagagctgaggcttatgattagtctctatcagactctgaatacattagcgcaaatcagctccgttattatttatcaacttgcataatggggcgtaccataca

SEQ ID NO: 5528 - DNA, 1521 bp, unidentified
  source 1..1521: mol_type = unassigned DNA; note = element_878d369
  misc_feature 1..2: note = core
  misc_feature 3..127: note = LE
  misc_feature 128..1084: note = CDS
  misc_feature 1085..1521: note = RE
  misc_feature 1268..1468: note = bridgeRNA
aggcagtatgactttccgtgagacagatgctggccaacgtgggatatttaacgcgggttaacatcgttgtcagagccgcatgggtgagctgttgctacaccccggtatttccaccacggaggccagcatgaacaacaataacacattgtacgtcgggttagatgttcacaaagaatcgattactgtcgcttatgctatcaattcagaacctgttgaactgatgggtaaaattggcacatcacctactgatattcagaatctttgtaaacgtctcaggtcaaagtcatcacaggtcagtatcgtttatgaagcggggccctgtggttatggactttatcgtcggctggtgaaatccggttttgactgcatggtctgcgccccctcacttatcccgaaaaaaccgggggagcgggttaaaaccgatcgccgtgatgccatcagacttgtgcgttcactgcgtgcaggagatctttctgctgtctacgtacccggcattgaagatgaggcattccgggatttggcccgggcatgggcatctgcccgcgatgatttacggcatgcaaggcaacgtctgaaatcgtttcttctggttcatggggtccattatgtcgggcgagcagattggggccctgcacaccgacgctggctcagcaaatactcattcgaaagtccctggcgacaattagcttttgacgaacaccgtcgtacaatagaagatcggcaggcacaatgtgaacggctggaatccgccctgaaggaggccgttaccgaatggaggctgtatccggtagtagaggcgctgcaagccatgcgagggattcagtttattactgcggttggattaatttctgaactgggtgatctgacccgttttgaacatccacgacaactgatgtcatggtttggtatcacgccatcagaatattcatcgggtggaagcagacatcagggcagcattaccaaagccggaaacagctatgccagaaagctattggtcgaggcagcgtggagttaccgtcatccggcacgcatcagtccggcaatacaaaaaaaggcaggaaaatttaccccgccccgtcattgacagagcatgggatgctcaactcaggctttgtaagaggtatcgaaaacttcaggccaaaggaaagaatgtcaatattacaattgttgctgttgcacgtgagctggcgggttttatctgggatatgggccgaatagcaatgtctgtcgcacaacaaccacaatgtcacaaataaaaaatgagaataaccagttccctgaaggcgacgtagcccggtacaagagtaacccacgttagcgcttggcgacggcggaacaaagctgattcgcgacgtaagaaagtggcaggctcatatgacggacctctgtaatgcggtatccaacccgcgaatatcagcgtgattcaccgtcggatttactgctacgtcgccctcagggaattaaacctaaaaagaaaatcgtcaaaattagagattccggtttgacacggaaagtcatatc

SEQ ID NO: 5529 - DNA, 1352 bp, unidentified
  source 1..1352: mol_type = unassigned DNA; note = element_87a1524
  misc_feature 1..2: note = core
  misc_feature 3..87: note = LE
  misc_feature 88..1110: note = CDS
  misc_feature 1111..1352: note = RE
  misc_feature 1124..1339: note = bridgeRNA
tgatggggtggatggctcctgcttcaaccggcgtcgcaatgcgccatagtgcaggtgtcaaaatctgcttatgagaggagccaccccatgcaagttaccacaatcggtgttgatctggccaagaacgttttccaagtccacgggatcaccgcgagcgaagaagtcgtgttcaacaagccgctgcgacgagcgcaatttctgccgttctttgcaaaactggaaccgtgcctgattggcatggagtcgtgcagcagtgcgcatcattgggcccgtgaactgacagctcttggtcacgaggttcggctgattccgccgatgtatgtgaagccatatgtcaaacgcggtaagtctgatgccattgacgccgaagcaatttgcgaggcagtgactcgacccaccatgcggtttgttgcgaccaaaacagtcgagcagcaatccctgttgtcgctgcatcgggcgcgtgaccttttggtgcgccaaagaacgcaactcatcaacaatctgcgtggtctggtcgcggagttcggtatcttcattcccaaagggctggcccgtgtgattggatttgctgaggacatcactcttggtgaagtgctcgacttgccagacatcgccaacgaggtgatccgcaacctgtcagaacagctcatggctctgcataagcgggtccgatggtatgaagagcgcctcaagcaagtggccaaagaagatacgcgtgtccgtttgctgcgcactatacccggcgtcggcgcggtgacggcttctgcgatcatcgccagcattggagatggtcaccaattcaaaaacggccgggagttcgcagcatggctgggtttaacgcctgccaacaaatccagcggcggtaaagagaagttggggcggatcaccaagatgggtgaccagtatctgcgatcattgcttgtcgttggtatgacatcactcgttcgacaaacacgatcccaccccgagcgagccagcaaatggcttacatccttgcttgaacgcaaacctgcgcgtgtcgcaactgttgccatggccaacaagaccgcccggatcgtctgggctgtcctgacccgcaacgaaccctacagcccacgcactatagcctgagacgaaaagaacaatgagttagcaagacccgcgagatgatggtgcataagtctgccgccaaagccaagacactccgccgaatggcgcgggcataatagcccgtaaagctgataggaacttggtttgcggaacccatcagggccagcggtcaaaaccgcgcaaacaggccggacacatgactgcttctgacaaatgcacaaatcagatcaaaaatgtcttgctatgcaggagccatccacaca

SEQ ID NO: 5530 - DNA, 1321 bp, unidentified
  source 1..1321: mol_type = unassigned DNA; note = element_87b07e9
  misc_feature 1: note = core
  misc_feature 2..251: note = LE
  misc_feature 252..1310: note = CDS
  misc_feature 1311..1321: note = RE
  misc_feature 15..242: note = bridgeRNA
ctattggtcatgatgatccgggccgggcttcttcgacgggagacgcttcggtcgggccgttgggtgactcggaaaacacgtgccgcaaggctttccgttgatatgtccacggcggcccacagggcgagagccctggcctggagtgacttgatagaagcctgctgagccgtcaactcgcaataggtctgtccccaggccagggctcttgcctctgccccgtcatccacgacagcggaggagaggccagctcgatggtgacagtacggatcgacccgcacaagcacgtccacgtcgcagtggcagtcgatgccggcggcaggcagatcagcaagccgatgatcgtcaacaacgacacgctcttgatcactgcgctagtcaagtggatccgctcgatcgcaggcgacatgcccgtcacctgggccatcgaggacggtcgcgggttcgcccgccgcctcgccgacggcctgctgctcgccggccacgaagtggtctgggttccatcccggctgaccgctgcccaccgcaagctgcatgccgccaccggcgccaagtccgaccccgtcgacgccgccgcagccgcccacgccgcgatcgccacccccggcctggaccggcaccgcatcgacgagcgagtccgtgaactacgcgtcctggtcgactaccgcgcagacctcatcaaacgccgcaccatggtgatcaaccagctcaaagcacaactgcatgtctggctcaaccacactccaggagacctcgcccgccccaaaggcctggcctcgctgaccgcactgctagagccggcaccgctgggcacacacgtccgcaaggcgctcgccgacatgatcacggagatcgccgatctcaaccaacgtgtccgcgacctcgacggcactatcagggaactcgtgaccccgctggcccccgcactgctggagatcaccgggatcagtcacatctccgcggcggtcctgatcgctgagatcggcgacatcacccgcttctccagctcggccaagctcgcccgctacaccggctgcgctccgatcccggtctactcctccgacaaagaacgccatcgcctgcaccgaggcggaaaccgacggctcaacagcgtgctctacaccgcagcgatcgtgcagaaacgctggcatcccgacgcacaggcgttacttgcccgccacgaacccaccaaaggtagccgcggcgcccgccgcatccttcaacgccacctcatcgacgtcatccaccgagccatgaccaccgatcaagcttcctggaaacaccacatcacccgctacgaacacaccgcttgacatagaagcat

SEQ ID NO: 5531 - DNA, 1198 bp, unidentified
  source 1..1198: mol_type = unassigned DNA; note = element_87b2f4c
  misc_feature 1: note = core
  misc_feature 2..216: note = LE
  misc_feature 217..1182: note = CDS
  misc_feature 1183..1198: note = RE
  misc_feature 34..198: note = bridgeRNA
ttgtctgtgcgatccatgctttactatcggagaagctggttatgaaccccgggacggccatcccggggttcgcgcggtcaggcgcccgtacaggaattggttttgacaaccgacctcatgaagggacctcatcgctccagcttcgcatcgcttgatgacttgactgggctatccgtcggacacgcccgcagacaattcgaagcatggagcccgattatgatgacagaaccggccaaaatccagtccatcctcggtctggacgtctcgtgcgataccgttgccctcttcgatagccgcacccatcgcagcatcaccattgccaacgatcccgacgcgctgcgggcggccctgcagccctatcaggccagcgccacgcttgccgtatgcgaagcaaccggcggccacgaggacaccgtgctcggcgtgctcctggaactgtccattccagcccaccgcgccgatcccgccaaggtcaaggcctatatccaatccttcggcaaacgcgccaagaccgatccgatcgatgcccgatggctggcccgctacggacaggaccgtgccgaggcgctgccacaatggcaacccaaagacccgatccggcaaagacttacgctgctcgtcgcccgccggctcgatctcgtcgccatgcgcgtccaggagcaaaatcgcctcaaggccccgcgcggcagcttcctcgccgacgatatcaatgcccatctcgatgagctcaaccgccatatcgccgccctcaatgccgagatcgacagcctgatcacccaggatcacgatctgacattgcgcgccaaagcactgcgctcggtccccggcatcggccccgtcctcatgccgatgctgctggccctcatgcccgaactcggcagcctcaatcgccgccaggtcgcaagccttgccggcgtcgcaccccatcccaaagacagcggcaaggtcagctggcaccgcgccaccttcggcggccgacgcacgatccgccccgcgctcttcaccgcagccctcaccgcctgccgcggagacgggccgctcgccacggcctacaaaaccatggtcaaggccggaaaaccaaaacggctcgccctcaccgccctcatgcgaaagatcatcaccatcgcaaacgctcgcgtcagggacgctctcaagccgaaaaccgaaaaaatgccggcataggctttaactgacttgg

SEQ ID NO: 5532 - DNA, 1105 bp, unidentified
  source 1..1105: mol_type = unassigned DNA; note = element_87ddeaf
  misc_feature 1..2: note = core
  misc_feature 3..188: note = LE
  misc_feature 189..1064: note = CDS
  misc_feature 1065..1105: note = RE
  misc_feature 25..198: note = bridgeRNA
cttctgtatcctcagtttgctatattgcccccgtcagcagccttggccgaggtcgctgacggggcggtatatggcgtctgagccttgtggcatgaaccacgtttactagcgagccagcaccgtctctcttcatcatctcgaacagttgcatgtggccgttgaggaccacggatcagaaggaagagaacatggatacggtaacacaagctacgatcatcggcatagatgtcagccgtgattggttggatattcactgtctgccagctggcaaatgcgcgcgctttccgaacaaagtcaaaggccacgagcaagtcgctcaacttgcttgcgagctgggcgcgctggtctgcttcgaagctaccggcgggcaggagtggcagctttgggtcgcgttggacgatgccgggatcgcgacgcggcaattgccaccggctcagatcaaagccttcgctgccagccgggggacacgcgccaagaccgaccggatcgacgcggaactcatcgcgcgcttcatggcattcagaccggatgccgggcgggcccttccacatagaaagctacgtcttctcgcgcaaatcaaggcgcaggggaagcttggatccgccgagatgtttgcagccatggacgaagacctcaaaggtctgctcgacaggcaaattgccgagctcgaagctcagattgaagatatcatcgcaaccgatgagtgccttgccacgactgccgatatcctgcgttccgttcccgggattggcccggttgccagcacgatgctgctcgcagaaatgccggaactcggtcagatcaatggcgagcaagccgccgccctcacaggcctggctcccattgcacatgacagcggggcgatgcgaggcaagcgcgcaattggcggcggtcggcggctgctacggcgtgtcatgttccaggctgctcttgtcgcaagccatcacaatccagttctgaaaatcttcgccaatcgtttgcgggccgcaggaaagccacacaaggttgttattacagccgtcgctcgaaagctcgtcacaatcgtcaacgccctctgtaaataaagccagaaatgggccgtcccagaaagttaaagatacagttg

SEQ ID NO: 5533 - DNA, 1954 bp, unidentified
  source 1..1954: mol_type = unassigned DNA; note = element_87e0d8d
  misc_feature 1..5: note = core
  misc_feature 6..278: note = LE
  misc_feature 279..1601: note = CDS
  misc_feature 1602..1954: note = RE
  misc_feature 32..294: note = bridgeRNA
ttgctacaatatgcttgaccccaaaagcagcatgttaaagaatgtgctgttcagcggttcttaccaaagctacaatgagagggtaatcggcctttcgaagcattgcttgagctaaccacgctcgatggtgcaaactgtcagccggccctttcattgcagcgttcgattgatgcaggttgagttatcggagtgatccgtacattcgtgtaacaaagcaagctgaacaggtaatgaactgcggcggtcgccgattatgaatctgattgggaggactgcctatgaacacaggaacgatcactgccgttggaatcgatgtatcaaaacacaaaagcacggtcgctgcccgccgtccgggaggggaagtcgttcttctgccgtttgatgttgagcatactgcagaaggccttaaaaagttgatcacgaagctcagagaacttgacggagagatcaggatcgttatggaacacaccgagatgtactggcggccaattgcgatgactctgaaagaagccgggttctatgtaagtgttgtgaacgcaattctgatccacaattttagcgacaactctattcgtaaggtcaaaacagaccgtgcggacgcgatgaaaattgcgaactacggtcttaccttctggagtgacttacaggaatacgctggcgaggacgagaaccgtcagctgttaaaaatccagagccgactctatgaaaggaccgcaacaactgcagggatgctgcgaaacggattgatctcacttctggaccagacctttcccggagccaacaaactgtttcgggatgaaagccgtaactccaagggccatgtgaagtggatagattttgttcttcgcttctggcataaagaatgcgtggcagctttgtccctggcgacttttacagacaccttccaaaaatggtgtaaaagaaccggctacaagttcagcgcttccgacgccgaacggatccatgccattgccaggaacgcagttgccacgctacccaaaaatgatagtacaaagcttctcataacgcaagcgacaaatagcctgaatgcgatctatgactccctccaagcgattagaacggagatggatcgcctcgcttcaatgctgcccgaatatgaactggtaatgggcatggagggcatcggaaaggttacaggccctcagcttatggcagaggtcggtgatgtgcgtcgattctcgcacaaaggggcgctggttgatagcgtgggcggcagaacccggacccgccctgtgagccgcctgccagcgcccggctgcgttttcctccttgaagggcacaaagcccgtctgcgtcgtcaagccttgccggacacagacaggcggcccacagggtcggagatttttgagcgcgcccgccgtctcagggcgatgacggcggcgtgcagacgggctttgtgcccttcaagcggcgacggcgatgccatggggcggcgggcacgttcaaaaacgggcccgggttatgccgcacacgctatgcaggcgttgacgcttctccataccagtcaggaagcttcgattcgaaaagccgtcatgtgtccaaacgcggctctccacatcttagaagagtgctgtttgtgatcatgtcaatgacgcttattcgtgcaaatactgctaatccggtgttttgttttatggataagaagcgagccgaaggaaagcacttttacgtttatactgtcgccggctccgccaaatttctgcgcatatattatgcaaaggtcaaagaatacctgaacgctttagaagagaccgcctgatacataacaacgatggccatgctgctccgcagcacagccatcatcatatttactgcgtcatcgacgggtcatatcctctcagacctgcagccggaatatgttgcaggtccttttgttatgcctatttcttatcctgtacttttcttcttttgtgcttgacacacattagcaggt

SEQ ID NO: 5534 - DNA, 1319 bp, unidentified
  source 1..1319: mol_type = unassigned DNA; note = element_87e498d
  misc_feature 1..2: note = core
  misc_feature 3..206: note = LE
  misc_feature 207..1172: note = CDS
  misc_feature 1173..1319: note = RE
  misc_feature 3..182: note = bridgeRNA
cttgtatggtaggacttgaagggaggaggagggtcataactcgcttctgactgttcgcagcagtacagaccgtgggagaaatcacccctcctcctttcagcacccaagcgccgataaggaatgcctcgtttgcaaacgacgatagatgcaagcctgcgccagggtgtgcccttcaagtcacactacgctacaaggagcagctatccatggcaatgtccgcaaccccaattgaagctggcgtggacaccgccaaagatgaactggtgattcaaagcgctccgagcaccaaacccttcgccatccccaacaccccgaaagcaatcaaaacctggctcaagacactgcctaaaggctcagcgctggccatcgaagcgaccagcacttatcacatggaaatggcggagcaagcccacgctgcgggcttcgcggtctacgttatcgacggcctgaggttgagcaaataccgggaaagcgttgctgtgcgggcgaaaactgatgctcacgatgccgctttgctcgcccgtttcctgagcaacgagcgaggttccttgaaggcctgggttccgccacctgcggggcatcgtgagttccagatgctgctgcgtcgccgcgccaaactggtagccgtgcgcggcatgctgcggatgagtttgtcgggcgacacgatgtttgcctcagcgctcaagagccttgaagaaacggtcaagcgcgtagagcttttgctggaaaaacagctgcgtagggtgatcaagacggcggggctttccgatcagttgcgtcgcgtccagaagcttcccggtgttggctttttaacggctgccggcttagtgatgtccttcatgcgcggcgagttcaagaacagtgatgcctttgtcgcttacctgggcatggatgtaacggttgcccaatctggtaaatgggcaggcagagggaggttgagcaagcgtggagactcggaggttcgcaggctgctgtacaacgcctcgatgagcggcagccgaaccaagacttggtcgcagttttacgcccatcatcaagcacgcgggaagaagaccacacaagccttggtaatccttgcacgtcgcttggctcggctggccttcggcctgatgaggcatcaggccgactggaagcccgagatatataccggaggtgccaaaccagccagctgaggctggggctgctgcgcagcccaaccaaactgacggggatagcacccaacgccgaagagaaattctctggcgcgccgacttgtgcctggagattgctgaaagaagccgaagacggttctactgagcgattgccttcggccatagaat

SEQ ID NO: 5535 - DNA, 1407 bp, unidentified
  source 1..1407: mol_type = unassigned DNA; note = element_87f33bf
  misc_feature 1: note = core
  misc_feature 2..244: note = LE
  misc_feature 245..1033: note = CDS
  misc_feature 1034..1407: note = RE
  misc_feature 44..231: note = bridgeRNA
tcttaagtttgatctttaataaatcagttaactttcagtataaatcagaaagaacaaaagagcggagtaaggttactttatacagtgaagctttagacttcgacaacattgataatccccgctcttttactacttaaatcacgttcagttccctgcctgccggcaggcaggtgtgaggcctagacctcgttttcaagttgttgtgacccaagtagctggttctttcataaactattttctatgaatgaatataaggaaacttttggagttgacatcagcaagcctgcctgcagcaggcagggatgtctttgatttgcacggcagtaccagtggccacgatcagtttaagaataacgaaaaaggatttgccgcttttttaaagatccttcccgaagattcgatcgtggtgatggaggccacgggctattatcattacagactcgcacagtttctttacaaaaacaacgtagttgtatcggtcgttaatccgttatcggtaaaacgtttcatacaaatgaagttggccaaagtaaagacggacaagagcgatgcaaaggcaatctgcgagtatgccctggccaacgaagttccgctctacagtgccttgaccgatgtccaggcagagtgtttgcaactcttccggttaatggacagttaccttaaaaaacgcacggcaaccaagaacaagctgcacggcgaagaaaccctgggcattccctccaagtttgtgtaccgctccctaaaacgggacaggaaacacttggacaaagagattgccggtatcgaggaacgtctgctctcactggtcaagatggaacaacaacaacagctcactcttttgaccaccgttccagggataggcacaaagacagcattgtttttaattgtaataaccgatggtttttccaagtttgagactgctgcgcagctctgcagttatgttggcattacacctacgatccgggagtccggaagcagtgtgcgtggccgtagcaggatcagtaaggacttgcatccgacgagcgaattttgagcgagaggaatgcatataagaaacttcgcaacttactttttctttgcgctttcaatgcctgtaagtacaacaaggcctgccgggagctctatgaacggattgtaaacaagggaaagagcaagaagctggcacttattggggttgcgaacaaattgctgaaacagtgtttcgccatagcaaattcgggtttgccgtatgatgatgcgcacgtttcagtgctaagaattaaataaccaatattaaaatgttggtgttgtttatagcttgttgaactggaaacaaatcgacgaaggaagatttgttccatttcaacaatgccaggaaaactttgtcaaaatttaatggagaaaatgtttggtttttacctcagttct

SEQ ID NO: 5536 - DNA, 1527 bp, unidentified
  source 1..1527: mol_type = unassigned DNA; note = element_87f457f
  misc_feature 1..2: note = core
  misc_feature 3..238: note = LE
  misc_feature 239..1315: note = CDS
  misc_feature 1316..1527: note = RE
  misc_feature 17..183: note = bridgeRNA
cttgtatgttgcattcagaggcgtgaggatagattcacgtttcggcggtaaggccgtccgtcccttaggccaaccttggttgagcctgtcccgtagatcggccgccgcccctctcttcttacgccgtggagaatcgaaggccttttgagcctgcatgttcaaggttgacgcaaagagtgagtccgtgtgcgcggacaggggcggctgccgaagctcatcctagcgccccaggaggcttatgagcaagcaaatcgtttccatcggcaagtctgtttcttcctctgacacatcaacggaaacttcaaccaacccccagcaggcaagagttttttgtggcattgacgtcagccgcgagtctctggccgtggccgttctcacgccggaccaacccatcgaacaacgcgagtttgccaactcggccagcggccacaaggcgctgattgcctggctgggcaagatgaaggctctggcgcgggtctcactggaggctaccggcatttactcgatggacctggcgctggcgctggatgcggctaccggaatcgaagtggcagtgctgaaccccaagcgggttcatgattttgccaagtcgatgatgcggcgctcgaagacggaccgggccgacgcggctgtgcttgccgagttcagcctgcgcatggagtttgtggcgtggcagcggcccagccagagcgcgcttgcactgcgcgccatcagccgtcacattgaggcgttgggcttggagcatacgcggacaagcaaccgcctgcacgccgcagagggatcgctgggcacgccgcgctgcgtggtggaggatttgaaacgctcgctggctgggctggagcggcgcatggtgaagctgcggcgcgaggcccggaagctgatcgacagcgacgagcagatgcgagggcagttcctgctgctgacgggtgtgccagggatcgccgagatcagcgcgttgcagattttgggcgagttggtgctgctggcgcctgatctgaaagcgcggcagtgggtggcgcgcagcgggcttgacccggtgcatcaggattcgggcagctcggtgcataaacccgcgcgcatcagccgcgctggcagccgccatctgcgccgcgcgctgtatatgccggcgctgtcggcggtgcgctgcgacccgcatctgaaggccttctatgagactttgctggcgcggcacaaaagcaagttgcaggcgctgatcgccgtggcgcgcaagctgctgcacgccatttatggcatcttcaagagccgaacgccctacgacggaagcaagctgtttccacagttgcagatcgcataaacgctacaatgaccacaccaggtgaaacggaagcaggctctgctgggaagcaaccatgctgagggatagcttggtgggctcatcctgatgatgaaccagtggccgggcggggaactccctgtccggcctcgacagacatcagagggatagacccccatgcctcgaaaatccaaaccttccctgccgaaaatgcttgacacgaaagagagaat

SEQ ID NO: 5537 - DNA, 1401 bp, unidentified
  source 1..1401: mol_type = unassigned DNA; note = element_87f48ab
  misc_feature 1..2: note = core
  misc_feature 3..118: note = LE
  misc_feature 119..1144: note = CDS
  misc_feature 1145..1401: note = RE
  misc_feature 1165..1396: note = bridgeRNA
agatgcggtaatgggccctgctccgagcaagggtcatgatggtggctgtcccccgatagatgatcaaacggggtcacgacttgagtcggccccaagcatctggagacggaggaaagccgtggagaattatgccggaatcgacgtttcattggaactgtcgagcgtgtgcgttgtggatgcacagggtaaaatcctaaaggaggcgaaggtcgccagcgaacccgacgccttagtcgaattttttgagacgctcggctttgcagtgaagcggatcgggctggaggcagggccgctgtcgcaatggctgcatgcgggcctgaaaagtgcaggattcgaaacggttctgctggaaacgcggcacgtgaaggccgcactgtcggcgatgacggtcaagacggatccccgcgggatcgcccagttgatccggatgggatggtttcggccggtacacgcaaagtcggttgatgcgcaagagatccgggcactcctgatcgcacgcaaacagcttctcgggcggctgatcgatattgaattaagtatccgagggattttgcgcggcttcgggctcaaggttggcccgttgacgcggaggaatttcgaagcccggatccgagagctggttgctggtcagtcgacattggagcgcattgccagtgcgatgctttcggcacgatcggccttgacggcagagtacggaaggctgcacagggctgtgctggcaattgtgcgtgacgatgcagtctgccgccggcttatgacagtgccaggcgttggtcccctggtggctgctacctacaaatcggcgattgatgaccctcgtcgcatcgtaaagtcgaaggcggcaggcgcactgttcgggcttacgccaaagaaataccaatcgggcgaaaaggacgtcacaggcgggatcacgctggccggcgacaaaacggtgcgcgcggtgttgtatgaagccgccaacgttttgctatcgcgcatcacgcggttctcaaaactgaagcgctggggaatggacatcgccaagcggcgtggctcgaagcgcgcaaaagtcgccctggcacgcaagctcgcagtgatcctgcatcggatctgggtcgacggcacaacttatcgatggactgacgtcggctcgatcgcagcatagaagacgtggaggagatcaagaacgcaaccgggataatctgaatcccggtgcccgaagtcccgtcgccgggacggtggatccggtgaagccgttacacggccagtggtcgtcatctgatgaaccacgcgtatctagataggctcaccgctccctctgacagcatgatgtggcggccaggcgttgaccacggacagaagcatgagcccggcgacgagacgttcactcgggaggcttgacatcatcgggcccattacaga

SEQ ID NO: 5538 - DNA, 1155 bp, unidentified
  source 1..1155: mol_type = unassigned DNA; note = element_87f59c1
  misc_feature 1..2: note = core
  misc_feature 3..189: note = LE
  misc_feature 190..1140: note = CDS
  misc_feature 1141..1155: note = RE
  misc_feature 44..186: note = bridgeRNA
cttgtatgttcaacccaccgccattgattatacgatggcaaaggttcaggacgtgacagatcgttaagcccttgggaaggcgtagcccgtgggagagcaaggatcgtcacgtccttctctcaataacccgaacagttgctggggtgttgtagcccgcattcaacaaggttggggacaggagataggcccatgaaaacatccgaagtgtttgtcggtatcgatgtatccaaagccgggctggacgtgggcgtgttgcctttggcgcagttctggacagccccgaatgacgaagccggttgtcgaagcctcgcggaacgcctgaaggcattatcgccgacgctgatcgtgctggaagccaccggtggattcgaggtgtccgtggtggcgaggatcgtcgccgccggtctgcccgtggtggtggtgaacccgcgccaggtgcgggatttcgccaaggccaccgggtcgctcgccaaaaccgatcgcctcgatgcgcgggtactggcgttgttcgcgcaacgcgtgcgacctgcggtgcgaccgcttaaagacacgcaaagccgcgagttggatgcactgtttaaccgtcgccaccagttggtcgagatgctcacgatggagaagaaccgcttgagcctggccgccgcgccggtccgcaaagacttgaaggcccacattgtctggctggtgaaacgtctcaaggacgtggacggagaactcaagacactcattgagagctccccggtgtggcgtgagaaagacgacctgctgcaaagtgcccccggcatcgggccggtggccgcggtggcgttgctggcgcagctgcctgaactcggcacactgaaccgacggcagatcggcgccctcgttggcgtcgcgccgctgaacaacgacagcggaaaatacaaaggccagcgccatgtctggggtggccgggcaatggtgcgcgcggtgctctacatggcgacgctcgcggcgattcgttgtaatccatcggtcaaggccttctatcaacgtttgagggcgacggggaagaaacccaaagtagcgattgtggcgtgcatgcgtaagctcctcacgatcctcaatgccatgctcaaaaccaagacaccgtggtgcgataagatggcggcgggtgcttgacgtgggacacagttg

SEQ ID NO: 5539 - DNA, 1155 bp, unidentified
  source 1..1155: mol_type = unassigned DNA; note = element_8806643
  misc_feature 1..2: note = core
  misc_feature 3..207: note = LE
  misc_feature 208..1143: note = CDS
  misc_feature 1144..1155: note = RE
  misc_feature 12..213: note = bridgeRNA
cttgtcttatgaatatcccagcttttgtgcgaaacaagagccaccgatcagcattctagagtgctgatcggtggtggtggttggatcggcaaacccttggtttttgagggccgtaaacgagtaggatcaaccatcaccttcgccaaaggcctgaacggatacagagcggcacaaagccctctaggacaagcataggatatgacgaagatgacagatgataccattgggatcgatatttccaaagccactttggacattcaccggctaagcgacgggaagacgatgtcgtttagcaattgccctgcaggatttaaggcgctttccaggttctgcgcaaagacggcagtggcacgcgttgtttatgaagcaacaggtgcctatcacagcgggcttgaacgcgctttgggcgcacatttgccattggtaaaggtgaaccctttgcaggcgcgccggtttgcacaagcccaaggcttgcgcgcaaaaacagacgctgttgatgccaaaatgctggcagacatggggaatgcatttgcattagaaccggatgagccagcagctgaaattcaacacgatctgaaagagttacgctcatttcggtcaggattgatcaaggatagaaccggcatcatgagccgaatgaaaactcaaaccctgtccatcacgcgccgccaaagcaaagcccgtttggctcaggtagataagcaaatcgctgaaatcaatgctgaaattgaacgcttgataaactccagcgataaactggcgcactcgatgaaaatcctccgctccattccaggcgtcggcgctatctgtgctgccaccattttgatagagatgcccgagaccgggagtatggaccggaagcaggtggccagtttgactggcctagccccgatgacgcgtcaatcggggcaatggcgcgggaaatcattcattcagggtgggcggaaaatagtgagggatgcactctacatgccggccttggtagcgatgcgacacaacccagacttcaaggctaagtatcaagccctgatcaaagcaggaaagccccccaaagtcgccataacggcactcatgcgaaagctcatcgaactcgccaacgctctcatcaaagcagatcgaaattgggtgacaaagggggcttgatcaagacggata

SEQ ID NO: 5540 - DNA, 1337 bp, unidentified
  source 1..1337: mol_type = unassigned DNA; note = element_8807aa1
  misc_feature 1..2: note = core
  misc_feature 3..73: note = LE
  misc_feature 74..1093: note = CDS
  misc_feature 1094..1337: note = RE
  misc_feature 1072..1324: note = bridgeRNA
tgttgaggtggacggcccaacggcatcatgtgccaatgttgagttgttaaccaccaacgaaagggccgcccacatggagtttaagcgcattgcaatagatacgtccaaacatgttttcacccttcacggggtcgatgagcaggagaagccgcaattgcggcgagagctcaagcgcagccagatggtgccgtttttcagcaaattgtccgccaccgagatcgtactcgaagcctgtggggggtctcatcattgggcgcgggtgctcggggcacttggccatcgggtccgcttaatcccggcgcaatatgtcaaaccctttgtcaagcgcagcaagaatgaccacaatgacgctgaagcgatcaacgaggcggcgtcccggccgtcgatgcgctcggtggcggtcaaaaccgtcgaccagcaagcccagtgcatcatcctcaagcaccgggaaatgttggtgggccaacgcactcaggcaatcaacgccttgcgtggccatgccgcggagtttggcatggtgaccgccaaggggacctcaaaggttgcggctttattggcgctcctgatcgcggaaaatggcatcccggcggcagccattgccatgttcgaacagatgggtgcgcatatcgaaaccttgaataaccgcatcctggatttggatgcgcaattggctgcgctgcataaggaaaacgctcttagccagtctctatccgaaattcccggcattggtgtggtgggggcgatcaccgcgacattgaccgtggatccggcaaactttgcctcggggcgacatttttccgcctggattgggttgaccccaaaagagaaatccaccggtggcaaacagcgcatgggcggcatcagcaaggccggcaatgaacgattgcggcaattgctggtggtgggcgcgatgtccgtcatccggttcgccaagccaggcagcaagtcagcctcgccatggcttttgaaattgctggagcgcaagccgcgcaagctcgcggcagtcgctctggccaacaagatggcccggattatctgggccatgatggcgcacggggaagcctatcggcgtcagccgatggcaaccgcctgatccgcgcgccgctgccgagggtttaagggcaagcagaagatggttatcggtcgaaccgacgagagacaaaatccgttaataccagtggcccacgcaggtcgccgggttgtttggatgtctctcgcggaactcatctgggccagcggtcaccataccgcatcaataggccggacacatgaccgcattcgaaccaaggccagattctgcacatactaacccttgaacccagcgggccgtccacaca

SEQ ID NO: 5541 - DNA, 1545 bp, unidentified
  source 1..1545: mol_type = unassigned DNA; note = element_8811c09
  misc_feature 1..2: note = core
  misc_feature 3..240: note = LE
  misc_feature 241..1422: note = CDS
  misc_feature 1423..1545: note = RE
  misc_feature 3..218: note = bridgeRNA
cttgtattatagagtagtagttattaaagcccctctccaagggctgtgctacactgtaagggatgctgtggattggttaaatgctcctaccgcaagacggttcctgaaaggctccaaccacagccctttacagtattgttaatcagttagataccgccagacggtttatgtagaacaaggttacaagagtaaagtgttctgtggaaccagcatcaaaataaacacatcggaggtatttttatggtttgtgtaggaattgacgttgcaaaggacaagcacgattgcgttatcatcagctcagagggcgaagtcctggcggacgtatttaccatccagaacaacgcagagggcttcgacacactcttgcagacgatccgccgctgtacccgcccggaggataaaataaaagtagggcttgaggctaccggacactacagctacaacatcctcggatttctgcttgacaaaggcctgccaacctatgtcatcaatccgctgcacaccaacctctaccgaaaaagcctgagtcttcgtaaaacgaagaccgatcgtgtcgatgcgcgaaccattgccgctatgctcatgtctgatgtagacctcaagtcctacacagatacagcataccacaacgaggagctaaagtcactcacaagataccggtttgacaaagttcgtgaacgagcgaagctgaagcagtccgtttctcgtctggtcacaatcttgttcccggagcttgaaaagctggtaccgacactgcatatggcttctgtttacgcacttctcggtgagcttcccggtgccaagcagattgccggagcgcacatgacacatttgaaagcggttctgaacaacgcatccaaagggcgttacggacgagatatggctgagaccattcgggatgctgcccgacactctattggctctgtcatgcccgccaagtctctggaattacagcacacgatccgcctgatccgggaactggattccgaaattgaagacattgaagccgccatcgagacgatgatggaagaaatcgcttctcccattactaccatcccaggcatgggtgtccgtatggacgcaatgattctggccgaaattggggacttttcccggtttgattcgccggacaaaattcttgcttacgccgggatgtcaccatctacataccaatccgggcagatgtcgctcaccggcacctattcccacatggaaaaacgcggctccagatacctgcgctacgcgctttacaatgccaccaagtacgtctgcctttgggatccaagcttctccgcatatcttgctaagaaacgtgccgagggtaagcattacaatgtcgcagtctctcacgctactaaaaaactggttcgattgatttttgcgatggaaaaatccggacagccatacagcagcgctgcataagtcctttattcttataagctcaagcaggcgtccggcaggacgtcagctttgctatgcccttttggggccgtctacattttcctcacctttcctcgcattcgggcttgacttttaatagttagt

SEQ ID NO: 5542 - DNA, 1244 bp, unidentified
  source 1..1244: mol_type = unassigned DNA; note = element_8811f41
  misc_feature 1..2: note = core
  misc_feature 3..211: note = LE
  misc_feature 212..1144: note = CDS
  misc_feature 1145..1244: note = RE
  misc_feature 10..194: note = bridgeRNA
cttgtgtcttaagtcaggaataaactgagggtgagagcggtgagtagcaagctgaatgccccgagtgctcaaagcacgtgtgggagcccatgctgctactcacctctccgctctggacatgagcccgaacagttgaacgagcccacctcgaacagttacaagcgtgggccaagccagagcgctctcaccctgagtgtaagaggatttggccatgttttcctattcagcaggcattgatgtttccaaagacagcctcgaggctcggattcatttacttgaggctggggtaagttgttcaaatactgagaaagatttgccggcgctgattggatggctgcggctttaccaggtcagccgcgtgttggtggaagcgacgggcggttacgagcgaaacgttgttaaagcggcgcaagcggctggccttcaggtcatttgcgttaaccctcgtcgcgccaaagcgttttccagagcgatgggccaaaaagccaaaaccgacccgatagacgcaaagtctcttgcacaatttgcagccgtcatagactcgccaagcgcccgaatcacaagccctgagcatgaaagactgcgcgcattggtccagcagcgagagcattttgttcagcaaagagatgacgacaggcggcgcctgaaaacggcgtcctgcgatgcggtgaagcctgcattgcagagccatatcgagtatttgagcgcagcagtggaagcgataaatcagctgattcgtcaaagtgcgaacgagctagatcgcgaaaaggtggctcgactgtgctcggtcaagggaattgggctgattacggccagcagccttatggcttaccttcccgagttgggcgaaatcgggggacgcccgatcgcggcacttgcaggcctcgcgccctacaacaacgacagcggaaagcacaaaggtgcacgccacattagtggcggaagatttgcagcccgccgctcactgtatatggcctgctgggtgatcattcgggaccagccggaattccaagctcgataccagttgttacgtgataaaggtaaatgcgccaaggttgcactgatcgcctgtatgcgcgttttattggtacgcctgaacgcgatgctgcgtgacggcactgaatggaaagagcacaccgcttagcacggcagcagctctttcgttcagcattgcatggcctagagctgtgggagtcttgctgcctatgaatatgacttctgaattgaatccatttagacagttg

SEQ ID NO: 5543 - DNA, 1448 bp, unidentified
  source 1..1448: mol_type = unassigned DNA; note = element_881275c
  misc_feature 1..2: note = core
  misc_feature 3..165: note = LE
  misc_feature 166..1200: note = CDS
  misc_feature 1201..1448: note = RE
  misc_feature 1217..1443: note = bridgeRNA
agatggggtaacgggccgaccaagcaagccgcccgctcgctacggcgctatttgttgcgcgctcgcgagcggcttgcttggcgggagaggcggtcgtccctcagactgatggtgtcaagaaacggagtcgggcaagcccgctccaagcatcatcgagggacgaccatgaaccagtatgcaggaatcgacgtgtctttggaaagctccgcgatctgtgttgttgatggcgcgggcaagattttgcgcgagatgaaggttgcgagcgaacctgaggcgctgatcgcctggttcggatcgctgggaccagcgatcgagcggatcgggctggaggcaggtccgttgtcgcaatggctttacgctgccctgcgcgaagcaggccttgcagtcgagttgctggagacacggcatgtccgcgacgccttcaaggcgatgccggtgaagtcggaccgcaatgatgcccgcgggatcgcgcaactgatgcgactgggctggttccggccggtgcactgcaagtcgatcgaggcgcaggagacgcgagcggttctgacggctcgcaagcttctgcaatcgaagctgcgggacatcgagaacagcttgcgcggcattctccgggggtttggcctgaaggtcggcaagaccaccgagtgtacgttcgcgctccggatcaaggagctggtcggcggccatcccgggcttgagcgggtcgcggaggcgctgctcgaagcccatgctgtgctgcgacgcgagttcaatggcttggacaagcacacgcagaagctagcccgattgcacccgcaggcgaagcttctgatgacaacgccagccgtcggcccgatcgtggcactgacctatgcctctgcgatcgacgatccagcgcgcttccgctcatcgaaggcgaccggcgcgcattttggcctcaccccaaagaaataccagtcggggcaaagcgattacaccggccgcatcagcaagatcggcgacgctgccgtgcgcgaggcgctgtatcaggcggctcacatcatgctgaccaaaccggtcaggaactgctcggggctgaagagctgggcgatgcggatcgccaggcgggccggcatgcgcaaggccaaagtggcgctggcacgaaaacttgccgtcatcctgcatcgcatgctcgccgatgcgcaaccgttcaacccctcggccaagaccgcggctgcttaagaagggagaagttatcggttccgggcgggcacgacaccaggccttcccgagcgaagtccctcgctgggacgatggatccggtcaggccgccacccgggaagtcggttcacaaccacgcttccgtagattggccggccgggttctcatgcaccccattaggcgacggccacagcgccgatcccgtacagaagaaagtgcccagcagtgacgacgcaaaaagggattgactaatcgaggcccgttacaga

SEQ ID NO: 5544 - DNA, 1376 bp, unidentified
  source 1..1376: mol_type = unassigned DNA; note = element_88143ee
  misc_feature 1..3: note = core
  misc_feature 4..88: note = LE
  misc_feature 89..1111: note = CDS
  misc_feature 1112..1376: note = RE
  misc_feature 1113..1362: note = bridgeRNA
tgatggggtggacggcccccgacccacggcatcgcgatgtgccaggatggtgctgtcagctgaccatcaacgggaaggagccgtcctcatgcagattactacaatcggtttagatatcgcgaagaacgttttccaagttcatggcgtcgacggtgaaggccgggtggtcttgcgtcggaaggttcgccgcgatcagttgctagtgctgttgggaggactggaaccctgcctcgtcggtatggaggcatgtgcgactgcgcatcactgggctcgcgaactggctgcgcttggccatgaggtcaaattgatgccgccggcctacgtgaaggcctatgtgaagcgcaacaagaacgacgctgctgatgcggaagcaatctgcgaggcggttaggcggccgacgatgcggttcgtggccgtgaagtcggtcgatgcacagagcatcctgatgctgcatcgcgctcggcaccttctggtccgtcagcgcaccgcgcaggtgagcgcgctgcgggcgcatctggccgagtacggtattatcgcgccgaaaggccgagctcatgtccgtgaactgatcgaagcactggacagaggtgaaggcatgctcccggtcattgcccggcaggtgctcattctgatcgcgcggatgatcgaaagcctcagcgaacagattcgcaagatcgagattgaactaatggcctggcatcgcacgaaccaaacctgccgacggctagagaccattcccggcatcggcttcatcaccgcaactgcgctggccgccaccgtcgtcgatgccaaggtgttccgctccggccgacagttcgccgcttggctcgggctggtgcccaggcagcactcctccggcggcaaggagcggatgggcgggatatccaagatgggtgaccgctatttgcggcacctcctcgtcgtgggcgccactgcgatcgtccgctatacacgtcgcaaggcgactgccgtcagcgtttgggcgaaccacctgctggaacgcaagcccgcccgactggtcacggttgccgtcgccaacaagatggcgcggatcgcctgggcggttatggcgcgcgaggaaaactaccgcaaggcagaagctacggtctgacgctgaccgactcgagagagcataaccagtttgggcaggagagaacgacacgcgtgatgctgatccggtcaagccggagatcgggacaacctgagtgattcaacgcgcatctcagtgcgccagcttgatgaggacccgatccaccgacaccatcatggccagcggcctggcgccgcacgcaacaggccgtacacatgaatgaacctgacccgctccgcaaaacgccgttgaaaatactccttgctcaacgggggccgtccacaca

SEQ ID NO: 5545 - DNA, 1352 bp, unidentified
  source 1..1352: mol_type = unassigned DNA; note = element_88284b4
  misc_feature 1..2: note = core
  misc_feature 3..74: note = LE
  misc_feature 75..1100: note = CDS
  misc_feature 1101..1352: note = RE
  misc_feature 1076..1340: note = bridgeRNA
tgatggggtggacgccccctgacggcatcgacgtgccaaaatggtggtgtgctcatcacttgaaggaggcatccatgttggaagttaacacaatcggattggatttggcgaagaacgtgttccaggcgcatggcgcggatgcatcgggcgcggtcgtctttcgtaagaaactccgccggaaccagatactcacgttcctcgccacgcaacccacttgcacggttgcgatggaggcctgtgccagcagccattattgggcgcgggagatcactcggctcggacatgccgttcggttgatcgcgccagcctatgtcaaacctttcgttaagcggcagaagaacgacgttgccgacgcggaggccatctgcgaggcagcccagcgaccggcgatgcgcttcgtaggagtgaagagtgaggagaaacaggcggcgggaatcgtgtttcgcactcgtgatcttctggcgcgccagcgaacgcaggccatcaatgcaatccgcggtcatcttgccgagttcggtatcgtggctgccaaaggaccattccatgtgaccaagctcacaacggcgatagaggacgatccctctgccctgccggagtcggctcgccagatccttcgtgtgctcgtggagcagatgcgatcgctggatcagaaggtggctttgctcgaccgcgagattgcccggcgcgccaaggaggatacggaagccaaacggttgatgacaatcccaggggtggggccgattactgcaacagcgctcgcggcgctggcgccaccggctcagatattcaagagggggcgcgatttcgctgcgtggctagggctcacgccactgcagcggtccgcgggcggtaagcagaagcttggcgagacgtcccggatgggtgaacggactttacgtcgcttgctgattatcggagcgagcgctgccgtccgatgggcgatgcgtaagggcacgacggcagatccgtggctttcccgcttgctcagccgcaaaccgacaatgcttgcaattgtcgcacttgccaacaagacggcacgcatcgtctgggcattaatggcgaaaggcggaacttatcggacttcggccgtggcgggctagttccgcccggccgggatgtgagaacgtcgaacggagagtatggcgcaacggtcaacgagacgggatcgggaaaaccagatcatggacacgtgcttcgagcacgcgagattgaattggacccgctccgcgaactcccatacgggcccgcggcatgtagaacgccgcatcagaggccggacacatgtcagcacctgaccacgtgacgcgctctttgcgaaagattcttcttgcaccaacgggggcgtccacaca

SEQ ID NO: 5546 - DNA, 1612 bp, unidentified
  source 1..1612: mol_type = unassigned DNA; note = element_882a4bf
  misc_feature 1..2: note = core
  misc_feature 3..256: note = LE
  misc_feature 257..1189: note = CDS
  misc_feature 1190..1612: note = RE
  misc_feature 10..230: note = bridgeRNA
aaacatactaagattagaggggaacatcattgacgaatgatgttctcctctattttctatttttagattatagtgaagagtgaaagaaagttcgaacaaagccttgaggactacgagtccctatcaaaaaccgaacttctttactgtcattttagaatcaggtttacgtatgttggggccatgagcccgtgtataggaaattggaatcgaaatgaagcagtaaagttctttcaaaacttaaaaaggaggaaaacaaatgccttacattcttgcattagatgtttcaatgggacacagctacagtgtcctatacaaagacgacacctgcttatttgaagacgagatcgaacacactcaaagaggatttcatgcattactcgaagagatccagcatttgcctgaacgtccattgattgtttttgaagcaacggggatttattccagaccagtcgaaaagttctttcaagatcatcacttttcttactgtttgttaaacccgttagaggcgaaaaaacagatagaagaaagcaccttacgcagttggaaaacagataaatcggatgcccatcggctcgcacagactcatcttagaaatcaacgtcagccaaaagaagtacaaagcaatttttacttagagatgcgcgatttagcccgtttttatcaagaaattgagaagaaaatcactcgtctgcgcatggatttacacaactgccttcagttgacttttccagagcttgaacagttcttttcaaacaggctgaccccttacgcattgacattgatccgtctttttccccatccagattttgtattggcatctactcggacaaaaataaaaaataaactgatcaacgaaacacggaaaaaaatctccgcgaatcgtgccgagcaaaaggcagatcaaatcatccactatacacagtgtgcctatccagctgttgaaaaagacagtatccactgtcaaaaaacgatctattacgccgaacttctccaagatttactcgaacaaaaagaagcactggcgacacaaatgatcaaaaaagccgaaggctctccttgctttttgttgtaccaaacgttccctgggattggcgcactcacagccgctttattgctcggtgaattaggagatatcacacgatttaaaacccataaacaattgaatgcctttgtcggaatcgacatctgacggtatcaatcaggtaagtatactggccaagaccgcatcaataagcgtggtaatcccaaagcacggaaaattattttcttcaccattcgaaatatgattcgccagcaacgcgcagctcctaatcatattgtcgattattactacaaattaaaaaagcaacctatccctaagaaagataaggttgccacagttgcttgtatgaacaagcttctgaaatgtatgcacgctatggttagggcacatacagagtacgactatgcgtacgcggtctcagtggaccattaactaaaccacttacagtataccacttctttgcccagatcgaaaattttttacgaacggggctttatttggtgtgccttgattttttcgcttttgtttacgagctatttttattacatcttttacttgactaatcgtagg

SEQ ID NO: 5547 - DNA, 1554 bp, unidentified
  source 1..1554: mol_type = unassigned DNA; note = element_882d0d9
  misc_feature 1..2: note = core
  misc_feature 3..247: note = LE
  misc_feature 248..1423: note = CDS
  misc_feature 1424..1554: note = RE
  misc_feature 19..220: note = bridgeRNA
ctcgtattatagagtagtagttatttgagtccctctccaaggactttatgctacactgtaagggatactgtggattggctctaaactcctaccacatgatggttgcagaaaggctccaaccacagtctctttgtaagtttgttaatcagatagataccgctagacggtttatgtggaacgaggttacaagcgcaaggagctctgtggtcccaagcagtatcgaatctaattatgaaggagtatcgctatggtttatgtgggaattgatgtcgcaaaggacaagcacgactgttttattgtcagcgcggggggtgaagtgctgcaagatgtatttaccattacaaacactatgactggctttgatgacttgttccaaagaattagcactgtgtccggaagtttagacaaagtaaaagtaggacttgaggccaccggacactacagctacaatttgctcggatttcttctcgacaaaggtctgctcacctttgtcatcaaccctctccataccaatctctaccagaagagtctcagccttagaaaaactaagaccgataaagttgacgcccgaatgattgcatctatgctaatgtctgatgtgaacctcaagtcctacacagacacaacataccacaacgaggagctaaagacactgacccgttaccgttttgacaaggtaaaggaaagggcgcagctcaaacagtccatttcccgattggtcacaattttgttcccagagcttgaaaaactggttccaacgctccacatggtctctgtctacgcccttttgagcgaatatcctggtgccgtacagattgctgccgcaaatatgacccacttaaaggcacttctgagcgacgtctcaagggggcattatggtcgtgagaaagctactgaaattcgtgatgctgcaagatgttccatcggctctcggatgccggccaagtcgcttgaactgcgccataccattcagctcatgcacgagttggatgcagagattgccgaaatcgaggcggaaatcaaatccatcatggacgaacttcaatccccaattctgaccataccgggcatcagctaccgcatgggggccatgattcttgctgaaattggtgacttctctcgcttcgattcgccggacaaaattctgacctatgcgggactttcaccctctacatatcaatcggggcaatttacatcatcctacgctcacatggagaaacgcggctcccgctatctgcggtatgcgctcttcaacgctaccaagtttgtttgccattgggacccaacctttgctgcctatcttgcaaaaaaacgctccgaaggcaaacactacaatgtcgccatctctcatgccgcaaaaaagcttgtgcggctcatatccgccttggaaaaatccgggcagccatacaacctcgccgcttaatctgccagccataccgttttctgagtgcccgcaaggacgctctatttgttgtggcctttttgcgcttcaaaacatcccatgctgtgtggttagaattatttcatttttgggattgacttttaatagttagt

SEQ ID NO: 5548 - DNA, 1319 bp, unidentified
  source 1..1319: mol_type = unassigned DNA; note = element_882ee0d
  misc_feature 1..2: note = core
  misc_feature 3..70: note = LE
  misc_feature 71..1084: note = CDS
  misc_feature 1085..1319: note = RE
  misc_feature 1091..1313: note = bridgeRNA
ttaattatatggtccgccccactctcaagcccttaagcttagagtaggctctcagaatgaggtgaaccatatgtcttctattcacatcttaggtatcgacctaggcaagcactgtttccacgctatcgctcataaccgttcaggtgcggaagtattacgtcgtaagtttaatcgaaaccaactccaacatttcctttgtaaaatcgaaccaacaaccattgctttcgaagcttgtggcggtgctcattggctcgctcgtaagtgtggtgaatacggccatcaagttcgactcattcctcctcagtacgttaagccttatgtcaaaggcaacaaaaatgatttcatagatgcatcagcaatcgcagaagccgctggtcgaccaacaatgaggtttgtagcagtaaaaagtgaagaggcccaagtcatcgcagcgattcatcgtgtcagagatggttatatcaaagagagaacggccgccatgtctcgaattggggctatcttgcttgagttcggcctgagttttccaaaggggcatgcaaagatgaagtctctcttccaatggctagcagagcaaaaagtgtcattgccggagagtttgctgtgtgaattagtgtctatccacgaacactacaaataccttaatgaacaggtcaaagctcaagacagtaagcttcaagtcgttgttaagaataacgaaagtgcacaactgttgaaaactatccctggagttggcgacctcacatcgacgttgtgtgttgcggacgtaagctccccaaacaatttcaccaatggtcgggaaatggcagcttggttagggcttgtaccgagacaattctctacgggaggaaagaccaagctactgggcatgagtaaacgaggcaataaacatcttagaactctgtttattcatggagcaagggcagtcctctccaggctagaaacaacagggaaagtgtttggagagtggctcatcaaacttcgggcaacgaagccatttaatgttgtggtcgtagcactcgccaataagctagcaagaatagcttgggcggtgttgtaccaccgccaagcttttaaggctgtatagctataaccaagtttgcaacgccaatgaacgtgatgacaaaaacggtcaatcgaccagattaagaacctgacacaaaaaatagcgttaaacgcttttggctttttaaggataatctggcgcagatatcatcgtggagctgggaagctagtgctcccaacaaggactccgaatacattagcgcaaaccaactccgttatgacttaattgtagttgcaataacggggcggaccataca

SEQ ID NO: 5549 - DNA, 1362 bp, unidentified
  source 1..1362: mol_type = unassigned DNA; note = element_8832b84
  misc_feature 1: note = core
  misc_feature 2..222: note = LE
  misc_feature 223..1218: note = CDS
  misc_feature 1219..1362: note = RE
  misc_feature 50..210: note = bridgeRNA
cctttagatttgttgaatgagaaaatgataattttatagaagtataatgatacaacctaaccaacaaagtgaaccagtttgtattgcaaagatttggtcttatgagacgtttaggactttgttggttttactaaaaaagcatcagatagtaattaagacgtagtggtctagtataaggtatagatagcattttagtataggttgtaataaaataatcatcttatgaacaaatttaatcattttgttggaattgatatttcaaaggaatatttcgatgccacattatttaatggcctaactactttagaacacaatcaatttaataactcaaaaaaaggagttgatgaattgatagattggataaaaggttttaaagcaagtctagaaaaaacattaatctgtatggaacatacaggtatttacaaaaactttttagttgatatactatcaagcaataaatgtaatttatggattgaaatgcctttacgcataattaaaagtagtggcgttcaaaaaggtaaaaatgataaaatcgactctcaaaggatagctatgtatgctcatagatttcaagataaggctatgttatttagtggatctaaaattgttttagataaactacatgctctttctaaacaacgtagaatgtatcttacttctaaaagcgctattcagacaagacttaaagaacaaaaactttttgataaagaaatttacaataccttatttgaaaacgataataagattataaatctttatgaaaatattattgaagatattgataaccaattagataaactaattaaagagaatcaagagatacttgaggtatatcaatttgcaacatcagttagaggagttgggcctagaactgctatcgctctaatttgttatactaaaaacttcactacatttaatacctcaagagaattagcctcttactgtggagtggtaccatttcaacatacatctggaaaaagtattagaggaaaaaacaaagtccattttatggctaataaagatttaaaaagactacttcatttatgtgctgtttcttgtgttcaatctgacccagaaataaagacattttatgagagaaaacaagaggaaggtaaacataaaatgtcaatattaaatagtgttagaaataaactaatacatcgcatatgtgcctgtgtaagagacaggaaaatgtatgtagaaaaacaagtaatctaaagaacttaattatacaatagcgttataaaatagtagaggatagctaatactaccctccaatacacctatgcctggttttattgaaatattattataaaaacatagtaaattttacgaattatcatttgtttatatcatagtaat

SEQ ID NO: 5550 - DNA, 1163 bp, unidentified
  source 1..1163: mol_type = unassigned DNA; note = element_884d758
  misc_feature 1..2: note = core
  misc_feature 3..216: note = LE
  misc_feature 217..1149: note = CDS
  misc_feature 1150..1163: note = RE
  misc_feature 6..211: note = bridgeRNA
cttgtatcttggcatttcagctggtgtgctgcaaaagagtgcggctgcgagatcctcgaagcggctggtgctggctcaaggccaaggccgagttgtagtttgatccgcagccgcgcagttcttttaaactcgaacagtgactggagcgaccaggccgcctcccgggtggggcaagcggcccggccagctcgaatacaagcaggagttatttaacctatgaagcaaaccattgtctatatcggcattgacgctagccaaagctcatttggatgtgggtggcaaaatcgcttccatcgttttgacaacgacaaggcaggcagagtcactttagtcagatggatcaaacaaaagcagtctggccctgtgcaggtcatctgcgaagccagtggcggttacgagcaagacttgctcgacgcgctggctgaggctgacctggccgtcagcttggtgcaggcgactcgggtgcgacagtacgctcgggcggccggcatcctggccaagactgacaaagtcgatgcccgtgtgctggctcgttttggggcagcgatgcggccagagcccacgtcgccgcgatcggccgcgcagaagcttttgcgcgaactggaatcgcagcgccggcacttaagcgaccttttagtggccgagcaaaaccggctcgagcaactccacgacgaaaagttgcgaggcttagcgcgcgctctgatgggcactatcaaaaagcaaatcgcccggatcgatgcccgcatcaccaccttaatcatgcaggaccaggaactctgccaaaaagcccaaaagctcaccagcgtcaaaggtgtcggagagcgcacggctgcgctgctgctggcgcagatgcccgagttgggcacgctcaatcgccgggaagctgccgctctggcgggcttggctccttttaatcgcgacagcggcaccatgcgtggcaagcgcacgatcttcgcaggacgtcgtgccgtacgccgtggcctctacatggctgcactggttgcgagccgtcgcaatcccatcctctcaaacttttaccggcgtcttcgcacaaaagacaaaccgcacaaagttgctctcactgccgtcatgcgaaaactcctcctcgcccgcaaccaggccttaactccaacccaatcctttgcttgaaaaccagacagtta

SEQ ID NO: 5551 - DNA, 1320 bp, unidentified
  source 1..1320: mol_type = unassigned DNA; note = element_88565c6
  misc_feature 1: note = core
  misc_feature 2..228: note = LE
  misc_feature 229..1305: note = CDS
  misc_feature 1306..1320: note = RE
  misc_feature 4..227: note = bridgeRNA
cagagatgatgtaagtgagcacctcccgacggggtctgacccaacctctgactgacttcgggtcttcaacgggatctgtcggccctggtcgggaggtgctcgtgtgcactcaccgtgcgtggcgttgtgaccttataggagcctggccaaaggccccatctctgtcttgtccgttcgcccggctggtgcgtgccgccctgccccccggtcacgaacgacaggacgacgatgcgctccattacaccccaagacgcggcgatcatcgaggtcgccggcggagtcgacacccattccgacacccacaccgcagcggtgatcgaccaggtggggcgggtgctgggcaccgagcagttccccgccgacacggccggatacgccgcgctgctggactggatgcgctcgttcgggcagctggtgggtgtcggtgtcgaggggaccggtgcctacggcgccgggctggcccggctgctgcaccggcaagaagtcctggtgatcgaggtcgaccggcccgaccgcaagacccgccggttccagggcaagtccgacccgatcgacgccgtccaggccgccaagaccgcgctggccggggagcggaccggcgtccccaaacagcgtgacggacggatcgaggcgctgcggaacctgcgggtcgcccgccgcagcgcggtcgatcagcgcgccgacgcccagcgccggatcaagaccctcatcgtcaccgcccccgacgacctgcgtgagcgactgcgcagcctcggcgtcaaagacctgatcaccacctgcgcgaacctgcggcccgaccggaccggcgcagcctcaccggccaccgccgtcaagatcgccctgcgatcgccggcccgccgccaccagcagctgaccgccgagatcgccgacctggacgaactgctcgagccgctggtggccgccatcaaccccggcctggtcgccgccaacggcgtcggcaccgacgtcgccggccagctgctggtcaccaccggcgacaaccacgaccggctgcgttcggaggcggcgttcgcgatgctctgcggtgccgcgccgatccccgcctcgtccggcaagaccaaccggcaccgcctcaaccgcggcggcgaccgacaggccaacaaagcgctctaccgggtcgtcatctgccgcctgcgctgggacccccgcacccgcgcctacatggaacgacgcaccaaagacggcctgtccaagaaggagatcatccgctgcctcaaacgctacgtcgcccgcgagctctaccagctcatcaccacaccaaacgatcttgaactcgccgcttgacatccataggagcat

SEQ ID NO: 5552 - DNA, 1362 bp, unidentified
  source 1..1362: mol_type = unassigned DNA; note = element_8859a78
  misc_feature 1..2: note = core
  misc_feature 3..76: note = LE
  misc_feature 77..1090: note = CDS
  misc_feature 1091..1362: note = RE
  misc_feature 1075..1349: note = bridgeRNA
tgatggggtggacgccccctgacggcatcgctgtgccaaagtggtgtcgttgatcatcacttgaacggaggcgtccatgttggaagttaacacaatcgggttggatctggcgaagaatgtgttccaggtgcattgcggggatgcgtcgggaagtgtgctgttcaggaagaagcttcgccgcgatcaggtgcttgggttccttgccatgcaaccgacctgcacggttgccatggaggcgtgtgccggcggccattactgggcgcgggagattgcgaagctgggacatgctgtccggctgatcgccccaggttacgtcaagcctttcgtgaagcggcaaaagaacgacgccgctgacgccgaagcgatctgcgaagcagcccagcggccgaccatgcggttcgttgccgtgaagagcgaagtgcaacaagctgcggtcatggtgtttcgcgttcgtgaccttgtggtgcgccagcggacccagaccatcaatgcgatacgtgggcatcttgctgaattcggactggtggccgcgcaggggctcttccatgtgaccaagcttgttgcggcgattgagaaggattccaccatccccgaagctgcccgcccaatcctgtttctgctcgttgagcagctacggtcgctggacgcgagagtggccatgcttgatcgcgagattgcccagcgtgccagagaggatgcggaagcccggcgattgatgaccatccccggtataggaccgatcaccgctacagcacttgccgcgttggccccatctgctcagaccttcaagagaggtcgcgattttgcggcctggctcggcctcacgccgctgcaacgctcctcgggcggcaagcagaagctcggggagacatcccggatgggcgaacgaaccttgcgtcgcctgctgatcatcggagccagcgccaccgtgcgctgggccgcgcgaaagggatcgatgacggatccttggctctcgcggatgctagagcgcaagccgcccatgctggtgatcgtcgccttggccaacaagatggcgcgcatcgtctgggcgttgatggctaggggcggtatttaccggacgccagcgtaggcagcgagatagtccgctcctcgagcggactacccaagtgtgagaaggtcgaacggagagtatggcgctacggtcaaagagacgggatcgggaaaaccagatcatggatatgtgctttgagcacgcgaggttgagttggacccgttccgcgaactcccatacgggccggcggcatgtgacagccgcatcagaggccggacacatgtcagcacccgaccacgctctgcgctctttgaaaagattcttcttgcatcgacgggggcgtccacaca

SEQ ID NO: 5553 - DNA, 1332 bp, unidentified
  source 1..1332: mol_type = unassigned DNA; note = element_8867ad8
  misc_feature 1: note = core
  misc_feature 2..77: note = LE
  misc_feature 78..1106: note = CDS
  misc_feature 1107..1332: note = RE
  misc_feature 1104..1326: note = bridgeRNA
gaatgatatggactccctctacctggcactctgcgtgccatacttacttagtacacgctgaagaactggaggttactatgttcaccattaaaactattggcgttgaccttgccaagaatgtgttcagtattcacagcgttgatgcatatggcaagtgcgtcctacgcaaaactgtcaaaagaaacaaactcttagacacattcgcgaagttaccgccctgcctcatcggtatggaggcgtgctctggtgcacaccactgggcgagagagctactgaaactaggtcataacccgaaaattatggcgtccaaattcgttattccatatcgacaaaatgagaagaacgatgccaatgacgcagaggccatctgtgaagcggtatctagacccaaaacacgatttgtctctataaaaagtgaagagcaacaagctgtgctttgcctgcaccgtattcgacaggggctaattaaaacaagaacggcgactattaaccagctcagaggtttactttccgaatttggtattgtgatgcctcaggggcgctactcggctcaaaacactattggtagtgtccttgaagatgcagaaaatgggttgcctatactcgctcgagagctacttcaagatctatcgaacaaaattcaaaaccttaacctagaagtactgcactatgatcgcagagtctctgctttagtccgtgagatggcatcagccaaaaccctcatggatattccaggtgtcggtgaacacagtgcaagtgccattgtcgcgacggtcaatgacgccaaacaatttggctccagccgccaattcgctgcttggatagggttggttccaagacaacactcaacaggtggtcatgttcatcttggtcgcatcagcaaaagaggcgaaaaacacattcgcactctacttattcatggcgcaagagccgttattgcacgatgtaaagagaaaaccgatcacaacagtatttggttaaatcaactcgttgaacgacgaggttataaacgagcagctgtcgccctagcagcaaagaacgctcgtataatatgggcattattaacaacgggaaaagagtacaagattaactatgtaaacggttaacactcaccgagtcaaagcaatagcaaatgatgacaatatgaccagaccgagatgcctaaacctgtttaattgggaagtaataaatactgtttaacgaatgaggccggcatcaagcgaatatcatcaaggtgacggaacgaatccgattaaacaccgaatgtagagctgctgtccgatccactgttgtcagcgggagctattgttgacaaaagagggagtccatgta

SEQ ID NO: 5554 - DNA, 1356 bp, unidentified
  source 1..1356: mol_type = unassigned DNA; note = element_8868c66
  misc_feature 1..3: note = core
  misc_feature 4..82: note = LE
  misc_feature 83..1102: note = CDS
  misc_feature 1103..1356: note = RE
  misc_feature 1098..1342: note = bridgeRNA
tgatggggtggacggcccctgtcgcccggcatcggcgtggcatgatggcagtcggtctttgtcagccataaggagccgtcccatgcagatcagtgtcgtcggtctcgatatcgcaaagcaggttttccaggtgcatgccgctgatgcggagggtcatgctctcgcgcaggtaaagcttcgccgttctcatgtcctggattatttccgcgggctgccaccatgcctggtcggcatcgaagcatgcgctactgcacaccactgggcgcgcgagctgatcgcgctcggccacacggttcgtctgatgccaccggcttacgttaaaccctacgtcaagcgcaataagacagatgccgccgatgccgaagcgatcgccgaggcggtaacccgcccgacgatgcgcttcgtgtctgtaaagtccgccgagcagcaggcagcgctgatgctgcatcggacgcgtgagctccttgtgcgccagcgcaccatgctcgcaacgagtctacgcgcacatctggccgagttcggcatcatcgcgccgcaaggcatccaccgcgtcgagaagctcgcggcggaagtccataaccccgcggtgccgccactcgcgcgcgatgcgctgatggttttaattggcgagcttgccagcctttgggagcggatcgatgccttggaagctcagatcatcgctcggcatcgcgccgaccaggtcagccggcgtctcgcgtctattccgggcgtcgggccgattaccgcgatggcaattgtgagtacagttcctgatccgtcgatgttccgctcggggcgggagttcgctgcctggctgggcctcaccccaaagagccactcaagcggcggcaaagaccggatgggacggatatcgaagcgtggcgaccgctacatccgacacctgctctatgttggtgcaggcaatgctatccgctttgccaaggcgcgggcggcaaccggggaagcatggatccgagctctgcaggaacgtcggccacccaaggtcgtgatcattgcgctcgccaacaagatggcgcgcatcgcttgggcgctgatgatgcggggggagagcttccgcccgcctgcggtagccgcagcttgatcgcaagccggatccataggttgcgagggcgaaagtgaggtgatggcacgaccgggcggaccggggatcgacaaagcccgcagagcttgaggcgcggtaaagcgcgtcccgttgatgaggcgtcgatccgcgaactccatcagggccagcggtcatgagatgggccgcactcataggccgcatacatgaacgcacccgacccgcgccttgccccagcctcataacagccttgcaacgcaggggccgtccataca

SEQ ID NO: 5555 - DNA, 1377 bp, unidentified
  source 1..1377: mol_type = unassigned DNA; note = element_886baef
  misc_feature 1..2: note = core
  misc_feature 3..85: note = LE
  misc_feature 86..1111: note = CDS
  misc_feature 1112..1377: note = RE
  misc_feature 1085..1364: note = bridgeRNA
tgatggggtggatgccccctcccgacggcatcacgatgtgccaagctggcgatgatgaggtcagccagcagaagaggaggcatccatgacagacgttagcatcgtcggcgtcgaccttgcaaaacaggcattccaactgcatgcggcggcgcgcgacggcagtgtgatcttccgtcgcaagctgtcgcgctcgaagttcgttgaggtgatggcgaagcttccgcgttgcgtcgtcgcgctggaagcgtgcgcgaccgcccaccattggggccgggtcctgggcgcgcaagggcatgaggtgcggctcattccgccggtctatgtgaagccgttcgtcaagcgtcagaagaatgacgcggccgacgccgaagcgatcgtcgaggcggcgcagcggccgaccatgcggacggtcgctgtcaaatctgtcgatcagcaggcgcgcgccatgctattccgcacgcgggaaatgctgatcggacagcgcacgcagttggccaatgcgcttcgtggccatttggctgaacacggccatctcgtcccccaaggactggggaacgtcgcccgcttcgccgcgatcatcgcgagtgccgagaacaatctgccggatctcgtccgggatctggcgcggctctatctcgaccagatagcgcacctctcggaacgcattaaaacgctggaagcgcggatggccgccgaggcgaaaaagagcgccgtcgccgcccgcctgcgccgtatgcccggcatcggaccggtgaccgcaatggcgatcgagacgttcgctccggccatggcgaacttccggcgcggtcgggacttcgccgcctggctcgggctcgtgccgcgccaacattccaccggcggcaaacagagattggggcgcacctcgaaaatgggacagcgcgacatccggcgattgctgatcgtcggcgcgatgtcggtcgtcacttggaaggggcgccgcagctcacccggctcgtggctggcccgcatgttggcgcgcaagccgcgcatgctcgtcgccgtcgctctcgccaacaagatggcgcgcgcgatctgggcgatgatcacgtacgaacgagactaccaggaaccggcggcggcagtctgctgagccgaaacacaacggccgctgccggctgtcgggatgtgaggagcgcgacgaaccgtatgggcacgtgatcgaggagatcgggtcggccagccaggggcgtgcaaagagcctttgagctcgccattttgttctggagccgatccgcgcatcgccataccggccagcggcatgatcaaagccgcatagcaaggcctgacacatgaacgctgccgatcacagctcgcacggtccgaaaaactccttgcatcttcgggggcatccacaca

SEQ ID NO: 5556 - DNA, 1379 bp, unidentified
  source 1..1379: mol_type = unassigned DNA; note = element_8872eb8
  misc_feature 1..2: note = core
  misc_feature 3..88: note = LE
  misc_feature 89..1120: note = CDS
  misc_feature 1121..1379: note = RE
  misc_feature 1146..1365: note = bridgeRNA
gatggggtggatggctcccgctcccggcatcaaagtgccaaagtgtggttgctatcgaagcgtccactcatgagaggagccatccgccatggagattaccacgattggcctcgatctggccaagagcatttttcaagttcacgcagtcgacgaacggggcgagcctgtggtccgcaaggcgctgaggcgggctcaggttctgccctttttcgccaagctgccgtcttgcttggttggcatggaagcgtgcggcacatcgcatcattgggcgcgcgagctgacgaagctgggacatcaggttcgtctgatgccgccggcgtacgttaagccgtatgtgaagcgcggcaagaccgatgcggctgacgcggaagcgatctgcgaagcggtgcagcgcccgactatgcgcttcgtgccggtgaagtcgggtgagcaacaagcggcgctggcgctgcaccgaacgcgcgatctcttggtcaagcagcgcacgcagttggtaaatatggtccgtggcctgttggcggagttcgggatcgagatggcgcgaggcctgcatcatgcgctggctctggctcggcggctcgttgctggcgaggcgccggaggtgccggtgctcgcacagcgtgtggtgaccagacttgccgatcagatcgccgccctgcagttacaactggggaagctcgagcaggagctgcttgcctggcatcgctcgaatgacctgtcgcagcggctggcgacgatccctggcgtcggcgtgatctccgcgaccgcactcgcagcttcggttatcgagcccgagcggttccgctctggtcggcagttcgcagcctcgcttggcctgacgccgctgcagaactgtagcggaggcaaagagcgcctcgggcggatctcgcgcatgggcgatcgctatcttcggcggctgctggttgtcggcatgacctcgctaatccgccgggcccgaaccaaaccggagtcggttgatccgcggctgcccgcgatgcttcagcgcaagccggcgcgcttagttagcgttgccgcagccaatcggacagcgcgagtggcgtgggcgatcatgacacgcggtggcacctatcgcgcgccgatggtcgccggggtcgcatgacaatgtaaaacaggagaagagcttaacgaggttgcgaggacgaagagatgtgatggcgcaccggtcagaccgggaactgggacaacccgtcgtacgtcttgggcattacagcccgcaaagcagagtgggacctggttcgcggataccatcatggccagcggtcagacaccgaccgcatcaacaggccggacagaagactgcacccgaccaaacgcagaacatcaaatcaacccttgcaacgcgggagccatccacagaa

SEQ ID NO: 5557 - DNA, 1425 bp, unidentified
  source 1..1425: mol_type = unassigned DNA; note = element_887fda6
  misc_feature 1: note = core
  misc_feature 2..65: note = LE
  misc_feature 66..1103: note = CDS
  misc_feature 1104..1425: note = RE
  misc_feature 1205..1419: note = bridgeRNA
taatgggatggtccgccgcctctgccaagagcagccgggtataagaggagcaaggaggtgttcccatgcagctacacacgatcggcattgatctcggcaagacagtgtttcatctggttgggcttaacccgcgcggcgaggttgtggtacgcaagaagttttcgcgcaaacaactgttgctcttcactgcgaacctgcaggtcgaattgatcggcatggaagcctgcggagggtcgcactttctcgggcgggcgctgagagagcagggtcacgaggtacggctgatgccggcgcagtatgtcaagccgtacgtaaaaaccaacaagagcgactacattgatgccgaagcgattgcggaggcagtcgggcggccgaagatgcgcttcgtaccgatcaagagcgacgaccaactcgatctgcaatccctgcatcgggtacgagagcgctgggtgatgcgacgcaccgcagttatcaaccagattcgtggtttgctgctcgaacgtggaatcactctacgcaaggggcgacgccatatcgatgccgcattgcccgggattctggaagacgccagcagccagctctcgggcgccgtgcgcgtgttgttagttcaactgaagctggaactcgatcatttgcaaacgcggatcgacgaagtcgatgccatgatcaacaaagctgctggcgagagcgaagtctgccgacggctggtatcgattcctggcatcggacctgtgacggcgactgccatcatcgccgcgatcggcaatggagcagctttcaagaagggacgagggttttccgcgtggctcggaatcgtccccggtgaatacaccacgggtggcaagcaaaagctgctggggattagcaaacgtgggaactcttacttgcgaagactcttcgtgcagggggcacgtgccgtcctacagcagagcgcgaagcaatcttccggtctgagtgcgtggctggcccagctcacaacccgcgcccacaataacgtggtcgcggtcgccttagccaataagctggcgcgtatggcatgggcggtactcgctaagaatgaaccctatcggccgccgatcgcggtcggtgcagccacagcataactggcctgcagatgacgcctggctgaaaccaggcttggaaatcgcattcgcgattcccacatctacagaccagcgactgctgcggagttgatcattttctgtcaggtctgctaacgaactatgagatgacacaacggtcgaacccggcgctctcgaaacctgcaaaccggaaaagccttcgaggctgcctgactaaataggacgagcgcgcagcgcattccatcaaggcccggagctttgcgctccaataaggccgaatacatttgcgcaggccaacctgtcgccctcatttttcgcttgcgacaaagcggcggaccataca

SEQ ID NO: 5558 - DNA, 1196 bp, unidentified
  source 1..1196: mol_type = unassigned DNA; note = element_8882050
  misc_feature 1..2: note = core
  misc_feature 3..206: note = LE
  misc_feature 207..1184: note = CDS
  misc_feature 1185..1196: note = RE
  misc_feature 36..212: note = bridgeRNA
cttgtcttatgaaaatctggtcgcttcgtgcgatgaaggaccgttgatccggggtggccaccccggatcaacgggaaggggacgggtcgggatatgacaggccatgatgggccgtattagagtgtgaccgccccttcttttccttgtgccctgaacggatacccgggggatcaagccccggatgacaagcataggacatggaaaagatgacgcagaccgacgctgattccaagaaacaaatgcctggtcaggcgatcacgatcgggatcgacatctccaaggatcatctcgatgtggcgctttatccgggcggggagacacggcgcttcctcaacgcccgcagtgggcacaccgccctgttgcgctggctcggcaagcaggtcgtggcacggatcgtgttcgaggcgaccggcccctatcatcgggatctggagcggcgccttgagcaggccggcctgcccttcgccaaggtcaatccgcgtcaggctcgtcgcttcgccgaggcaacggggaaactcgccaagaccgatcgggtcgatgccctcatgctggcacgcttcggcgtgttgctcgagccccagtcccgccccgcccggtcggagaacctggtgcaactggccgaattggtggcgggacgccgtatcctcatcaaggatcggacggcaacgctgaaccggctcaagaccctgggacaggaactgctcaagcgtcacgctcgccatcgcctgcgacaaatcgaagcgcacctcacctctctcaatgtcgctatcgatgctgtaatcgccgccgatccggtgctgacgcgacggctcgccattctcaccagcatccccggcctgggtgaaatcaccgcccaggctctgattgccgatatgcctgaactgggcaccatggacgaacgccagaccgccgctctggccggtctggcacccatcacacgacagtcgggaaaatggcagggcaagagcttcatccagggcggacgctcccatctgcgacaggccctctacatgcccgccctcgtcgccatgcgcttcaatcccgatctcaaatcccgctatgacgctctcgtcacacgtggaaaacacgccaaggtcgccatcaccgctgtcatgcgcaggctcgtcgtcatcgctaacgctctcctccgcgatgatcgaacttggacaccaaaagtcgcttgatcacaacggata

SEQ ID NO: 5559 - DNA, 1488 bp, unidentified
  source 1..1488: mol_type = unassigned DNA; note = element_8898485
  misc_feature 1..2: note = core
  misc_feature 3..247: note = LE
  misc_feature 248..1468: note = CDS
  misc_feature 1469..1488: note = RE
  misc_feature 6..246: note = bridgeRNA
ctaatgggagctaccgggtcggctgttcgggcagactcggtacctgtagccgctggtgagtgagcaccctcgtcggccggaccttggagtcctggggtcagatcgtgccctcaccggtggtcaggggtcttgatcgctgatgggatgtcgtgccccccgaggatctggggtgagcactgatccattagttcgcgggccggcccctgcaggctgctgaccgctgttgtcgatcgtcgtggaggtcgggttgctgttcgtcggtgatgactgggctgaagaccatcacgatgtcgaggtccaagacgaggacggcaaggtggtcaagcgggtccggctgcccgaggggatggccgggatcacccggctgcacgacctggtcggccggttcgtggccgaggacgccgacccgtccgacgtgctcgtctgcatcgaggtcgatcggggcccgtgggtgcgggcgctggtggccgcgggctatcgggtgttcggcgtcgatcccaagcaggccgcccggcaccgggagatcctcggcagctcgggggccaagagcgacaagggcgacgcccacgccctggccgacatgatccgcacccgccgcaaccagctgcgccaggtcgccggggactcggagatcgcagaggccgtcaaggtcgtcacccgggcgcatcagacgttgctgtgggaacgcacccggcacatgctgcgccttcgggtggcgttgcgggactacttccccgccgcccttgccgcctacaagccgctcggcctcacctcggaggcggtgctgaggctgctggccaaggcccccacccccgagacggcggccaagctgacgatcaaccagatcagcgcgacgctcaagggccgccgcgacatcggcgccaaagccgcggcgatccaggacgtgctgcggggcgagcacctcggccaggccccgctcgtcacaggtgcctacgcctccaccgtgaaggccctggccgccgtcatcaccgtcctgaacagcgagatcaagacgcttgagggtgaggtcgaggctcattttggccggcacccggacgctgaggtcatcctcagtcagccgggcatcggcgtcgtcctcggcgcccgggtgctcgccgagttcggagacgccgaaggccgctacgtgagcgcgagggcccgcaagaactacgccggaacctcgccgatcacccggcagttcggcaagaccaagattgtccaggcccggttcgtccacaacgaccggctcgtcgacgctctccatctccaagcctcctgcgccctccttcacgatcctgaggtccgcgcttactacgaccagctcaaagcccgtgacgtcagccataacgccgctctccgccaagtcggcaaccgcctggtgggcatcctccacggctgcctcaaaacccacaccacctacgaccaggcaaccgcatggtcacatcgcaaccacgacctcgccgcttgacatctaacgtccagggatgt

SEQ ID NO: 5560 - DNA, 1219 bp, unidentified
  source 1..1219: mol_type = unassigned DNA; note = element_889db2e
  misc_feature 1..3: note = core
  misc_feature 4..242: note = LE
  misc_feature 243..1205: note = CDS
  misc_feature 1206..1219: note = RE
  misc_feature 44..227: note = bridgeRNA
tcttgtatgttcgtttcatcgcttgactgggttccggtcgggcggtctactcaggggcacttgagtagcgagcgtcgggatgccgattcttgactgaggccatcatgagcctgcacagaagatcagcacccggcgctccatgtcgggcgtccggtcgaacggtatcgaaggcccctccgcctcggagacgagcctgtatccacaaggctgaccgtgtacgacgtcccgagaaggagccgttgatggacgccgtactggggatcgatatcggcaaagcgaagtttcatgtgaccctgctgttggccgatgggacgcggcggcggaaagcgtgcggcaactcgccgacgggctgcgccgagctgctcgcctggatgacccgccacggcgccacgcatgtgcatgccggtctcgaggcgaccgggacctatggcgagttggtggccacgacgttggtggacgccggtcatcaggtgagcctcctcaatcccgccatcattcaccactacgccaagagtcgcttgtcacgtgcgaagaccgatccggtcgatgccgatgtcatcgccgactatacggcgaaggaacacccgcccgcctggacgccgctgccgcgcgaggtccgcgaccttcaggcgttggtccgtcgcctcgatgcgctgctcggcatgcacaccgaggaacgcaatcgggcgcaggccggcgcgctcacccccgcggtgcagcaatccatcgacgaggttctggaccatttggcgacgcagatcgagacggtgcgtcaacagattcgggaccatattgatcagcacccgagcctgcgtgcctcgcgcgatctgctgacgaccattccagggatcggccaggccaccgccgccctcctcgtcgccgagctctttcacaaacccttcacgtcggctcgacaggccgccgcgtttgccggcgtcgtgccgcgaccgaaccagtccggtcagcacacaggccggcgcgtgatgtgcaaactcgggcccgggcgtctccgcaaagccctctactttccggcgatcgccgcgatccgcttcaatcccagtctgcaaccgctcgcccgtcgcctgcgggccgccggcaaaccccccatgctcatcatcggcgccgcaatgcggaaactcattcatctcgcctttggcgttctcaaatccggccgcgcctacgacgcgagcttggccaaggcttgactctcaacacggta

SEQ ID NO: 5561 - DNA, 1168 bp, unidentified
  source 1..1168: mol_type = unassigned DNA; note = element_88aa52f
  misc_feature 1..2: note = core
  misc_feature 3..176: note = LE
  misc_feature 177..1148: note = CDS
  misc_feature 1149..1168: note = RE
  misc_feature 33..197: note = bridgeRNA
cttgtatcctgagatttagttaccatggtgacggataaatttggcacagtgtgtgcggcctgatcctgcctggggtttaaagcccgtacctgagcaaccggcgctacactgagccgctcatctgaaacccgaacagttgtccgtatgtcataacgtatttgcaaggatgggtaattatgagtttgccgaatccaatttgtgtgggaatcgatgtttccaaagcctctctcgatgtcgctgccaacaaagaagacattgaacaattcaccaccagtaatgatgttgatggctttgacgcaatctttgccagattgaaagagcactctgttgctttagtcctgatggaagccaccggaggactggaagcagccattgcctgttctcttcaagacaaaggtcttgatgtggttgtcatcaatcccagacaggctcgcgactttgcccgtgcaatgggctatctggccaagactgaccgtattgatgccaaggcgctagcccaaatggctgaagtgattcaccgtcatccggaccggaagcgttttatccgcgccatcccagatgcagatcgtcaggagcttatcgctatggtagtgcgcagacgtcagttgattacgatgcttgtcgctgagcgtaaccgcctgcctctgtcgcacccgcagagcagagagagtatcaatatcatcgtcagagcactgaaagatgagttagcgcgcattgacaaagatatggacagacacatccgggaacactttaaagaactcgccgacaaactctgcactattaaaggggtaggcctgatgactgtcgcagccctgctggcggaggttcccgaacttgggaaactttcgcggcgtaaaatcagcgcgcttgtcggcgtgacaccggttaaccgtgactctggaactctacgaggccgacgaaccatctttggtggccgggccggggttcgcacagctttgtatatggctgcacttgtagcgacccgcttcaacccggtgataaagacgttttatagccgactgctggctataggtaagcccaggaaagtagcgctggtggcctgtatgcgtaaactgctgaccattctgaatgcaatggtcagaaaaggtgaaaaatgggaagagtcataccataggattacctcataaattggtattcaagacagttg

SEQ ID NO: 5562 - DNA, 1372 bp, unidentified
  source 1..1372: mol_type = unassigned DNA; note = element_88afb05
  misc_feature 1..2: note = core
  misc_feature 3..80: note = LE
  misc_feature 81..1109: note = CDS
  misc_feature 1110..1372: note = RE
  misc_feature 1083..1359: note = bridgeRNA
cgatggggtggacgcccctccgacggcatcgatgtgccaaggtcgtggtgttgaagaccgcgacgataggagaggcgtccatggaggaagttagcatcatcgggctcgatttggcgaagaacgtctttcaagcgcatggcgcgctgatggacggatcgacggcgttccgcaagaagatctcgcgagcgaagatgctgtcgtttttcgattccattcccaggtgcgttgtcgcgatggaggcctgcgccagttcgcaccattgggcgcggcagatcggcgcgttgggccatgaagtgcgcctgattgcgccgatctacgtgaagccgttcgtaaagcgaaacaagaacgacgcggccgacgccgaggcgatcgccgaagcggcggggcggccgacgatgcgatttgtcgccgtcaagagcgcggagaagcaggcctccggcatggcgttcaagacccgcgaccttctcgttcgtcagcgaacccaaacgatcaacgccttgcgggggcacatggcggaatacggcgtcgtagcgcccaacggacccgttcatatcgagcgtctcgccgaggctctgcaagacagtggcagcggcttaccagcgccggtcgttgttctgagccagatgctgctcgcgcacatcgccgcgctcagcgaacagattgggctcctcgaccaggagcttcgccaacgcgcgcgccacgatcaaaccgccaagcggctgatgacgatccctggcgtcggcgtcatttgcgccgtagccatggaggccctcgcgccgcccttggaaagctttgccaagggccgcgacttcgccgcctggctcggcctcacgcctcgacaaaactcgtcagggggcaagacccgcttgggcggaacctcgaagatgggccagcgcgatctccgccgattgctggtcagcggcgcgatgactgtcgttcgatgggcttcgcgcaaaggcgcccccgaggggtcctggctcgggcgcatgttaaagaaaaagccccgcctcgtcgtcgcggtggcgctggcgaaccgcacagctcggatcgcctgggcgctgatgacaaagggcggggtttaccaagctcctgacgcggctcgcgcttaaaagcgccggccgcggtcggagacgtcggaggtgtgagaaggccaatccaagggtaagggcaaacggtcaatgagacggggtcgggaaaaccagtgtgtttcggagcgcttcgagcgcgccacgccgatttggacccgatcctcgagcttccatacgggcccgcggcgtgtgaactgccgcactatgaggccggacacacgaaagcgcctgaccacctgctcgagcctgaagaaagcccttgcatccaacggggcgtccacaca

SEQ ID NO: 5563 - DNA, 1536 bp, unidentified
  source 1..1536: mol_type = unassigned DNA; note = element_88b1625
  misc_feature 1..2: note = core
  misc_feature 3..247: note = LE
  misc_feature 248..1411: note = CDS
  misc_feature 1412..1536: note = RE
  misc_feature 3..230: note = bridgeRNA
cttgtatgatgtatttagtccaaatacatcaatacgctcctttcttctcaattttgatataatcgttagtaacactgtggactttttatctttcttttatagcttcgactatttgaaggagtgtattgccacagttttatctgaatcatttatagttggataagcctttgagttttcatttcacgcaagtctatgatgataaaactatgtggacagacacagtgattattcatttaggaggtttcttatgatttatgttggaatcgacatcgccaaacgaacacattatgcttgcgtcatgcactctgacggtgaaatccttgcagatccatttccttttacgaatgatcgtgccggatttcaactactgcttaactgcatcggctcctatcccaaagaacaacttcttattggaatggagtctactgcccattatgcagaaaacctgacttcttttctctttagcagagattttcaggtctgtatcatcaatcctatccagaccgcttctttacgtaagtctaacattcgtaaaacaaaaaccgactccgtagatacctttctcatcatcaaagcattgtctctacataattaccgctgtttttcaaagcgtgattatgattctttgcaattaaaaaacctttgccgctttcgccagaaactgatgaaagcaagaacaaaggttaaaattcagctcgtatcctatgtggaccttatctttcccgaactccagtttttctttaagtctggaatccatacaaagtcctgttatgcgctcctgaaaaccgagtctaatcccgacaggattgcaaaaatgcatctcacgcggttatcaaacctgctgaaaaagacctctatgggccactacactaaaaatcatgctatcgcattgaaagagcttgcatcgcaatccgtcggtattaatgatgatacactatctttgcagattttgcaatccattgaacaaattgaaatgtattcgcagcaaatttccagggtagaagcttctatcaatgaaatcatggataacatggactctgtaattaagactattccgggtatcggcaacctcaacggtgccatgattattggtgaaatcggtgatatctccagatttgaaaagccatgccagctcctggcttacgccggtttagatccttcagtttaccagtccggtaaatttaccgctgcgaaaaccagaatgtctaaacgcggctcaaagctattgcgctatgcactaatcaatgcagcatggcagcttacgctccacaatgaaacattcaaagcctattacgacttgaaagtctcacaggggcggcgccactacaatgcccttggtcatgttgcacacaagctggtgagagtgatccataaaatgatgacagataatcttgtctttgatttagattagttcctgcttatcaactatattaaattttcaaagcacctcattcgatgctttatttgttatgcactgctttagccaaaactttttaaaaatttttttcaatttactattgacttttcatagttggt

SEQ ID NO: 5564 - DNA, 1203 bp, unidentified
  source 1..1203: mol_type = unassigned DNA; note = element_88b613a
  misc_feature 1..3: note = core
  misc_feature 4..213: note = LE
  misc_feature 214..1188: note = CDS
  misc_feature 1189..1203: note = RE
  misc_feature 12..203: note = bridgeRNA
cttgtatcttgatttgtggtcgtagaatgcggccgacgcgggcgcgacagaccgatgtctccttggtcctgtaagagaccgcttgaaagcacgagtcgtcgcgcccgcccttgaaggaggagcccgaacggttgccggggccgctgcccttctcttgggcaagcccgtatccgcaaggccgggccgcctacacaaagaggaaggagaagccgtatgagcaccaccacgagccccgaaaggaacccccgcgtcctcgtcggcatcgacgtctccaaggggtacttggacgtctgccggctcccggaaggcgagacctttcgcctcgccaacgatcaggggggcatcgacgaactccttcggcgcttctcggaggagacgcgacccgaactggtcgtcctggaggccaccggtcgctacgagcgccccgccgccaccgccatcgccgccgccgggatcgcggtagccgtggtcaacccccgccaggctagggacttcgccaaggctaccgggcgcctcgccaagaccgacaagatcgacgccgaggtcctcgcccgcttcgcctccgccatcgagcagcttccgagcatcttgcccgacgaggaagcccagcacttgcaggcgattctcaccaggaggcgtcagttgcttctgatgctcaccgccgagaagaaccgcctcctcatggcccccgagccggtcgccaaacgcatccgcgcccacatccgctggctcgaaaaggaactcgagcgcaccgatcgagagctcgacgaagcagtccaagagagcgaggtttggcgccgcaacgaggagttgctgaggagcgtgccgggagtggggccggtcctggcgaggacgctcctggccgagctgcccgagcttgggaccatcacccacaagcgcctctcttccctggtgggcgtagctccattcaaccgcgactccgggaagatccggggcaagcgagaggtgtggggcgggagggctccggtcagggccgccctgtacatgggggcgctggtcgccacccgccacaaccccatcctcaaggagttctacgagcggctgcttagtgcgggcaagcccaagaaggttgctctggtggcgtgcatgaggaagctgctctcgatcctcaacgccgtgatgagggatcgtgctgtttggaggtgtcctcatgccctaaccccttgacttctaagacggttg

SEQ ID NO: 5565 - DNA, 1399 bp, unidentified
  source 1..1399: mol_type = unassigned DNA; note = element_88bd5fe
  misc_feature 1..2: note = core
  misc_feature 3..79: note = LE
  misc_feature 80..1117: note = CDS
  misc_feature 1118..1399: note = RE
  misc_feature 1115..1386: note = bridgeRNA
tgttggtgtggacggcccccgacggcatcaagcgtgccagaatgaggtcgttgtagatctcagacaaaggagaccgtccgtggaacagattacccgaattgggatggatacgtcgaaacatattttccagcttcacggggtgaccgccgccgaggagccggctctgcggaagaagctacggcgcaaggagatggtgagattcttcgagaagcttgcgccgacagtaatcgcgatcgaagcctgcggtgcgagccatcattgggcgcggctgctgcaatcgttcgggcattcggtgaagttgatcgcgcctcagctagtcaagccgtacgtcaagcgcggcaagaacgatatggcggacgcggaagcgctttgcgaggcgacgagccggccgacgatgcgcttcgtgccggtgaagacggctgagcagcaagcggccttgatgctggtcggcgtacgtgaccggctgatccgcaatcgcacgcagttggccaacgccatccgcggctatgcggccgagttcggccttacagccgccagggggaaggctcacctcgatcctctgctcgagcgcatccaagccgatgagagcctgcccgccttggctcgggagctgttcgcggcccaggccaaggaatatgcgcaactgcaggcgcaaatcgacgaagtcaatgccaggctcatgtcctggcatcgggccgatgaatgcagccgacgtctcgccaagatccctggcgtcggcccgatcggcgcggtgctactgaaaatgaagaccccggaacctgagctattccgatcgggacgccagttcgcggcctggatcggcttgacgccgaaggatcattcgaccgcaggcaaggtcaggctcggcgttatcacgcgagccggcgatgaaggattgcgcagcgtgctggtggttggggctaccgccgtgatccagcatgttcgacgcggcggcaggtcgtcgccttggcttaccgagctcctcaaacgcaagtcgccgaagttggccgccgtggcgctggccaacaagatggcacgcatcgcctggaaactgatggttacgggggaaaattacaccgcgaaatctacgcccgccgcgttggcaggcgtagcctagagatcaaccagacacggggagcaactcaactgcaaccgtgctgttgatgccagaacttgcaagataatgagcagatggtgtgatcaatcgatccatgacgagagaaattccgcattctccagtgaccctctatgaggtcgctcatctgtttggagctcttgtcgcggaaaccatcttggccagcgttcatgtgtgaacgcacaaacaggccggacatatggacgcaagcgatctgatcaaagcactgcaaaaacaccttgcgaggacggggccgtccacata

SEQ ID NO: 5566 - DNA, 1431 bp, unidentified
  source 1..1431: mol_type = unassigned DNA; note = element_88cb8b8
  misc_feature 1..2: note = core
  misc_feature 3..140: note = LE
  misc_feature 141..1160: note = CDS
  misc_feature 1161..1431: note = RE
  misc_feature 1198..1431: note = bridgeRNA
aaatgtaatgaacgcgtcccacccattaaatccggagcacgacgatgaataaagagaaaggtgtggagcctcacagatttccggcatcatagtgcccaatacgggatgcataaagctccctcagactggagactccacacatgaaatatataccagtttgcgttgatatcgcaaaacatctgattcaggttcacttcatcaatgagcacacgggtgaaatggttgataaacaactacgtagcagggattttctgactttcttcagtaaccgggaaccctgtctgataggtatggaagcctgtggaggctctcagcactgggcgcgtgaactgaaaaaacaggggcataaagtccggcttatgcaagctcgttttgttaaggcattcgtcatgggtaacaaaaatgatgtgatggatgcccgtgctatctggatggcggtacagcaaccgggcaaagaaatcgctgttaaaacggaagaacagcagtctgtactggttctgcaccggactcgcaggcaactggtgaagtttcggacggcacagattaatgccctgtacggaatattccttgagttcggagaaaccctccacaaaggccgggcagcactggccaaagaactaccggaagctctggaacggctgaagatgcgtctccctccgtatctcatcagtgtactggatgaccagtataacaggctgagtgaactggactatcagatagacggtatcgaaaaacaacttctcagtgtggctcggcagagtgagacctgcaaacgtctgatggaaatccccggagtggggccactcatcgcgacggcagcagtcgccgccatgggagaagcctcggcgtttaaatcgggtcgcgagtttgcggcttatgtgggtctggttccgaagcaaaccggctctggaggaaaagtgcgcctgctggggataagcaaacggggtgatacgtatctgcgaaccctttttgtccatggcgcacgggcagccgctctgttaacaaaagagcccggtctctggattaccgagctgaagaaacgccgtccgaccagtgtggctattgtggcgatggcaaacaagctggcacgaacagtatgggcaatagctgcccatggacgtaaatacgataagaatcatgtcagtatcaggccttattaagcgcggataccgataaatattaactcctaacaaagggtgaatgctgaaaggttgctgtggcggccagagtgatgacgaagacaggtaagaccgtgactcactaaacctgaatgatcccttgggcttaaagcccgcgagaaaaatgaggcgtgagttagcgaattacataggggctcgcagctttatggctgcaaaaagccggatataaagctgcaacctatctgtcagaatcaaaacactggatgtcattgcaaacgggacgcgttcatat

SEQ ID NO: 5567 - DNA, 1274 bp, unidentified
  source 1..1274: mol_type = unassigned DNA; note = element_88d7078
  misc_feature 1..2: note = core
  misc_feature 3..146: note = LE
  misc_feature 147..1088: note = CDS
  misc_feature 1089..1274: note = RE
agatggggtattcggcttgcgccccttcttcaacggtgatgcaggaaggtgctgcgcttcgagctgatgatagaacgtggtctgtccaaacagccacaggcatcaggaaaggaagcgcagaacgggtcggtctcgaggccgggcccttgtcgcaatggcttttcgaggggctggcgtgcgccgggttgccggtcatctgcatcgagacgcgtcatgtgaaagcgttcctgaaggcgcagccgaacaagacggatcgcaatgacgcgcgcggcatcgcgcagatgatgcgggtcaacctgtaccgcccggtgcatgtgaagacgctcacgagccagaagcggcgggcactcttgacggcccgcaagctgctgcagggaaaggcgatcgccatcgagaacgacatccgcggtcttctgcgcaacttcggcctcaaggtcggtgttgtgggaacggtgaagttcgaggagcggatttgcgagctcgtcgaaggcatacccgatctcgaagagatcatggagccgctgctggccgcccggcggaagctgcgtgccgaatttgctcgcctgcacaaaaaagtgctcacgatcgccaggagtgatgcgacctgccggcgcttgatgacggttcccggtgtcggccccgtggtggcgctcgcctatgccgcgacaatcgacattccgcagcggttcagaagctccaaggcggtgggacccatcctgggactgacgccgaagctcaacgagtccggggaaagcaagcgcgttggatgcatatccctgtgcggggacggcatgatgcggacgttgctctatgaggcagcacaaacgctgatgactcgcgtgacgaaatggtcgtggctcaaggcctgggcgatgaacgtcgccaagcggcaaagcaattgtcgcgctcgcacgtcgcctggcagtcgtcatgcatcgcatgtggctggacggcaccgagttccgctggatgagggaaaccatggcgtcagccatctgatccagaaggccggaaaggagagagacagagttccgctcgctggcggacggacgtccttcgcaggacgatggatgaggcgagttcgctgagacactcgtaccgattgcaacacgcgatcaagacgcttggtagattgtgccgcctcattctcctgaccccatactgggagggcgaaacgccgatcccgaagagaagcaaggccctgcgaaagacgtcaaaacgccggagacacgcaaaagctcgatagcgattgacctcaacacgccgaatagaga

SEQ ID NO: 5568 - DNA, 1569 bp, unidentified
  source 1..1569: mol_type = unassigned DNA; note = element_88d717b
  misc_feature 1..4: note = core
  misc_feature 5..276: note = LE
  misc_feature 277..1452: note = CDS
  misc_feature 1453..1569: note = RE
tctcgtattatcaatataggtgttctaattgataatttctttctagaccgcctttcatagtaagtatatctggcggccatttgatatacttattttgcactgtggatttgtctctgtttttgtacagctttgactgttctaaggagattcctaccacagttttatttttatgttgatcagttgattagcacctgatgctttataactcacgagactacatggatagaacatttgtgggacttaccatacagtgcattatttacaggaggtgtcatcatgacatattttattggcatcgatattgccaaattcaaacatgactgctttatcatggatcaggatgggactgttatccgaaattccttttcctttaaaaatgataaagcaggatttgatcaacttctttctgttttgaattctctggatccatcccatgaaaaaaggataggtcttgaagctaccggtcattatggaatgaatctcaaactatttcttgaagatcacgagctttccttcctggaaatcaatcctattttgatcaaaggtttctcttccaccagaacccttcgaaaaacgaaaactgacaaaatagacgcttctttgatttctctgtacttgacatcggttgaatacaaaatctatccaaccaaatcataccatataaagaatttgaaatcattgacccggtcaagggaagaactcgtcaaggaaagatcgctccatctcgttaacctgactaatgttttagacctggtattccctgaatttaaacctttttttaatggttctctaaaaagtgccacatgtttatatctgctagaaaactataccagtccttctaagatggcaaatatgacttcagcatcttacaagagtatgtccagcaaactcaggcgcacgttctcatatgcgaggttcaacgagttaaggcagctggctagaaatacaattgggcacgaagatgaaatccttatctttcgattaaatctttaccttgatctctataaaacgattgactcaaagattcaggatatagaacacaaaatcgaagaagaattccagaaaatccatacccacatccacactataaaagggattggtctgcattcagccgcctctatctacgcggaatatggaagcttggacgcttttgatacaccgaataagatgcttgcttatgcaggtctggagccttcaagagatgactcagggcagcacagctattccggaaagatggtaaaacgtggatcatcttatttaagacagaccataatgaacgtagcagaaactgtgatgattcataatcctgttttctatgactactactataagaagaaaagcgaaggcaagtgtcacagagtagccttatcccatgtggccaaaaaattgatacgcattattttctatcttgaaaaaaatgatgttgattttgatccagaaaagttacggtagcattttctcttcaaaatcataagaattttaaaacttgagccttatcaggctcttttcgtcatgccttgattctactgagaataaatttttattttcttgttgatttctaatagttaa

SEQ ID NO: 5569 - DNA, 1617 bp, unidentified
  source 1..1617: mol_type = unassigned DNA; note = element_88d7cb6
  misc_feature 1: note = core
  misc_feature 2..250: note = LE
  misc_feature 251..1486: note = CDS
  misc_feature 1487..1617: note = RE
  misc_feature 6..226: note = bridgeRNA
tcgtattattaggtcagccagaaaatatttctggttgaccattttttatatcgatatatgatagcggtagccggggtagaacgttcgcgcccgtgggacttgatcccgtccgcaaaacagttcgccccctacttgtagaaacatgtttgaggctggttgggacaatgatctcgtataacaagcgaagctatgacactacaaagaggatttaggggttaccggttaattgtattttgaaggaggaattaagatgaatccagtcattggtctggatgttgcaaaaggtgaaagtcaagttcaagcgtacttggaaagaaagaagccgtacaagaaaagtttcaaagtagaacatgatcttgatgggttagctagtttattagattttattaaagaagtagaagatatttcaggagaacgtcccccactagtgatggaatcaacaggtcattatcacacaccagttgttcaatattttgaagacaaaggttatttaatcattattgtaaatccacttatctcttataaagcgaaaagctctagtttacgaaaggtaaaaacagatatcattgatgccaaccatctctgcgagctgaattataaggaggatttagagccttataaaaggcgtggtatccaaattgggaacttacgtcaccttacgagacaacacgataatattacaggtatgtttgtacaaacgaaactacagtttcaggcagttttagatcaaatcttccctgagttctgtaaggtttttagtgacttatattcggatgtttctttaaaaatactacatacatttcctacttcagaatacatattgaaaacaactactgatgtattaacaactaagataaaagaattctgtaattctcgttctctacagtgggcaaacaaaaaagctgaagagttaatggctgcagcagctcaaaacccttttcagaagatactatattctagccttgccctaagcttagaaatgtatattaatatgatttttgaatataaaaaacatctatccatactagaaaatgagatagatgctttagcaaaaagtattgaagaatctaagattatccgttcaattcccggtatcggagaaaaaatcgctgccacgattgtatccgaaattggggaaattgaaaggtttaatcatcctaagaagctcgtcgcatttgccggtctagatccaagtgtctttgaatccggtacattcaaaggtacttacaatcgaataaccaaaagaggctctagtagactacggcaagctttgtttatggctgttaaatgtgcgattcgtgactgtcgaaaacaaaaaacaacggatgaaatccttcctcgtaataagaaattacgggcgttttatgataaaaaacgagaagaaggaaaaccacttagagtagctgtaatagcttgtgcaaacaaactcttacattggatttatgcaattttaaaaaataaaactactttccaagacttagcttgatttaacaatttaaccaagcacacctaaactttcaaaactaagatttggagggttatttggtatgcgaaatttagtataacatgatattttttatatttttaatgaaaattattgacaactattagctggtt

SEQ ID NO: 5570 - DNA, 1426 bp, unidentified
  source 1..1426: mol_type = unassigned DNA; note = element_88d88a1
  misc_feature 1..3: note = core
  misc_feature 4..123: note = LE
  misc_feature 124..1158: note = CDS
  misc_feature 1159..1426: note = RE
  misc_feature 1177..1376: note = bridgeRNA
agatggggtattcggcttgcgccccattcccgaggacggcgttcgtggaggtgctgcgcttcgagctgatggtagaacgtggtctgattgaagcagccacaagcatcagggaggaagcacagcatgaagcactatgccggattggatgtttcggtgaaagagaccgccatctgcatcgtcgatgagaacggacgaatttgccgtgaagcaaaggtagtcagccatcccgaggatttgtcgaaggccttgacggagacggggttccgcatcgaacggatcgggctcgaagctggcccactgtcgcagtggctgttcgagggtatggcgcgggctggattgcctgtgatctgcgtcgagacgcgccacaccaaggcgttcctgaaagcacaaatcaacaaaagcgaccgcaacgacgcgcgaggaattgcccagatgatgcgcgtcaacctgtatcgtcaggtgcatgtgaagacgcttgcgagccagaagcgtcgtgctctgctgcgggcccgcaagcttttgcaggagaaggcaatcgctatcgagaacgacatccgcggcttacttcgcaactttgggctcaaggtcggcatcgtcggtgcggcgaagttcgaggcgcggatcaaggaactcatcgaagacatgcctgacctggaggagttcatcgacgtcctgcttgccgcgagacggaagctgcgcgacagcttctctcgtctgcacggcaaaatccttgagcttgtcgggaatgacgcggcctgcaaacgtctgatgacaatcccgggcgttggcccggtgacggcgctcgccttcatcagcaccatcgacatcccggcgcggttccgaagctcccgatctgttggtccggcattggggctaacgccggtgctgaaacagtctggcgaaagtgagcgagtcggccgcgtctcgttgtgcggcgatggcatgatgcgcggcctgctctatgaggcagcacagtccatgctgacacgcgtgaagaagtggtcgtggctgaaagcctgggcaatgacggtcgcaaggcggggaggcttgaagaaggcggtcgttgccttggctcgtcgcatcgcggtcatcatgcacagaatgtggatcgacggcagcgagttccgctggtcgcgcgagggtgcagccgagatttgatcgagacctgaaaggagaagagatccaccgccggtgggaagatgtccttcgcgggacgacgggtgaggcgagttcgcaatgggtccagggtcgacagcaagtctgctgtcaggacgcgagtcagattggaccgccccactcttctgatcccatgatgggagggccgatgtgccgatcccgaagagaagcgagagcccgcgatcgacatcaaacgccagcgtgatggagatagctcgaagatgcttgacccaaacccgccgaatagaga

SEQ ID NO: 5571 - DNA, 1284 bp, unidentified
  source 1..1284: mol_type = unassigned DNA; note = element_88e51a1
  misc_feature 1..2: note = core
  misc_feature 3..237: note = LE
  misc_feature 238..1272: note = CDS
  misc_feature 1273..1284: note = RE
  misc_feature 17..240: note = bridgeRNA
ctgacttgtctactggagtcaggcgctggggtctgcagcccgtagcgtcagggcgtcggtcggcactggctcgcaaaccccttgccgccctcgggttggctcttcaagagcgtgccgccgctggccggcgcccggccgtggcgtggctcaacagaggcgtgctcaccgaatttccgcaagtcaggctgcccgccacggtgatcctcgttcgctttggcggaaggaacccagcttcccgtgatcacgatcggcatcgacccacacaagtcctccttgaccgctgtcgccctcgacgagaccggtcacctgctggcgaccaggcggatcaccgtcaacgccgccgcatacaagacgctgaccgactgggtcgcccgctggccgcagcgccgttttgctgtcgaaggcgccgctgggctggggcggggtatcgcgcaactgctggccgccgccggcgaacacgtcgtcgacgtcccagccaccctggccgctcgagcgcggctgctggacacgggcggcacccgcaagaccgacgccgcggacgccgccagcgtcgctcacgccgcaatgcggcaccagcggttgcgtcaggtcgtcgccgaggaccatcacacccggctgcggttgctctccgaacgccgcgacgacctggctcgcgaacgcgtccgactactcaaccggcttcacgtgctgctgcgtgatttgctccccggcggcgcggcgctggacctcaccgcggataaggccaccgcgctgctgcgcaacatccggcctctcaccgccaccgacagctgccgccgcgacctggcacgggaaatgatcacggacctacgccacctggaccggcgcctgcacgccaaccaggcccagatccggcaggtcctgaacgagacgcaatccaccatcaccgagatccgcggtgtcgggcacatcatcgccgcgaagatccttggccacgtcggcgacatcagccgattcccgagcgccgataacttcgccagctacgccggcacctcgccactcgaggcatccagcggcgaacggcgccgccaccggctcaaccccaccggcaaccggcaactcaacaccgccctgcacaccatcgcgctcgtccaagcccgcgacgaaggccccggccgcgtctactaccagcgcaaactcagccaagggaaaacacccgccgaagcccgccgcgcactcaaacgacgcctcgccaacgtcctctaccgacacctcatcaaagatcaactcaaactcgccaccggtacgggttgacacacagaggcg

SEQ ID NO: 5572 - DNA, 1256 bp, unidentified
  source 1..1256: mol_type = unassigned DNA; note = element_88e5e40
  misc_feature 1..2: note = core
  misc_feature 3..224: note = LE
  misc_feature 225..1241: note = CDS
  misc_feature 1242..1256: note = RE
cttgtacgtttgctgtgggcatgttttgttcatgcctggtttccggggaagccgaccggaccttcgagcagcctggtgctgactctgcgcgtagagaggctccccgccccattcgacgagcacgtggagtgtctcgagctctggagcccgtgtgacaagggcgcgccgtcgatagttgcggggtcggggaacctggaagccgatcttacgagcttcacagcgaggtgcaatcccatgaccgcaatagtctcaccgagaccctgttggcgttcgacgtcggcgccagaacccatgaatttgtccacgagaccgcaggcaagctggaacagggccagctgcagaacgacatcagcgccgtgcgctcgttcctggcgcgtctgctgaaggatggtcgccgcctgcgggtgatcatggaggcgacgggcatctacttcctcgaccttgcccttgtggcccacgaactcggcgccgaggttgtggtgatcaaccccaaagcgggacatcacttcgccaaggggctggggctgcgcagcaagaccgatgcgatcgatgcccggatgctgctcgagttcctgcgccgcatgccgctcacgcgctgggagccgccggcccgggaatgcctgcaattgcgccagatcgggcgttatctggtgcagctcaccgacgagagcacggcggccaagaatcgcctccatgccctggagagcacggaggagacgccgcgcttcttgcgcgaggatttacgtcgctcgatccgctcgctcgagggacgacttgagcgcattcgtgcgcaggcgatcgaactgatcgggtgcagcgagtcgctcaacgcggccttccaggccctgaacagcatggtcgggatgggcgacaagtcggccgtcgccgtgctgggcgaactctgcgtgctgccccgctccctgtcggggcgggcctgcaccagccatgccgggctcgacgtgcgccatcaccagtcgggcacgagcgtgaacaagcccgggcgcatctcgaagcacggcaacaagtacctcaggcgcgcgctctacatgccggcactgagtgccggcacccacgatccgcacgccgctgcgttcaagcagcggctgcaggcgcgaggcaagaagggcttgcagatcaacacggcgatcatgcgcaagatgctcaccgccgcctgggcgatagtcagagaccccacgccttacgacggagccagactctatgcgacgatagaaacgccttgacactcaacagagtgt

SEQ ID NO: 5573 - DNA, 1169 bp, unidentified
  source 1..1169: mol_type = unassigned DNA; note = element_88ebe55
  misc_feature 1..2: note = core
  misc_feature 3..215: note = LE
  misc_feature 216..1157: note = CDS
  misc_feature 1158..1169: note = RE
  misc_feature 13..224: note = bridgeRNA
cttgtcttatgaacttcttgcttcttcgtgagataaagaagagccggagaggacgaccatcctctgccggcgattgggtacggatcgtgagatgcgaggccgccatttttgcgaatgccgggccgagctagagtttgatcgcccccatcttttccaatcgtcctgaacggatacccgagttttaaggctcggatgacaaaaatgggagatgagaaatgatgacgaatattaccatcggcgcggacatctcgaaagagcatatcgatctgcacagcctgcctgacggaggaaccttgaaggttgccaatgaccgcaagggatttgcagctattgtccgatggattggcacaataggcgtggagcggattgtctatgaacccacaggcacctatcacaaggccttcgagcgcttcatgacgacacaaggggtgccgctctccaaggtcaatccccgctctgcccgacgttttgcagaggctaccggcagacttgccaagacagatacgatcgatgccgcaatgctggcccgttacggcacgcttcttgaaccgcgtctcctgcaggctagcgcgcaaatcaacaatgacctgaaagagttgcatgtggcgcggttggcgctcattaaggatgggaccgctgcaaagaacagagccaagaccctttccagcccgctcttgaaacgacagaacgccgacaggctccgccagatcgagcggcagatcaaggccgtggaccaggccatcctggcgcttattgcagaagacacgcttctgaaggccaggtttgatatccttgtctcgatccccggcgtgtcgcgcatcactgctttcacgcttctcatcgaaatgcccgaactcggcgagatggatgagaaagccgcggcggccctttgcggactggcacccatgagccggcagtccgggcgatggaccggacgcgcgttcattgctggtggaagggccatcgtccgccaggcactctacatccccgctctcgtcgcctgccgcttcaacccggacctcaaggccaaatacgaccagctcaaagccgccggaaaagaacccaaggtcgccatcaccgccatcatgccaaaggtcatcgtgctggcaaacgcactgatccggacaaatcgaaaatgggagccaaaacccacttgatcacaacggata

SEQ ID NO: 5574 - DNA, 1332 bp, unidentified
  source 1..1332: mol_type = unassigned DNA; note = element_88f2d22
  misc_feature 1..2: note = core
  misc_feature 3..420: note = LE
  misc_feature 421..1317: note = CDS
  misc_feature 1318..1332: note = RE
ccgacttatatctccggtagcggtttcgtggtcggggtagctgcccgtagcgtgccgcagcgggccgggtggtttgactcctgaggttcctgtcgccgcagcattctcgggctgactctgcgggggtatgtcgcgccacccggcctgcgttcgcggcgtgaccgaagagaggcgtgaccacaagtacgggcaaggtactggaagtcggattgtccgccgcggatccccacccgaacaggagagagggacccgttacccatggtcgttatcggtgtcgatccgcacaagagcacgcacaccgccaccgcggtggacccgagcacaaacatcgatctcggttcgatccggatcgaggccaccttggccgaataccgacggctgatcgcgtgggccaggcggtgaccgcaacggcagtgggcggtggagaacgccgacggactcggacgccatctggcccgatggctgatcgcacgtggtgaaacggtgctggatgtgccgaccaccgcgacggcgcgggtgcgggagttgtcccgcggcggccgacgcaagaacgaccggatcgacgctgccgcagcggcctgcgtcgccgcactccaaggtgaaggccgcctggtcgtgcccgacgagcactccgatgcgctacagatgctggacgtcagacgaaacaacctctccgccagcaggacccgcacagtcaaccagctgcacgcactgctgagggaactactggccggcggagccccgaccggcctgagtgcgaacaccgccgccgctgcgctgcgggggtgccgggcacagacgctctccggtcgggttcgcgtgggtctgtgcaaggatctcatcgctgatattcgacgcctcgaccggcagctggccaccaaccaggccgatatcgatcagttgctcgtcgagcacggcactcggttacggacaatcgacggtatcggtccggtgctggcggctcggctcatcggccgcaccggcctggcgacccgcttcgcgaccgcagccgcgtatgccacctacaacggaaccgcgcccgttgagatcgccagcgccgaccgtcggattcaccggctcagccgcgacggcgaccggcagctcaacgctgcgctccacaccatcgccatggttcaggtccgaatgccgggcagcgctgggcgtgcctactacgaccgcaaggtcgccgctggatcgtcacaccgtgccgccatgcgctgcctgaaacgacacctatccaacaccatctggcgaatcatgatcgccgacgaggctcacagacgtcgacatcctgccgactgttcctctgcagcttgacaaaatagagaggca

SEQ ID NO: 5575 - DNA, 1395 bp, unidentified
  source 1..1395: mol_type = unassigned DNA; note = element_8910bf4
  misc_feature 1..2: note = core
  misc_feature 3..78: note = LE
  misc_feature 79..1113: note = CDS
  misc_feature 1114..1395: note = RE
  misc_feature 1112..1382: note = bridgeRNA
tgttgaggtgcacggctcccaacggcatcgaatgttccagaatgagttcgttgaaatctcaatcgagggagaccgtccgtggaacagattatccgaattggtatggatacgtcaaagagcgtttttcaattgcatggcgtcaatgcccaagagcagccggtgcttcgcaggaaactatctcggagggatatggtaaaattctttgagaaggcttctccaaccaccgtcggaatcgaggcatgcggcggctcgcatcattgggcgaggctgttgcgctcccttggtcacgaggtaaagctcatcgcgccgcagttggcaaagccctatgtcaagcgcggcaagaatgatgcggcagacgccgaagctttgtgcgaggcaatgagccgcccaacaatgcgcttcgtgccggtgaagaccgccgaccagcaagctgctctcatgctggtcggtatgcgcgacagattaatcggttaccgaacacagcttgccaatatcattcgcggatttgcaatggagttcgggattgttgctgccaagggaatgtcccagatcgagccgctattggagcgcatcgcagccgatcccactttgccagaaatggcgcgcgagctttttgccatgcatacactggagtatcgcgatctgctggccgagattgcagtcgttgacgagaaactgatggcactgcatcgttctaatgaatgcagccgccgcttggcggaaattccaggtgtcggcccggtcggcgcgtcccttctcatgatgaaaacgcctgatcccaggatcttcaagtccgggcgcgattttgccgcttgggccggattgacgccaaaagatcactcgacggctggaaagacaagacacggcatcatcacccgtgctggcgacgagatgttgcggagcgtactggtcgtcggagcaacggctcttctccggcatgtccgaaccggtcgaagcaggaatgcttccccatggatcatcaaccttttgcagcgcaagagcccaaagctcgtagccgtggcgttggctaacaagatagctcgcatcgcctggaagcttatggttagcggcgagacataccggcagtcggaaggaaacccgcagccggtatgaaatccaggcgaaacacggtgagcaagataaagtgcaactgagttgagcctggttgtgaacttgcaagaagaaagcagatgatgtgatcgatcgatccgaggtgcgggatactccgttcgttccaatggccgtcaaggtcgtcgcattgttaggaactcgcgctgcggaaatcatcttggccagtggtcatgtgcgaccacacacaaaggccgcacatatggaagcaagcgatccgatcaaaatatctgcagaaaacacttgcaagcggaggccgtccacata

SEQ ID NO: 5576 - DNA, 1380 bp, unidentified
  source 1..1380: mol_type = unassigned DNA; note = element_89117b8
  misc_feature 1: note = core
  misc_feature 2..74: note = LE
  misc_feature 75..1118: note = CDS
  misc_feature 1119..1380: note = RE
  misc_feature 1150..1376: note = bridgeRNA
atgctgtaatggactctccccgcgccacagttctatacccagaaccgcggtgactgaacaaagggagaggcgcgatgaaacgaattgcggttgatctggccaagtccgtttaccaagttgccgagagtgtccgttccggccaggtggtgcagcgcaagcggctgaaccgagaggcgttcaggcgatatatacaggagcaaactgagccggtcgagtgggtgatggaggcttgcggcacggcccattactgggggcgcgtggcacaggcactgggccattcgataaagctgatccacccgcgctatgtacgcccgtatcgacgccgcaacaaaaccgaccgtaatgactgtgatgcgatgctggaggccgcgcgctgcaaggatatctatccggtgccggtgaaaacccatgagcaacaacaggtgcagcaactgcacgggctgcgcgaaacctggaagaaaagccgtacccagcggatcaacctgctgcgcggcatcctgcgcgaagcgggtatcgaagccccggtcgccaccgccgcgtttatccgtgcggcccacgagttggttgagcgcccagaagtcgcccccttgagccatcaactgcatatcgtccttgcggaaatcaacctgcacgaacagtgcgtggccgagtgtgagcagcaactcaaacgctggcacgccgacgatgaagtggtgcgcaaactcgatgaagtcagcggtattggcctgctgaccgccagcgccctgaaaaacgcagtcggcaagcccgagcgctttgccagtggtcgtcaactcagcgcctggctgggcctgacaccacgcgaattcagtagcggcgaccggcgcaagttgggtcacatcagccgacagggcaacgtctatgtgcgcaccttgttaatccacggctcgcgagcggccttgctggcagcacagcgctgtcaggctcgctcaccggaaaaactgacccaattgcaacgctgggccgtcgagacggcagcccgtatcggccacaacaaagcggctgtagccctggccaacaagttggtcaggatttgctgggccgtgtggtgccatgagcggcgtttcagtggtaactggcaaagcctaaagcccgcctgacggcggggtaatcagaagggagagatggttttcttgtggttgtggtgagcagcagcactgtcggaacaggcgagtcctgcagcggaataaggccgataacaatcatgatccgcgtgatcgattgaacgcttggcccccgctgcgcgaactacagagtggccagggcggtgagcccaaaacaggccggatatacgaatgcaaccgcgctgacgacaggtgcaaaagcaaagctttgctcactacttgtggggagagtccatat

SEQ ID NO: 5577 - DNA, 1434 bp, unidentified
  source 1..1434: mol_type = unassigned DNA; note = element_89177c0
  misc_feature 1..2: note = core
  misc_feature 3..83: note = LE
  misc_feature 84..1184: note = CDS
  misc_feature 1185..1434: note = RE
  misc_feature 1252..1373: note = bridgeRNA
taattgaatggactcgcccaagccgaggcgtctatgcgccacggtggcattcttaagaagccaacgacagcgagggcgaggccatgaaaaagcatacgacgatcaaccagtctttgtcagccgatgtgtcggcatgcaccacagttgcggtagatcttgccaaaagggtctttcaggtggctggggaggatgctctcggtcaggtgatattcgaggatcgaatcaagtcacgtgaggcctttcaggtatttcttcgtaagcttccagcgagcgtgacggtgttggtggaaaccgggcccggcgctcaggcatgggcgcggttgctgcaaacgcagggtaatcccgttcgcatcctgccggcccagctggttgccaatcatcgcagcggaccgaaaaatgatcgtaacgatgcgttagctatcttgcgcgcgggtcgcgattgcaagatctcagccgtaccgctcaagagtgcggcggcgctggcgatgcaggctctgcacagggcccggcagggatatgtacggcgacgcaccgcggtcagcaatcagatgcgcggcctactgctggaacatggtgtggccatggcgcagggcgaattagctatcagccagctcgtgcctcggatactggaagatgccactcagccgttgcccgatttgctgcgcgaactgatcgccgaactgctgggcgaatggagtcaactgggtgaacgcgtcaacgtgctgaccggtcggctggaaacggccgcgcaggaggacgagacggcgaagcggctgatgacggtgcgcggtgttggcccgatcatcgccacggcgctgttggccaagcaaaccgagcctgaacgcttcgccaacgcccgcttgttcgccgcctatttcgggctggtacccagccagcacagcactggcgagaaggtccggttgggtaagatgagcaagcatggcgatgcctacttgcgcagtctgacgatccagggtgcccatgccgttttaagacagctacgacctgattcacagcagccggacgaccaacgtctccagcgctggatctcccgtctgggtcgcaaggaggcggcggtgcgattggccaaccgcaacctgcgcatcctctgggtgctactgcaaaacgaccagacttatcgtcgccacccgggcaatggtcaggaggcggcgatgagtcactgataaccgagttctgccaccggggcgttaaaccgctccaacccatgctaagaacattgaccccaggtcagaccgtcgcggattgatgcctgagctcctactggcccttgaggccttactgtaatcggcataccgcgagcttacccaatgttggccagaagcagctcaacgcttcctcgaacaggccttatacatagatgcaaccgggtagcagtgttcaaaagcgggttgaatgtgggggcgagtccataca

SEQ ID NO: 5578 - DNA, 1431 bp, unidentified
  source 1..1431: mol_type = unassigned DNA; note = element_891bbc4
  misc_feature 1..2: note = core
  misc_feature 3..70: note = LE
  misc_feature 71..832: note = CDS
  misc_feature 833..1431: note = RE
  misc_feature 1209..1425: note = bridgeRNA
taatgggatggtccgccgcctttaccaagccagcagtttgggtataagaggtgaacggaggaggcatcccatggagctacacacgatcggtattgatctcggcaagacagtctttcatctggtagggcttaacctgcgcggcgaggttgtggtgcacaagaagttttcgcgcaagcaactgctgcacttcacggcgaacctgcaggtcaagttaattggtatggaggcctgcggagggtcccactttctagggcgggctctgagagagcagggtcacgaggtccggctgatgccggcgcagtatgtcaagccttacgtaaagactaacaagagcgactacattgacgccgaggcgattgctgaggcagtgggacggccgaagatgcgcttcgtaccaatcaagaccgatgagcaactggatctgcagtccctgcatcgggtacgggaacgttgggtgatgcgtcgcaccgcggtcatcaaccagattcgtggcttgctgctggaacgtggaatcacattgcgtcagggacgaggccatgtcgatgcggcattgcccgggatcctggaagacgctaacgccatgctctccggtgcattgcgcatgctgctggcgcaactgaaactggagctcgatcacttgcaaatgcggatcgacgaagccgatgccatcatcaagaaggttgctggcgagaacgaagcctgccggcggctggtagcgatccctggtatcggaccggtgacggcgactgccatcatcgccgcgatcggcaatggagcagccttcaaaaaggggcgagggttttccgcgtggctcggaatcgttccgggctaatataccactggtggtaagcaaaagctgctggggattagcaaacgcgggaactcttacttgcgaagactcttcgtgcaaggggcacgtgccgtcctgcaacagcgcgcgaagcaatcttccgctctgagtgcatggctggcccaactcacaacccgcacccacagtaacgtggccgcagttgccttagcgaataagttggcgcgcatggcctgggctgtgctcgctaagaatgaaccctatcggcccccaatgttggtcggcgcagctacggcatgacgggcctgcggatgacacctagctgaggccaggcttggaaatcgcattcgcgattccacatctacagaccagcggctactacggagttaatgattttctgccaggtctgctggcgaactatgagatgacacaacggtcgaacccggcgctctcgaaacctgtaaaccggaaaagcctttcaaggctgcattactaaataggacgagcgcgcagcgcattccatcaaggcccggagctttatgctccaacaaaggccgaatacatttgcgcagaccatcctgtcactttcatttttcgcttgcgacgtggcggcggaccataca

SEQ ID NO: 5579 - DNA, 1314 bp, unidentified
  source 1..1314: mol_type = unassigned DNA; note = element_8923514
  misc_feature 1..2: note = core
  misc_feature 3..67: note = LE
  misc_feature 68..1084: note = CDS
  misc_feature 1085..1314: note = RE
  misc_feature 1094..1300: note = bridgeRNA
taatgggatggacggctctcccaccccggagcatcgttgtgcaaccggcagtcgaaggagaggaatgatgaccatcgatgtacttggtattgatctggcgaagaatgtcttccagctgcatggcgttgatcgcaagggcaatgcgattttcaaacggcgggtcatgcgcgaccaactactttcggtgctggccgggattgagccctgcaccgtcgcgatcgaagcctgcacaggagcattttgctgggcccgccaatttgaagagttgggccacaacgtgaagatcgtgagtcctcaatatgtgaagccatttgtccgcaggcagaagaacgacggcaacgatgccgaggcgatctgtacggctgtgcgtcaaccccacattccgctggtgcctaagaaaagcgttgagcaacaggatatccaggctctacaccgcgcccgccagcgtcttgtgaaccaccgaacggccctggtcagccagatgcgcgggctgctgcttgatcgtggcattgcctttgccaagtcgattacccgggtgagacgcatgattccggagatactcgcacgcgccgactccggcctctcgactatggcccgtgagaccattgccgagctctgggatttcttctgcgatctcgaacgccgcatcgagcatttcgacaagaaaatcgaagccgtcttcaaatcgagcgagccctgtcagcgtgtcgccaggatcaaaggcgttgggcccaaaacggcaacagcgattgtcgcggcggtcggcgatggttcggacttcaggaatgggcgccacatggcggcctggcttggattagtaccgcgccagttctcgagcggtgataaggcggtgcttatgggcatctctaaacgaggaagccagcatttgcgcagcctattggttcacggcgcgcgtgccgtcgtgagaacggcacccaataaaaatgatcccatcagccaatgggccaaccagcttcgggagcgacgcgggttcaaccgcgcaacggttgccatcgccaacaagaatgcacggataatctgggccgtgcttcgaacgggcgatcaataccgcgccgccgcctgaagaaccgaaccagtttgcgagtagacggagaaatggactgcactgatcgagccgacgcgcgacgagcctgactattatcgaggcccttgaggcctaccagctgtagaggtgcgcgtgtgcggatttcccatttgggcgctctggacaaccagctgacgccggatagatgtttgcaactgatccacgcagaacgtttcaatgccgcttgcaaagggagagccgtccataga

SEQ ID NO: 5580 - DNA, 1566 bp, unidentified
  source 1..1566: mol_type = unassigned DNA; note = element_892f9ca
  misc_feature 1..2: note = core
  misc_feature 3..280: note = LE
  misc_feature 281..1444: note = CDS
  misc_feature 1445..1566: note = RE
  misc_feature 34..257: note = bridgeRNA
acgtataatccaattatcctcttttgagggtaatggattattcccctttctcccaatctcttgggctttattgaatactccattataataattacagcactgtggatctgtacctatttcattacggctttgactgttccgaggtgactcagaccacagcttttcgtctactactggtaattagtttgttaacgcatgacgtttgtatttacgtgattacgcagccgaattctctgtggaagacagcagtgctaaatatcttataaggaggcttatttctatgaccatgtactttgttggaatcgatatttccaagtacaagcacgactgttgcatcatatcagcagccaaccagaaagttgtttcaaagtttactttcaaaaatgataagtccggttttgaacaactaaattcactctccactcctgaggatataaaaatagggtttgaatcaactgcccattatgccctcaatcttgaactcttccttgaaaatgccaaccacagcttcatggaaattaatccagttttaatcaaggatttcaagaagtctcagactctccgacgcaccaaaaccgattctatcgactgcgagttaatagcccgttggttaatgactgttgaatacaaaccccattcaaaaggattttaccacgcttattccttaaagtcattaactcgtttacgggacaggctggttcgccagcgttctttttatcttgttaaaattacaaacgttcttgaccacacctttccagagttcaaacctttcttccatgagcgtttatctaaaactgccttatacctccttgaaaactacggctccgctgaaaagatagcaagaatgaattccgcatcctatgagaaacttcgatccatttccagaggaaaattttctccccagcagtttattcgcttgaaagaacttgccgctaatacagtcggtgtaaacaactctatcttcgatgtagaacttaatagtctgctgaccttatacaagtcccttgtagatgaaatcaaaacattagaaagcgaaatcaacagactggtagatgaagtgcatccacactatatgtccattccaggtatcggtcctatatccgctgctatcatttacgctgaatatggtgatatttcaaacttctccagtcctaaccagatgcttgcttttgccggaatagaacccagcgtacatgagtcaggaactgaagcatataatggcaagatggtaaaacacggttcctcacagctacgatatgtgcttatcaactgctgtctgccgttgatacggtttgatgtgacatttgctacatactatgccagaaaacgttcagagaacaagcctcaccgggttgctatcactcatgtagctaagaagcttgtcagagtcatctatgcattggagagtcaagatatcgactttgacccaaagaaacttcgatgagctcatgttcataagttaacaccctccatctgaaatacgctattttcagatggtttattaaggttacccttttttataaaccataaaattccaaaaaaacacttgactgtttatagtttgtc

SEQ ID NO: 5581 - DNA, 1742 bp, unidentified
  source 1..1742: mol_type = unassigned DNA; note = element_893e29f
  misc_feature 1: note = core
  misc_feature 2..283: note = LE
  misc_feature 284..1519: note = CDS
  misc_feature 1520..1742: note = RE
  misc_feature 13..303: note = bridgeRNA
cctgttactatgtatttgcccccgagttcatggcagccagccaaaggccggggacatctcgttgcctaagctgctagaatgagagcgcaatggtctgaccttgacccccaagggctgttacgcccgtcgaaaagtcagtcagccatcctctcattcgcagcgttcgatttgtgcaggtagagccatcggggaaccgatacgttcgcgtcagcaaacagatggaatcggcaatgggagaagatggattcgtccattgcaaatctattgacaggagtgagccttcatgaacgcaatcggaatcgacgtttccaagggaaagagcatgatttctgtactccgtccgctgggggtaaccgtggctcaacctttcgaggttgctcacacagcgcttgcgctaaacaagctggccgattatatcggcagcttggacggtgagagcaaggtcatcatggagcatacgggccgttattacgaacctatcgccaacgtcatccatgaacggggtctgttcgtcagcgcggtcaacccgctactaattcgggagtatggcggcaattctctgcgccgggtcaagacagacaaggccgatgcccggaagatcgccaaatacgggcttgacaattgggctgagctgcgcgaatatactcccatggatgcaattcgctacgaactcaagacattgaaccgacagttccagttggcttccaagaacagaactgcctgctccaacaatttggtcgcccttatggatcagtcctatcccggcgttcgagggtggtttgacagccccgtgcgcaaggatggcagccagaagtggatagacttcgccatgaccttttggcacatggactgcgtgcgctgtgccagtcaagccgccttcgtggagcgataccgcaagtggtgtaaacgcaacggttacaacttcgacgcggtcaaagccgagcggattcaccgggaaacaaaggatatggttgcgctggttcccaaatctgacaccacgaagctgctggttcaggaaaacgcaacacagttgacgagcatttcccgcatgggggaagttctccgagccgagatgaaccgtttggctgcccaactgccggaatatccggtggtgatgggcatgtatggcgttggggaatcgctggggccgcagctcatggcagagattggggacatccggcgttttgcggggaagcaatcgctggttgcctttgctggtgtagaccctatgcccaatcagtcgggtgcgaaagacatccgcagcaaccgctcctccaagcgtggttcgccttacctgcgcaagacgctgttcatcattatgaccgtcctgttgcagaaagctcccgcggacgtttccgtctaccaatttcttgaccgcaaacgcgcggagggaaaaccctactatgttttcatgactgccggagccaacaagtttcttcgcgtctactatggcaaggttcgtgactatcccgcttcgctgaacacggcttgctctccctcgtctgtcgatccggagtgattgacagaggttgccttgcaacctcttggccgctttgaagcgctggcggcatggcctgttaaggacgccgtaggcgcggcgttagccgtttatccttgactgggcatgacggctgtgctacttatacctcatggtcagcgtttctgcggtggcctgtttgttgatcaagcttcctcgtctcctgtcgtcaagctactttggggcttgactttttatttgcagg

SEQ ID NO: 5582 - DNA, 1364 bp, unidentified
  source 1..1364: mol_type = unassigned DNA; note = element_894450c
  misc_feature 1: note = core
  misc_feature 2..304: note = LE
  misc_feature 305..1105: note = CDS
  misc_feature 1106..1364: note = RE
  misc_feature 1126..1316: note = bridgeRNA
gaatggaagggacttcccctgattatgaacctgattaactcttgtgcaatcatgggataaatatcactccggagggattcgttatgaccatcactactgtcggtatcgatcttgctaaaaacgtgttcgctgttcactgcgttgatcagaatggtaaaacggttctggttaagcccaaagtatcgcgtgctgcacttcctgagctgattgcagtttacctccctgtgttatcgggatggaggcatgctccggggcgcactactgggcgaggctgtttcgagagtatggtcatgaaccgcgcctgatggctgcaaagtttgtatcgccttaccacatggccggtaaatcaggaaagaatgatgctgccgatgctcaggctatctgtgaggctgtccgtcgtccgcatatgcggtttgtgccagtgaaggacgaaagccagcaggctatgcagtgtttacatcgtacccgacagggttttatcgaagagaaaacagcaacgtataatcgcctgagaggattgatctctgaatttggcgtcatcgccccgcagagtactgatgccttacgccgcatggtttctgagcagaagaattctttaccgttccaggttcagcaatgtattgatgatttgctggagcacgttgatcgcattgaagccaacattgctgactatgaccgaattttgtcccgcatggccaaaacagatcaccgcagtcagcgactgatggagctgaagggagttggccccacaacggcctgtgcgctggtcgccagtatcggtaatgcacatgattttaagaatgggcgtcaactggccgcctggctggggctcacgccttcacagtacagcagcggcggaaaatcaaagcttggcaggataacgaaagctggcgattcgtatctgcgaacactgctggttcagggggcccgttcagttctgattggcgctgataaaaggactgattctttcagtcgttgggtttgtacgctggttgaacgcagaggatactggcgtgctgttgttgccatcgccgccaaaaacgcaaggctgtgctgggcatcattgcattacggtgatgatttccggctgtactcagccagctaaagcactaagtagtataaccatctgacctgcaactcgttgatgataaagggttagaccccgtgaggcctatctggctattgtacaggatatacgtatccgcttaacgaacaagaacctcacgcgcgtctttcatcagggcccgaatcgatgacgattcatcatggccgtttatagtaccgcagtctctcccctttatttttactgaagagcagacagaaaccttgaataccgacgttgacatgccggggaagcccttata

SEQ ID NO: 5583 - DNA, 1524 bp, unidentified
  source 1..1524: mol_type = unassigned DNA; note = element_8945871
  misc_feature 1..3: note = core
  misc_feature 4..246: note = LE
  misc_feature 247..1275: note = CDS
  misc_feature 1276..1524: note = RE
  misc_feature 3..220: note = bridgeRNA
cttatattatatttagcgcagttagctactgccaaagcccaagtggtatacttggaataagccactgtggattagttcatttcctccaatcgcttgacgatttccgaaaggctctaaccacagctttttgtttcaattggtaatgagtttgataacgcatagacgttttatctcgtctaaggtaacaaggcaaaaagttcgtggataaccaagtagacttgaaatactacatctggaggtactcccatgccttatgtgggcattgatgtcgctaaaaataaacacgatgttacagccttgaatgttcaaggaaaaactgttcttaaaccactcactttttcaaataataaagctggttttgaactcttagatctgtctcttcgacagctcaaccaagactgtctcatcgctcttgaagatactggacattatgcctttaatctactgaacttcctgcatgaacaaggatataaagtttacacctacaatcctttgctcatcaagaaatttgccaaatcattatcacttcgcaagactaaaacggataagaaagacgctcatggcatcgctcttaaacttctttctgaccccaatcgtgaacaatttcaacacgataatcggcaagtagaactaaaaatactggctagacatattcatcgtctcaagaaaaaacagtctgattggaaagtacaatacactcgttgtcttgatatcatctttcctgagttggataaaatcgttggaaagcattcagaatatacctaccaactcttgacacgctaccctaatcctcagaaaaggcttgaggcaggatttgataagctgatagaaattaagcgattgaccgcttctaaaattcaggatatcctctcagtcgcacctcgttctatcggaacaacatctcctgctcgtgaattcgaaatcatcgaaatcatcaaacattacaagaggctcattgacaaggcggaaacatgtgtcaatgacttgatggctgagttcaactcgatcataacgacggttactgggattgggggtcgtttaggggcggtcattttagccgagattcgaaatattcatgcctttgataatcctgctcaattacaagctttcgctggactggattcttctatttatcagtcaggtcagattgatttagctggaagaatgatcaaacggggttcccctcatctgcggtgggcactcatacaagctgccaaagcatgcgctcgcttttcacctgcttttaaggcctatcttaagactaagttagaataaggaaaacattacaatgtagccatcatccaccttgcaaaaaaacttatccgaaccctgttttatatcctaaaaaagagctgccatttgacgaacaaaaagtgatgtaatttctgaaattaacacaggattacctttgaaaaaatggactttttcaagggctttttgccgtgctctaaaatcatcgccaaatcatcaaattgaaagtaagaaatagtttagataaaactattgacttttcttatagtttgt

SEQ ID NO: 5584 - DNA, 1190 bp, unidentified
  source 1..1190: mol_type = unassigned DNA; note = element_89540db
  misc_feature 1..2: note = core
  misc_feature 3..190: note = LE
  misc_feature 191..1168: note = CDS
  misc_feature 1169..1190: note = RE
  misc_feature 13..199: note = bridgeRNA
cttgtgtctctccacgggttgatggttagctaccatcatcctatcagcccggtggcaacccgagccgctcctgaggtccgtgaacctgtgttgtagatcggaccaccgggctgtttctctcaaaacttgaacggtatccaagccacttccggttggaagagaggctgcacagacaaggcaaggtggagagatggcttacatcggcatcgacgttagtaagagcaagctggacctatgctggctgcgtgaaaacggcaaagtgaagaccaaggtcttcaccaaccaccccaagcactttcccgcattgatcgactggctgacccgccaaaccggtgagcaagcccgggatttgcgcgtgtatctggaagccacgggtatttaccacgagccggtggccgaatggctgcacgaagtcggtgtccaggtccatgtcgtgaaccccgcccaggtccggcattacggccatgcgttgggccactcaggcaagacggacaagaaggacagccagcttctggcgcgctacggcctcgaccggcagccaccccggtggcaaccggaaccggcggcgattcggcggttacggcgcctcgccggtcgtctggagactgtccagcaagacatccagcgggaagagaatcggcgagagaaagcgatgttcagccgggatacggagacggtgtcatcgatcgatcaggttctgctggccctacagggcgaggcgaaacggctgcgcgaagagatcaaagaccatatcgacggcgatggtgacctcaaacgcgaccaggcgctgcttgagagcatccccggaatcggtgaagtcacctcggtccatctgatggttctgttgcgaggcaagacgttccgcagcgctcgccaggcggcggcgttcgtggggctggtgccatgcgaatggacatcgggcagctcggtgcgaggtcgaccgcgtctaaccaagaaaggctcgccggcgatgcgccgacggctttacatggcggcgctgaccgcaagccgctacaacccggtggttcaagggttctacactcggttgcggcaggcgggaaaaacgcccatgtccgcactgactgcggcaatgcgcaagctgatgcacatcgccttcggcgtgctgcatcggcaaaccccattccagacccaacccgctgggggttgagtccggataggagagacggtat

SEQ ID NO: 5585 - DNA, 1517 bp, unidentified
  source 1..1517: mol_type = unassigned DNA; note = element_8955377
  misc_feature 1..3: note = core
  misc_feature 4..282: note = LE
  misc_feature 283..1461: note = CDS
  misc_feature 1462..1517: note = RE
  misc_feature 13..263: note = bridgeRNA
cttgtatgatatagtcaggttttataggagtaagaaacacttctataggacttgctgacaagaatcagacgtgagataatgtcagcagagggcggagaggcgtcggaggtcctccatgagcgcaaggctcgaaagtaagactgacgcctccgcccggtgaacaggctacgaataagttggatgaagtacgcacatgcgcagcttcggatttcgcacaaggcagtggcgttcatcggtacggaggaaaactcctcgccccaaaggcgaaagcgagtgaacgccatgttttatctgggaatcgacatcggcaagcgcaaccatgtggcaaccatgctggatgatggcaagaaggcggtattccgcgctttctcgttcagcaacagcaccgagggcggagaagcgctgcttgcgcagatcgtgaaacatgcccccgatgcgacgcaggtcagcatcggtttggaagccaccgggcattactggttagcactgtattccttcctgtctgaccggggctatatgattcatgtcattaacccgacccagaccgatggctggagcaagggaattgagatccgtaagcgcaagaccgacaagattgattccgagctcattgccgaactaatccactatggcgacttttcgagtacccagttggcggatgaaagcatccagtcgcttcggacgctcacacgttttcgcagctacctggtggattccatcgctgacctgaagcgcaaggtgatctgcgtgctcgatcaggtgtttcctgagtacgaaacgctgttttccgacgtgttcggcgcaactgcacgggagctcctcctgaaatactcgtcgcccgacgagctggagcagctgtccgttgagaagctcacacaggtactggagcaactcagccgcaagaaatgtagcacggccaaggcggaaaaggtgctgaaagccgcgaagcattcctttggggtgacgcattgccgagacacctttattttccagctccgcgctctgctgaatcagatgaacttcatcgagcagcaggtgacggatacggaggcggagatcgatgtgctcatggagcagctgcagtcacccatcacgaccattccagggatcggcccggtgctgggtgcggtcattctgggcgagattggcgatattcatcgctttgagtccccttccaagctggtagcctacgcagggatcgacgcttccgtttcccaatctggcgactttgagggaactcagatgcacatgagcaagcgcggctctccctatttgcgcagagccctctttatggctgcccgcagtgcggtcaactctgatgctcagctgggtgcgttttttgagaaaaagcattccgaaggcaaacattactctgcctgcatcggtgcggtttcccgcaagctatgccacatcattcacgccatcctttcccaaaaccgtcctttctctcccaagacttaattccacaacttttttctgctcaacccctcatgaggggttgacttttcatagttggt

SEQ ID NO: 5586 - DNA, 1439 bp, unidentified
  source 1..1439: mol_type = unassigned DNA; note = element_8956365
  misc_feature 1..2: note = core
  misc_feature 3..84: note = LE
  misc_feature 85..1188: note = CDS
  misc_feature 1189..1439: note = RE
  misc_feature 1258..1378: note = bridgeRNA
taattggatggactcgcccaagccgaggcgtctgtagcgccacggtggcattcttaagaagccaacgacagcgagggcgagtccatgaaaaagcatacgaccaaaagtaactccctgtcttcagccgacgtgtcggcttgttcgacagtggctgtagatcttgccaagaacgtgttccagatagccggagaagacgccctgggtcaggtcatttacgaaaagcggatcaagtcacgtgaagcctttgtggcctttttacaaaaactgccggcaggcgtgacggtgctgatggagaccggccctggcgcacaggcttgggcgcggctgttgcaagcacagggcaatcaggcgcgaattttaccggcgcaacatgtcgccaaacatcgtagcggtgccaaaaatgatcgcaacgatgtgctggcaatattgcgttcaggacgagatgtaaacattgcgccagtgcccgtcaaaagcaccgcacaactggccatgcaggctctgcatcgtgctcgacaggggtatgtaaggcggcgcactgcaatgggtaatcagatacgcgggctgttgctggaacagggcattgccatggcgcaaggggcggtgaccctcagccgaaatgtcccacgtatattggaagatgccatccagccattgccggatatgttgcgcgagctgattgatgaaatgctgggcgaatggagccatctgggtgagcgcatcgatgtactgacggggcgcctggaagcagcagcgcgcgaagatgagacagcaaagcgtctgatgacagtgcgcggcatcggcccaatcatcgccacggccttgctggccaaacagactgagcctgagcgtttcgccaatgcccgaatgtttgcagcctactttggcacggtgcccgagcagcacagcagcgggcaaaaaatccgattgggaggaatttgcagacgcggagatggctatattcgcagcctgtcgattcaaggagcgcacgccgtgttaaggcaggtgaagcctgattcggagcatcccgatgatcgccggctacgacgctggctaagtcagcatggtcaaaaaggagcggccgtgaggttggccaatagaaacctgcgcatcgtctgggtgctgctgcaaaacgatcagacctatcgtcgccagcctgcaggttgccaggaggcgacgatgaatcattaatcaacagagttctgccaccggggtgctgagtcacctcaaccgctgctgaagaacattgaccccaggtcagaccgtcgcggatagatgcctgcggtcctactggccctttgaggccttaacgtaatcggcataccgcgagctcacccaatgttggccagaagccgtaacgcttcctcgaacaggccttatacatagaggcaaccgggtagcagtgttcaaaagcaggttgaaagtgggggcgagtccataca

SEQ ID NO: 5587 - DNA, 1180 bp, unidentified
  source 1..1180: mol_type = unassigned DNA; note = element_8958388
  misc_feature 1..2: note = core
  misc_feature 3..166: note = LE
  misc_feature 167..1165: note = CDS
  misc_feature 1166..1180: note = RE
  misc_feature 3..191: note = bridgeRNA
cttgtatggttaagttgtcggggtggagggacatcctgaacgatcggccaatgccggaccgacaccgcgagaactctcccgccccacccatcaccgtcgataaggaactgagcggcgccgttcatcgaaccgcgaccgccgatctgaacgcaagtcaacgagccggatggcatacaccccgacgttactcattgtgcgctttggaggtgctcccatgcaaacgactgtgctttatatcggtgctgatgttgccaaggctgagctggtcatcagcgtagcgggccaacggccctgcatcattgccaacacggccactggcattacccgttggttaaagacagtgtcagaacacgcgctaattgccatggagtcaacgggcaattaccacgccttactggcccagttggcttatctgcatggcttgacggtctatatcttaaacgcgcgtgatgtcttttactatgcacgagccttaggcagccgggccaagaccgataatattgatgcagaggtcattgtccgctacctgcaagagcatcaatccagcctgcaagcttggcaaccgctcacccccgagcaacaacagttgcgtcaactgttgtctcgtcgcgctcaagtgatcactcaccagagcgctttacgccaggcctttaccgacgtggatctatcaggtgtcgatacccaagcgttgcaacatggatttgatgttgtgctggcctcaatggatcaacaaatacagcatttgattgcgaacgacccgcatctcgaacagggatatcaacgtttacgtagtgtgagtggcatcggtcaacagacagcggccttgttgaccgaactgctcaatcgtattccctttgccaatgcggatgccttagtcgcgtatagcgggctcgatccccgacccaacgactcagggaccaagcgaggccgtcgtcgtatcagcaagcgtgggccggctttgctgcgccgacaactgtatttggcagcgatgtcggcctgccgcagtgcggcatgtaaaccgttgtatgaagcgtatcgtgcccgaggcctggcgggcacagaatcgattgtgattctggctcgtaagttgctgcgcattgcatatgccgtgtggaaaagtggacaagcctttgacccgtccaaactatcgcctaaaacagcttgacccaaaccatagaac

SEQ ID NO: 5588 - DNA, 1390 bp, unidentified
  source 1..1390: mol_type = unassigned DNA; note = element_895c711
  misc_feature 1..3: note = core
  misc_feature 4..127: note = LE
  misc_feature 128..1153: note = CDS
  misc_feature 1154..1390: note = RE
  misc_feature 1172..1350: note = bridgeRNA
acatggggtaatcgcgggagcgacgcgccctggaaccgatcatagccttggagggtggctgttccccgataagatgaaatacgggctcacgactggacgccgggcccagcatcaacggagaacagccatggaagaacatatcggtctcgacgtgtcgatgaaagagacggcagtgtcgatccgccgtgaaggcgaacggatctggcgcgggaagtgcgcatctgatcccaggatcattgccgagcttgtccgcaagcgggcgccggccgcaaagcgcgtcgtgttcgaaaccggcccgctgtcagtttggttctatcatgcgctgcgcgccgagggattgccagccatctgcatcgatgcgcgccatgccaaagccgctctcgatatggcggcgaacaagacggatgcgaatgacgccgatggtttggcgcgtcttgctgaagcaggattctttcgcgaggtgcgcgtgaaaggcttcgacagtatgttgacccgcacgctcgtggcagcacgcactcggctggtccggatcaccgtcgagctttccaaccagatccgagggatcatgaaaacgttcggcttgctcgttcccgccggtaagggaactacattcgaaaagaatgtccggagccttcttatcgatcagagcgagcttgctcctgtcgtcctaccgatggtggaagcctggcgcagcattcgcatccgtgccgccgagcttgggcgccagcttgtcgcagatgcacgtcaaagccaagcatgccgcatactcatgtcgatccccggcatcggcgccattaccgcaacctctttcgccactgccattgaagatccgggcaacttcaagaagtcccgctctgttgccgcttggatcggcctgacaactcgccgctaccaatcgggagaagtcgattatgacggccatatatcccgacgcggcgatcgacatttgcggggacttctctatgaggctgcggcggtcatcctgacacgcagcccgatcgacagcagcctgcgcacgtggggcctcaagctccgggagagggttggcttcaaacgagctgccgtggctgtggcgcgcaaactggcggtgataatgcattcgatgctcaagaccggtgagttctttgatcgaaatgcaggcgccacagcatgaaatcttgcgaatagcgttcaggatctgagcgcctgagacgtccctgccgggacgtgagccgagccattccgctgatggggttgcaccgctgtctcagcaaagtgcgtcgtccacattgaaggctcgtccgcggagctccatcatgcggcgactgatgtcgaccgcgaagacaaccatgcacccggcagcgtcgtctcgacgcaattacatgcttgacgtcccagcggcgattagaca

SEQ ID NO: 5589 - DNA, 1353 bp, unidentified
  source 1..1353: mol_type = unassigned DNA; note = element_895d037
  misc_feature 1..2: note = core
  misc_feature 3: note = LE
  misc_feature 4..1077: note = CDS
  misc_feature 1078..1353: note = RE
  misc_feature 1116..1351: note = bridgeRNA
ttaatgagatggtcacccccaccctgtgagcggtacgctgacagggtgtttttctttctgaaggggatcatcatgcaaaacgttacgctcatcggtatcgacctcggcaagcattcgttccatgtccacgctcaggataaaagcggccatgcattgctacgtaagaagttttctcgcacccagttaaccgcctttctttccacctgttctgccgccaccgttgtgatggaatcctgcgccggtgcgcactttatggcccgacacatcagccaactcggccatcaggttaaactcatttcaccgcagtttgttcggccttttgttaaaagtaacaagaatgattttattgatgcagaagctatctgtgaagcggcatcgcggccctctatgcgcttcgttacgccacgaacggaagaccagcaggcgatgtctgcattgcatcgcgttcgtgatgccctcgtcagggagcgcgtcaaagccactaaccagatgcacgctttcctgctggagttcgggataagtatgccgcgcggcattgccgttatccggcgtctgaccgcggtgcttgaagaacatcaacttcccccttatttaacccgcctgcttctccggcttcatcagcattattcttatctcagcgaacagattgaagggctcgaacaggagctaaaaacgcacatggcggatgatgataccgcgcagcgtttgctgaccattcccggcgtcggaatgataacggcgagtcttctggcaacgaagctgggcgatgggaaaaactacgccagcagtcgggactttgccgcttcgacgggattggtcccacgacagtacagcacgggcggaaaaacgacgctgatggggataagtaagcggggggataaaaatatgcgacggctgttagtccagtgcgcacgggtttttatgcagcggctcgagcataatccggggcgactggctgagtgggtgaaggtgcagcagacgcggcatcactcgaacgtagtggcatgcggactagccaataaactggcccgaatagcctgggcagtgacggtacaccgcaccgcctttagtcaataaaagagctaacagttagcggctgttagctctgaggtattaccgggttaccatctggttttgcgaagactgattattgatgacatgaacggcacagcgacctgcggatgaacctgacataaaaaatggctctttgaagccgccggatttttaaggttcagcaggtgcggacttcatcgtggcgcgggcaacgcagagttacccatcagacgccgtatagatttaagcaagcccatcataaatcaaaatcggtgttgcaaaaacgggggtgaccataga

SEQ ID NO: 5590 - DNA, 1419 bp, unidentified
  source 1..1419: mol_type = unassigned DNA; note = element_8960463
  misc_feature 1: note = core
  misc_feature 2..91: note = LE
  misc_feature 92..1138: note = CDS
  misc_feature 1139..1419: note = RE
  misc_feature 1187..1411: note = bridgeRNA
taatggcatggacgcccctgcttttaacgggcatcagttgtgccaaagtggaagtgtcaagcaaccacttaatccagcaggagcgtccacgatgaacattacgacggttggcctcgatttagcaaagttgcattttcaggtacatggggttgatgcgcgaggcaaagtaacattgcgaaaacagttgaagcgatcgcaaggtattacgtttttcgcgcaacttacgccttgtcttgtcgggatggaagcctgcggtggagcgcattactgggcgcgcaaactctccggagtgggacacacggtaaagcttatcgccccacaattcgtcaagccgtatgtgaagaccaataaaaacgatgccgccgatgccgaggcgatctgcgaagcagtcggccgacctaacatgcgatttgtaccgatcaagaataccgaacaacaagccttgctcggattgcaccgcgcccgccagggattcgtcgctatgcgcaccgcacaagcaaatcaggtccgcggattactgatcgagtttgggttagtgattcccttaggcatccgctacatcgaacaaaagatgccggaatttatcgaggatgcggagaacgggttgtcgggtgcaagccgatcgctttttgggcgactgttgggaaactttcgccagctcgatcgccaggtcaaggagctggagcgagagatcaacgcgtggcaccgagaagatgcggcgagccggcgcatagaggcgatcccggggattgggcctctcacagcaagcgcgttagtggcgagcgtcggcgatgcaaaactcttccacaatgggcgacagtttgccgcttggctcggcctcgtgccccgccaggattcctccgggggaaagacaaccctgctcggcatcagtaaacgcggagatacgtatttgcgcactctgttgattcacggcgcccgctctgttcttctaaacttgaagcgtcatccggatcgggcgagcggatggctggggcgcatcgcggataggcgcaatcccaatattgctgccgttgcgttggcgaacaaaaacgcgcgtgtcgtttgggcactgctcgctcatggccgcgactaccaggccaacttcagttcagctatgcctctcgccacaggcgcgtgaacctttaccagccaccatcgaaagcgggcagataaaccatttctcaccaccgattgcacaggcgtttttcaaagtgatggcatcacaggtaagaccggggttgaccaaacctagatttaacacgggacttcaaaagtccggggcactgatcaggcgtcaaccagcgtattccatcagggcccgcgacttcgcgtcgcatacacaggccggatgtatggcagcaatctattcctgtgaatcaaaaccgaaagaatcgcttggcaagaaggggcgtccatgta

SEQ ID NO: 5591 - DNA, 1587 bp, unidentified
  source 1..1587: mol_type = unassigned DNA; note = element_8967f9e
  misc_feature 1..4: note = core
  misc_feature 5..291: note = LE
  misc_feature 292..1476: note = CDS
  misc_feature 1477..1587: note = RE
  misc_feature 45..260: note = bridgeRNA
ctgctatataataacgtcatatcacaaatacatattttgtgataataatccctggtatgaacatcacaaaacactgtgatgatataatcattcatacaggcagaggttctctatttaaccttgcggcttcatccgctggacgcagtctgagacctctttcttacagtaattcatttatgagcaggatgcaggttgtttcatatttctctgctgatttcaaagccggctatgaactgtaagtttttgagggactgtctgacttatttagttatttagaaagtaggtgtagttatgttttttgttggtattgatattgcaaaacgtaagcatgaagctgttgtcattgatgaaaaaggacgtattgtgcaaaaaccttttcattttcctaattctcttagcggctataacagcctgatcagcttagtaaaaagaatcacttccactcgtaaagatgttgtttttggcatggaatccacaagtcactactggcttgcactatactcccatttgataaaagatggatatactacacatgtgatcaatccaattcagtctgatgcttttcgtggactttttattcgacaggcaaaaacagatcccattgatgcagttatcattgcagaagtgatccgatttggaaagtattcttccacacattttccacaacataagatattagctttaagagaaatgtgtagaaaccgtttgtatatggtggattctgtatctgatttgaagcgaaaaataaccgcattgatcgatcaggtttttcctgaatatgaggaaattttttctgatatctttcttgtttcctcaattgaagttttatatagatatccaacccctaaaaagctgctgcatattcggaaagacacattaaccaatcttttaatcaaatgcagtggtggacattttggttctgcaaaagcagatgagattatggatgctgccaaaaactcatttggcattgatgatccttatgatgtttatgctaatttgataaaaacctatcttaagcagataaaatttatccaaaaaaacatctctgaaatggatcaaaagatcactgaaatcatggacgaaattggttctccaattacttctattcctggtataggtgtcacccttggtgccgttattttatctgaaatcggtgatatttccagatttaaatctgctgataaactggctgcctttgctggcattgatccgtctataaaacaatccggcgattattccagtattagaaatcatatgtccaaacgaggcagtccttatctcaggagagccctttggatggcttgcacaccagcagttcagtttgatccaatgtttcatgcatactatttgaaaaaacgttctgaaggtaaaagtcatatgaaaacaatggggcatgttgccaaaaaaatgatctgcgtcatttatgccgttcttcgagataataaagaatatcagcccattcttactgttgcataatatcttttcatacccattcaatcaaaagagagcctatatggcttttcttttgatgttcatttttcgtgaatttatttttttgtaaatactatattgacaaatatagcagga

SEQ ID NO: 5592 - DNA, 1353 bp, unidentified
  source 1..1353: mol_type = unassigned DNA; note = element_896caf6
  misc_feature 1..3: note = core
  misc_feature 4..121: note = LE
  misc_feature 122..1081: note = CDS
  misc_feature 1082..1353: note = RE
  misc_feature 1106..1305: note = bridgeRNA
agatgggatattcggcttgggcccatccttagagggtgggtgtcgaggtgctgcgcttcgagctgatgatagaacgtggtctgtttggaacagccgcaagcatcaggaaaggaagctcagcatgaaacattatgccggattggacgtctcggtgaaagagacctcgatatgcatcgtgaacgaaacgggcgtgatctgccgcgagatcaaggtcgccagccacccggaagatctggtccaggccttgaagaatcctgaatggcggctggtccggatcgggctcgaagccggcccgttgtcgcaatggctgttcagcggattggcggaggcgggcttgccggcgatctgcatagagacccgacatgcgaaagcattcctgaaagctcagatgaacaagaccgaccgcaacgatgcacgcggcatcgcacagatgacgcgggtcaatctgttccggcccgtgcatgtcaagacgctgacgagccagcatcgtcgcgccccgctgaccgcccgcaagctgctgcaggaaaaagcgatcgccatcgagaacgacattcgcggtctgttgcgcaacttcgggctcaaggtcggcatcgttggaacggttgggttcgacgatcacatccgggagcttgtcgatggcatgccggacctcggcgagatcatgaagccattgctggcggcgcggcaaaagctgcgggagacattcatgggagctccaccgcaagctgctatcagcaccatcgatgttccgctgcgcttcaggaactcccgcgccgtcggtccagcgttggggttgacccctgtactcaatcaatcgggggaaagctatcgcgtcggccgcgtgtccctgtgtggcgacggcatgatgcgggccctgctttacgaagcagcccaggtcatgttgagccgggtgaggaaatggtcctggctgaaagcctgggcgatgaacgtcgcaaagcgtcgcggacggcagaaagctatcgttgcgctcgcacgccggctggctgtgatcatgcaccgcatgtggagcgacggcaccgaattccgctggacaagggaacgcatgcctgcggctatctgaacagactgccgggaaggagccgataaagttccgccgccggtggaaagacgtccttcgcgggacgatggatgaggtgagttcgcttgggctcttgtgccgatcgcagcatcgcgatcaggacgcgcgtcagattgggccgcctcattctactgatcccatgatgggagggccaagcaaccgatcccgaagagaagcaaggacccgcgaaagacgtcaatcaccagcagagcggaaagctcgaaagcgcttgacctcaacacgccgaatagaga

SEQ ID NO: 5593 - DNA, 1641 bp, unidentified
  source 1..1641: mol_type = unassigned DNA; note = element_896fa49
  misc_feature 1: note = core
  misc_feature 2..302: note = LE
  misc_feature 303..1478: note = CDS
  misc_feature 1479..1641: note = RE
tggtatatataaattagctcatccagctgagttaaatctatatacatctcctttctcttccggcttagtatcggcccggaaaccgagtagaattgagattgtgaatgcgtacttgtatctcatcattttgtagctttgactacgtgaaggattatctggccgcttcgttgtatggaaactgtaattagttagatgagcccttcttttattgaagtgagttcacattttgaaccatattctctgatacttatgaaacggcggtactggtattcgtcacttatatttttgaaaggggtgataccatgattaacatcggtattgatgtcggtaaattcaagcattgtgcttctgccattgatgacaagaccggcgagattcttataaaaccttttttcttcaataacgatcagaaaggctttaatcttttctattccaaaaccaaacagtatattcatagaaaacattccgttggtatggaagacactggtcattacatgatcaatcttacagattttcttttggataaaaagttcactgttagatttatcaatcccaggtctacctgccttagacgtaaagaacttggtatgtctgccaagaacgatcgtaaagattctatcctcattgcagaaatgctcagtgagaaaaaattctggagatctgtaactcgtataacgcaagaaactgataagcttcgtgaaattacacgtctgtatcatcagttacaggaacagcagaatgaagatatgaatcgtcttcagcgtgctttggatattgtctttccagaagtgaacaaactctcctggacacgctattccaagacctatatgcaattcttagccaagtatcctactgctgcttctattgcctctgaagacatccgcaatctacgtaatgcacttaaaactgacggacgtggcaggcagtgtaaacttactgctgaagatatcaaagaagctgccaaatgttctgttggtgaagataacattgcggtcgcactcgaagtgcagtcaatcatagctattatcaacactcgtaaacaacagattgaaaacctggaaaataaaatagaagaattcagcctgaaactaaactctcctatcatttccatccctggcatttctcacataacaggaatgaccatcattgcggagattggtgatattcacgatttttcagacgccgcacatctgatatcttatgccggcatggagcctctcgtacaccagtctgggaagtacgatgctgcgcatatgccaatatccaagcacggatctcggtacttgcgcaaagcattgtatcaagcggtttttaccgtctgtaaatattgcccaaccttcaatgcttattatactaagaaacgtaatcaaggtaaaacatatcgttgtgcacaaggtcattgtgtacgcaagctgttacgtgtcatatataagcttttagagagcaatattgcattcgatgaaaatctagtcaaataattgacagatacttacagaataatcaatcacatagtcaaagctacaactgtagttgttttaatagtactctattcacaatttcaaagatctatttggaaatttgctggatttcttaacatttcctgatttctttcatttatcacttgacttcctaatagttaaa

SEQ ID NO: 5594 - DNA, 1408 bp, unidentified
  source 1..1408: mol_type = unassigned DNA; note = element_896fac5
  misc_feature 1..2: note = core
  misc_feature 3..80: note = LE
  misc_feature 81..1124: note = CDS
  misc_feature 1125..1408: note = RE
  misc_feature 1122..1395: note = bridgeRNA
tgttggggtggacggcccccaaatcggcatcgatgtgccagaatgaggtcgttacagatctcaagcgaaggagaccgtccgtggaagagattacccgcatcggaatggacacgtcaaagcacgtctttcagttgcatggcgtaggcgctactgaggagcccgtgctgcgcaaaaaactgcgtcgcaaggagatgatcgccttcttcgggaaactgccaccaactgttgtagcgatcgaagcgtgcggtggatcccatcattgggccagattgctgcaatcgttcggacatgaggtaaaactcattccaccacaatatgttaagccgtatgtcaagcgcggcaagaacgacgcggccgatgctgaggccctctgtgaggcaatgagtcgaccgacgatgcggttcgtcccagtgaaaagtgcggagagccaggcggcgttgatgctgatcggggttcgtgagaggttgatccggaatcggacccaactcgccaatgccatacgtggctatgctgccgagttcggattgagtgctgcccagggaatatgcaaggtggaacacctgctcgagcgtatcgcaaccgatgagacgctgcccgaacttgctcgcgacttgttcgcgcttcatgcacgagaatacagacagttgcagggagagatcgccaaggtcgaagccagattgatggcttggcaccgggctgacgaatgcagtcggcgactagcgaaaattcccggcgtcggcccgatcggcgcgtcactgcttgtcatgaagatgccagcacccgaaggctttcgctcgggtcggcacttcgccgcctggctcggactgacgccaaaagatcactccaccgctggaaaaatccggcttggcggtattacacgtgccggcgatgaaaccctgcgaagcgttctcgtggcaggggcgactgctcttctgcgccacgttcgagaagggcgcggcaagaacgcttcgccatggctcagggaactcctcaagcgcaagccgccgaagctcgtggctgtggcattggctaacaagattgcccgcgtcgcatggaagctcatggtgaccggcgggcaatacagggccgacaccgcgcaaccgcttcatgcccgagccgtatagagatcagccagccgcggcgagtgatctgcggaacgctgccgcactgaactgatgcccaaacttgcaagaagaagagtagatggtgatcgatcgttccgaagcgcgtgacaatccgtataatgcaaaggccgacaaaggccgcagacctgtttggaactcgcgtagcggaaaccatcttggcccgcggtcatgtgcggccgcacactcagaggccggacatatgatcgcaagcgatcggttcaaattactgccgtcaatcttgcaagccgggggccgtccacata

SEQ ID NO: 5595 - DNA, 1360 bp, unidentified
  source 1..1360: mol_type = unassigned DNA; note = element_8974a53
  misc_feature 1: note = core
  misc_feature 2..69: note = LE
  misc_feature 70..1107: note = CDS
  misc_feature 1108..1360: note = RE
  misc_feature 1136..1354: note = bridgeRNA
taatgggatggtccgccgctttagctagcaaggagcgtgtgtatgagagtcttgcggaggaggcatcccatggaactacacaccatcggcattgatcttggtaagacagtttttcatatggtcgggcttaacctgcgcggcgaggtcgtggtgcgcaagaagttctcgcgcacacagctgctgcgcttcaccgctaacgtacgcgtcggattgattggcatggaagcctgcggaggtgcgcattttcttggccgagcactgcgggagcagggacacgaggtgcgactgattccggcacagtatgtgaagccgtacgtgaaaacgaacaagagcgactacatcgatgccgaggcgatcgccgaggctgtcgcacggccgacgatgcgtttcgtgccgatcaagactgatgaccagctggatctgcagtccctgcatcgcgtgcgcgagcgttgggtgatgcggcgcacggcagtcatcaaccagattcgtggattgctgctcgaacgtggcattactctgcggaagggacggtgtcatgtcggagcggcattgcccgggatcctggaagacgccgacgccaaactatcgagcgccttgcgcatgctgctggcccaattgaagctagaactcgatcacttggatatgcggatcgacgaagccgatgcgctgatcaagaaaacggctcgtgaaaacgaagcctgccaacggctagtggccatccctggcatcggacctgtgacggcgaccgcagtcatcgcggctatagggaacggaggggccttccgcaagggtcgagagttcgccgcctggatgggggtagttccgcgtgaacactccaccggcggcaagcaaaagctgctcggtatcagcaaacgtggaaactcctacttgcgaagactgttcgtgcaaggagcacgcgcggtcctgcaacagcacacgaagcaatcttccggtctgagtgtgtggctggcccaactcatctcgcgcagccaccgcaacgtcgccgccgtagcgttagctaacaaactcgcccgcatagcctgggccgtgctcgcgaagaatgaatcatatcggcctcccgtgttggccgatgtagctgcagcttagcgacgactgcggagaacaagatttcttaccaggtctgctggcgaatgaggagatggcacaacggtcgaacccggcgctcttcaaacccgtaaccggaagaagtctctcgagactgaattactaatggggaaaagagcgcagcgcattccatcctggccaggagtgattcactccaacaaaggccgtatacatttgcgcagaccaacttgtgacatcctcacatttcgcttgcggcgaagcggcggaccataca

SEQ ID NO: 5596 - DNA, 1306 bp, unidentified
  source 1..1306: mol_type = unassigned DNA; note = element_8974eb6
  misc_feature 1: note = core
  misc_feature 2..266: note = LE
  misc_feature 267..1259: note = CDS
  misc_feature 1260..1306: note = RE
  misc_feature 55..251: note = bridgeRNA
cctttggttttaatatagttctatttagtactagttgttattgttgaaatggggggtgcaggggggggtaagaactaaatactttgtggaaaacgttaagataaaaggcagggtgaacttatcgactcactagcttataagagagcttgtccgggtatcagtccctgccttttatgattgcccaaggcccaactagaatactttctttgctgtaacaaaggtgattggcaaaaggcaatttattaacgtatttaaaagttaaacgtatgaaaagctggaatgttattttgggagtggatgtatctaagttaacgttggacatctgttgggcagaacatcatctgcacatcaggatcgccaattgcactaaagggtttactgtatttaaaaagtggtgtaaaattaaccagatcgatctgcgggaaacattagtggtcatggaatatacaggaggttatgaataccgattcatgcagttctgtgagtcgataccggtttgttattgtcgtgtaccgggattggagattaagcagtcgatcggcatgaccaggggtaagagtgatcaggcagatgcctttcgtatcagcaggtatggtcaggaaaaaaacaaacgcctggagccttcagcgccattgaataatcatattttaaagctgaaacaactcctatccttccgtaaaaggctggttcgtgaaaaggcaggaatggaaagcacggttaaagagcgtaaacatatgtatgcgctaaagagaaccgatgcgattatcaatattgcccaatccaggataaaggcgaataaaaagcacatcgatctattggaaggggagatcatggaacttattaaaagcgatgagccaatgctgttaaactaccggataatcagtagtattaaagggatcggtccggtcaatgcctggatgacgatagcttatacagagaatttcgccagctttactgacgctcgaaaatacgccgtattcgtcggggttattccttttgagcacacttctggcacaagtattaaagggcgaaaaagggtgagtcatctggctcataaagaattgaagaacgaactaaaccaggcagctaaaacagctataacacatgatccggaaatcagggcctatgctgaacggaagcttaaaaacaaagcttatccactggtattaaataatgtaaagtttaagctgatccttagaatgttctctctggtaaaaagaggtgaaatgtatgttgaaaactatacaagagcggcttagaaaatgcttttgcaaaataaatttggaaatataagaaacctagaata

SEQ ID NO: 5597 - DNA, 1277 bp, unidentified
  source 1..1277: mol_type = unassigned DNA; note = element_897efd6
  misc_feature 1: note = core
  misc_feature 2..192: note = LE
  misc_feature 193..1155: note = CDS
  misc_feature 1156..1277: note = RE
  misc_feature 34..201: note = bridgeRNA
ttgtatgacgcgaaagaagcattgtgagagctgacaggggctgagtcgtcatggctcagccccggtcgcgacgggaagcccgcaggcgcttcggaccccaatccgtgagtgagcttggagctccagtcgcttcttccatacccgaacagttgcctgggcgcgagcccgcatcagcaaggaagggatacgaagatgctctcgctttgcggaattgatgtctccaaggatcgtctggacgtcatcgtgttgcccgaggagcaacgctcttcggtgagtaacaaccgggcgggttgggccgatctggtcgagcggctgcgcggctgctcgatcgcggcgatcggcctggaggcgagtggcggttacgagcgtggcgtcatgcgtgcgttgctcgcgggcggcctgcccgtgcgccaggtcaatccgttcaaacttcgacagtttgcgagggcgagcggggttctggcgaagaacgatccgctcgatgcccgaatgatcgcatcgttcgtcggcatcatgccgacacgtccagcgcagcggccgacgccggcagccgaactggtggccgagatgcttgctgttcgccgccagctcagttccgagaaagtcgccgctgagaatgcctcgagactgctggaagacgcgttgctgcggcgtctttctcgccgccgtatcggcaggctcgccgccgacatcgagctgctcgacaagcgtctggtcgagatcgttgcgaccgatgccgcgctcgcgcatcgataccgactgctcacgtccatgcccggggttggaccggtcctggcctgcacgttgattgtgctcttgcccgagctcggcggcatgacccgcaagcaggtcgctgcgttggtcggcgtcgctccctatgctttcgagagcggtacgctcaagggaaggcggtgcatctggggcggtcgtgcgaacgtccgccaggtgctctacatggcggcgatgagtgccagtaattggaatcctgggctcaaggcgttccatgaccgcctcgaggccgccggaaagaagccgaaggtcacgatcgtggcggtgatgcgtaagatgatcaccacgctcaacgcaatggttcgtgacgatgttgtttgggccgatcgtcatagcggtcggaacagtgtaacgaccgcacggtagccgttgcgctgagcgatttggccgagtcaaggccgtagccgcgcgtagcgcgggggcgcgaagcgccacccttgacgcggccaaatcaatcagcgatctcgctgcgacaagatgacagttgc

SEQ ID NO: 5598 - DNA, 1454 bp, unidentified
  source 1..1454: mol_type = unassigned DNA; note = element_8983420
  misc_feature 1: note = core
  misc_feature 2..236: note = LE
  misc_feature 237..1439: note = CDS
  misc_feature 1440..1454: note = RE
  misc_feature 10..239: note = bridgeRNA
ccgttaccttttccgtggccccgctattggggctccggtctccgggcccggtatgacttggtcccctcgtcgacatgatcgaaaaggtggtgtcaccgggccgggaggcattggcagaccgctgatcaggggcatgaccgctcacatccgcaccatggatgagcaggccttcgtaacgtggatgccggcacgctgatgccacgcgcgagaccgggaagaggctgctggggaggggcatgaaccacgacggtgagatcgacatctacctcggtctggacgtcggcaagggcgaacatcacggcactgctctgactccggcgggcaagaaggtgttcgacaagcccatgccaaatagtgaatcgcggctgcgtgaactgttcgaggagctgcaggtcaagcacggcaacgtgctggtcgtggtggaccagccggcctcgatgggtgctctcccactggcagtggcccgcgatacgggctgccgggttgcctatctgccagggctgacgatgcggcgtatcgcagatctctacccgggcgagtcgaagaccgatgcccgcgatgcggcgatcatcgccgatgccgcccgcaccatgccccacaccctccgcgacctggcccgggacgacgaaaccgtcgccgagctgaacatgctcgtgggcttcgacgacgacctggccggggaggtcacccgcatcaagaaccgtctgcgcggactgctgacccagatccatccctcgctcgagcgggtcctgggccctcgactggaccacccggcagtgctggtccttctcgaacgacacggctcaccagcccagttacggaaagccggcaggcgacggctggtgaccctgctgcggcccaaggcgccacgcatggcagaacggctcgttgcggacatcttcgacgcactcgacgaacagacggtcgtcgttccgggcaccgaggcctccgcgctgatcgtcccaagtctggctgcctcgctctccgcggtacttgaccagcgcaaagtccttgccacaaggatcgaggaactgctggaggcacaccctctttcgcaggtcctgacctcgatgcccggcattggggtcaggacggcagcccggatccttatcgacgtcggtgacggcagcggcttcgccaccgcagggcacctggccgcctacgccggcctggcacccgccacgcgcagatccggctcctccatccgcggcgaacagcactcccgacgaggcaacaaacagctcaagcgagccttctacctcgccgcgttcgcctcactgtcccagccggactcacgtgcctactacgacaggaaacgacacgaggggaaacaccacgtcgcagccatcgtctgcctggcccgacgccgcatcgacgtcctcttcgccatgctccgagacggaaccttctaccagccacctgctccggccaccgcttgacgaaaaccatagggg

SEQ ID NO: 5599 - DNA, 1583 bp, unidentified
  source 1..1583: mol_type = unassigned DNA; note = element_898a1df
  misc_feature 1..4: note = core
  misc_feature 5..361: note = LE
  misc_feature 362..1573: note = CDS
  misc_feature 1574..1583: note = RE
ctcactggagtaccttccagccgttgagtaacggcggcatggcactgcgcagggttgcccacggcggcggtcggtcggcgcttgcgacgaaccgaccggccgccgcggtggacaacccgtgtttgacgcggcgatgcccgtacgacgatggttcgatccgacttccgtgcccttgcagtgactgccgcgcgcgctggccgctcgacggcccgtgtgagacccgcagcctgcaaggtgccggaagacccagacgggctacaggatgtagcgccaagcctcgcatcttcgagcgccaatcagtgagcgacccgcacgggcttccggcacggcaagtcataccgcaactcacaggagtctgtccatgagcaactgctttgccgggctggactgggccagccgaacccacgcggtgtgcgtcatcgacgagcgcggcagcgtgcgtgtgcagttcgaggtcgcccacgacgcggcgggcctgaccgaactggtgcgccgtctgcgcaccgccggcgtcagcgccgtcgcgatcgaacggccctcgggtctgatcgtcgatgcgctggtggaggcgcgcttgtgcgtggtgcccatccatcccaacatcgtcaaggccacgcgcccgcgctaccgcagccacggcggcaagagcgacgccaccgacgcgtacctgctggccgatttgctgcgcaccgacggccatcgtttcaagcccctggcttgccagagcgacgagatccgtgcactgcgcgccttggtgcgcgggcgcgacgacctggtggccacccgcgtgcaactggccaaccagctgcgcagcctgctgcagtcgttctggcccggcgccgccgaggtcttcgccgaggtcgattcgcccatcgcgctggccttcgtcaagcgctaccccacgccggagtcggccagccgcctgggccccaggcgcatggccggcttctgcggccagcacggctacagcgggcgtcgcagccccgaggagttgctgcagcgcttgcatcaagccgcagccgtcgccctgggcgagctcgagatggaggccaagggcgaactcgcactgagcctggtgcgcacgctgtcgcccctggtcgagcagatccgcgtgctgaccagccgcatcgagcacgacgtgggcagcttcgacgacggcaagctcatcatgagcttcccgcgcgccgggcgcgtgtgcgccgcgcagatcgtctgcgagatcggcagcgtgcgcgagcgcttcgacagcgacgaacacctcgccggcgaggccggcgtcgctccggtcacctacgcctcgggcaagtccaaggcggtggccttccgctgggcgtgcaaccaccggctgcgtgccgcgctcacttgcctggcagacaactcgcgccacgccagcgcctgggctgccgatgtctacgacagggccatggctcgcggctgcgatcatccgcacgccacgcgcatcctcgcgcgcgcttggctgcgcgtcatctggcgcgcctggcaggaccgcaaaccctacgaccccacccagcatcgcgccgccgtgatgctgctcaaaacggcaggaggttgacacaggatgt

SEQ ID NO: 5600 - DNA, 1357 bp, unidentified
  source 1..1357: mol_type = unassigned DNA; note = element_898fee0
  misc_feature 1..2: note = core
  misc_feature 3..74: note = LE
  misc_feature 75..1106: note = CDS
  misc_feature 1107..1357: note = RE
  misc_feature 1086..1344: note = bridgeRNA
cgatggggtggacgccccttttacggcatcgatgtgccaaagtggtgttgtgaccacatcaaaaggaggcgtccatggaagagtgtaacatcgttggtatagatttggccaagaacgtatttcaggttcatgcatcagatgaagttggtcggcggcttttctccaaaaaggtttcgcgcggccaacttttgaagctgatgtctacgatacgaccctgtgtggtggcgctggaggcttgtgccagtgcgcatcattggggccgtcagatcgcaaaacttggtcatgaggttaagctcattccgccgatttatgtgaagccttttgtaaaacgtcaaaagaacgacgcagcggatgcagaagccattgtcgaggctgcgtcgcgaccgactatgcgatttgtcgcggttaaatctgccgatcagcaagcggccgggatggcgtttaaaacccgtgatctttttgtgagacaaagaacacaactgatcaacgcgctccgaggtcatctggcagagcacggcgttgtcgcgccgcagggtgttgtacatctcaagcgtctcagggcggctttggctgatgaaacaaccgggcttccaacagcagtcgttttacatgccgggatgattttggatcagatatcagttttgcagtcacgaatagagaaacttgaaaaggagatcttcgccgtatcccgcaaagaagatctcgcggtgagactgatgacaattccgggtgtcgggccaattacggctgcagctcttttggcatttgcacccgatccggcaacattccggcgcgggcgggatttttcagcctggatggggctgacaccgagacagcactcatcgggtggcaaggagagaatggggcgaacatcgaaaatgggtcaccgtgatttgcgacgattattgatcaccggtgcgatggccgttgtcagatgggcggcacgcaaaggtgcccaggcggggtcctggctggcgcgcatgctggatcgtaaaccgaagatgttgattgcagttgcgcttgcaaaccgaatgggccggatcatttgggccctgatggcgaatggcggtacatataattctcaccgggatacggctcaagcctgacccgatgggttatgtgagcaggtcgatggataagtaagggcaataggtcaatgagactggatcaggaaaaccactacccggacgatgcgcaacaagcgcgcgtaagcgatttggacctgatcctcgcatctccatacaggcccgcggcgtgtaacgtgccgcaatcagaggtcggacacacgtcagcacctggccacattgccaaaatttcatccaaagaaaatgcttgcattacccggggcgtccacaca

SEQ ID NO: 5601 - DNA, 1610 bp, unidentified
  source 1..1610: mol_type = unassigned DNA; note = element_899288e
  misc_feature 1..2: note = core
  misc_feature 3..279: note = LE
  misc_feature 280..1386: note = CDS
  misc_feature 1387..1610: note = RE
  misc_feature 12..299: note = bridgeRNA
ctactacaatatatttatgggtaatccccttacttccagtaaggatttatccatctcattacttaaactgttagaatgtaggatgcaatggtatatcgacttcatcacttggacctcgcgtccgtactttagactgataaccggctcctcattcacagtgttcgttttatgcaggttgaatcacattaggtgcattcgtgtcacacacagtagtttgaacaggtaatgagtaaaactggtatttatccattgtaatattttttaaggagtgataaatttatgaacgcagtaggtatcgatgtttcaaaaggtaaaagtatggttacaattctgagaccatttggggagattgtatcctctccttttgagattaagcacacatccagtgatatccattcacttattaaacttattcattctatcgaaggtgaatcccgggttgtaatggaacataccggccgctactacgaagcacttgctcaccagctttcagcagcagatctctttgtcagtgctgttaatcccaagttggtcaaagattttaataacgattctcttcgcaaaatcaagtccgacaaagctgattctgtcaagattgcccgctacgctcttgacaaatggcaaagtcttgaaccgtatagtattacagatgaattacgcgctcagctaaaggtcatgaatcgtcagtttcatttctatgtgaaacaaaaaacggctatgaaaaataatcttattaatctcattgaccagacatacccaaatgcaaatacttattttaatagtccaccccgcagtgatggctcccaaaaatgggttgattttgtctatacgtattggcatgtagattgcgttcgtaaaatgtctctaaattcttttgttaaacactatcaaaactggtgcaagcaaaaaaaatatatcttcaataaatcaaaagccgaagaaatttatacccagtcaacggaacttgtcccggtatttccaaaaaacgaaataaccaaacgcatcattagacaagctatcgctcagcttaacagcacttccgctaccgtcgaaacaatacgcattctcatgaatgaaaccgcctcaaaacttccagagtacccgattgttatgcagtttaaagggattggtccatctcttggtccacagcttatggctgagatcggtgatataaccagatttacacataaaggagcccttactgctttcgccggggtagatcctggcgtaaacgagtctggctcctatgcacaaaaaagtgttccaacatccaaacgtgggtcttcaaatttaagaaagactctttttcaagtaatggatgttcttattaaaacaatgccgcaagatgatcctgtatatcaattcatggacagaaaacgtgcctagggtaaaccgtactatgtttacatgactgcaggcgctaataaatttctcagaatctattatggacgagtgaaggaatatctctgtattctttctgagtcaagctaattcaaaacttttatttgcagaccagcactgcttgtggtggtcttattttagtgcctaattttaaccatgtaaaattttatattttttttcccattaagtcttgactttttatttgcagg

SEQ ID NO: 5602 - DNA, 1229 bp, unidentified
  source 1..1229: mol_type = unassigned DNA; note = element_89947d4
  misc_feature 1..3: note = core
  misc_feature 4..218: note = LE
  misc_feature 219..1214: note = CDS
  misc_feature 1215..1229: note = RE
  misc_feature 36..207: note = bridgeRNA
cttgtatattgatttcggtcgttcacaatgcggccacaacgggcacgacagaccgactcctcctcggtccatgccttccgctaagaccgcgagacagcactcgccgccgcccctggtttcgggggagcccgaacggtcgcctgagcctctgccacagctacgccgggcaggctcgcatccgcaaggccgggcctacacgaagatgaagggggaaacgaatgacgggttccgcgcgagaaacccatgtcggcatcgacgtctccaagagggccctcggcgtgtgcgtccttcccggcgcaagcgcctttggcgaagccggcgccccccgtggggagtccttcgtggcggcgaacgaccaggagggcgtcgacgggaccctcccccggctggcgaagccggggggaagcccgaaactcgtcgtcatggaggccaccggacgatgcgagcgcctcgccgccacctccatcgccgccgccggaatatccgcggcggtcataaacccccggcaggcgaggggcttcgccgaagccatgggaaggcccgcggaaaccgacgggatggacgccttcgtcctcgcccgcctcgccgaggccatcgagccggaggccagcgcgacccccgacggggacgccgccgcttcgcggggggttctcgccaggaggcggcagcccgtcgaaatgctcgtctccgagggcgagcgcctccggatggctccgaaggcgctcgccaaacgcatccgggcgcacgtcgggcggctcgggaaggagatcgggcgcaccggctccgacctcgacggcgccatcgaggacaacgccgccttcaaggccagcgagagtctccccagaggcgtccccggagtcgggcgagccctctcccgcgcgctgctcgccgagctgcccgaactgggggaggttacccacaggcgcccgtgcgccctggtgggcgcagcccctttcaaccgcgactccggccagagaagcgggaggcgtggggcgtggggcgggagggcgccggcgagggccgcgctctacatgggcgcgctcgctgccacccgacacaaccccgccatcaaggagttctaccagcgactcctcgacgccggcaagcccaagaaggtggctctggtggcgtgcatggggaggccgctgtcgatcctcgacgccctgatgcgcgatcgctctatttggaggtgtcctcatgccctgactccttgacattcaacacggttg

SEQ ID NO: 5603 - DNA, 1739 bp, unidentified
  source 1..1739: mol_type = unassigned DNA; note = element_8998724
  misc_feature 1: note = core
  misc_feature 2..275: note = LE
  misc_feature 276..1481: note = CDS
  misc_feature 1482..1739: note = RE
  misc_feature 12..295: note = bridgeRNA
cctattacaataaacatggaaccggatatggcagccagccatattccattccaactcgtacctaagctacaataagagagtaatcggctaacgcatcattctctgggcttctacgcccgttctaaagacagttgaccatctctcttgttgtagcattcgttttaagcaggttgagccacccgccaagcggagcgttcgtgtcacccaatagattgaatcggcaacgagtaaaagatggattccggttgcaaatacaaagtaatggaggaaccgttatgaacgctgtaggcattgacgtttccaaaggaaagagcatggtttgcgtcatgcgcccctttggagaagtagtactcgaaccctttgaagttttacataccgcccaaagcctgaacgatctggctgggaagctcaaagctttggacggagagacccgtgtcgtcatggaagccaccgggaattaccacaaaccagttgctttcgttttacacgatgcgggcttattcgtttccgtagtcaatcctgttctgattcatgactatgacaacaacagtttaagacgtgtcaaaacggatagaaaagacgctgttaaaatcgccaactatacgctcgacaagtggacacggctacgacagtatcttcccgaagatgatacccggctggctttgaagaattgttatcgtcagtaccagcaagccgtggcagttcgtactatgctgaagaataatctgatctcatctcttgacctgacctttccagatgcaaacaagctattttcaagccccgcaaagagcaacgggtgcgaaaaatgggtcgatttcattggagacttctggcacagtgagtgtgtttcaagcctttcctctgatgcctttgctaaaaagtatttaaagtggtgtcagaagcacggatataatttcactcgctcaaaatcggatacgatctatgcctgtgcagtcaatgctgcttctcttccaaaatccccaacctcaaaactccttattcagcaacaggtcgctcagctgaaagccgtatctcagtccgtggctgcattccagcaggagatgcttcgcctttctcaacagcttccggaatttgatactgtgatggaaatgtacggcgtcggcccttctctcggtcctcaactgatggctgagatcggagatgtccgtcgtttctcatccaagaaatcactcattgcatttgcaggaattgaaccgcagccaaatgattctggcaagattgtgggcaacgatagcggaattagtaaagtgggttcggctgttctacgtaggacgctctttctgattatgactgtcatcttgaagacacaacctcaggatgagccggtttttcaattcatgaacaaaaagcgctctgagggaaagccctacaaagtttacatgatggcttcagccaacaagttcttgcgaatctattatgctagagtgaaagctgtaatggactccaaacactcaaaataagcatggatatttgtttttggtcgtaatttcctcttgagcctgagctgaattcaaagaaccgcttagctggcgcagcgaacccttgacaaaccgaagcattcaaatgctatcctgattttgcgagggctggctgggcttgctttgctatcccctccgtcgccctcgctgtgttttgaccagcatttgaatactgtttgtcatgggcagcggtcggttagcgaattttcttgttttgggacttgacttttattagcaggt

SEQ ID NO: 5604 - DNA, 1103 bp, unidentified
  source 1..1103: mol_type = unassigned DNA; note = element_89abcb9
  misc_feature 1..2: note = core
  misc_feature 3..164: note = LE
  misc_feature 165..1091: note = CDS
  misc_feature 1092..1103: note = RE
  misc_feature 1..160: note = bridgeRNA
cctgtctgtttcgatgatggtatgagttagctgcggaagggagcccgtcccccccgagggtctgggagcccgatagggagcaagggtcccttccgcgttggtcataaccctgaacagttgcttgggactgctgatcccgcacgacatggacaggagccgctaccatgccacaagccgtcatcggctgcgacctttcgcgtgccttcatcgacctacaagatctgccagcaggcagaaccgaccggatcaccaatacccgcgaagccatcgcatcttggcttggcgcactcgattgcaatgtccgcatcgtcttcgaggcgaccagtggctgcgatggcggtctcatcgcagcccttgccgaacgcggacagcctttctcgcgggtcaatccccggcaagcccgcgagttcgccagagccacgggtgtactcgccaagaccgaccgggtggatgccagggtactcgcacagatgggcaccgccctcgatctgcccatcaccatcccgatctcgcccaagcgctcttgcctcgctgattttctgcgccggcgcaggcagttggtcgacatgcgcaaggccgagaagctgcatcgccacagtgccggccagatcgagatcgcgaccgccatagagaccatgattgaactgctcggccgccagattgctgacctggatcggcacatcgcaaacctgatcaccgacgatcgccagcttgccggacaggcccgccttctctccgccgtccccggtatcggtcctaccgtgctggcaaccctgttgggcgaattgcctgagctcggtactctttgtcgacgccgcatcgcctctcttgccggccttgcgccccatgctcgcgaaagtggtacatggcgcggcgccagacgtatctggggtggccgacgaaaggtgcgggaagccccctatatcgccgccctcaactcctcccgccgaatcccctcgctcacagccatgcgcgacagaatgcgccaaaaaggaaaagcacccaaaacaatcctcatcgccgtcgcccgccagctcttggtcatcctcaatgccatgatacgttctggacagcctattcggctcccgtgaacatcacagttg

SEQ ID NO: 5605 - DNA, 1508 bp, unidentified
  source 1..1508: mol_type = unassigned DNA; note = element_89ad8b8
  misc_feature 1..4: note = core
  misc_feature 5..274: note = LE
  misc_feature 275..1483: note = CDS
  misc_feature 1484..1508: note = RE
ctcactggactaccctccctcgagcgagaaagtcagcggctcgggccaggtctaggggagacagtcgagtggtgcgataagcgttcggggagagcctgcgtcgctcgctgctcgacggccagaatgagacctgctcccccgaaccaaaacgagagaggcccagaccggccacaggatgaagcgccaggtgccccagcaggccagagcgccaatcagtgagcgaccagccggacctctcgccccgcagtgtctcgccgtcccccgaggtgacgcaatgagattctttgtcgggatcgactgggcgacgcaggctcacgccgtctgcatcctcgatcagacgagccgtgtccagtggcagggctcggtgccgcacacggccgacggcctcgcggcgctcctcgcgcgcctgcgccgcgtccgccagcgcgggcccctccgcgtggccctcgaacgcccctcgggcctgctcgtcgacaccctcgtcgaggccggcgtcgaggtggtgccgatccatccgaacgcgctcaaagccagtcggccgcggtactctgccgccggcggcaaaagcgaccccggcgatgccttcatcctcgccgacctgctgcgcaccgatggccatcggttccgcccgctgcatgcgccctcggatgagacgcgcgccctgcgcaccctcgtgcgcggccgcgacgatctcgtcgcccagcgtgtcgctgtcaccaatcagctccgcgcgctgctcgagcgcttctggcccggcgccgtcgccatcttcgccgacgttgattccccgattgccctcgccttcctcagccgctaccccaccccccacagcgccgcgcgcctcggcgaagagcgcctcgcccagttcctccgccaatatgcctactgcggccggcgcccggtcggcgagctgctcgcccgcctgcgcagcgtcccggtcagccaggtcggcgaggcggacgccgaggccagcggcgacgtcgtccgcgccctcgtcgccgtcctgagcccgctcgtcacgcacatccagcaactgtccgccggcatcgaggccgccctgtcgcagcatcctgatggcccgctcctgcagagcctgccgcgcagcggcgccgtcaacgccgcgcagattctcgccgagctcggcgacgatcgcgcgcggtttcccaccgacgagcagttcgccgccgaggccggcctggcgcccgtcacgcatgcctcgggccaacaccacgccgtcgtcttccgctgggcctgcaacaagcgcctgcgccgcgccctcaccaccttcgccgataactctcggcacgcctcgcgctgggccgccctcgtgtatcagcgggcgcgcgcccgcggctgtcgccatcagcacgcgatccgcatcctggcccgcgcgtgggcccgcatcctctggcgctgctggcaggatcgcgccccctacgacgtcagccggcatcgcgccgcgctggcgctcgccgtcgcgtgacggcgcgagggttgacacaggatgt

SEQ ID NO: 5606 - DNA, 1421 bp, unidentified
  source 1..1421: mol_type = unassigned DNA; note = element_89b05db
  misc_feature 1: note = core
  misc_feature 2..72: note = LE
  misc_feature 73..1113: note = CDS
  misc_feature 1114..1421: note = RE
  misc_feature 1201..1415: note = bridgeRNA
taatgggatggtccgccgcctttaccccagcccgcatctgaggtaggaaactacacacggaggaggcgtcccatggaactacacacgattggcattgatcttggcaaaaccgtttttcatttggttgggcttagccggcgcggcgaagtcgtcgtgcgcaagaagttctctcgcaaacaactgctgcagttcacggcgaacctgcaggtcgagttgattggcatggaagcgtgcgggggagcgcattttctgggtcgggcactgcgcgggcaggggcacgcggtgcggttgattccagcacaatatgtgaagacgaacaagaccgactccatcgacgcggaggcgatcgctgaggccgtgggtcgccccacgatgcgcttcgtgccgatcaaaaccgaagcccagcttgacctgcagtcgctgcatcgggtgcgcgagcgttgggtgatgcgtcgcacggccattgtgaaccagattcgcagcctgttgctcgaacgtggcatcacgctgcgacaggggcggcattacgtggatgcagctttgccgcggattctcgaggatgccgatctgaacttatctggagcattgcgcatgctgctggcacaactgaagctggaactggaacagatgacgctacggatcgacgaagccgacacgatgctcaaccagaccgtccaggagaacgaagactgtcaacgactggtggcgattcccggggtcggaccggtgacggcaaccgcactcatcgcggccatcggtaacggagcagttttccgcaagggccgggagttcgcggcctggatgggcgttgttccccgcgagcactccaccggtggcaagcagaagctgctcgggatcagcaaacgcgggaacgcctacttgcgaagactcttcatccaaagcgcacgcgcagtcttgcaacaccgcacgaaacagtcctcgggcctgagtgcgtggctgagccaactcgcgctccgcagccaccccaatgtcgttgccgtggccttagccaacaagctggcccgcatcgcctgggccgtgctcgcaaagcaagaggcatatcggcccacggtactggacagtgtggctacagcctggctggactgcagatgacgcctggctgaagccaggcttggaaatcgcatgcgcgattcccacatctacagaccagcgacgacggcggagctcatgattttcctgccaggtctgctggcgaaaaggagatggcacaacggtcgaacccggcgctctggaaacctgtggagtaaaagagtcttcgcaagactgcctatttaacaaggaacagagcgcagcgcattccatcatggccaggagaaatcctctccaacaaaggtcgtatacatttgcgcagaccaaccagccactcactcttcgcttgcggaaaggcggcggaccataca

SEQ ID NO: 5607 - DNA, 1577 bp, unidentified
  source 1..1577: mol_type = unassigned DNA; note = element_89b4f9c
  misc_feature 1..3: note = core
  misc_feature 4..281: note = LE
  misc_feature 282..1460: note = CDS
  misc_feature 1461..1577: note = RE
  misc_feature 13..259: note = bridgeRNA
cttatataatgtatttaggttgataaaggtaacctataatcctttgttagctgtataattattcaggattatcctgtataattgtttcattagatagagtgacatcgagtcctccttgagaccatgatctcgtccttgaaagagtgatgcctctgtctggtaaacaagtttacgaatcagttggatgttgaccctaatgggtacttcgcatatacaataaggcagtaacgtttaccagtcagtggaacctatctaaaatacttttatggcaggtgctgcttatgttttacttaggaattgatatcggtaaaaatacacatgttgcttcccttatagatgaaaaagcgaaggttattttcaaagctcattctttctccaacacttctgatggagcagccacacttctggaaaaaatcactccctatgtggcagaacttgaaattggcatggaagccactggacattactggctttctctttattccttccttgtggaaaatcacttggttgtgcatgtcatcaatcccattcaaaccgatggttggcggaaaggaactgaaatcagaaaacgtaaaacagacattattgattcggttctaattgctcattttatccgctatggtgactttttggaaacctctcttgctgacgaagacaccatgtctttgcgtaatttatcacgctttcgaaactatctcgtcggctctattggtgacctcaaaagaaaaaccatttgtgttctggatcaaatcttccctgaataccatcacgctttctccgatatctttggtaaaacatcaaaggaacttttgctacaattaaattccccttcggattatgaagatgtgacatcggaacaattagaagaacttttgtctcaagtcactttaaagggctatgctgccaaaaaattcaaagatgtatcttccttagcaaagacttcctttggtattacattctgtgttgagagcttttcttttcagctaaagcttctgattgagcaaatcaactttatagaaaagcaggtatctgatgtagaaaaacaaatggcagagcttctcgaaaacattcaaactcccattactacaattccgggaatcggcaatgtaattggagccaccatacttggtgaaattggagacatcaatcgctttagcaatggtgcaaagcttgttgcctatgctggaatagatgcctctgttttccaatccggtgaatatgaatccaccaacaatcatatgagtaaaagggggtcaccttatttacgcaaggctatctttcgagctgcctttgttgcctctaacactgaccctgtttttaaagcttactatcaaaagaaacgcatggagggaaagcatcacaatgttgctgttggtgcagttgcccgtaagttatgctacaccatttatgctgtgctaaaaaacgatgttccttatgaggtgcaagcaccacaagagtaacaaatattcatctatatttttttctacttgcttttgtaggtctttttgtagtgcataaaaatgcttccaatattcaaaaaatatttttcatttacctattgacttttgatagttggt

SEQ ID NO: 5608 - DNA, 1363 bp, unidentified
  source 1..1363: mol_type = unassigned DNA; note = element_89b7e91
  misc_feature 1..2: note = core
  misc_feature 3..74: note = LE
  misc_feature 75..1103: note = CDS
  misc_feature 1104..1363: note = RE
  misc_feature 1079..1353: note = bridgeRNA
tgatgatgtgaccgccccccgacggcatcggtgtgccagggttggtctgtgaggatccacaaaggaggacggtcatgtcggagattatcacggtcgggctcgacctggcgaagaatgtgttccaagcgcacggcgctgatgcgtctggtcgtgcagtgctgcgcaagaagcttaggcgggatcaggtcctggccttcttcagccagttgccaccttgtggtgttgcgatggaagcctgcggtggcgcgcatttctggggccgggagatcgggaagctgggccatgaggtgcggctcattccgcctgcttacgtgaagcccttcgtcaagcggcagaagaatgatgctgccgatgccgaggcgatttgcgaggcagcgcagaggccgacgatgcgcttcgtgcccgtgaagagcgaagagacccagggggccgcaatggtcttccggatccgcgagttgctgatccgccagcgcacgcaggcgatcaatgcgctgcgcggccatctgggtgagtttggccggatcgtgccgcagggggcagccaacgccgcgcgactgattgccatcgtcgaagacccggagagcggcctgcccgccgatgccattgcaacgttgaaggtgctggtcggagccctcacccatctggaggcggagatcggaaggctcgatgccgagatcgcccgccgggccaaggagaacgaggtcgcgcggcgcctgatgacggtgccgggcatcggccccctgatcgccacggccattgcagttctggccccgccgcccgagaccttccgcaaggcacgcgactttgccgcctggctgggtctggtgccacgccagcattcgaccggcggcaagcagcgcctcggggccacgacgaagatgggcgaacgctccttgcgacggctgctgatcatcggggccaacagcgtcatcatcaagcggcacgttcatgccgccgcccggccgggcacatggctgggcgggatgctgacgcgcaagccgccgatgctggtgcgggtggcgctggcgaacaagatggcgcgcatcgtctgggccctgatggctcgcggtggcgtctaccagtctccggtcgcggcggcataagccaccgtcggtcgcgaggacgtcggagcgaaagagggcaaggagaggtttggcgcaacggtcgtgagacgggatcgggagacccagagcgcaacagagtgccatcgagcacgcggctttgatctggacccgacccgcggacaccatacgggcccgcggcacgacgatggccgcagcagaggccggacacatgtcagcacccgacgacgcgccggaaccagctcccaaaaaatccctcttgcgcatggggcggttacaca

SEQ ID NO: 5609 - DNA, 1233 bp, unidentified
  source 1..1233: mol_type = unassigned DNA; note = element_89bade0
  misc_feature 1..2: note = core
  misc_feature 3..246: note = LE
  misc_feature 247..1218: note = CDS
  misc_feature 1219..1233: note = RE
  misc_feature 14..216: note = bridgeRNA
cttgtatctggacatgtcgcccctaaacaggcgtcatgtcttccgactgatcatcggaggaggtgtgggaggtccagtcgctcctaaagcttcgagcttgcatcgtagatcggctccgccctccacatgctggcccttgtgtgtccgaacggtatccagagtccgcccccgggcgtgaactcgcatcgacaaggcaggaccgggcccagcgccgatcatgaccctgacacgatggaggaatcgcgtatgtctcccgtcatcggcatcgacgtcgccaagcgcagtttcgatgtggccatcgatctgactaatggcaagcaccgtaccaaggccaagttgtcaaacgatgccaagggcttccaggccctgcaggcatggctgcagacgcatgcgcagcccgacagctggatcgccatggaggccaccggcacctaccaccaggcgctggccgagttcctccacgcacgcggctatcgggtgtgcgtgctcaacccggcgcagacggccgcgtacgcacgcagccaactcagccgggtcaagaccgatcgcagcgatgccaagctgatcgccagttatgccctgcgtcaccgcgagcagttgcgccgttggcaccctgatccgccggcgctcaagcaactcaaagcgctggtgcgccggcgccaggatctgcaacagatgctgcagatggagcgcaaccggctggaggtcgctccggcccaagtgaaggactcgatccaggtccatctggccgatctgcaacaccacatcgcccagatcgagcaggctatcgatgaccatatcgaccaggatccgaccttgcgtgggcagcgcgagctgctggtgagcatccaggggattgccgacaccagcgcggccttgatgctggccgagcttggcgatgtgaggcgcttcgccgatgcctcggcggtgaccgccttcgccggcctgaatccgtgcctgcaggagtcgggcgagcgcaaaggccacgtctgcatctcgcgcaccggctcgccccgcctgcgcgcgggcctgttcatgccggccttggtagccatgacccacaacccgatcatccggacgctgaaacagcggctgagcgaacgcggcaaagccggcaagcagatcgtgtgcgcggccatgcgaaagctcctgcacctggcctacggggttctcaaatcgggcacggcgttcgatccgaaaaggggccttgcctgctagggggcaagacggtat

SEQ ID NO: 5610 - DNA, 1168 bp, unidentified
  source 1..1168: mol_type = unassigned DNA; note = element_89bc8ae
  misc_feature 1..2: note = core
  misc_feature 3..179: note = LE
  misc_feature 180..1004: note = CDS
  misc_feature 1005..1168: note = RE
  misc_feature 34..200: note = bridgeRNA
cttgtatcttgaaagtggattactatgttctggcttagatttggcaaagcccgtgtagtccgattcctcctggggttattcaagcccgcagcatagcgactgacgcacaggctgagtcgttcatctgaagcccgaacagttgtctgaacttcaaatcgtgtttgcaaggaggggtatagatgagcgtgtcaaatcaacgttgtgcaggcattgatgtttcgaaaagcactctggatattgcaatcagcagtattgcccagcaattcactgtgccaaatgaagatggcggttttaatcagatactcaaagagttaaagcgaaatgaaactcaactgatcctgatggaagccagtgggggacttgagtctggtgtggctggttatcttcagtctgaaggtttcgatgtggttgttatcaatccccgacaggcgcgagattttgcccgtgcaatgggatatctggctaagaccgaccaaatagatgccagagtcctgctacaaatggcaaaagttattaaccagcatcctgagcgggaaaaatatattcgtcccttacctgatgttcacaggcagttgctggcagcaatggtggtcagacgccgacaattaacgatcatgcttacagctgagcggaacaggttgcatccatcgcatcctcagaattatgaaaatatcagatttataatttcggtattgaaaagtgaaatggctcgtgtagaagctgaaatgtcagcctatatctcgaaaaatttcagtgaattatctgcattattgagcgccgttaaaggtattggtgcagcgactgttgccgtgctgctggctgaggttccggaacttggaacgttatcacgacgtgaaattagtgcgcttattggggttgctccaataaacagggattccggcacgatgcgcggtcgccgaacggtattcggaggacgagcctccgtccgaaccgctctctatatgtcaggccctggtcgggataaggcacaacccagtaattaaagagttctatacacgcctggttgccgcaggaaagcccaaaaaagttgcacttacggcctgcatcagaaaattgctgaccatcctgaacgcaatgctgaaaaagaatgaagcagggatccgatgtatcaccagcatgcttcctagtcgcgctcgaaagacagttg

SEQ ID NO: 5611 - DNA, 1610 bp, unidentified
  source 1..1610: mol_type = unassigned DNA; note = element_89c0452
  misc_feature 1..2: note = core
  misc_feature 3..275: note = LE
  misc_feature 276..1484: note = CDS
  misc_feature 1485..1610: note = RE
  misc_feature 12..295: note = bridgeRNA
ctattacaataaatttggacaggaaagccgggcagccagtctggctttccctccatctcgtgcctaagctacaatgagaggagcaactggctgaccatcacctccttgggcttctatgtccgccggaaagactgtcagccatcctcttgttgtagcgttcgatttaagcaggttgagccaccggatgccggagagttcgcgtcacacaatagattgaatcggcaacgagaaaagatggattccggttgcagattctttgtattggaggaatgtgaatgaactgcgttggcatcgatgtttccaaaggaaaaagcatgatcgctgtcatgcggccctttggagaggtggtgatctcaccctttgaagtgcgtcacaccgccagtgaactgagcgagttgacaaagctgctcaaaagtctggacggtgagactcgtgtggtcatggaatccacgggcaattaccatgcaccagtggcttggctgctccacgatgcagggctttatgtttccgtagtcaatgcaatgcttgtgcatgactacggaaacaacagtttgagacgggccaagactgacaagaaggacgctgtaaaactggccaactatggtcttgaccactggcttacgctgcccagatatgttccagaggaggatacccggctgcttttaaaaaactgctaccggcagtatcagcaatattccaaggtgcagaccatgttgaaaaacaacctgatctccttgctggatgcggtattcccggaggtcaatcgcctattcagcagccatcctcgtcccgatggcagcgagaaatgggtggactttgttgcgacgttctggcattgccagtgcatttcagagctatctccgaaggcgttttccgcaaaatacatgaaatggtgcaaaaaacatggttacaatttcagccaagagaaagcagttgaactgcatacgaaagcgcgcagctgcattggtgctatgcctcgaaatgatacgaccaagctcttggtacagcaagcagttgcacagctccagacaacctctgtcgcgttggcttcgttaaagcaagaaatgcattctttggcagcttccttacccgaatatcctgtggtaatgggaatgttcggtatcggtccggctctcggcccgcagcttatggctgaaattggcgatgtgcgccggttccactccaaaaaggctttggttgcctttgccggcattgacgcgcctccttgccagtctggccaaatggacgtccgcagccgcagcatctccaagcgaggttccgccgctctgcgcagaacattgttccttgtgatgggcatttatctacaaaacgcccctctggatgaacctgtgtaccaattcatggacaaaaagcgttctgaaggaaagccgtaccgggtctacatgatggcttctgccaacaagttcctgcgtatctattacgcttcggtaactgcttatctaaactcactggaacgaatttgattccttacagaacacctccgaggctgactgccgtttcgattttgaatcgcttagcggtctggttttgtgttgcctttttccgcgacttagatttttgaaattcctacttgacttttattagcaggt

SEQ ID NO: 5612 - DNA, 1445 bp, unidentified
  source 1..1445: mol_type = unassigned DNA; note = element_89c1bb8
  misc_feature 1..4: note = core
  misc_feature 5..224: note = LE
  misc_feature 225..1436: note = CDS
  misc_feature 1437..1445: note = RE
ctcattggatgagtatgggcgggcaggtcaggttggcctgttcgtcgggaacggcgagggacggcctcgatgtctcgccaccagatggcctgtttgagctggtcgccctcgtcgttgccgggaggcgtgatcggcgcgagagagcagccccggtgagggccgaacaatgaggatccgacggtcgtcccggttccacggcgagagttcggccgggaggtcaacacatgttctgtggatgggactggggctcgactgtgcacggggtgtgcctgatcgatgaccagggcgcagtcgtcaagagatggatggtccagcacaccgggaatcagttgatgaacgtcttctgtgagctcgcccagcttgtcgagggcggcgacgtggcacaggtgccgatcgcgatcgaacgtggagagggcctggtcgtcggtttgatcgccggggccggccaccctgtctggatggtcgagccctctgccttcaaggccgcccgcccgcggtggggggccgcgggtgcgaagtctgacctaagcgacgcgttcatgcttgcggactacgccaggaccgatggccaccggctgcgtcgtgtcgagccggtggggcaagcgacccgagagctcgccgcgttggtgcgggcacgcattgcgttggtcgaggcgcgcacggcggcgtcaaaccagttgtgggcgatcttggccgagcactggcctggcgctgcggtggtgttccagaagctgacctcccagatcgcgctcgcattcctgaccgattacccgacaccgcaggccgcggcgcagctcggggaggggcggatggcgcagttctgccgccggcacagctatcgcggtgggaagtccccagccgagctcgtgggtcggctccgcgcggctcccgccagcgcgaatccaatcgctccaacgatccttgcatcgatcgtgcagggttcgaccgcgcacctccagctcctcaacaccgagatcacccgactcgaacgcgacctagccaaagtgctggccgcccaccccaagacgccgcttctgcagacgttgccgcgcatcgccaccgtcagtctggccgccctgatcgccgagatcggtcctctgcttgaacgctgtgagaatcccgagcaagtggccgccatgtgcggcgcggctcccgttactcgagcctcaggcaagtctcgaaccgtcgcgttccgctacaccgcgaacaagccagcacgcgtcgcgatcaccagcttcgcggacaactcacgacattcctcggactgggccagcgacgcctaccggcgagcacgagcacgcggcgcccgacatcctcacgccgttcggatcctcgcccgcggatgggtccgagtcatctgggcctgttggaccaccgacaccatctacgacccctcacgacaccgcggccaacagcttctcgcggcggtgagttgacctagagag

SEQ ID NO: 5613 - DNA, 1597 bp, unidentified
  source 1..1597: mol_type = unassigned DNA; note = element_89cef98
  misc_feature 1..2: note = core
  misc_feature 3..262: note = LE
  misc_feature 263..1471: note = CDS
  misc_feature 1472..1597: note = RE
  misc_feature 18..243: note = bridgeRNA
ctcgtataataaatgtagtcttaaatgaatgatttttaagactttaaacttgttacccctttcggggtataattgtttgtaaagattgaggttgcccaattcctccttgaaaattatttttcctatttaagactggcacctcatctctatagacagtatatgaatcagctggatagaacactgtttctgtatctcttacgaggctatatcgtccatagagtatggggaaaacctctttctaattaaagaaaggttgatgaatatgcaatatctaggtatagacatcggtaaacgtgctcatgaagcagctttacttgatcaggatggaaatcatcttggaaaaactgtgcgtttttcaaatagtcataaaggtgctgaaaaactactagatttaattaatgaacatgagtgtttacctgataatactttgataggtatggaagccacagggcattattggctttctatacatacatttttaaagaaattaggttttgatatcgttgtatttaatccaatccaatcggattcatttagaaacttctacatcagaaaaactaaaactgacaaagtagatgctgttctaatcgctcaagtcattaggatggatgtacctaacacaagttatatttcctcagaagacacgattaaattaaaacaactaactcgatttagagtgtcaatggttgaccaaacatcagacataaagagacagataatttcttgtcttgatcaagtattcccagaatacgaaaggttattctcagatatgtttggtaagacctctagaaaactattgttggaatcaccattacctgaagacctgttgaacattgaatccactcatcttacaaaacttctaaaggaagctagtaaggggcgcttcaccgaagagaaatcaatgcttaaggttgatgaaatcaaaggtttggcatctgattcttttggaatctcaatagcttctgatgtctttaaaatgcagattcaacttctgatccaacaaattgagttactcgaatctcaaataaaagatgttgaaagtaaaatcaatgaactcttagaaaaagataatcatcacttaacgaccattacaggtattggtcctattaccgctgccacaataattggtgagataggcgatattaaacgtttcgaaagaccgaatcagttgttagcttttgcgggattagacgcatctatatatcaatcaggtgactttacaggtactaataatcgtatatctaagcgtggaagtccatatttaagacgagccatttggcaagctgcatttgtcgcctcaaacaaagatcctgctttatctgagtattatcaatctctaagagctagaggtaagcatcatggaactgcgataggcgcagtttgtcgaaaacttgttaatataatctttgcagtttggactaatgataaaccttacgaagtaaggcatcactcaaataaagaacaagaataagtctaatttaaaaatttaaaaaattaggcttatttgtcatgcataaatttattagtatcaccactttcaaaagtcgaagctcaccataaaatatcctctaaattatgttgacatttttatagctgg

SEQ ID NO: 5614 - DNA, 1611 bp, unidentified
  source 1..1611: mol_type = unassigned DNA; note = element_89cf70e
  misc_feature 1..2: note = core
  misc_feature 3..287: note = LE
  misc_feature 288..1457: note = CDS
  misc_feature 1458..1611: note = RE
  misc_feature 57..266: note = bridgeRNA
ctggtatatatgaattagcccatttaactgagccattctatataccttttcctttctacctgattttgtattcatcaggtattttacttgtctgttagaattgaaattgtgaatgtgtactcgaaatttctccttggggctttgacttcataggaaagaatcttgccacttcttcgtattcagaattgcgatcagttgggtgggcctttgagttcttgtaccaggatcagtcgaatactttgtaagtggagattccattcgctcattttagaaaggacggtgctcttatgcgctatttgatcggcatcgatgtcagtaaattcaaacatacagcttctgtcattgataatgatggtgtcgtttacgttgaaccttttgacttcaataacgatatcattggtttccaattgtttttatctaccgtttcctctttcaccaatgatgattacattatcggtatggaagatactggccattatggcgataatcttcaacgttttcttttatccaaagaattgaaagtggccatgcttaatcctttagctaccaatcatattcgcttggcttttggtaaagccaagaacgacaaactagactcggttacgattggttctgccttggcaatgcctagactttatcgaatcatcaaagatgatcatttctcttatcatgagattcgcgagcttactcgctatcgtctgcacctgaccaaatccagtaatatctacaaaaatcgattgaagaagttgatcgatatcacttttccggaatttgattctttgttctctaccgcttattcaaatacctatttaaaggttctccatgactttcagagtgccgaaaacattgcttctacagacatacgaactcttcggaaagctttgatcgtagatagaggacgctgcgtttctatcactgcggaagagctcaaatctgcagccaaacaatcgatcggtcattctaatttcgcaatggaaatagaaatccggcagactgtggagatgatcgaaaagatcaattcaaacctagaggctgttgagaaaaaaatagaagagttcagccgacaactaaactctcccattcttgccatccctggtatctcacacatatcagcgatgtctatcctggcagagatcggcgatttctccaaatatgaaagtgccaaacaaatcatcaaactgtcaggaaccaatccatttgtatatgaatcgggtacctatagtatggcacgaacaaggttagaaaagaaagggtcaaagtatctaagagcaacactttataaaacgattcaggcagtaatcctcttcaatccggtattcaatcaatactatgtaaagaagcgagcagaaggtaagtcccacctttgcgctcaaggccactgtgtgcgtaaactgcttcgaataatctatcatattttgacgaccggcaaagaatttgatccagcccttttacgataataaataagtcaaagtcatctttaaaaaagctatttccccatagttctttttagtgtacacatttttacaatttcaaagatcaaatcgacaacaaatcaagcaataatatttcaaactatttcataattttatacttgacttcctatatagttgt

SEQ ID NO: 5615 - DNA, 1419 bp, unidentified
  source 1..1419: mol_type = unassigned DNA; note = element_89cfb51
  misc_feature 1: note = core
  misc_feature 2..87: note = LE
  misc_feature 88..1128: note = CDS
  misc_feature 1129..1419: note = RE
  misc_feature 1186..1411: note = bridgeRNA
caatgggatggacgtccccaccctataacggcatggatgtgccatagtgagggtttgtttctctacgcgagcaataggagtctgcaaatggagattaagacgattggcatagatttggcgaaaaatgtgtttcaggtgcacgcagtggattcccggggcaaggttgtccttcgcaagcagttccgtcgcgaccgggtggcgacgttctttgcgaatctctcgccgtgtctgattggcatggaagcgtgcggcagcgcgcatcattgggcacgcaaactggaatccttaggtcacacggtcaagctgatggcgccccaattcgtaaagccctatgtgaagagcaacaagaatgatgcagctgatgccgaagccatctgcgaggctgttagccgcccttcaatgcgattcgtcccggtcaagaatgtagagcagcaagcggttctttcgctgcatcgggtgcggcaaggtttcgtcaaggcgcgtacggcgcaggccaaccagattcgtggcctgctgagcgaattcggcattgtcgtgccgcaagggatcgcttacgtcacgcagcgtgttccccagttgatcgaggatgccagccatgaattgccgggatcgtttcgctgtctcattgaccggctcctcgaacatctgcgacttctccatcatcaggtggaagagatagaagcgcagattcaagcatggcatcgggaaaatgtgttaagtcagcgtgtggagaagatcccgggcattggttatctcacggcgagtgcactggtcgccaccatcggcgacgcgaagaactttgacaacggccgccagctagccgcttggcttggactggttcccaggcagcattccagcggcgggaagcagaatctgctgggtatgagtaagcgaggggatgcttacctgcgcaccctcatgattcatggggcacagtccgtgatttaccgggtcgtgcagaaggccgatcccagaagttgggccttttcggtagccatacgtcgcaacaaaaacgtggcggccgtggcattggccaataaatcagcacggatcgtctgggcgctcctcgcccatgatcggtcattccgacccgactacgcagtagcttctgctgccgtagccgtatagtcaggccaacgacaggggcacagcaggtaattacagaaggaggtagaactaaacaccagcgattgctcaggcaatcaggaagtgatggcagaacaggtaagaccgtggtctgcacagcccgaagttaccgaggcactcaagagtgcgtgtaagcgatagaggcgtagaccagcgaaacccatcagggacagcgattgtatctcgcagcgaaagtccgaatgtacgggagcaaccttttccttatctgatcatcacgaatcgattgtttggcaaactggggacgtccatgta

SEQ ID NO: 5616 - DNA, 1377 bp, unidentified
  source 1..1377: mol_type = unassigned DNA; note = element_89d0041
  misc_feature 1: note = core
  misc_feature 2..228: note = LE
  misc_feature 229..1350: note = CDS
  misc_feature 1351..1377: note = RE
  misc_feature 9..232: note = bridgeRNA
cgttactttattcgtaccccttataatggggtgttagccagccggacccggcatgattactgcccccagtcgtccatgatccggggggtgatgtcaccgggtctggtggggcgctggtaaccgctgatagggggcaggtcagacatcatgtcgggaccatctgtaacgtggatgccggtacctgctccccgaggttatctggttaacccgtataaacagggaaacacaatgaccgaatccagagattacgaatccgtccaggtctttattggcgttgatgtaggtaaagacacccatcacgccgttgccgttaatcgttcaggtaaacgtttgttcgacaaagcattacccaacgacgaaaacaaactcagggcgctgatatctgacctgaaacagcatggacagatactgctggtcgttgaccagcctgccaccatcggggcgttacccgttgccgttgcccgctctgaaggcgtccttgtcggataccttccaggactggcaatgcgacgcatcgccgacttgcactccggtgaagccaaaaccgatgcccgtgatgcgaccatcattgccgaagctgcacgtactctgcctcatgctcttcgctcactaaaactggctgacgaacaaatcgccgaactctcaatgcttatacatccggctctggaacgcgttctcggcccgcgactggatcatccagcagtacttgatcttctccagcgatatccctcacccgaaaaactcgctttactgggtgagaaaaaactggcaacccagctctgcaaactcgcgccccgtctgggaaaacgccttgctgcagatatcacccaggcactgacacagcaaaccgtcatcgttcccggtacgaatgctgctgtcgttgttctcccacgcctggcactccagctcatcacgctgcgtaagcaaagagaagaggtggctcttgaggtagagcaacgggttcttgctcaccctctttacccggtcctgaccagcatgcccggagtcggcgtcaggaccgcagccagactcctcacagaggttgcctgtcgggccttcgcctctgccgcacatcttgctgcttatgcaggccttgcgccggtaacccgacgctccggctcatccatacgtggggaacacccctcgcgacggggcaataaacgcctcaaacgggcgctgttcctgtccgccttcgccgcgctcagagatccgatatccagggcttactacacacgcaaaatgagccaggggaaacgacacaaccaggcgcttatcgccctggcaagacggcgctgtgacgttctgttcgccatgatgcgtgacggtactttttataccccgcaggtgtaataaacatgcttgacaacttaatagggg

SEQ ID NO: 5617 - DNA, 1290 bp, unidentified
  source 1..1290: mol_type = unassigned DNA; note = element_89d2c30
  misc_feature 1..2: note = core
  misc_feature 3..294: note = LE
  misc_feature 295..1107: note = CDS
  misc_feature 1108..1290: note = RE
  misc_feature 1132..1290: note = bridgeRNA
agatgtgatgaaaacaggtgtgcctcctatagggtagaacgtgctctaagcacaagacccattccaggaggcaccgatgatccacgtaggagtagatcttcaccagagattttgttacatgagggcgttggacgcaagaggaaggctaatcagtgcaggccaagtcgctaaccaagaagcggcgttgcgcagctattccagcagtttctcgggccggtgcaagtggcagtagaagcgtgcagcttctggccgcatttcggcgagcgatgccgaacaaagtggagttgcggatgggtgcatccgcagcgggtgaaggcgatcgcagcggccaagctgaagaacgaccgcatcgattcggcgacgctggcccatttgctgcgttgcgatctgctgccggaagcgtggatggccgacgaggtcacgcgcgagctgcggcagcaggtaaggatgcgagcgacgctggtccggcaacgtacccggctgaagaaccaggtgcatgccatcttgcatccacagggactgcgctacgaaggcagcgatttgttcgggcgcggcggacgagcatggttgaagcaagtctcgttgcccgtggcgggcggatcggcgatccaggtatatctaaagttgatcgacgcattcagcgcgcagattcaggaacaagaacaacaactgcggaagcgctgggaaaaagacgcgcgcgtgacctggctgagaaccattccgggaatcggctggtactcggcgattctgctgatagctgagatcggcgatctccagcgcttcgccgacaagcgcgctctgaccaactatgccggcctggggccctggttgcgcgaatcggccgacaagcgccggaccggaagcatcacccgagtgggtccagcgctgggccaagccgctgctgcgcaagaagcacaagaacacggttgtggtggccatcgcgcgcaaactgctggtcgcggtctgggccatgctgcacgacggcgtcgcctacgacgaaaagcattttaccgtcggctaagtaaggcggcggtgcaaaagtggaaagccaaccccgcttcccactttcgcaccgccacgacggcggctgctgtcatcaaggtttgaagttttaggtttgcggtcggtgtaaggaatccggagagctcgttgtcatccttgtccttcgaggacgtcgctcagatggagcctccggtcacggacgtaccttatgtgcctcgagcacgcataggagtctgtccgcaactccaccgcaatatccctatggacaggtacgcctgttttcataga

SEQ ID NO: 5618 - DNA, 1446 bp, unidentified
  source 1..1446: mol_type = unassigned DNA; note = element_89d36ec
  misc_feature 1..2: note = core
  misc_feature 3..131: note = LE
  misc_feature 132..1175: note = CDS
  misc_feature 1176..1446: note = RE
  misc_feature 1200..1399: note = bridgeRNA
agatggggtaatcggcttcgcgccccatcttgccgccgggaaaaggaaggtgctgcgcttcgagctgatgataaaatgtggtctggggtagtgaatgaatcagccacaagcaccagaaaggaagcgtagcaatgaaatactatgcaggcctcgatgtctctgtcaaagaaacttccatatgcatcatcgacgagaccggaaaaatctgccgggaaacgaaggtggtcagccaccccgaggatatcgcgaaactgctttgtgacccgcgatggcatttagagcgggttggccttgaagcgggtcccctgtcccaatggctctatgaaggtctcgccaaggccagcctcccggtgatctgtatcgagacccggcacacgaaagcctttctgaaggcgcagcagccgaacaagagcgaccgcaccgatgcgcgcggcatcgcccagatgatgcgtgtccacctcttcaaggcggtgcacgtcaagacgctgaccagccaggagcggcgcgccatgctgaccgcccgaaagctgctgcaggaaaaagccattgcgatcgagaacgacatccggggactgttgcggaacttcgggctgaaggtcggtattgtcggcaccgtgaaatacgagacgcgcatccgcgaactgatcgaaggcttgcccggtctgatcgccatcgtcgagccgctgcttgccgcccgggagaagctgcgggacgagttcgccaagctggaccgtatcgttcgggacgaggccaaacaggatcctgtttgccgccggctgacgacggtgcctggcgtcggcccgatcgtgtcgctcgcctatgtggcgacgatcgacattcctgcccgcttccgaacgtcgcgcgccgtgggggccgtgctcggactgacaccgctgctcaatcagtccggcgagagcaaacggataggccacgtcaccctgtgtggcgacgccatgctgcgaggcctgctctacgaagcagcgcaggctcttctgacgcgatcggcaaaatggtcatggctgaaggcttgggcgatgaatgtcgccaagcggaggggcgcccggaaagcaatcgtggcactggcgcgacgacttgccgtgatcctccaccgtatgtggagcgacgggaccgacttccgctggacacgggaggtggcgccggcagcagcaagctgattcaagtctacaccacgtagacaaaaagttccgccttacggcggaagacgtccttcgcggacgtgaatgatatgagttcgtgtaagcgcttatcgcggcagcgctctgcgccggtagcatgcaaatgagattggaccatatcattcttctgatcccatggtgggagggctttgacgccgatcccggagagaagcaagggccgcgaaaagacgttatccgccgcacaagtggaaagctcgatcgcgcttgacttcaccacgccgattagaga

SEQ ID NO: 5619 - DNA, 1423 bp, unidentified
  source 1..1423: mol_type = unassigned DNA; note = element_89d3e35
  misc_feature 1..2: note = core
  misc_feature 3..127: note = LE
  misc_feature 128..1165: note = CDS
  misc_feature 1166..1423: note = RE
  misc_feature 1189..1418: note = bridgeRNA
agatggtgtaacgggcggagcccagccagccgagtttgaaggtttggtgctttggtggtcgtccctcacaatgatggtgtcgcggagtcaggagtggcctgctccatagcatcacggagagacgaccatgaagcagtatgccggcatcgacgtatcattggaatactcgagtgtgtgcgtggtggatgcggatggtcgcatcgtgcgggaagcgaagctcctcagcgagcccgatgcgctgaccgcctggtttgccgagcacggcgtggccatggagcggatcggccttgaggctggccccctgtcgcaatggctttatgccgggatggcgaagacgggtctggcggtcgagctgatcgagacgcggcacgtgcgtgcggccttcaagacgatgccggtgaagaccgacaagaaggatgcgcggggcattgcgcagttgatgcggcttggttggttcaggccggtccactgcaaatctcttgccgcccaagaggtgcgcgcgctgctgacagcccgcaaactgatccaggggaaatttcatgacatcgagatgagcatccgcggcattctacgcggcttcggccttaaggtgggaccgacgacgcgacgcacctatgcggcacggatctgcgaactgatcgaaggtcatccgaccctggaggcgattgccgcgtcgctgttgaaagcgcgcgacgcgcttgcggacgaatttgcctgtttcgaacgcaagttgcgtgtcatcgcccgtcaggacgacaaagcccgtcggttgatgacgacgccgggcgtcggcgtcctggtggcactaacattcgcggcggccgtcgacgcgcctgagcgtttccgaacatcacgagcggtggggccgcatttcggattgacaccgaagaagtatcaatcgggcgagaccgactacagtggtcgcatctcgaagatcggcgatgtgggtgtgcgaaccgcgctctacgaggcggccaacgtcatcctgacccggccggtcaaaggctcggatcttaagacttgggcgctggcggtcgcaagacgggcgggacccagaaaggcgcgcgttgcactggcccgcaagctggcggtggtgttgcaccgcatgctcagggacgggaccaacttccttcctcgcaaggcagcgccagccatggccggctgaggaggaaggatgtaacaagacaggctttcgggcgggccatgccatcagccccccggagcaaggtcccttcgccgggacgatggatgggttaggccgcagtgaggtaagcagccccagtggactgcgcgtttctagattggccaaccggtcctcagcagaccccataaagcagcgaccccgcgtcgactgcggacagaagcaagcactcggcgagggattaggctcaaaagggattgactcgctaaagcccgttacaga

SEQ ID NO: 5620 - DNA, 1492 bp, unidentified
  source 1..1492: mol_type = unassigned DNA; note = element_89d58cd
  misc_feature 1..2: note = core
  misc_feature 3..479: note = LE
  misc_feature 480..1472: note = CDS
  misc_feature 1473..1492: note = RE
  misc_feature 7..244: note = bridgeRNA
ctaatgagagctaccgggtcggcataaggcaggctcggtgccggtagccgccggcaggtgagcactctcgccgcctggactgagtccgagtcctttggtcagatcgtgcccctgccggtggtcgggagacctgatcaccgatgggatgtcgtggccgccgtacggggcgtgatcacttgtccattaggccgtggtggatctcccgtgggctgccggtcctgctgccggagcgtggggaggcctgggtgctgttcgtcggggacgactgggcagaagatcatcatgatgtggaggtgcaggacgagaccggccgccggctggcgaagggacggctgccggaggggctggccgggatcacccggctgcacgagctgatcggcgcgcatctggccgaggacgccggcccggagcaggtggtggtcgggatcgagaccgaccggggtccgtgggtgtaggcgctggtcgcggcgggctatcaggtgatcgcggtcaacccggtgcaggcggctcgttaccgggagcggtactcgacatccggggcgaagagcgacgccggcgacgcgcatgcgttggcggacatggtccgcaccgatcggcaccagttgcgtccggtcgccggggacagcgacctggcggaggcggtgaaggtcgtggcccggtcgcaccagaccctcgtctgggaccggacccgtcaggtccagcggctgcgcgccgcgctcgtcgagtcgttcccggccgcgctggccgtcttcgacgacctcgacgccgccgacacgttggaactgctcggtaaggcgccgacaccggccgaggcgaggcgtctgaccgtcgcgcagatctccgccgccctgcggcgggcccgccgccgtggcgacctcgcggagaaggcccgcacgatccgggcggcgttccaggccagccagctgcccgtccgcccggccaccgccgccgcctacggcgcggtcgtccgcgcccaggtcggcctgatcggcacgctcaccgccgagatcgaccggctcggtgagcaggtcgatgcccattttggccagcacccggacgctgagatcctgctgtcccagcccggcctgggaccggtcctcgccgcccgggtgctcgccgagttcggagacgacccgaagcgctacgcccacgcgaaggcccgcaagaactacgccgggaccagcccgatcacccgcgcctccgggaagaagacggtcgtgatggcccgctacgcccgcaacgaccggctcgccgccgccctggaccggcaggcgttctgcgccctgagggcctcacccggcgcccgtgcctactacgaccagatccgcgcccgcggcaccggccaccacgccgcgctgcgccagctcgccaaccgcctcgtcggcatcctccatggctgcctgaagacccgcaccccctacgacgaagcaaccgcctggacacagaacgtcacacttcaggatgccgcttgacacccaaaaacatgggatgt

SEQ ID NO: 5621 - DNA, 1322 bp, unidentified
  source 1..1322: mol_type = unassigned DNA; note = element_89d6732
  misc_feature 1: note = core
  misc_feature 2..270: note = LE
  misc_feature 271..1263: note = CDS
  misc_feature 1264..1322: note = RE
  misc_feature 60..259: note = bridgeRNA
cctttggactttcaaatataagaaagcaaaaaataaagcattattaatattactatatggggtttccaaaggggtgtggaaaatccaaaaatgtggataactttaaaaccgacagcagagtgaactttaatcctttccagctttatagagctttcacacgtattagtccctgccgtcggtttacttgctccggtccaactagaattttctctttgacgcatcaaaggtttttgacagagcaagtttttaatcacattcaacaacaaagttatgagaaaatgggcgtttattctcggtattgatgtttccaaaaaaacattggacgtttactgtaaagaaagaaaaaaacacatctgcatcgaaaacggggcagagggcttcaggatattgcaaaagtggtgcagggagcatgaaattgatctatcccaaagtattattgcgttggaatacaccggcggctatgaatacaggctgctccagttttgcgaagcaaagaaaatccgttttgtccgttttccaggtttagccgtcaaacgctctatgggtataacaagaggaaaaaacgacaaagtcgatgcccaacgcatagctcaatacacagatgaaaaacaacaatctattgagccatcaaaaccattaaacaaaaagattttggagcttagggcactattaaaattccgtaaacatttagtggtggaaagagcgggatacgaagccagagttaaagagcggaaatatatgtatcccgaactcaaaaacgactgcatcatcagagagtgcaaccggaaaataaaggcaggaaaagaagccgaagcaagagtggagcggacgattgcaatgcttatagaaagtgatgaaaatatgcagttaaattacgaactggttacaagcattaagggcataggcccgatcaatgcatggatgactattgcttataccgaaaatttttcggctttccccaatgcgagaagctatgctgtctatgcgggtgtagtaccttttgattacagctcgggaaccagcattaacggcagaaaaagggtcagcagtttagctaataaggcattgaaagcggaattaggacaagccgcaaaatcagcaatgacatgggacttagaaataaaggaatatacagaacgtaagttattgaccaaaaaatggcctgttgtcgtcaataatgtaaagttcaaactcatcctaagaatattcgcagtcgtaaaaagaggggaaaaatatgtggataattatcgaaaaacagcttaatttaaattattgtaaaaaatatatgaagcccaatttggtattcttagaatcctagaata

SEQ ID NO: 5622 - DNA, 1454 bp, unidentified
  source 1..1454: mol_type = unassigned DNA; note = element_89da18e
  misc_feature 1: note = core
  misc_feature 2..231: note = LE
  misc_feature 232..1434: note = CDS
  misc_feature 1435..1454: note = RE
  misc_feature 1..228: note = bridgeRNA
cgttaccttcttcgtgaccccgtacggcggggttctggtcgccagggtcggcatgactcaaagcccctgtctcttgcatgatccggggggtgttgtcaccgattctggtggcgttggctgaccgctgatagggacagggccgcccttgggtaggtctcttcgtaacgtgggtgccggcttccttcgccagacgtgcgaccagcacctgcaacgagcggagaggaatgaacgatgccgcgacctgagtatgccgtgttccttggtctggacgtcggcaagcaggagcaccacgcctgcgggctgggcccggatggcaagcgcgtccacgacgggcctctgccgcagtccgaagcaaggatcggcgagatcctggaagatctcagcgggcgcggccgggtgctggtggtggtagaccagcccgcgtcgatcggcgcgctggcggtgaccgttgcgcggtcgctgggcgtcgatgtggcctacttgcccgggctggcgatgcgacggatcgcggatctgcatccgggcaacgcgaagaccgatgctcgggacgcctacgtgatcgccgaggcggccaggacgatgccgcacgcgttgcgtcgcgttgacgctggcgatgaagcgctcgccgatctagaggtcatcgtggggttcgatgatgacctggccggtgaggtcacccggatcagtaaccgcatccgcggcctgctcacccaggtccatccagcgctggaacgcgtgctgggtcccaaggtccagcaccgagcggtgctcgagctgctgcagcgcttcggtggacctcagggactcgcgaaggcgacccggcgtcaactcatcgccgcgacgaaggtgcgtgcgccacgctcatacgaacgcctcgtcgacgcggtggtgaaggcgctgaccgagcagacggtgagcgtgccgggcactcgggcggccgaactcgtgctgccacaactcgccgtgaccctcggtgggctgctcgaccaacgcgaacaagcggctaaacagatcgaggagatgctcgatccgcaccctctttcccgggtcctgacctcgatgccggggatcggagtcaggaccggcgcacggatcctcctcgaggtcggtgacggctcggccttccccaccagcggacacctcgcggcctacgccgggctcgcgccggtgacccgcagatcgggcacgtcgatccgaggggaacaccccagccgggccgggaacaaacaactcaagcgagcgttcttcctggccgctttcgcatctctttctgacccgaccagccgggtctactacgaccgcaaacgcgccgccgggaagaagcacaacgccgccctgatatgcctcgcccggcgcagagtcgacgtactccacgccatgctcaagaacggcaccctctacgaaacgagacaatcctcagctccggcagcttgacgaacctgatagggacaccc

SEQ ID NO: 5623 - DNA, 1312 bp, unidentified
  source 1..1312: mol_type = unassigned DNA; note = element_89dbda5
  misc_feature 1: note = core
  misc_feature 2..226: note = LE
  misc_feature 227..1297: note = CDS
  misc_feature 1298..1312: note = RE
  misc_feature 1..225: note = bridgeRNA
cagagatgatgttggtgagcacctcccgccggggtctgaccctccgcctgactgacttcgggtccttaacgggatttgtcgaccctggccgggaggtgctcatgcactcatcaggcgtggcgttgtgacttcataggagcctggctagaggccccatctctgtcttgtccgcgttgcccggctggtgcgtgccgccctgcacccagtcacgaacgacaggacgacgatgccttccattacacctgatgacactgtgatcgaggtcttcggtggcgtcgacactcaccaggacacccacaccgccgccgtgatcgaccaggtcggccgggttctcggcacgcatgagttccccgccaccgcggccggctacgccgatctgctggcctggatacgcgggcacggccggctgagccgggtcggggtcgagggcaccggcgcctacggcgcgggcctggctcgcctgctccgcgacgagcacgccgacgtgatcgaggtcgaccggccagaccgtaagacccgccgcttccagggaaaatccgacccgatcgacgcgatccaagccgcccgggccgcgctggctggtgaacgcaccggcacccccaaacagcgcgacgggcgcgtcgaagcgttacgtaacctgcgcgtggcccggcgcagcgcggtcgaacagcgcgccgacacccagcgccagatgaagaccctgatcgtcaccgctcccgacgagctgcgtgcccggctacgcggcctgagcgtcaaacagctggtcgtcacctgcgcgaacctgcgccccgagcgggctgacgccgcgaccccgctcaccgccgtcaagctcgccctgcgcagtctggcccgccgccatcagcagctgtccgccgagatcaccgacctcgacgagctgctcgagccggtcgtcgccgcgatcaaccctggcttgctggccgctaacggtgtcggcgccgagatcgccgggcagttgctggtcagtgccggggagaaccacgaccggctcgcctccgaggcggcgttcgccatgctctgcggcgttgcgccgatcccggcctcgtccggcaagacgacccggcaccggctcaaccgtggcggcgaccgacaggccaacgccgccctctaccgcgtcgtgctctgccgcctgcgctgggatccccgcacccgcgactacatgcaacgacgcaccaaggaaggcatgtcgaagaaagaaatcattcgatgccttaagcgatatgtcgcccgcgagctctaccaactcatcagaatgaacgatcttgaactcgccgcttgacatccataggagcat

SEQ ID NO: 5624 - DNA, 1566 bp, unidentified
  source 1..1566: mol_type = unassigned DNA; note = element_89e7897
  misc_feature 1..2: note = core
  misc_feature 3..248: note = LE
  misc_feature 249..1421: note = CDS
  misc_feature 1422..1566: note = RE
  misc_feature 3..225: note = bridgeRNA
ctcgtattatagtgttgtagctttcctttacctgttcttggtaatcagctacagttgttatggatgctgtggactggtctgtttttcctaccgcttgacggttttagaaaggctccggccacagcctctttgttacagtgttgatcagttagataccgcatgacggtttatgtagaacgaggttacgtttagcaaagagcctgtggatttatgacagcatcaaatacacttgaaggaggatcaccgtaatgatctatgttggtattgatgttgcaaaggacaagcacgactgctgtatcctgaatcaggaggcagacctgctcttcccggtatttacgattgaaaacaatctcgccggatatgagcagctgtatgagaagatccgatctgtttcgaaagacctgaaggaaataaaagtagggctcgaggctaccggtcactactcatacaacatcctgggatcgcttcttgaacacggttaccgcacctgtgtgatcaacccgttgcatacaaatctttacagaaaaggtcagagccttagaaagacgaagacggataaagtcgatgcccgttcaattgctgagatgcttgtgactgataagacactcaagccctacacagacacatcttaccacagcgaagaactgaaatcattaacccgttaccgcttcgataaagtccaggaaagagccaaactcaagacttctctttcacgccttgtgaacatcctgtttcctgagctcgaaaaacttgtccccacgcttcatatgtccaccgtctatgcgctgcttgaggaaatgcccggcgcatcgttcgtggcagatgcaaacctcacgcatctcaaatctctcctggagaaggcctctaaaggccattaccagcgcgataaagctgttgagatcaggaatgctgcgataaactctgtcggctccgcaatgcctgctaaatcgatggagctgaagcatacgatcaatctcatccgcgtccttacggaagagattgatgagattgaggcgtccattaaaaagatcatggataagtgtgactcaccgatcaccactatccctggcatcaaataccggatgggagccattatactggccgaaatcggagacttcagccgttttgacaacgctgaccagatcctggcctacgccggaatgtcgccatctacatatcagtccggacagttggaatcaagctatgcccgcatggaaaaacgtggctccagatatctgcggtacgctttgttcaatgctacccagtacgtctgtatctgggatgaacgattccgcctgtatctggccaagaagcgtgccgaaggcaagcattactttattgccatatcgcatgctgccaagaagctcctaaggacgatataccggatggaaatgacccatacggcatatcagcctctgtaactttccttgttcatacttttctgctgagagcacccagtcggatgctctgttcgtcatgcagttttcaaggtactgatctatctaaaatgcgttaccgcattttatacaaaaatcatcaattcaggcttgacacttaatagttagt

SEQ ID NO: 5625 - DNA, 1472 bp, unidentified
  source 1..1472: mol_type = unassigned DNA; note = element_89e850a
  misc_feature 1..2: note = core
  misc_feature 3..49: note = LE
  misc_feature 50..1204: note = CDS
  misc_feature 1205..1472: note = RE
gaggtggcatgaaagaggtcgcgctcactggaagaacggaccgctaaagatgttgatggcgatggagggtcagtcgcacttcctgcctttcggcgtaccgtattggggtttcgaggctctcaataacggaggaagtgcgaccgtgtcttacgattatcatatcggcgtggattaccacaaatcctatagccatctcgtcgttcaggacggcggcgggcgaacactgcgctcgggccgggtgaagaatgaccggcattcgatcgcggcgtttctggaccgctacaaggacaactctcatgccgtcgtggaagccacccgcaactggacggtcatctacgactggctcgacgacatctgtgatgatgtggtgcttgcccatccgctgaaggtcaaggcgatcgccgacgccaagatcaagaccgacaagatcgacgcgacggtactggcgcatctgctgcgggccgacctggtgccggaagcctgggctcccagcgagcgggcgcgggaattgcgggtggcgctgcgcgagcggatgttctacgtgcggctgcgcaccatggtgaagaaccgcatcgtcaccatcttcgaccgctatccggagcagacggtccaactcaggaagctcggcgacctgttcggcaaggccggccgcgagcaactgtcggcgctgaccgtctcgccgatcgaccgcatccaaatcgaccgcagcatcgccttcatcgacgacatcaatgcgcggatcaaacaatcggaagccacgatccgggcgatgacgcgagagaacgccaatgtgaagctgctgaagaccattcccggtatcggcgagttcttcgcccggctgatcgacgccgagatcgacgatatcggccgtttccgctccccgaagaagctcaccgcctatgccgggcttgttccttcgacctattcgagcggcggcaggacgtatcatggccgtatcatcaagcaaggcaacaaatggcttcgctgggcctttgtcgaagccgttgcgcccgccatcgccaccgatccgcagctgcgagaacaatacgagcgcctgaagccccatggcacgaataaggctaaggtggcggtggcgcgcaaactactgacgatcgccttccagcttttgcgcgaccagcgcccttacgagcggcgcggcgccagcatggaggaatgcgcgtccacgatatcccgactgtcctgatggctggctagcgagcctggcagcgccgggctgcgctcctaacggagaatgggaagccgggagccgaacgccactatgtgaccgaagccgaagagacaacggcatcagggtcacggattggagaatggttcaagaaccgcgggacggaacctgtcctgcgcacaaaaaagatttagccgaccggcccccagcgccggtcaaaacgcaaccgaacccaggaaatccgcccagcaggacggtagttcgacccttgtgttctttcattgga

SEQ ID NO: 5626 - DNA, 1542 bp, unidentified
  source 1..1542: mol_type = unassigned DNA; note = element_89e9e06
  misc_feature 1..2: note = core
  misc_feature 3..239: note = LE
  misc_feature 240..1421: note = CDS
  misc_feature 1422..1542: note = RE
  misc_feature 3..218: note = bridgeRNA
cttgtattatagagtagtagtttttatagcccctatccaagggctgtgctacactgtaagggatgctgtggattggtttcggttccctaccgctagacggtttttgaaaggctccaaccacagccctttacagtattgttaatcagttagatactgccagacggtttatgtggaacaaggctacaagagtaaagagttctgtggaatcagcatcaaataaacacatcggaggtattctcatggtttgcgtaggaattgacgtggccaaggacaagcacgactgcttcatcatcagctcggaaggtgaaatcctggcggatgtattcaccatcccgaacaacgcagagggcttcgacacgctcttgcaggcaatccgccgcagtactcgtccggaggataaaataaaagtagggcttgaggctaccggacactacagctacaacatcctcggatttcttcttgacaaaggtctacccacctatgtcatcaatccgctgcacaccaatctctaccgaaaaagcctgagccttcgcaaaacgaagacagaccgtgtcgatgcgcgaaccattgcggctatgctcatgtctgatgtggacctcaagtcctacacagacacagtataccacaacgaggagctaaagtcactcacaagataccggtttgacaaagttcgtgaacgagcaaagctgaagcagtccgtttcccgtctggtcacaatcttgttcccagagcttgaaaagttggtctcgtcactgcattcggcctctgtttacgcacttctcagcgaatttcctggcgccaaacagatttccagcacgcacatgacgcatttgaaagcagttttgaaaaacgcttctcaaggccgctatggccaggagatggccgagaccattcggaatgcggcacgctcctcagtcggctctgtcatgcccgccaagtctcttgaattacagcacacgattcgcttgattcgtgaattggacgccgaaatcgaagatattgaaactgccattcaagccatcgtggacgaaatgcagtctcccattactacgatcccaggcatgggtgtccgtatgggagcggttatcctggctgaaataggtgatttctctcgcttcgactcgccagataaaatcctcgcatacgcagggatgtcaccttccacttaccagtccgggcagctttcactgtctggagcctactcgcacatggaaaaacgaggttcccgttacttgcgctacgctctttacaatgccacaaaacacgtctgtcattgggacccgacctttgccgcttaccttgccaagaaacgggccgaggggaagcactacaacgttgcgctctctcatgcggcaaagaaattggtacgtctgatttttgcaatggagaaatctcagcggccatactgcgccgcaccataaccccgatttttcataagctcaagtaggcgtccagaaggacgtcagctttgctataccccttttgaaccgtctaaatttttgccgctcctccgcatttcgggcttgacttttaatagttagt

SEQ ID NO: 5627 - DNA, 1440 bp, unidentified
  source 1..1440: mol_type = unassigned DNA; note = element_89eb3b5
  misc_feature 1..2: note = core
  misc_feature 3..125: note = LE
  misc_feature 126..1160: note = CDS
  misc_feature 1161..1440: note = RE
  misc_feature 1193..1393: note = bridgeRNA
agatggggtaatcggccggcgttgttgtggatagctgaagattttgggtgctgcgcttcaggctgatggtgaaacggggtcaccgttgttacgggccccaagcatcagatggagaagcgcgagccatggaccattttgccggattggacgtatcagtcaatgagaccagcgtctgtattgtggatgacacaggcaggatcgttcgcgaagccaaggtggcgagcgaacccgaagcgctgctggcggttttgacgaaccctggctaccgcttcaagcggattggactggaagccgggccgctgtcgcagtggcttttcagcgctctcgccgaagcgggcttgccgatgatctgcgtcgagacgcggcacatgcgggcggtattgaaggcgcagatcaacaagacagaccgcaacgacgcgcgcggcatggcgcagatgatgcgggcgggactttatcgtccggtgcatgtgaagacattacgcagccagaagctgcgcatgttgctgacccatcgcaagcttctgcagtcgaaagccattgccgtcgagaacgacctgcgcggaaccttgcgtaacttcggtctcaaggtcgggatcgtcgggaagctgaagttcgaggcgcgcatcagggaactggtcgagagccaccccgatctggccgttctggtcgaaccgctgcttgtcgtccggcgggtgctgcgcgagcagctcggcattctgcaccgccgcttgctggccatcgtgcaagacgatgaggtgtgccggcgcctgatgacgaccccgggtgtcggtcctgtggtggcgctgaccttccgcgccaccgttgacgtgcccgcgcgctttcgcaactccaaggcagtcggggcggtattgggcctgacaccatccaggtatcaatcgggcgagatcaatcgaaccggcgcgatatcaaagtgcggggacgagatgatgcgggtgatgctctacgaagcggcccagagcatgctggtacgctcagccaaatggtcctggctcaaggcctgggcgatgcagatcgccaggcgtcgcgggatgaagaaagcgatcgtcgcgctggcgcgtcgcttggccgtcatcatgcaccgcatctgggttgatggcgccgagttccgctggagccggcaagagactgcggcagcatgacaatgcaagatcaaacccgataggagaaaacctgagctccaccacgcggtggcatgatgtccctcacgggacgatggatgaggtgagatcgcaatgtccgctggacctgccgtcactcagacggcaaggccgaccgaaagattgttccgcctcgtcttcgaatcccatgatggaagggccctggtgccgattccgaagagaagcacgagcccgtgagcgacatcgacattgtaatggtgggtagcctgaaagcgcttgacccaaaccggccgattagaga

SEQ ID NO: 5628 - DNA, 1342 bp, unidentified
  source 1..1342: mol_type = unassigned DNA; note = element_89ee379
  misc_feature 1..2: note = core
  misc_feature 3..74: note = LE
  misc_feature 75..893: note = CDS
  misc_feature 894..1342: note = RE
  misc_feature 1078..1329: note = bridgeRNA
tgttggggtggacggctccgcggcatctcgtgccaaggtttggttgtcgaattccgaacctgaaggaccgtcccatgaaccttaaccgcgttggcctcgacacgtccaaggccatcttcactttacatggcgtcgaccaggacgagagagccgtcctgcggcgtaatctgaagcggtccgagatggaggcgttctttgccatgttgccaccgacgctcgtagcgctggaggcatgcggcggctcgcaccactgggggcgccggttggcagacctgggccacacggtgcggctgatcccgccgcagtacgtcaagccgttcgtccggcgtggcaagaacgaccgcaacgatgccgaggcgatcagcgaggcggcgtcacggccgggcatgccgtgcgtgccggtgagggcggccgagcagcaggcagaggcgatcgtgctctcggtgcgcgagttgcttgtgcggcaacggacgcaactggtcaacgccgtgcgcggtcacgctgcggagttcggcgtcgtggcagccaagaacatcagtcacctatcagggttgcttgaaaccgtagcggctgaggaggcggtgccggataccgccaaggagatgctggcgttcctgggcgcccaggtggtccagctcgacgagcggatcgcggagctggaaggccggatgaagcagcagcacaaggcaagcgcggtcagccagttgctggcggaggtgcccggcatcggcccgatcagcgcgctgagcctagcgctcaagatcgacccgggccggttcacctccgggcgccacttcgcaggctggctcggcttgacgccgaaggagcattctacgggcgggcgccaacggctcggcggcatcagccgggccggcaacgagcggttgcggtagctgctggtcgtcggcgcgatggccgtgatccgctatgccaagccggggagcaaaacggcctcggcttggctgttggccttgctggagcgcaagccgcgcaagctcgcggcagtggctctggccaacaagatggcccgcatcgtgtgggccatgatggcgaccggggaagcgtatcgcggcagcaaaggagctgcagcggccgcctgaaccgttcgcaggtgccagggtgcaaggacagctgcaggagatgatgatcggtcgatccgacgaacgggtgaacccggaaactccaacggccgatcgaggccgcctgagtgtatggtctcgttcgcggaacccatctgggccagcggtcatagggccgcgtcaacaggccggacacatgaccgccgtcgcaccgctcgccaaatccagcagcaaacccttgcacctcaggggccgtccacaca

SEQ ID NO: 5629 - DNA, 1557 bp, unidentified
  source 1..1557: mol_type = unassigned DNA; note = element_89ee729
  misc_feature 1..2: note = core
  misc_feature 3..251: note = LE
  misc_feature 252..1427: note = CDS
  misc_feature 1428..1557: note = RE
  misc_feature 3..229: note = bridgeRNA
ctcgtataatataaagtagtagtttttagagttcctctccaaaaactatggtataataagaatagatgctgtggattggttttatctccctaccgcccgacggttttttggaggctccgaccacagtctctatgcaaaatgttaatcagttagataccgccagacggtttatttagaacgaggttacaaatgcatcgagtttctgtggatctaaacaacagcatcaaattatttttttcggaggtatcactatgattatcgttggtattgatgttgcaaaggacaagcatgattgctttattatgaattcagaaggtgaagtactttttgatgttttcaccatatctaatactcttgaaggctttctgaccctactgtcaaatatcaagtctgtttccttagattttgataaaataaaaataggacttgaagccacaggacattacagctacaatctgcttggatttttgttaaacaacggtctgccaacctatgttttaaatcctctgcacaccaatctctaccgtaaaagtctgtctctgcgtaaaacaaaaacagacaaagtagacgcacgtgtgattgcttctatgctaatgtcttgcgtagacctcaagccctacacaagcacattataccagaatgaagagttaaagtcaatgactcggtacagatttgataaagtttctcaaagagcaaagctcaaatcatctgtatcaaggcttgtaataattctttttcccgaacttgaaaagctcgtacctacgcttcatatgaaatctgtttatgctttgctgagtgaatttccgtcagctaaacatattgctcgggctcatctcacacggcttacaaatctgctttacgaggcgtctaagggtcgttacgggaaagataaagctatccaaatacgtgatgccgcaaagcactctgtcggctctgttatgcctgcaaaatctcttgaacttaagcatactatcaagctcattggcgaactcactgacgagatagatgagattgatatggaaatcaagaaaatcgttgatgagtccggaacaacattgctgactgttccggggatcagctattcaaccgcagcggttatccttgctgaagtcggagatttttcaaattttgcaacacccgacaaggtacttgcttttgccggtatgtcaccgtctacatatcaatccggacagcttactaactgctacgctcatatggaaaaaagagggtcaaagtatctgcgttatgctttgtacaatgcagcaaagtatgtctgcaagtgggacaagaccttctccgaatatctctccaagaaacgttccgaaggtaagcattactatgttgctctttctcatgctgtcaaaaagctggtcagactcatattcgctttggaaaaatcgcacttgccttatcagccggctgcataaaacaactgcccgattatatattttttcaagcatctttcagatgcctgctttgctatactctttttcacctttgttaattcaaaaatatttctctttttctcattttggatcttgactttttatagttagt

SEQ ID NO: 5630 - DNA, 1575 bp, unidentified
  source 1..1575: mol_type = unassigned DNA; note = element_89f69e8
  misc_feature 1..2: note = core
  misc_feature 3..101: note = LE
  misc_feature 102..1229: note = CDS
  misc_feature 1230..1575: note = RE
  misc_feature 1309..1502: note = bridgeRNA
agactgtatgtcccttatcttgcagaggcgactcaccctcgatgcggtagcgagggttgcccggagaggccgggcagagcctcaagcaaggagggtgagtcatgagcgatcatagcgaagctttcgtagcttttgatacatccaagttacgtaatgcggtggcgattgcggacgccggtcgatcgggcgaggtgcggtttatcagcgagatcgagaacacaggtgcggcgacagccaagttggtgcgccggctcgccgccaagtacgagcggctgacgttctgctacgaggcggggccgaccggatacggcctgcatcggcagatcaagagcctcgggcacgagtgcgtggtggttgcgccgtcgctgattccgaagaagccaggcgatcgggtgaagaccaatcggcgcgatgccgtgagcttggcgaagttgctgcgcgccgatgagctcactgcggtgtgggtcccggacggcggtcatgaggcgatgcgcgatctgacccgggcgcgcgagaccgccgtgatggatctgcgttcgaagcggcagcaggtatcggcgttcctgctacggcaggggcggcactatccacaggacaggaagacgtggaccaatgcgcatagggactggttggcgagccagaagttcgagtatgcggagcaccggctggtgttcgaagagatgatgctggcggtccgccaggcgcaggagcggctcgagcgattggagcaggcgatccgcggcgcgctagcggactggtcgctggccgaggtggtcacagcgttgatggccatgcgtggcatggatttgatcgcggcggcgacgttcctggctgagatcggtgacctctcgcgcttccgaacaccgaccgagctgatggcctatctcggcctggtgccgtcggaagattccaccggcgacacgatcaagcgcggccccatcaccaaggccggcaaccgccgcgcccgccgcatgctggtggagtgcgcctggagctatcagcatccgccgcgggtggggcgagccaagcagcacaaggttgccgcagccccgcgagcggttcgcgagattgcctggaacgcgcagtgccgcctgcaccggcgctaccgggcgctggtccgcaggggcaagctcaagaccgtcgccatcaccgcgatcgcgcgcgaactcgccggcttcatctgggcggtcagtcgcgagatcaccaccgccccggctgtggccaggtaaggcgggctgtccaaagggagcaaatggctcgttcacagacctttccagggagcctgcgccggggcttggtccggtgaaaatatctcgtgcaacggcaggagcggagccgcggcaaaggggaattcccgatcatgctttgtggccgatcgccagatcgacgcccgtcctcagaccgggacagccccagacggaaagacggacatgcgtgaacccgcgaataagaggatgttgaccgacgtctccgggcttcgctcctaccgttgcacgatcatcccatcgacacctctccggagctcctgcagaggccgagttattgcacccgcctcggcttgactcgggacataag

SEQ ID NO: 5631 - DNA, 1388 bp, unidentified
  source 1..1388: mol_type = unassigned DNA; note = element_89fb1f5
  misc_feature 1..2: note = core
  misc_feature 3..54: note = LE
  misc_feature 55..1116: note = CDS
  misc_feature 1117..1388: note = RE
  misc_feature 1087..1373: note = bridgeRNA
agatggggtggttgccgtcctccccaagcggcatcgcaacgtgccagagttgtggtgttcacagccacaaagcggagaggacggcaagatgaaggatacgatgatcgtagtggatctggcaaaaacgttttccagcttcacggggcatcgctagccggacaggtgaggtaccgcaagaagctatcccgtgcgcagttccttcggttcatgtcggaacaaccgtcggcgcttgtggtcatggaggccagtggcagtgcccaccattgggcacgcgagctgactaaggtcggccatgaagttaagctgatcgcaccgcaatatgtccgaccgttcgtaaagcgccaaaagaacgatgctgccgatgcagaagctatcgtcgtagcggcgcgccaacctgagatgcgttttgttgaacccaagacatcggatcaacaggcgcgggctgttctattccgggcgcgcgagcgcatcgtccatcagcgtacggagctggtgaacgcgctccgatccacgctttacgagtatggccaagtcgttccgctcgggatcagccacatcaagcgcatcgaggcgattatagaggatgcggatgtcgatctgccggagattgtgcgagaagagtgccgcgacctgctggcccagatcggcgagaagacggcccggatcgcaagcaaagcagcgaagctcgccgaactgtcccgacaaagcgatacggcacggcggcttcagacgatgcctggtgtgggaccgatgaccgcgatggcggtcgacgctttcgcaccggccatggagacctttcgctgtggccgagacttcgccgcctggctggggctcgttcctcgtcagctctcgtcaggtggcaaggaaaagctcggtcgggtgtcgaaagccgggcaggctgacatccgcaggcttcttatcattggcgcgatgtcgcgtctcaactggctgggccgcaaagcgattgctgatggttcctggctcacccagctgctcgctcggaagccgcgaatgcttgtagctatcgctttggccaacaagatggcgcgtgcgatctgggcaatgttgacaaaaggcgaaaattaccgggatccagcgttgggcgtagttgcgtaactcgatgcgactatgacgaactaacgctggtaagaggggtgtgagaggtcagacgatctgaatgggcaaatgatcgaatagatcggatcaggaaaaccagaaaacgtactcgagcctcagctcgatgcttagatttggacctgtttcgcggatcaccataccggccagcggccttcggcagcgctgcacttataggcctgacagaagaccgcactcgatcacacgcaccatgaagatcagattcttcttgcaaccgggacggcaaccacaga

SEQ ID NO: 5632 - DNA, 1448 bp, unidentified
  source 1..1448: mol_type = unassigned DNA; note = element_89fe079
  misc_feature 1: note = core
  misc_feature 2..109: note = LE
  misc_feature 110..1129: note = CDS
  misc_feature 1130..1448: note = RE
  misc_feature 1145..1373: note = bridgeRNA
gaatggaagggacttccccgtcccgaactagccgcttagcggcaaccggcaacgaagtgccacgatgggaagtgcgaactctcatcaactcactcggaaggggaagtccatggccattctctacgtcgggattgatctcgccaagaacgttttcgcgatccacggagtcgacgagcacggcaaggccgtgctggtacggccaagcgtgcagcgagccaggctgcatcagttggtggcggcgctgccgccgtgcacgatcgggatggaagcctgctcgggagcgcatcactgggcgaggctttttgcacagcacggccacaccgtgcgcttgatggctccgaagtttgtcgcgccctatcggatgagcggcaagcgcggcaagaacgacgcagccgacgcgcaggcgatctgcgaagcagtgcagaggccgaacatgcggttcgttccggtcaagagccaggacgagcaggcgcgcttgtgcatccaccgcgtgcgccaagggtttgtcgagcagcgcaccgccacgatcaaccgcctgcgcggcctcttgagcgagttcgggatcgtccttgcccagaaggcggccacggtacgccgcgaggcggcagcgcacctggaggatctgccgggctgggccaacatcgcagtgggtgattgcctgagcgaggtgcaccggctcgacgaacgactggccgagtacgagcgacacgtcagccgcatggccggcgaggatgcgcgcagcgcaaggctgatgctgctacagggggttggctgcacaacggccagcgcgctcgtctcgacggtcggtgacgcgcgcgacttcaagaacggtcgtcagctcgcagcgtggctcggcttggtgcccgggcagtacagctcgggcggcaagacccgcctcggaggcatcaccaaggctggcgacggctatttgcgaactcttctggtgctgggcgccaagtcagtgctggccgcggccaggaacaagcaggactggctcagccgctgggcgatggcactcgaggtgcgacgcggctactggaaggcggtaatcgcgatcgcggccaagaacgcgcgcatggcctgggcagtgctcgccaagggcgaggacttcaggctgatcgaggcctgagcaccacaaatccgattcccgccacgcgtgacgaccaagcgttgatgagtcaagggttggacccgcgccgggagagctcgatcatgtcgaggagacaccgctcggtgttctcgcctaacgaatggagccccggcgcgcgtctttcatcagggtccgcagcaacgaacgctgcacgatgaccggttgtagtttggcagtccgcactcttgctgcctcagcgcttcgcctttgcacggtggtcgaccactgaagacgaacctcttatccgtcgctgcgcatcaaaaactcttgcgcttgatctcgaagggaagcccttgta

SEQ ID NO: 5633 - DNA, 1665 bp, unidentified
  source 1..1665: mol_type = unassigned DNA; note = element_8a01091
  misc_feature 1..2: note = core
  misc_feature 3..234: note = LE
  misc_feature 235..1650: note = CDS
  misc_feature 1651..1665: note = RE
catttagcctcggagggagtccgcaggcgggccgaacgtccgaccgggacacctggtgatccctggctttctgagtggtcgtctgcgggctcggtgtctgatcgggcggtgtccttgttcgggaacttggagccggccggtaggcgtggactcctgcttagagaatgtctgggccgtggccgcgatggtcagtcacctggtgaacagggatgtggaccgacaggagcaatgacaatggcattgacgttggggatcgacgtggctgtccgggcggagcatcaggcaacgctcgcccgtgatggtgccacggtatggcgtggccggaagttctggacacggccggccgacctggaacggttgtgggcggacttggacctgcccgatccggccgagctgaccgtggtggtcgagccgacccggaacgcgtggatcgtgttggcggagtggttccgtcgccacggtgcacgcgtggtgatggtcccgaccacccagtcggccgacctgcgtaagtactactccaagcacaccaagaacgaccggatcgactccgaattgctcgccggctgcccttgctgcaccccgaaggcctgcgggagtactccgggcaggggccccgcccactcgctgcgacgactggtcaagcagcgctccacgatggtcaagcgccgagtcgcggtctatgcccggctcgatgcgttggtcgagttgctcgggccggcgtggtacgcggtactcgggtccaactacggcgccgcggcgctcgagttcctttcccgctatgccgatccgcatgccgtgatccggttaggccgagcgcggctgaccaggttcctgatcgcccggtcccgcggtgcgtggcgcgacgatcacgccgccgggctcatcaccgcggcccgagagaccctcgccctgtggggcaccagcgacgggtctgacgggatggacttcgccgagctcgctgaggacatcgcccacgaagccgaacaggcactgttcctgacccgtcagatcaagcagatagacgagcgagtcgcgaacctctacgccgacgccgacccggccggcatcgttgcctctgctcccggcgtgggggcggtgatcagcgcggtcatcgctggacggatcggcgacccgcaccggttcacgtcccttgccgcgatccgcgcgtacaccggtctggttcccaacgtcagccagtccggggtgagcaaggtcgagtcctcgatcaccaaggccggggatccgctgttgcgtgagatgctgtgcaccgctgccgaccaggcccgcagggtcgatccccagttcgcggcgaagtaccagcggttgatggtcggcgaccggcaccacgagtccgcgatctgtcatctggccacccatctggtcacccggatcgccgcctgtatgcgtgccggccagccgtacgccttgcgggacgtcgacggcacgccgatcaccgaggccgagggccgggcgatcgtcacggcgcgctacaagatcgacccgcggcggcgcgacaacgtccgataccagcggatgcgtgagcgccgcaagcaggcggcgggccaggagtcccaggagtcccaggagtcgcgatgcgctccaacagcccagcccgccaagaccaagcctacgagccgccatgtggcttgacctgcgctaggaact

SEQ ID NO: 5634 - DNA, 1559 bp, unidentified
  source 1..1559: mol_type = unassigned DNA; note = element_8a03bc9
  misc_feature 1..2: note = core
  misc_feature 3..274: note = LE
  misc_feature 275..1453: note = CDS
  misc_feature 1454..1559: note = RE
  misc_feature 3..254: note = bridgeRNA
cttgtataatgaacatagggaagaacattatacattccctttctttaataataattatataatttaattagatgctgtggattagttatctcacctacagctgctatccctattatccaattctagcagactgtttcttttgaggctataaccacagctctatgtttaattgttaattagttagataacgcctgacgttttatctacaacaaggatacattcaacatagagttttgtggaaacacagcatactttatttaaggagatgttgctcatgctattcattggtattgatgtctctaaatcaaagcataactgttatcttgtcgattctgaaggcactattcatgaaaataatcttcagatccaaaatgatatccatggctttaaaactctatctcaaaaaatcacttccatctgtcaggctcacaatcataaaaaagtaaaaataggacttgagtctacaggtcattacagcactaatatcacaaattatctgtattctgaggggtttgaagttattatcttcaatcccattattactaacaacaatagaaaaagtaatactctcaggaaaactaaaacagataaaaccgatgcaaaggttattgcgaccatgctctttactgatgactcaaagtcctattcacctatatcatatcagataattgagctaaagtcactaaccagacaccgtcatcggatggtcagtcaacgcagtaaatttaaggtatcacttacacgattaataaccattatatttcccgagttgcctgaacatatctactctatacaccaaacatcatctaaagcattattattagaattaccaacaactaaggatatatcaaattgtcacttaactaaactcactaacttactcaagaaaaactcaagaggtaaatattccagaaataaagctattgagttaaaaaatatagctgctgaatctattggttcttctaatagagctaccgcttttgaacttaaacaaactattagattcattcagtttcttgatagcgaaattaaaataattgacaaaaaaatcaaagaattattggatgaaattaatacaccagtaattactatacctggtattggacataccttagcagcaactattattgcagaaatcggtgatatccatcgttttccaaaaccatcaaaactagtggctttctctggtttagatccatcagtatgccagtctggaaattataatgctacacatacaattatggttaaaagaggatctaaatacttacgatgggctattttacaggctgcgaaaacggttactatgcgagataaaacttttaaggattatctaagtaaaaagctttctgaaagaaaacactattttgttgctttatcacatgtgggtaaaaaactaattagagtcatttttcatttgctaaagaataatattagttttgtacctcaaacataggttttttaattctaatttttaatttgagcaactcagttgctctgtttgttatgccataatattttagaaaaatattttaaaaattacttgacttcatatagttagt

SEQ ID NO: 5635 - DNA, 1385 bp, unidentified
  source 1..1385: mol_type = unassigned DNA; note = element_8a04bec
  misc_feature 1: note = core
  misc_feature 2..87: note = LE
  misc_feature 88..1128: note = CDS
  misc_feature 1129..1385: note = RE
  misc_feature 1144..1383: note = bridgeRNA
taatgggatggtccgttccgctccccaaacggcatcgcaatgtgccagaatggaggtattccatacgaagaaggagcgaaacgaaccatgaagcaatctatcataaagggtgatatcaaagtagtgggtattgatttggcaaagagtgtatttcatctgcatgcagtggatggcaaaggccatgtggttttgcgcaagaagttgtcccgcaatcagcttgcggagtacatagctcagctttcctgctgtctggttggcatggaagcatgcggtggctctcacgcttgggcacgtaagttccgggagatgggtcacgatgttcggttgatcagcccccaatttgtgaagccatatgtgaagagcaacaagaatgaccaggttgatgcagaggccatttgtgaggcagtacagcgtcccacgatgcggtttgtgccgattaaatcagttgaacagcaggatattcaaagcctgcaccgagccagagagatagccattgggcatcgtacttcacagatcaatcaaattcgcggactgctgcacgaatacgggattgttgtcggtaaagggccggcgagtttacgcaaggcattacctgatattctggagaatgccgataatgaattgactcccatgttccgtgaactgctggatggtctgtatcaggagttgttacaccttgatcgacgcatcagcgaatatgacgcgcacattgccctgttggcggagcagagcgatgcatgccaacgggtgatgagtattccggggatcgggccgttgacagccactgcactgattgccgccgtaggcgatgcgaaagtatttcagaacgggcgtgagatggctgcttggttgggactggttccaagacaacattccaccggaggccaccccaggctacttggcatcagcaagcgtggtgatccctaccttcgcagattactgattcacggttccagagcagttcttcgttttgcatcgcacaaacaggaccggcgcagcagatgggctgcaagccttatggagcataagcatatgaatgtggcagctgtggcgatggccaacaagaatgtaagaacggcgtgggcattactgacgcgtcacgaaatgtttgaagtaacaatggcataaagctgtcatcaaatgatttttaacgagttgcgaggacttgaagcagaatggcaaaaaaggcggacgctgcattcccgggagcctgacgttaacactggccacaaaggccgctttagtgatgaggacgggaatgcgcggatttccatcggggccagaggcagacaaacaatcatgcctcaatcaaaggccggatatatgtgtgcaaccgatctttcagccaaagccttcagaccttgcaatgcgggacgaaccatata

SEQ ID NO: 5636 - DNA, 1236 bp, unidentified
  source 1..1236: mol_type = unassigned DNA; note = element_8a0604c
  misc_feature 1..2: note = core
  misc_feature 3..222: note = LE
  misc_feature 223..1212: note = CDS
  misc_feature 1213..1236: note = RE
  misc_feature 51..215: note = bridgeRNA
atggtaagtttgcattagtaaatgtactttaataaattagttaaaaaattaacctaaagataaaagcagcaggataaaggcagacgcttcactgatacttagatatcgtccccgattttattcccctgctgctgttttcttccaaatccggatagaacgttgtttagccataacttttaccatggtggatcagaagaaaacttctttaaaaaagaattttgtatgtcaaaaatatcaaaaaaagtaattggagtagatgtcggagcgaagtttttaacagtaagctttaatgattttgaaaacagagatcaggtttttaatatagaaaatacccagcgctctattttgtcatttctaaagaaactgcggatagaagattattgttttgtcattgaggccacaggaaattacagcagtcgtattttacatttatccttagttcagggctttgaatcaagtctgataaactgtatgtctgttaagcattttgcaaggatgaaaaacatcatcagcaagacagatgctgaagatgccaagctgatcaggctttacggagagatgtttaaacctgatatttatacttctaaaagtgttgatattgaacatcttgatcaggaactaaagcttctcaatgatttggaggaagaaaaaaggagatatggagtgaagttaaaatctcttcgctataatgctcagattaatccaaacacagaaaaacattatgaaagaagattacaacaattagaaaaagagattaaagaagttataagccgtctccctgggctccaggatgaagagtttaaggaaacaaaagcattactacaaagtgtatctggcattggtgaaaagacatctcttcaactgatgacggctacttcaggatttaaaaactttaattcagcaaaatcattatctaaatattttggcttggcaccccgtatttatcaatcgggaaagaaatcatattccccgggaaaatgcagaacctcaaagaatcatatcaggggcttgttatatgtttgttcgtggacggcaattaagcataacaaacaatgtaaagagttttatgaaagacttctttctcaggggaaacctaaaaaattagctttaattgcagtatgtaacaagctactgagaatatgttttggagtggtaaaaaataaaatcaattatcaaccagattatcaaaaaaactttaaaattttaacctgaataatttgcatagtaacatagaac

SEQ ID NO: 5637 - DNA, 1412 bp, unidentified
  source 1..1412: mol_type = unassigned DNA; note = element_8a0a881
  misc_feature 1: note = core
  misc_feature 2..94: note = LE
  misc_feature 95..1147: note = CDS
  misc_feature 1148..1412: note = RE
  misc_feature 1181..1402: note = bridgeRNA
taatggaatggacccatccccactttgacggcgtcacgaagtgcgccaggatgaaagtgtgtcaagtactttcataccgagaggagatgggtccgtgaataaggttacgacgctgggtatcgacttggcaaagacggtgtttcagttacacggcgtggactcggcgggtaaggtcgtgtgtcgtcgagaagtgcgccgcgcgcagctcatgaaagtcgttgcgcagctgcagccttgtctgatcggcattgaagcgtgcggaggagcgaactattgggcgcgtcgctttgccgagtttggtcatcaggtgaagatgatgagtccgcagtttgtgaagccctatcgtaagagcgacaagaacgatcgcaacgacgcggaggcgatctgcgaggctgtgactcgtcccagcatgcggtttgtcgcggtaaagactgtcgagcaacaagacatgctcacaatgcatcgagtgcgtgaagggctgatgaaggagcgtgttgcgctcatcaatcgcattcgtggctcactgtgtgagtacggaatcgtgatggccaaggacgtgagcaatctgcggcgccagctgcccggaatcctggaagatgccgcgaatgagctgacggcgagcgcccgacagctattcagcgagctatacgaagacttcgttgcacgcgagcagcggatcagccaactcgagcactcgatccgggcgctcggttcgcagcacgacgtcgtgcgccgcctactgacggtacccggcatcgggtatctgtccgcgactgccctgtatggcgcggtgggggacgcgacgcactatcgaaacggtcgacagctcgcggcttggatgggtttagtgcctcgccaatcctccagcggcggtaaacaacgattgctcggcatcaccaaacgtggcgacaattacttgcgcaagcttttggtgcatggagctcgctcaatcgtcacgcgtgcggagcgcactgcgcggcccgcagatcgatggctcaatgaactgcgcgagcgccgcgggaaaccgcgcagctatgtggcgcaagcgaacaagacggcccgaatcgcctgggcgatcatggccaagggtgaggtgtatagagcgcctagcgcagcgctggatgtaagcgcagccgtcgcagcctaggcaaagcggggttcacttgacgcagaattcccctcggcgattgcacaggcgatgacgaagtgatggcgaaattgatcagatcaactcggtgcaaacctgcttttcacacaggtcgttaagaccgtgagcctgtttaggtcaccgagagcagattccatcagggccagagagcgtgctctcagcaacaggccggatatatggctgcaatctcgatcaaaacaaagtcaccaacgcatcgacttgcaaacggggatgggtccatata

SEQ ID NO: 5638 - DNA, 1366 bp, unidentified
  source 1..1366: mol_type = unassigned DNA; note = element_8a20bde
  misc_feature 1..2: note = core
  misc_feature 3..75: note = LE
  misc_feature 76..1101: note = CDS
  misc_feature 1102..1366: note = RE
  misc_feature 1077..1353: note = bridgeRNA
tgatggggtggacgccccccgacggcatcgacgtgccaaggtggtggtgttgagcaccaccggagggaggcgtccgtggcggaggttagcaccatcggcttggatctggccaagcacgtattccaggcgcacggcgcgagcgcggctggcgccgtcctgttccgcaagaagctgcgacgcgagcaggtgctgtccttcttcgccggtcagcctcgctgccgcgtcgccctggaggcgtgcgcgagcgcgcaccactgggcacgcgcaatcggcgagctggggcacgaggtgaagcttatcccgccggcctacgtgaagcccttcgtcaaacgtcagaagaacgatgcggccgatgcagaagcgatctgcgaagccgcgcaacgcccgaccatgcggttcgtggccgtgaagagcgaggcgaagcaggctgccgccgtgatcttccgggcgcgcgatctccttgtcggtcagcgtacccagatcatcaacgcgttgcgcggccatctgggcgagtacgggctaatcgcgccacaaggtccctcgaacatcgagcgcctgatcgtgcaggtcgaggatccgacatccggcattcccgccgcagctcgcgcttgcctcgtgcggctcgtcgcggtgctccgtcatctgcaggacgagatcgccgaactcgacaaggcggttgcggcacgggccaaggccgacgccgctgcgcgccggctcatgacggtgcccgggatcggtccgctgattgccaccgccatcgaggcgctcgcgccacctgccgagacgttccgctcaggccgggattttgctgcttgggtcgggttgacgccgattcagcgctcgaccgggggcaaggagcgtctcggccgcacctcgcgtatgggtgagcggacgctgcaacgcctcctcatcttcgcggccagcgccgtcgtgcgctgggccaagcgcaagggcgtgccggccggctcgtggctcggccggatgctggcgcgcaagccgccgatgctggtcatcgtcgcactcgccaacaaaaacgcccgcgttgcctgggcgctgcttgcgaagggcgggacctatcgagctccggccgtcgccgcgtgagcggtcggcggatgtgaggctgtcgacggggtgaggaggtcgaaggacaggtatggcgcaacgtcggtgaggcgggatcaggagaaccaggcgcacggggagcgcttcgagcgcgttccagtgatgtggacctgatcctcgaactcccatacgggcccgcggccaatcttcgtgccgcactagaggccggacacatggcagcacccgatcacgcgctcgcagcttatcctgagattcttcttgcaccggagggggcgtccacaca

SEQ ID NO: 5639 - DNA, 1393 bp, unidentified
  source 1..1393: mol_type = unassigned DNA; note = element_8a27a69
  misc_feature 1: note = core
  misc_feature 2..78: note = LE
  misc_feature 79..1128: note = CDS
  misc_feature 1129..1393: note = RE
  misc_feature 1160..1384: note = bridgeRNA
taatgggatggtccggccgtgttcctgccctgccagcaattaaagctggcaaggggcgcccacgacaaggagcacgccatgtcccagactgcccaaactgccgtcgccgtcatcggcatcgatatcggcaagaactcgttccacatcgtgggccacgatgagcgtggtgccattgtgctgcgccagaagtggtcgcgcgggcagatggaggcccgatttgccaacctgccgccgtgcctgatcggcatggaggcctgcgttggcgcgcaccatctcagtcgtaaactcaatggccttggccacgatgcccggctgatgccggcgaagtatgtccgtccctattcgaaagggcagaagaacgacttccgcgatgccgaggcgatcgccgaggctgtgcagcggccaaccatgaagttcgttgccactaagacggcggaccaactcgacctgcaggcgctgcaccgggtgcgcgagcggttggtcagccagcgcaccggcatcatcaatcagatccgcgccttcctgctggagcgcggcattgcggtgcggcaaggacagcgtttcttgcgtgccgaactgccacgcatcctggccacgccacctgatgtcctgtcgccacgcatggcgcgggtgatcgaggacctggctagcgactggcggcggcttgatgagcgcatcgaagggctgtcagcagagatcgacgttctggcccgcgcggactccggctgcgagcggttgatgagcgtaccggggatcggcccgatcatctccagcgcgatggtggctgcgattggcactggtgacgcattcaccaaaggccgcgacttcgcggcttggctggggcttgttcccaggcagatgtcgaccggtgaccgcacgatcctcggcaagatatcaaagcgcggtaatcgctacctgcgggttctgttcgtgcaggcggcctgggttgtgttgatcaagcccaagagctgggagcgccatgggctcaaagcctggatcgaggcggccaagaagcggctgcaccacaacgtgctggcgatcgcgcttgccaacaagctcgctcgcatcgcctggagtgtactggctcgcggccggggcttcgaggcgagcaagcttcaggtcgcgtagtcatcgaaccggcgtagctagcgccggcaagtcccaccgaggtctgcgagagaacgagacgagatggaggttcggtcttcccggcgcttgcgaacactggtgacccaaatggcccccgaggtctttccgctaatgagatcacaggcgcgctgatacccataatggccaggagcgagatgctccaaccaaaggccggatacattgatgcaagaccgctaccgccaactcgacgaaattctcttgcgacgcacggccggaccataca

SEQ ID NO: 5640 - DNA, 1471 bp, unidentified
  source 1..1471: mol_type = unassigned DNA; note = element_8a33276
  misc_feature 1: note = core
  misc_feature 2..247: note = LE
  misc_feature 248..1450: note = CDS
  misc_feature 1451..1471: note = RE
  misc_feature 44..213: note = bridgeRNA
cgttacctttttcgtggcgcctggttccgggaggatgtaggcgtaggtaaccagccggtcccggcatgatgtctgcccccagtcgaccatgatcgcaggcggtgaaggcagccggggccggtactggttcacacggaccgctaatagaagcacgacccgatgcgtggggctttgtaacgtggacgtgggcgagtgaaccacctggttacctcacccttacccctgagtgatgaaaaaggtaaccgcaatggaccaccagctctacctcggcatcgacctcggcaagaccgaacaccacgccaccggcatcaccgcggcaggcaccgtcgtccacgacaaacccttaccccagtccgaacccaagatccgggccctcttggaagggttgcaggccacacacggcccggtgttggtggtcgtggatcagcccaaaaccatcggtgccctggtgatcgcggtggcccaggacctcggtattgatgtggcctacctgcccgggctgaccatgcgccgggtcgctgacctgcacccgggccaggcgaagaccgatgcccgagacgcgttcatcatcgccaacaccgcccggactttgcctcacaccctgcgcgggatcaccgtgagcgaagagagcatcgcggaactttccatgctatgtgatttcgacgatgacctcgcggcccagatcacccaggtccgcaaccggctacgcgggttcctcacccagatccaccccgccctggaacgagtcctcggaccacgactggaccaccgcgccgtgatcaccttgctcactcgctacccctccccggccaggttgcgaaccgccgggcggggccacgtccgaagcgtactgaagaaacacgcgccccggctggcggagaaactcaccgaagagatcttcacggccttagctgagcagagcgtgatcgtgacgggcaccagcgcggcggagaagatcatcgggcgcttagctgagcagttggttcagttgggagctcagcgcacggagatcgagaccgagatcctgacagtggtcgatgcccaccctctcacccaggtcctgacctccatgcccggggtaggggtcaggacagcagcacggatcctcaccgaagtcgtaggcaaggacttcaaagacgcagcccaccttgcttcctacgccggcatcgcccccgtcaccagacgttccgggtcttcgatccgcggtgagtcgccctcccggcgaggtaacaaagtcctcaaacgagccttgttcctctccgcgttcgcctcgatcaacgccagtcccgcctcacgtgcctactacgaccgcaaacgcgcacagggcaagcgccacaaccaggccgtgatcgccttggccagacgccgcaccgatgtcctctacgcgatgctgcgcgacgggacgttctacagcgaacccaccccacccgtcgtggccctagccgcttgacgaaaaccatagaagcacccc

SEQ ID NO: 5641 - DNA, 1379 bp, unidentified
  source 1..1379: mol_type = unassigned DNA; note = element_8a39129
  misc_feature 1..2: note = core
  misc_feature 3..79: note = LE
  misc_feature 80..1114: note = CDS
  misc_feature 1115..1379: note = RE
  misc_feature 1114..1366: note = bridgeRNA
tgttggtgtggacggcctccacacggcatcgattgtgccagattgaggtcgtgcagatctcaagcgaaggagaccgtccgtggagaagattatccgaatcggcctggatacatcaaagcacgtctaccaactgcatggtgtcgattctgcggaggagcccgtgctccgcaagaagctgcgccggaaggagatggtggccttctttcagaagttgtcgccgacggtgatcgcgatagaagcctgtggcgggtcccatcatctggctcgctctctcgcaaccttcggccacgaggtaaagctcatcccgccgcactacgtcaaaccgtatgtcaagcgcgggaagaatgacgcggccgatgcggaggccttgtgcgaggcgatgagccggccaagcatgcgcttcgtgccggtcaagaccgccgagcagcaggctgctctaatgcttgtcggtttacgcgagcgtctgatccgcaatcggacccagctcgccaatagcatccgtggcaacgcggccgaattcggggtcatcgccgcaaaaggtctgtgcagaatcgggccgctgcttgaacggattgcggccgacgtgagcctgccggctctcgcgcgggagctgttcgccattcaggcgaaggaatatgccctcatcgaagcagaactcaaagtcatcgatgtcaagctgatggcttggcatcgcgacaatgcgtgcagccggcgcctctcgcagatcccaggcgtcgggctggtcggcgcgtcgatgctggtcatgaagacgcctgatcctcgcctattccgatccgggcgccaattcgcagcatggcttgggctgacaccaaaggaccactcgacggccgggaaggtcaggctcggcgtcatcacgcgtgctggcgacgaagccttgcgcagcacccttgtcgtcggggccaccgctcttcttcggcgcgtccgcgaagggagcaacaggagctcttcggcctggctgctggatctgcttcggcgcaaaccaccgaagctcgtggccgtggcactggccaacaagatcgcacgcatcgcctggaagctcatggtgagtggcgagacttaccgggcttccttcgtcaccgtctccgcggcctgatggatcagcgcggcgggactgaatgaacgatgcggattttggatcttgcgaggaaacgagcagatggcgatcggtcgatccgagacgtgaagaaggccgcagcatgcatcggccgtaacaggccgcccgagtgtttggcgttcacgttgcggaaaccatcttggcccgcggtcatgtgtgaccgcctcgatgaggccgaacatatgactgcaagcgatccgatcatcgaagctcaagaccttgcgggaagggggccgtccacata

SEQ ID NO: 5642 - DNA, 1578 bp, unidentified
  source 1..1578: mol_type = unassigned DNA; note = element_8a396d4
  misc_feature 1..2: note = core
  misc_feature 3..288: note = LE
  misc_feature 289..1467: note = CDS
  misc_feature 1468..1578: note = RE
  misc_feature 10..268: note = bridgeRNA
gtataatgtatttaggttgttcaagggatacctataaacccttagacctacttctttacatctcctctctaataggagataataagtttattcgattgagaggatgatcctttcctccttgagcgtctctgctcgtacttgaaagactgatccctctctctaataagctttctgcgtatgagttggatgttggttgccttttggcttctctccgtatttagcacaaggtagcagtgcttattagagctgtgggctcccaatctaaaatctttctttgaggtgtttgctatgttctttgttggtattgatatcggtaaaaacaaccacgttgcttctatgatggatgaatctggaaaaattgtttttaaagctttttctttttccaatacttcggatggtggaaatgccctgttttccaagctttcttcctattcctccaatccttccacttttgaaattggtatggaagcaactggtcactactggctttctgtttattccttcctctttgagaaaggttttcttctccatgtcatcaatcctattcaaacagatggatggcgtagaggtatcgaaatacgcaaacgtaaaaatgacgtcattgactctgttctcatcgctgatctgatccgctatggacagtttgtggaaactagacttgctgaccaagatttattctcccttcgtaccctaacacggtttcgttcctatctagtggaatccatcagcgacctcaagcgaaaagttgtttgcgtcctcgatcaagtattcccggaataccagaccattttttccaatatttttggtaaaacctcaaaagaaatccttcttcggttttcttcacccattgattttgaaaatgtttcatcccaaactctggctgaacttcttgcacagctcagcaggcaaaaagttggagctacaaaagccgaaaagttaaagaatgcggcttccagttcgtttggtattactttcgccaaaaacagctttacttttcaattaaaagccttgattgaaccgatctcctttatcgaaaatcaggtaaaggaaacggaaagcgagatttccagacttatggataaactagattccccagtcacgaccattactggtatcggcaatgttactggagctgcaatcctcagcgagatcggtgatatttctaaatttgacagtcccagaaagctggttgcttttgcagggcttgatgctactgtcacgaaatctggagaatttgaagctagccacaatgtcatgagcaaacggggttccccttatcttcggaaagctattttccaggctgccctgatcgcttctttccatgatcctgtgctaagcgtgtattatcagaaaaagaaaacggaagggaaacatcatctaacctgtgtgggtgcagttgccagaaaaatgtgtaacattatttatgctgttctaaaaaacaagcagccttatgttccaaaagcgtagacccttataccctgttcaggcttgctgataggcaagccttattggcgtactcttttttccagaaaatttctttttatttttttcaatcatctacttgacttttaatagttg

SEQ ID NO: 5643 - DNA, 1455 bp, unidentified
  source 1..1455: mol_type = unassigned DNA; note = element_8a42c5f
  misc_feature 1..5: note = core
  misc_feature 6..232: note = LE
  misc_feature 233..1438: note = CDS
  misc_feature 1439..1455: note = RE
  misc_feature 1..236: note = bridgeRNA
cccccgttacctttttcgtggttcctgatcaaggagctgtggtcgccgggtccggcatgactttgtcccccagtcgaaggcatgatccggggggtggtgtcaccggacccggtggcatcgccggaccgctcatagggacacggccaccttcgggtaggtctcgtcgtaacgtggctgccggccgacggtgccggaccctcgaccacaccgcacgacacggaagacactcggcatgaccagcggttaccaggtgttcctcggcgtggacgtgggcaagggcgaacaccacgccgtcgccctggaccccggcgggaaacgcctccacgacgccccgctgcccaacaccgaacccaagcttcgggcagtgttcgacaaactcgcccgacacgggacggtgctggtcgtggtagaccagcccgccaccatcggcgccctgcccgtcgcggtcgcccgcgccgtcggccaccgggtcgcctacctgcccggcctggccatgcgccgcatcgccgacctctaccccggcaacgccaagaccgacgcccgcgacgcccacgtcatcgccgacgccgcccgcaccctgccccacaccctgcgcgcggtcgacaccggcgacgacaccctggccgaacccggggtgctggtcggcttcgacgacgacctggcagccgaggccacccgcatctccaaccgcatccgcggcctgctcaccggcatccacccagccctcgaacgcgccctcggaccccgcatcgcccatccggcggtgctggagatcctgtcccgctgcggcggaccgacaggcatccgcaaagccggacgacgcaaagtcgccgcgatcgccaccgcccacgcaccccgcatgggcgacaggctggtcgagcagatctggaccgccctggacgaacagaccgtcacggtcccgggcaccacggcggccgacaccgtgctgcccagactcgccgacagcctcaaggccgtgctcctgcaacgcaaaagcgtcgccgacgaggtcgaggggatgcttgatgcgcaccctctcgccccggtcctgatctcgatgcccggcatcggggtcaggaccgccgcccgcatcctgctcgaagtcggcgacgcctccggcttcgccagctccgcccacctggccgcctacgccggcatcgccccggtcacccgccgctccggctcgtcgatcaaaggcgagcatccggcccggaccggcaaccgcaagctcaaacgggcgttcttcctcgccgcgttcgcagccctctccgacccgaccagccgcgcctactaccagcgcaaacgcgacgaagggaagaaacacaacgccgccctgatctgcctggcccgacgacgctgcgacgtcctgttcgcaatgctccgcaacaagacccactaccgccaccccgagaccactcccgccccggctgcggcttgacaaccacatagggacac

SEQ ID NO: 5644 - DNA, 1360 bp, unidentified
  source 1..1360: mol_type = unassigned DNA; note = element_8a46010
  misc_feature 1..2: note = core
  misc_feature 3..71: note = LE
  misc_feature 72..1100: note = CDS
  misc_feature 1101..1360: note = RE
  misc_feature 1102..1350: note = bridgeRNA
ttatggaatggcccgccccaactctccggcgtcggatacgatgccggtgcttgaacagagaggagcgagccatgagcatagttacgatcggcatcgatttaggcaagaacagctgcagcctcgcggggctggacgaacgcggcgccgttgtgttgaggcgtcggatgcaaccggccacggttgtgagcttcgcgtcgaagcttgcgccctgcaccatcgcgatggaggcctgctgcggggcgcatcatctgggccggatgctcaccgcccagggccacacggtcaagctgatgtcgccggagtacgtccgtccgtatgtgaaggcgcagaagaacgatgatcgtgacgccgaggcgatcgctgaggcggccacccgtccgacgatgcgctttgtagaactcaagtcgcaggagcagctggacatccagacgttgcaccgtgtgcgctcgcgcttggtcaccgcccggacgaccctgattaaccagctgcgggcgattctgctcgagcgtggcgccaccttcgcccaaggtcgccgcaagttcgagacggggctcgacgcgatgcttgcagatgcggaacgcttgccgccgggccggatccgtcagctgatcctcgatatgcgcgaagaatggtcggcgctggatcggcgtatcgttgctctcgatgaggagtttgccgtcctcgcgcgaacagatgaggcggcgcggcgactgacctcgattccaggcgtcggcgctttgaacgcgaccgcgctggtcgccgcggtggggcgggcggagagcttcgaccacgcccgtgatctgggcgctttccttggtctggttccgcgccagcacaccactggcggcaagccgcgacttcttgggattagcaagcgcggcaatgcgtatctgcgcaccctgttgatccatggcgccagggcggccttgccgtcgttagctaagagtgagaccgcgctcggcgcctggctgcgcagtcttttggcgcgctgtcatcacaacacggtggtggtggcgcttgctaacaagctggctaggatcgcctgggccttattgcgtcgggaggagaccttctcgatcggccgggcgacgatggtctgatgcaatcggtcgccggcgcttaacacgctgtgtgacccaaccgaatgtctgcgggaggactttgaaagatggcctgacggttaccgacgtcctgacagcctggtttaaaagatggcacatcgatgccgacgtttttatgaggcagggacgtgcggctctccatcttggcggcggcctatgccgacacgccgtatacgttgatgcagatcagtcagacgccacgatcaataaatccccttgcagacggggcgggccatacg

SEQ ID NO: 5645 - DNA, 1404 bp, unidentified
  source 1..1404: mol_type = unassigned DNA; note = element_8a4c600
  misc_feature 1..2: note = core
  misc_feature 3..137: note = LE
  misc_feature 138..1163: note = CDS
  misc_feature 1164..1404: note = RE
  misc_feature 1174..1364: note = bridgeRNA
acattgggtaatcgcggagcgagtcgccctcaggccagatggtccctgcattgaagagcgggtggttgttccccgataagatgaagatacgggctcacggccggacgccgggcccaagcatcgaacggagaacaaccatgggtgagtatatcggtcttgacgtgtcgttgaaagacacggccatctcagtgcggcgggacggcaagcggatctggcgcggcaaatgcccttcggatccgagcctgatcgcggatgttctccgcaagcgtgcgcccgagcccaagcgggtggtgttcgagaccggccctttgtcggtgtggttctatcatgcgctccaggccgaggggctgccggccatctgcatcgatgcccgccatgccaaggccgccctcgacatggcgccgaacaaaaccgatgccaacgatgccgatggcctggctcatctggccgaggttggcttctaccgcgaggtgcgtgtgaagggctatgacagcatgctggtccgtacgctggtagccgcacggtcccgattggtccagatcacgaccgagctgtccaaccagatccgcgggctcatgaagacgttcgggctggttatgccccgcggcaaaggtggcacgttcgaagccgaagtccagcgcctgctggcagggcaggaggagctcgcccggatcatcctgccggtgctggaggcctggcgcagcgtgcgcagccgtgccgccatcctggggcgacagcttctggctaacgcccggcagagtgcggcttgtcagcggctgatgtcgatccccggagtgggggcgatcaccgccacctcgttcaccgctgccattgaagatcctgctaacttcaagacgtcgcgctcagtcggtgcctggctggggctgacgacacgccgctatcagtccggtgaggttgactatgacggccacatctcgcggcgtggcgacgctcatctgagagggctgctctatgaggccgcgaccgtgatcttgacgcgcactcatgccgagagcgacctgcgccagtgggggctgatgctgcgcgagcggatcggcttcaagcgggcagcagtggccgtagcccgcaagttggccgtcatcatgcatgcgatgctcaaatccggagagcccttcaaccgggtggttggcgccaccgcctgacccagaggattcagatgcgcctgtgctgaggcgtccctgccgggacgtggacgaaccattccgccgagcctgttgcactttgcgagccccaagcccgcagcgtgcgttccacaccttggaaggttcctcccgcgaagcccaatcatgcggcgacactgtctcgaccgcgaagacgacactgctcccggcaaaccacagcctcgacacaaaaagggcttgcattccaccgcgcgattagacg

SEQ ID NO: 5646 - DNA, 1479 bp, unidentified
  source 1..1479: mol_type = unassigned DNA; note = element_8a54a62
  misc_feature 1..3: note = core
  misc_feature 4..253: note = LE
  misc_feature 254..1474: note = CDS
  misc_feature 1475..1479: note = RE
  misc_feature 11..249: note = bridgeRNA
cccgttactttcttcctacccggttgaggagggatccttggagggtgttggccatcccgggctcggcatgattcctgccccctgtcgttgatgatctggggggtgttgtcaccgagcctggtttggcggcaggggaatcgctgatagggacagggcccggactcgtccgagtgtcgttcgtaacgtggatgtcgagctccgccgcttcttggttcggccaacactgcaaccgagttcggaacgggaagggccgatggaaacaagcatcatcgggcacgacagcgtcgacgtgttcataggtgtcgatgtcggcaaaggtgagcatcacgcggtcgcgatcgactgcgccggggagcgcttgttcgacaaggcgctgcccaacgacgaaggcaagctgcgcgcgctcatcgatggtttgaagggccacgggacgctgctgttcgtggtcgatcagccggccacgatcggcgcgctgccgatcgcggtcgcgcaagccgcgggcgtcctggtcggctacctgcccgggctcgcgatgcgccgcatcgcggacctccacgcgggagaagccaaaacggacgcgagagacgccgcgatcatcgcggaggctgcgcgctcgctcccgcacgccctccggtcgattcagctcgcggacgagcaggtcgcggagctgagcatgctctgcggcttcgatgacgatctcacggggcaagtgaccgcgacgagcaaccgcatccgaggtctgctcacacagatccatcccgcgcttgagcgggtcctgggtccgcatctcgatcaccccgcggtcgttgatctcctgcaacgtcatcccgcgccagcggatctcgcgaaaatgggacctgcgcgtctcgccagccggctcgtgaagctcgcgccgcgcatgggcaagcccctcgcggccgagatcatgcaggcgctctccgagcagacggtcgtggttgtcggcacgaacgccgcgagcctcgtcctgccgcgcctcgcgaagcagctcgaggacctccgcacgcagcgggcggagatcgcggtcgaggttgagcggctcgtcgacgcgcaccctcttcagccggtcctgacgagcatgccgggagtcggcgacaggaccgcagcaaggctcctcaccgaagtcgccgggaagtcgttcgcgtcagccggacacctcgcgtcttacgccgggctcgcgcccgtcacgagacgctccgggtcctcgatccgaggcgagcacgcttcccggcgcgggaacaagatcctgcaacgggccttgttcctgtcagccttcgcagcgctcagagacccagtttcgcggtcctactacgaccggaaacgagcgcaaggcaaacgtcacaaccaagcactcattgccctcgcgagacgacgatgcgacgtcctctacgcaatgctccgcgacggcaccatctaccaaccacccctagcccttgccgcttgccaagaaccatagggaca

SEQ ID NO: 5647 - DNA, 1229 bp, unidentified
  source 1..1229: mol_type = unassigned DNA; note = element_8a5748b
  misc_feature 1..2: note = core
  misc_feature 3..239: note = LE
  misc_feature 240..1214: note = CDS
  misc_feature 1215..1229: note = RE
  misc_feature 6..213: note = bridgeRNA
cttgtatctcgacttcagccctgtcaatgggcaatagtccccgactgatcatcgggggaaggactgggaagacgtgcgcacccttaggcttcgagcctgcatcgtagatagcactcccgccttccgcactcgctcgaaaagctcgaacggtatctagagtccacatgctgtgagaactcgcattcacaaggcagggccgggcgcagtgacgatcatcgtggattgagcgaggagtttttatgtccagcatcgtaggcatcaacattgccaaacacagtttcgacattgctaccgtgcaagccaacggtaagtttcgcaccaaggccaagctgcccaacggcagtgccggtttcgaactcttgcaagagtggctgagcaagcacgccgctcctgatgcctgggttgtgatggaggcaaccggcacctatcacgaggcactggccgagtacctgtatagcctgggcggctaccgggtctgcgtgatgaatcccgcacagatcgcctactacgcccgcagccaactgcagcgggtgaagacagaccaggtcgatgccaagctgattgccctctacggcctgcgccatgtggatgagctgcgtctttggcagcctgagcctcaagcgatccgtcgcctgcgggcgctggtcaggcgtctgcaagacctcaaggagatcaagcaaatggagagcaatcgcctggaggtggccgatgacagcgtacaggagtccatccgcctggtgatcgagcgtgtggacgaacagatcaaagagaccctgagggccatccggaaccatatcgacaacgacccagacctgcgcaacagacgtgatctgctggaaggtatcgatgggatcggagagctgacggcggccctgctcatggcggagctgggcgatccggtgcagttcaaggatgcgggcgccattaccgcctttgcaggcttgaacccgaggttacaggactcgggcaagtacaaggggcatgtgcgcatctcacgggtaggctcagcgcgtttacgggcagggctttacatgccgtccctcgtcgccatcacttacaatcctgcggtcaacgctttggcacagcgcttacgcgaacgaggtaagaccggtaaacagatcatctgcgcggcgatgcgcaagctcctgtgcatcgtttatggcgtgctgaaatccggtgtgccctttaaccccgaattggcacttgctcggtgagggccaagacggtat

SEQ ID NO: 5648 - DNA, 1410 bp, unidentified
  source 1..1410: mol_type = unassigned DNA; note = element_8a5a67d
  misc_feature 1..2: note = core
  misc_feature 3..111: note = LE
  misc_feature 112..1155: note = CDS
  misc_feature 1156..1410: note = RE
  misc_feature 1175..1405: note = bridgeRNA
agatggcgtaacgggccggctctggcgcgacggggtggtcatccctcagaatgatggtgtgaaccgacggagtcaggcttgggcctgctccaaacatcgagagggacgaccatggactattatgccggaatcgacgtttcgttggaagcctccagtgtttgcgtcgtggatgcgagcggcaagatcattcgggaggcgaaagtcctcagcgaagcggaaaacctgattggttggttcaaggagcttggccttgaattgacgcgcattgggctggaggcgggccccttgtcgcaatggctctacgcggccatgaagaaagatggcttggcggtggaattgctggagacgcggcatgttcatgacgccttcaaggcgatgccggtcaagagcgatcggaacgacgcgcgcgggatcgcgcaattgatgcggttgggctggttccgcccggttcactgcaaatcgatgccggcgcaggaagtgcgcgcgctgctgacggcgcgcaaactggtacagtcgaagctgttcgacattgagatgagcttgcgcggcatattgcgcgggtttggcctgaaaattgggagaacgaccccgaaccgcttccgcctgcgcgtcgaggagctggtcgcgggccatccaaccctggagatcatcggcaaggccttgttggcggcgcatgaggtcttgctgcgcgagttgaacggctttgaaaagcgagtgcgacaacaagcgcgccaggataagcgggtgctcctgatgatgtcggcgccgggcgtcggatcgatcgtgggtttgacctatgtcgcggcgatcgacgatccgaccaggttcaaatcgtccaagcaggtggggccgcatttcgggctgacgccgaagaaatatcaatccggcgagacggattacagcgggcggatcagcaagatcggcgatgcctcggtgcgcacggcgctctacgaggccgccaacgtgatcctgaccaaaccgctcaagggcgcgaccgcgctgaaaagctggggaatgaaattggccaagcgcgcgggtatggccaaggccaaggttgcgctcgcccgcaagttgggcgtcatcctgcatcgcatgtgggtcgacggaacgcagtttgccgacaaagggatgtctcccaagccggtaaccgcataacggagaacggaaacaaaggttttcgggtggggcgcgacaccagccttcccgaagcgaagtcccttcgccgggacgatggaagaggtcagatcgttacgggctcagtgacggcgacgatcacgcgtcctcagattggtcggcctcctcctcatctaatcccatcaggtggcggtcttgcgccgaccacggacagaagagtgactcggcgaagagatgacgcaacaaagggattgacagttcgaggcccgttacaga

SEQ ID NO: 5649 - DNA, 1408 bp, unidentified
  source 1..1408: mol_type = unassigned DNA; note = element_8a6135f
  misc_feature 1..2: note = core
  misc_feature 3..92: note = LE
  misc_feature 93..1136: note = CDS
  misc_feature 1137..1408: note = RE
  misc_feature 1178..1405: note = bridgeRNA
taatgtgatggactccaccctcctgatatcggcatcattgtgccaagcgtgccagattgagctggcaagctaaaacaagagggggagtcaccatgaatgctagcgcaaaagtcgttggtttggatattgcgaaggacgtgttcttcgcggtcgggctcgatggacacggcaggcgggtgttcaagcgtaagctttctcgagaccaggtgcttgcgcagttcgcgcagatggccccggcgatgattggtatcgaagcctgcgcaggttcgcattactgggcacgcaagctcgtggaaatggggcacgacgccaaactgattgcggcccaacacgtcagggcatatgtcactggtaacaaaaacgacatgaacgacgctgctgcaattgccgaggcacgctcgcgcggttcgaccaagtatgtgccgatcaatacggctgcacagcaagatttacagatgctgcaccgcgctcgcagcgccctgatgacagaacgggtggcgatgatcaacaggatccgggcatttgccggcgaatatggccgggtatttcccaagcgcgtggaaagattgcgcgacggactgaaagcatggctgaacgatccggacaatggtttgtctggtatggccctggagacattccgggagctcaaggcccagctggacgacaaggacgagaggattcaggcgtacgaccgacgtttgaatcaggcagccaggtcggaactggcgaagaaactgatggaagtgccgggtgtagggccgttgacggcaacggcagtgcaggcaacgatcgccgatccgcaccactacaagagcgcgcgagactttgcagcgaatttaggcctcgtgccacgcgagcatagcagtggaggcaagcagcgcttgtatggcattacctgcaggggcgacagctacctgcgcaccctgctcatacacggagcgcgcagtgcgctgagaacagcaagcggcaagcccgacaagctgctgcaatgggcaacaaggctggcagaacggcgcagtttcaacgttgccgcgactgcgctggccaacaagatggccagggtgatctgggcgttgatcgcgcacggacgtccttatgttccggcctggtcgaaagacacgcccaggccggcctgaaaagactgtcgagtaactcagcaacaacaaggagcaatcgccaagtttgcgacgagaagaacgaatgatgccaacaggtcgaaccggcgtcgggtgaatccgtaaactgtagtggccatcaaggccgtcaccctatgaggatcctgacgcgcgtatcacatcagggccagagcactggaaacgctcaacatacaggccgaatagatacaagcaaactcttcctaacggcaaaaattcaatcttcttcttgcaaatcgggtggagtccataga

SEQ ID NO: 5650 - DNA, 1376 bp, unidentified
  source 1..1376: mol_type = unassigned DNA; note = element_8a72e16
  misc_feature 1..2: note = core
  misc_feature 3..213: note = LE
  misc_feature 214..1185: note = CDS
  misc_feature 1186..1376: note = RE
  misc_feature 41..219: note = bridgeRNA
cttgtattagggcgccggactatagtggcctcgttccgagaggaatggcccaacccgggtggccacccgagctgggccgccgatcgatcggatcgttgcccaccgaagccttgagagctgcgttttgtagcaagatcgcggtcggcacttcatcgggacccggatggttgaacgaacttcaggttcgcatcagacaagggagggtcgaggaagatggccaagcgtatcacgatctgtgccgggatcgataccggcaaacgcaagctcgacgtggcgctcgatggcagctcggagcagctgcaggtggagaacacggcggaaggtcaccaggcgctggtggagtggctgaagaaccacaaggtcaagcgggttgggatcgaggcgagtggaggctatgagcaggcggttgtcagtgagctgcgccgcaagcgatttatcgtcgtcgtcttccagccggcccaggtccgtgcgtatgccgggttcctgctgcagcgggccaagaacgacaagatcgatgctgccttgattgcggcctgcactgctgccgtcaaggaaatccaccccgctccggatccccggctgcagccctttgccgagcatctgacgatgatcgatcagatcaaggaggacatcgcaaagctcaaaaaccgactggagagctgccgtaacgagcgtatccagaagcactggaaggagcagattgctctcttggccaagcacaaacgagccgagttcaaggctctggtggccgcgatccgcaggcatcgcgacctcgccgcacggctcgatctgatctgcagcgtcggcggcagcggtctgccgaccgcggttgccatcctggtcaggatgcccgagatcggccagatcacgcgcgagcgagccgcagctctcgccgggcttgcgccttacgatgacgacagcggtgatcgccgcggcgcccgacacatcgacggcggccgcgaacgcctgcgacaggcgctctacaccgcggctcttccggcatccttccgctggaatccgcaactcatggcgctgtacagacgcctgagtgccgccggcaagggccacaaatgcgcgctcgtcgcctgcgccaggaagttgctcgtcatcatcaacgccgtcgtcgcccgcggaacgccgtggcttgctgaaccgtcaaaagctgcgggcgtgcccgccacctgagcccgtttctttgttcggccgaagcaccgtttcttcgtcccgacctgccctcaccacgacgccgcgcgccgcggccgtcaaggctggccgtcgctccggcctcaccccatcgccgctgccgccaggccacgccttgacggccgcaagcacggcgtcatgctcgcggcaatcggacggcgctttaatggttg

SEQ ID NO: 5651 - DNA, 1344 bp, unidentified
  source 1..1344: mol_type = unassigned DNA; note = element_8a755ba
  misc_feature 1: note = core
  misc_feature 2..294: note = LE
  misc_feature 295..1098: note = CDS
  misc_feature 1099..1344: note = RE
  misc_feature 1106..1340: note = bridgeRNA
taatgagatggtcagcccagttcgagaaacccggtgagtctagacttaccgggtttctctcttgaccgaaggaggatctctcatgaacaccgtaacgcttctaggtatcgacatcggcaagaacaccttccacctgcatggccaggatgcgagaggaaatcagctcatgcgcaagaagctcaatcgttgccaattgctgccgtatctggcgcagttgccaagctgcaaaattgcatggagtcctgcggcagttcgtaatggctggctaggcagatcgagggcttgggccaccgcgtgcaattaatcgcggcgcagcatgtgaaggcctacgtcactggcaacaagaatgactttatcgatgcagaggccatctgcgaagccgcgtcgcgacccagaacccgctcggttccagtaaagacccttgagcagcagatcctgtcgactgagcacaagctgcgcaagtcttgggtggataatcgcacgcgaatcatcaaccaggtgcacggtgtcctgctggagctcaggatcattttccccattggacatgctgctctggagcaggtgcccgctttgatggaacgccatgagctgccgattcgactgcgtaatgcggttgagcgaatgctgctcgatattcaacgcctgacgagagatatcaaggggatcgatgtcgagatcaaacagcagttgtctgaggacgccgccggcatgcgcttgctgagcatccccggcatcggccctctcaccactagcgcgctggtggccgatgtcggtgacgcttcgacttacaaacgctcacgcgactttgccgcgtcactcgggttggtgcctcgacagtattcaagcggtggcaagacgagcttgcttggcatcagcaagcgcggcgacaagtatctgcgctgcctgctggtgcaaggcgctcacgcactgatgatacgaatcgacaagcgtgacgatgcactcggagcttgggtaagaaatcttttggctcgcaagcccccgaacaaagtcgcctgtgcgctggccaacaagacgacaagaatcgtctgggcagtattagcccgaggcggcagctacaacgtgaaacagatggcttgacctaaccgacttaccaccggcttttgcgacgacagtgatgatgacgataaacggcagacatcccaactgaaaacctgaaaacgaagatagtttttaaagctgatccctttatcaaggacaattgggagcgacttctcatcaagggccgagcgctaatgaacgtgctcaccacgagcccggatacattagcgcaagcatgctttaccgttcatcaaactgcgttgcaggaggtgggctgactataca

SEQ ID NO: 5652 - DNA, 1211 bp, unidentified
  source 1..1211: mol_type = unassigned DNA; note = element_8a831f7
  misc_feature 1..2: note = core
  misc_feature 3..191: note = LE
  misc_feature 192..1178: note = CDS
  misc_feature 1179..1211: note = RE
  misc_feature 12..200: note = bridgeRNA
cttgtatctctccgtgatgagtgtttagctagcacttatcaattctggaagtcagtgagcttgatgacgacctgagcactcagatgctgctttgtagattgggccctgacttcctaacctccattaaactgaatggtatcctagcgccccagattcgggtgacgctgtatgtacaaggggagtagatagagatgaaagcatttattggaattgatataggaaaagataagctagatgtaagctggcttcgcgatatagcaaagaataaaaagaaaacgaaggtcttaaaaaataacccgaatggcttcaaagagttagttaaatggttgctaaaaaatacgaacttaaatgctcaggatattgttatcacaacagagcctactggtgtttacagtgaacctctaatgtactggctttatgagcaaggctttaccttactgcatgtaaaccccggcaaagcaaaacaatatgctaagtcattagggctagttcataaaacagataagtctgatgcaactatgcttgctcgatatggacatgaccaacaatattctcttaaagcttggcagcctgaatctctagaagccagagagttaaaggccatgacacgcagactagaagcgttagagcaagatttacaacgtgaagaaaaccgatatgaagccacttcattctcaggagcttctgagcgagtaatgcagtccattcaagatatgatatccgtattaaaagttgagatagaaaagcttaaatctgaaattgacgattacatcgataggcaccctcatctaaaaaagaatcgtcagttgctagaaagcattaaaggtgttggcgaagttacctctcgtattatggtttgtttactcgcgtgtaaacgctttaaaagcgcgaaacaattagcttgctatttagggttaatccctaagcaaaaagagtcgggtaaacagataggaaagacaaccttaagcaaagaagggccaggttatatcagggctaaattatatatggcagccgtcgtagcaggacaacataaccctgatataaaagagcaaaaaactaggctaataaggcatgggaaaacaaaaatgcaggccattggcgcagctatgagaaagcttgctcacatctgctttggtgttgtgaagaatcaaactgaatatcagcctcaagttgtttaaatcaaacttgagactggttaggagagatggtat

SEQ ID NO: 5653 - DNA, 1363 bp, unidentified
  source 1..1363: mol_type = unassigned DNA; note = element_8a8f5d1
  misc_feature 1: note = core
  misc_feature 2..71: note = LE
  misc_feature 72..1103: note = CDS
  misc_feature 1104..1363: note = RE
  misc_feature 1112..1353: note = bridgeRNA
tatggaatggctcgcccctttccctcggcgcatgattgcgtcgtcgatgaggatggcagggaggcgagccgttgaatgagatcagggttcttggtatcgatcttggaaaggacgtttgcagcgttgtcggccttgatgaggctgggaaagtggtgctgaggcgccgaatgcgtcgggacagcgtatcgaagctggcggcgggcatgccggcctgcgtgatggcaatggaagcctgttgcggcacccaccatctgggccgccagctttgcgagcagggccacgatgtccggttgatgtcgcccgaatatgtccggccctacgtgaaagcgcagaagaacgacgatcgggatgccgaggcgatcgcggaagccgcgacccgtcccacgatgcgcttcgttgatctgaagagcgacgaacagctcgacatgcagagcctgcaccgggctcgagatcggcttgttggggagcgcacggctctgatcaaccagcttcgggcgatcttgctcgagcgggggatcgtgatcgccaaggggcggcgcaagcttcaacttcggctggaacagcttctcgccgaagagacggcgatcggccgtcggatgagggtgctgatcgaggatatgcgggacgaatggcgcgccctcgacaaccggatcggggccctcgatgcggaattcgcggacctcgcccgcaccgatgcatcgatgaggctgctgtcgacgataccggggatcggcccattgaatgcgaccgccttcgtcgcttcgatcggaaaggccgagacgtttggccgtggccgtgacctcgcggcctggctcggtctcgtccctcgacagatgacgaccgggggcaagccgcgacttctggggatcaccaaacgcggcaacggctatctccggcgaatgctgatccatggagcgcgagcggcgctgccatctctggccaaggggaagacgccgatgggcgagtggctgcgtggattgctgtcgcgagcgcacatgaacacagccgtcgtcgcgctggcggcgaagatggccaggatcatctgggcggtgctgagaagcggccgccccttcgagatggctgcgtcgccgtcagccggatgagatgatcagagatcggccgggagggagggtatccttcaggccggcgttgtctgtgagtggactggaaagatggcctgacagtcgaacggcgtaccggcatcctgaccaaaaaaatggcgccagacgccgaggtgtttatgaggatcggtacgtgcgaaagctccatcttggccggggaggatcatggccccgagaccggatacgttggcgcagactgaaaagccgtcaaaaagtcgcttgcaggcggggcgagccatacg

SEQ ID NO: 5654 - DNA, 1328 bp, unidentified
  source 1..1328: mol_type = unassigned DNA; note = element_8a90fa9
  misc_feature 1..2: note = core
  misc_feature 3..68: note = LE
  misc_feature 69..1073: note = CDS
  misc_feature 1074..1328: note = RE
  misc_feature 1095..1326: note = bridgeRNA
ttaatgagatggtcactccctccttcccggtactatgctgaggacaggctttcattcggagaaccatcatggaaaatattgcgcttattggtatcgatctgggtaagaactctttccatatccattgtcaggatcatcgtgggaaggctgtttaccgtaaaaagtttacccgaccaaagctaatcgagtttctggcatcatgcccggcaacaaccattgcgatggaagcctgtggcggttcccactttatggcccgtaagctggcagagttggggcattttccaaagctgatatcaccacaatttgtccgcccattcgttaaaagcaacaaaaacgacttcgttgatgccgaagctatctgtgaagctgcatcgcgtccgtccatgcgtttcgtacagcccagaacggaatctcagcaggcaatgcgggctctgcatcgtgttcgtgaatctctggttcaggataaggtaaaaacaactaatcagatgcatgcttttctactggagtttggtatcagcgtaccacgaggtgctgccgttattagtcggctgagtaccattcttgaggacaatagtttgcctctttatctcagccagttattgctgaaactacaacaacattatcactatcttgttgagcagattaaagatctggaatcccagttgaagcgaaagctggacgaggatgaggttggacagcgtttgctgagcattccctgtgtcggaacgctgacagcgagtactatttcaactgagattggcgacgggaagcaatacgccagcagccgtgactttgcggcggcaacagggttggtacctcgacagtacagcacgggaggtcgaacgacattgttggggattagcaaaagaggtaacaaaaaaatccgaactctgttggttcagtgtgcaagggtattcatacaaaaactggaacatcagtctggcaagttggccgattgggtcagggagttgttgtgccggaaaagcaactttgtcgtcacctgtgctctggcaaacaagctggccagaatagcctgggcactgacggcgcgacagcaaacttacgcagcataacggcataaatacactagtttaaacaatcactcatctggttttgcgaatactgatattgatgatactaacggcccaccggcctgttgaggaacctgtaaaacggaaaggctcattgaagccgtatattttcttgaggttcatcaggcgcggaactcatcgaggcgcgggaataaaatcccattcagacgccggatagattcaagcaagccaacttatcgtcgaaatcggtgttgcaaaaacgggagtgaccataga

SEQ ID NO: 5655 - DNA, 1366 bp, unidentified
  source 1..1366: mol_type = unassigned DNA; note = element_8a91b9e
  misc_feature 1..4: note = core
  misc_feature 5..77: note = LE
  misc_feature 78..1112: note = CDS
  misc_feature 1113..1366: note = RE
  misc_feature 1085..1355: note = bridgeRNA
atgatggggtggacgccccgccgacggcatcaatgtgccaaagtggaggtgttgagcaccacttaagggaggcgtccgtgtcaaaggttaccacgatcggtctggatattgccaagcatgtttttcacgctcacggtgtggacggacgcggtctcgcgttgttcagtaagcgtctcagccgcggaaaggtgctcgattttttcgcggctcagcctagctgcactgtcgcgctggaggcatgtggcggagcgcaccactgggctcgccagcttgctcagcttggccatcaggttcggttgatcccaccggcctatgtcaaaccgttcgtgaagcgacagaagaacgacgcgatcgatgcggaggcaatttgcgaagccgctcagcggccaagcatgcggttcgttgccgtgaagagtgaagaacaacaggcggcaggtctggtatttcgaacccgcgatctgctggtgcggcagcgaactcagctcatcaacgcagtccgaggacacctcacggaatatggctggatcgctcccaaggggccctctcacatggcgaggcttgccgatctgatcgagaaagaagagatgatcagttcgcttcccgatgccgcccgcgctatgttccgtttaatgcttgatctgctcaccggcctcaatgacaggattggggatcttgacaaagaaatcgcgcggcgtgctcgagagaacgaagtcacacgtaggctgatgactattcctggcattggcccgatctccgctaccgcgattgcggccttggctccgccggccgagacatttgccaaaggccgtgacttcgccgcctggcttggcttaacacctcttcaaagatcgacgggcggtaaacagaagctcggcggaacatccaagatgggcgaacgcactctacggcgcctcctcatcatcggcagcagtgcagtcgtacagcaggcgagcaaacgcggcgcgccaaggggttcgtggctcgaacagatgttggctcgcaagccccgcatggtggtaaccgtcgcgcttgctaacaaaatagcgcgcatcgtttgggcgctacttgtgaaacaggaggattacatggctccggtcacggccaaggcgtagtcctggccggacctgaggtcgtcagaggtgtagtcggtcgaaggaaggtatggcgcaacggtcggcgagacggggtcggaagaaccagacggactcatcgtgcctagagcacgcgttaatgatttggttccgatccgcgaactcccatacaggcccgcagctccatcgctgcatcagaggccggacagatggcagcatccgactacgtgccaactttcttcagaaatcgcttgcatctcgcggggcgtccacag

SEQ ID NO: 5656 - DNA, 1279 bp, unidentified
  source 1..1279: mol_type = unassigned DNA; note = element_8a94e56
  misc_feature 1..2: note = core
  misc_feature 3..61: note = LE
  misc_feature 62..1030: note = CDS
  misc_feature 1031..1279: note = RE
  misc_feature 1061..1266: note = bridgeRNA
ttatgggatggacgcctcccgcttcccggcgacgatgcagtcgccaaccaaggaggggagcatggcgctagaattactggcgatcgatctcggcaagcggtcgtttcacctttacggcatcgacacggacggggtgatcctgtcgcggaaggtcagccgggcgaaactggccgaggtggtcggcgacctggcaccgacggcaatcgcgatggaggcatgcgccagcgcgcattattggggacggtgctggctcgcagccggccgcgaggtgcgcctcatcaaccctcgtttcgtaaagcccttcgtcaaaggctcgaagaacgatgcggtcgacgcggaggcgatcttcgaagcggcgatgcgcccgacgatgcgcttcgtgccggtgaagtcgaaggaccaacaggacctgcaatcgcttcatcgcgcccgcgaccggctgatctgccaacggacggctttgatcaaccacacgcgcggcctgcttgccgaatacgggatcgtgttgccgcaagggccgtggcgcttcactgcccaggcgccggccgccattgccgatgccgacctgtcggacctggcgcgcgcgatcttcggcgagctcctggaccaactcgacgagctcgatcgtcgggttaaaaagctcgacacgacgatggttaccttctgccgcacgaatgcgacttgccggcggctcgccaagctgcccggtgttggtcctgtcgtcgccacggcgatcctcgccgccgtcaacgacggccgacagtttcgctcgggccgtgagatggcagcgtggatcggcttggtgcctcgacaatatacgactggcggcaagccacggctcggcggcatcggacgacgcgccaaccattacctcaggcgccagcccaagcatgacgaccgccggtcaatctggctgaatgcgcttgtcgcccggcgcggcttcaataggacgatcgtggcgctcgccaacaaaacggcgcgcatcgcttgggcgctgctgaaccgaaaggaagaatacgcggtttcctgaggcgcagaactcctgcaccaagaccgcgaccgaatgcgaggtgaataactgatggcgcgtcggcacggaccgcagcttcaaagcctgatctacgacaaggccgcagcggccgatcatgttatgaggtcagaggcagcggactcccatcaaggccaggagcgtgatcgctccagcaacaggccggatagattcgtgcatcccgtaccgccggttcaacagaatcaccttgcggcgggaggcgtccataga

SEQ ID NO: 5657 - DNA, 1620 bp, unidentified
  source 1..1620: mol_type = unassigned DNA; note = element_8aa9896
  misc_feature 1..2: note = core
  misc_feature 3..280: note = LE
  misc_feature 281..1498: note = CDS
  misc_feature 1499..1620: note = RE
  misc_feature 14..300: note = bridgeRNA
ctactacaatgtatttatggttgagatacccatcagccagatgggttcttcaccgtcttgttgcttaagctgttagaatgatggagcaacggtatggcggctccctttcttggacttagcgtccgcaactgagactgccagccagctcctcattcgcagcattcgttttatgcaggttgaattgcccttgcggtgcattcgtgtcacaccccagtagatagaacaggcaatgagtaaagctgacatttaccgtgtcatatatcatttcaggaggtgggcaatgaacgcagtaggtattgatgcatccaaaggcaaaagcatggtgacgatcctccgtcctttcggggagatcgtttcaacccctcacgaggtcaggcatacatctgaccagatcgatgacctgatccgggagatccgttcccttgaaggcgacactcgtatcgtcatggagtacaccggtcgctatcacgaaccgatggcccgctggctttccgatgccgggctttttgtcagtctcgtaaacccaaagctgatcaaagattttgacaacgattcccttcgcaaagtcaaaaccgataaggctgattctgtgaagatcgcccgctatacgcttgacaagtgggacaagctcaagcagtatggagccatggatgaattacgaaaccaactcaagaccatgaaccgacagttcgggtattacatgaagctcaagaccgctatgaagaacaacctcatcagccttcttgaccagacatttcctggcgccaatgccttctttgatagtccagccagaagcgatggctcgcaaaaatgggtcgatttcgtcgatacctattggcacgtggatcgtatccgttccatgtccctttctgcatttaccgagcactaccagaaatggtgcaaacgtaaaggctacaacttccagccagataaacctgcggaaatctatgagtcgatccgcaacatcatcccagtgctcccgaaagatgagatgacaaagtttatcattcgtcaggcggtgaaccaggtcaatacagcttcagccgctgtcgaagaactgcgtatccgcatgaacgacattgcatcccaacttccggaatacccggctgttctcgccatgaaaggtgtcgggacatcccttggccctcagctaatggccgagatcggtgatgtgaccagatttacacacaagggtgcactttccgcttttgcaggcgttgatcccggaaagaatgattctggatcctactctcagaagagtgttcacacttcaaaacgcggttctgcaccattgcgcaaaacactgttccaagtcatggatggtctaataaaaacgatgcctcaaggtgatcctgtttacgaatttatgaacaaaaaacgttctcaagggaagccttactacgtttacatgaccgccggagccaataaattccttcgtgtctactatggccgtgtcaaggaatacctgactgaacactcagaagcaaccgaatcctgatttcaattcattcatcaagattccacttggccgacactctggcggccttcttttcgtgccttcattcaacctatataaaatttcaaagtgcatcatttcagccttgactttttatttgcagg

SEQ ID NO: 5658 - DNA, 1219 bp, unidentified
  source 1..1219: mol_type = unassigned DNA; note = element_8aad39f
  misc_feature 1..2: note = core
  misc_feature 3..220: note = LE
  misc_feature 221..1204: note = CDS
  misc_feature 1205..1219: note = RE
  misc_feature 12..198: note = bridgeRNA
cttgtatcttgtttcccgtggtggttagctcccaccacacgaggcggagagagcttgtggcgctcctgaggggcaaaccttgatgtgtagataaagccctccgcctcaccttccgccggacaccacactgaacggtagccaagggcctggaaaccagtgaccctgcatggacaaggcaagtgggcgtgaaaggcaccctgacatgcaaggaggtttcgcgatgaagtatctgggtatcgacgtctccaaggccaagctggattgcaccctgctcgacccggtgacggacaagcgcaaggccaaagtggtcagcaatgattccgcaggattggatgccctctcagtatggctcgccaagcagggtatcgccttgggggaagtgcatggcgtgatggaggccaccggcgtctatcacgaacaggccgccctggggctgactgatgcgggaatgcgggtatcggtggtcaatcccgcccaaatcagagactttgccaaagggctcgccgtgcgcaccaagaccgacgggacggacagtgtagccttggcgcgctatggtgccttgactcaaccggcgccctgggtagcgccaccgctggaaatccgtgaactgaaggcgctgatcgcccggctggaagccctggaggcggatgcgcgccgggaattgaaccggcgagagaaagcgctcgtcgcccgcgcccccgccctggttcaggaatccctggccaatcacctggcctcgctgaaccgggaaatcgcccggctgaaacaggcgattgacgatcacatcaaccgccatccgggattgagggcggaccgggaacgcctgctatcgatcccggcggtgggcgacaagaccgccaaccggatgttggcggtgctgcatagccggaagttcacgagggcggaacaggtggcggcgtttctgggcttggtcccggtcgaacaccaatccgggagcagcatccagaagcgtccccggctggcgaagaatggggatgccaaaacccgcgctgtgctttacatggcagccatcgtggccacccagcacaacccgcatgtccgggcactctatacccgcctgtgtgccaaggggaaagccaaaatggcggccctcggtgcggccatgcgtaagctcgttcacttgtgcttcggggtgctcaagcagcagactacttaccagtccaattgggcgggtagctgttgacagacgagacggtat

SEQ ID NO: 5659 - DNA, 1206 bp, unidentified
  source 1..1206: mol_type = unassigned DNA; note = element_8ab4afc
  misc_feature 1: note = core
  misc_feature 2..214: note = LE
  misc_feature 215..1171: note = CDS
  misc_feature 1172..1206: note = RE
  misc_feature 36..204: note = bridgeRNA
tcttaagtttgttttctattaaattagagttataaatcagaaagaacaaaagagaggattaagattaatatacacgtagagacctagatctcgtcaacaatgataatcccctctcttttctacttaaatttcgttcagttctgtgagacttattagatctcgtttttaagttgttgaaagtaaagtagacagttccttccttaatcattttcttatgaataaaagtaatgaaatttatggaatagacattagtaaagatgtgtttgatgtagtgaataccaaagggattcacgagcagtttgaaaacactataaaagggtttaagaagttttctaaagaagtatcttcaggggatttagtagtgatggaagcgacagggtactaccattattgtttagctcaatatctttacaagcaaggctatttggtatctgtagtaaatcctttatcggtaaaacgatatattcagatgaaactctcaaaggtcaagaccgataaaagtgatgccaaagccatctgtgaatatgcctgtttaaatgaagttccattgtatacggccaaagatgataatcaagcagagagtctccagctggtgagtttaatagatatttacttaaaacaaagtacagctataaaaaacaagcttcatggagagaaagctctaggctttccatctaaagcagtatatcattcaataaatagggccttaaagtcattacagagagagattaagaccctagagcagcgattaacccaattgataaaagaacatcagcaacaacagttaacacacttaaaaagtattcctgggatgggtaataaaactgcgataatgcttattattctaactgatggattttctcgttttgaaaatgcaaaacaactttgctgttatgcgggaatcagaccaaccattaggcaatcaggaagtagtgtaagaggtaaaagccgtatcagtaaagtaggaaacaagaagctacgaaacctattgtttttatgcagtttttcagcctgtaaatacaataaagcctgtcgagagatttatgaacgactagtagctaaaggaaagagtaaaaaattagcattaatagcagtatcaaataagttgctaaaacaagcttttgccattgcgaaaagtggacgaccttatgatgaaaactttgtttcataattagcttaaaattgcttgttttttaactcagttct

SEQ ID NO: 5660 - DNA, 1495 bp, unidentified
  source 1..1495: mol_type = unassigned DNA; note = element_8aba232
  misc_feature 1..2: note = core
  misc_feature 3..204: note = LE
  misc_feature 205..1473: note = CDS
  misc_feature 1474..1495: note = RE
  misc_feature 5..204: note = bridgeRNA
ctgatggctctaccttccttttccatcgggaaccccacaggggatcgctttgcgcgcttgtccttcgaggactgaggtgagacggcgaccccagtggggggcccgggaggcctgacgcccacaacggtgtcgtccctcgaggactggtccatcagcacggcgccgtgcctccggcaacccggtcggacaatcaaaggaggttcggtgctcggagttgggatcgattttgcagaggagttccacctggtggccctcggccggcccggcgagggggtgatcgacatccgccgggtggagcacacccccgaggacctgagacggctcttcggggccatcaacgagctcgagcccgatcccgccgaggtgcgggtggtgctcgagacccggcacgggatgctcgtcgaagccttggtggatgccggctacacggtggtgccggtgaacccggacctggtggcgcgacgacggggcccggccaagaagaaggatgacgccgaggacgcccgcatcgcctgcctcatcgccctcgatcgcttcgagcggctgcggccgctcatcccccacggggaggtggccggcgagctgcgggcgatcgcccgggacgacgagcgggcggccagggacgagcgacggctgctcaaccgcctgcgggccgacctgatcgccaccttcccggccgccctcgagatcgcgggcgccgatctcggcgcgcccacgttcctccgcctcctcgaggcctggccgaccgcagcgtccctgcgtgaggtgccccgggacgagctggtggccttcgcccgctcggggcgccacggctggcccgagcgcttcgcgaaccaggtggtttccagcgtgtcggccgagaacttcgtggcccgggaacacctcgtggccgccaaggcctcgaccatccgcctcgccgccgcccagctgctgctcatcggcacccaacgtcgggcctgggaacgccgcatgggcgaactgctcctgggcggcccccgacgcggacgggaccacatcgtgaaggaccccgacttggggaaggcgttccctggcggcgagatctacctgagctttccgggcctcggtgaccgtctcgccgccagggtcgccgctgagatcggcgagcacatcgaacagttcgacacgccgaactcgctgcaaagctatgccggcaaggcgccggtgaccagacgctcgggcaagagcgagctcgtcgtctccacccgcctggcctgcaaccgctacctgcgtgacgccgtccagcagtgggccttttgcagcctcagccgatcgggctgggcccgagtcttctacgacgcgcagcgagccaggggcaagggccaccacgccgccctccgcgcgctcggcaatcgctggctcgaggtcctctggcactgcgtgcggaaccgcactccttacgaagaagaagtccacgtcaccaaccgcaagcgatacctccaggcggccgcctgaggaggtggttgacaaacggtgt

SEQ ID NO: 5661 - DNA, 1370 bp, unidentified
  source 1..1370: mol_type = unassigned DNA; note = element_8abf701
  misc_feature 1..2: note = core
  misc_feature 3..75: note = LE
  misc_feature 76..1110: note = CDS
  misc_feature 1111..1370: note = RE
  misc_feature 1083..1358: note = bridgeRNA
tgatggggtggacgccccccgacggcatcgatgtgccaaagtggaggtgttgaaacaccactgagggaggcgtccgtgtcgcaggttatcacaatcggtctggatatcgccaagaacgtttttcacgcgcatggcgccgatgagcgcggtgcgatggtgttcagtcgcaagctgacgcgtggcaagctgctcgacttcttcgcgagccagccgcggtgcacggtggcgcttgaagcctgcggcggcgctcatcattgggcgcgcgagctgcaggcaatgggtcatcacgtcagactgatcccgccggcgtatgtgaagccgttcgtgaagcgcaacaagaacgatgcgatcgatgctgaggcgatctgtgaggcggcgcagcggccgggcatgcgcttcgtggcggtgaagagcgaggcgcagcaggccgccgggctcgtgttccgcacgcgcgatctggtggtgcggcagcgcactcagctgatcaacgcgatccggggtcacttggcggaatatggttgggtcgcgccgcgcgggatggcgcacatgacgatgctggcggatctgctcgaggatgaggcgatggcgtcgacactgccggcggtggcgcggccgatgttcaagctgatggtcgacctgctcggcgaactcgacaagcagatctccgtgctcgaccgtgagatcgcgcggcgcgccaaagaagatgaggcggcgcggcggttgatgaccatcccggggatcggcccgatcgcagcgacagcgatcatcgcgctggctccgcccatcgagacgttcgccaagagccgcgacttcgcggcctggctcgggctcgcgccacgtcagcactcgaccggcggcaagcagcggctcggcagcatatcgaagatgggcgagcgcacgatcaggcggctgctcatcatcggcggcagctcgatggtccgcagcgcctgtcgccacggtgcgcctgcaggctcgtggctggagcgcatgctcgcgcgcaaaccgcgcctgctcgtctcggtcgcgctcgccaacaagatggcgcgcatagcctgggcgctgttgacgaagaaagaggattatagagctccggcagcggtcgcggcgtaacgccgggaacgaagccagaggcgtcggggacgtaggcggtcgaaggagggtatggcacaacggtcggcgagacggggccggaagaaccagggaatggcagagcgctagccaagcgcgcaaagctgtaatggatccggtccgcgaactcccatactggcccgcagctatggcgctgctcatcgaggccggacagatgacaacatccgactacgtgccagaataccccatttagcgcttgcatccgaaggggcgtccacaga

SEQ ID NO: 5662 - DNA, 1538 bp, unidentified
  source 1..1538: mol_type = unassigned DNA; note = element_8ac1e52
  misc_feature 1..2: note = core
  misc_feature 3..240: note = LE
  misc_feature 241..1422: note = CDS
  misc_feature 1423..1538: note = RE
  misc_feature 3..218: note = bridgeRNA
cttgtattatagagtagtagttattagagcccctctccaagggctgtgctacaatgtaagggatgctgtggattggttctcacgtcctaccgcaagacggttccagaaaggctccaaccacagccctttacagtattgttaatcagttagataccgccagacggtttatgtagaacaaggttacaagagtaaagagttctgtggaaccagcatcaaataaacatatcggaggtattcattatgatttgtgtgggtattgatgttgccaaggataagcatgattgcgttatcctgaattcggaagggaaaatccttgcaggtgtattcaccattcccaataatgcagatggatttgataccttgctacagaagattcgcagctgcacaagttcggatgataaaataaaagtagggcttgaggctactggacattacagctacaacattctcggatttttgattaaccaaggtttgcccacctacgttatcaatccgctgcataccaacctgtatcgaaagagcatgagtcttcgtaaaaccaagactgatcgggtggatgctaaaactattgcaactatgcttatgtctaatgtggacctcaagtcctacacagacacagcataccacaatgaagagttaaagtcactaaccagataccgatttgataaagttcgtgaaagagcacaactgaaacagtcagtttcacgtttagttaccatactgtttcctgagttagaaaaactggtgccaacgctgcatatgtcctctatttacgcactccttattgaatttcctggagcaaaacagattaccgaagctcatttgacacacttgaaatctctcctgaaggatgcctctaaaggccgatatggacgagatatggcaacagaaattcgtgatgctgccaagcattcgattggttctgttatgtctgctaaatcgcttgagttgcgtcatacaatccgattgatccgtgaattagattcagagattgaagacattgaagcagctattgaagccatcatggaagaacttcagtctcccattacgactattcccggcatggggtttcgtatgggagctatgatccttgccgaaatcggtgatttcgcacgttttgattctccggacaagatcctcgcttatgcaggtatgtcaccgtctacctatcaatcaggacagctttcattggctggaacctactctcacatggagaaacgcggctctcgctatttgcgttatgcgctttacaacgcgaccaagtatgtctgccattgggacccaggctttgcggcttaccttgctaaaaagcgagctgagggaaagcattacaacgttgcactttctcatgccgctaagaaattggttcggctgatctatgccatggagaaatctcggcaaccgtacaaacgtgcagcttaagttcttagataagctcaattgggcgtccaatggacgtcagcttcgctataccctttttgaatcgtctgcattattttcacctttccacacatttgggttgacttttaatagttagt

SEQ ID NO: 5663 - DNA, 1352 bp, unidentified
  source 1..1352: mol_type = unassigned DNA; note = element_8ac21f3
  misc_feature 1: note = core
  misc_feature 2..60: note = LE
  misc_feature 61..1113: note = CDS
  misc_feature 1114..1352: note = RE
  misc_feature 1125..1346: note = bridgeRNA
taatgggatgacccgccctgtccttccatccacagtcgagcgatcaagaaggaggatgcaatgagcatacggaacaagccaagagatgcagccgtgttcggcatcgacatcggcaagacagtctttcacgtcgtcggcctcgatgcttctcacgcaccgatccagaaagccaccttcagacgggagacgttgctgcagttctttgagcgtgcgtcgccggtgttggtcgggatggaagcgtgtcccggttcgcagtggcttgcgcgcaaacttcaagcgatgggtcacattgtgcggatcgtgccggcacagttcgtgaagccgttcgtgaagtcgaacaagaacgatatcatcgacgccgaagccatcgcagaagcggtaaccaggccgacgatgcgcttcgtggagatccggtcgccggaacagattgacctgcaggctctgcaccgcgtccgggacaggatgatcgctcatcgcacgcgactgatcagtcagatgcgcgccttttgcctggaatacggcatcgcaatccaccaaggtgccggcaagttcaaagccgacatgccacgggtgctcggggatatggacaatgagctcacgcccgccatgcgccgaatgctgactgaggtattcggggaactcggcgatctcgaacagcgcatcgccgccatgaaccgcgagatcgaagctatcgcagcgcgcagcgatacggcccgtcgcttaatgactgtacccggtgtcggcccactgggggccaccgccttgcttgcatcggccggcacggggcgtcagttccgcaaagctcgcgatctggcggcatggcttgggctcgtgccgcgggagtactctactgggggcaaaacgaggctgctcggcatcagcaaacgtggcaacaagtacctccggcgcatgatcatccacggagctagatcctgcgtgacgcatctcgaccgaagccgggaccgcctggggccatggcttgatgggctggaacgccgaatgcataagaacaaggtcaccgtcgccttggcagccaagatcgcccgcatcttgtgggtcgtgctgacgaagcccggtgccagttacgagcggagggatccagccttcggctgatctggaccgctacagactgcgaggttcgtgagcgtgatgacgaaacagttgacctgcgtatcgtaagctccgtcaaaaaaacgggctaccagcccgaagcatttatccgagaacgatacgcgcggatctcatcaaggcctggccgcaacagcggtccactcgcgagaggccggatacatttgtgcagactggcaccgtcaccaccgatcgacccttgcatggacagggcgggtcataca

SEQ ID NO: 5664 - DNA, 1383 bp, unidentified
  source 1..1383: mol_type = unassigned DNA; note = element_8ac25f9
  misc_feature 1..2: note = core
  misc_feature 3..263: note = LE
  misc_feature 264..1313: note = CDS
  misc_feature 1314..1383: note = RE
  misc_feature 38..210: note = bridgeRNA
cttgtatcttgcttgcaactgcccgatctcttcctcccatggtagttggagattggatcgggtttcggcgggaggccggtcgcatcctaaaggcgctgcagttctgggcagcctggattatagataggccccccgcccttcctttcccacgccgtggagaatccgaggccactggagcctgcattcacaaggtcggcgcgagaggttgtggtacagggtcggggagccggaactcagtctaatccaaatcgcaaggggcagatatggccaaaaatagttcagaagcggaagtccgagttttcgctggcatcgatgtcagcgcacgcgagctgagcgtcgccgtgcgttgtggaagcgaggacgagaaggcggtcaaaaccttcggcaataatgcggctggccacaaagcccttctggcttacctgctgcaaggaaatgtgcgtgctcgcgtttgcttggaagcgagcggtaattacagcctagatctggccttgactttgcaagctcaccgtcaggtggaagtcagtgtagtgaaccctcgtcgtgcgcggcggttcgcggaatcgcttggccagcgcagcaagaccgatccggtcgatgcccgtgtgctttgccaatatgccctacgcatgccttgggtctcatgggtcccacccgatctgctgaccttgcggttgcgtgccctgacacgggccatcgaagctttgactgttatgcagacccaggagaaaaatcgtcagcattcgttgctggccagccaggctttgcctaggttggtgatcagggaactgcagcagcacctggattatctcgagctccgcatcacgcggctgcggcgggaagcgcggcgactcatcgcccgtaacctcgaactggatcgccgtttccgtctcatgcttaccactccaggaatcgcggaaaccagtgctttgcaaatactcggcgagttagccgtgctgcccgacagcctggatgcgcggcagtgggttgccttcgctggattggatccacttcggtttacttccggcaactccgtcgaaaagaaaccgcggatcagccgagggggcagtcgtcacctacggcgggctctatacatgccagcgttggtggccatccgtcacgagcctcacctgcgggccttctatcagcgcctattagctcgcggaaaggcccccctgcaggcgatagtggccgtcatgagaaaactcctgcatgcctttttcgccatgttccgctctgatcactcctacgacggttccaagttgtgcccagcggaattggcttccgatacgggtgctttgtgtgctgcttgatggaagaaaaaaagagagaggttctcctgcacctctccagagagaaacaaattgaaaatcaagagagaat

SEQ ID NO: 5665 - DNA, 1378 bp, unidentified
  source 1..1378: mol_type = unassigned DNA; note = element_8acdb4e
  misc_feature 1: note = core
  misc_feature 2..229: note = LE
  misc_feature 230..1363: note = CDS
  misc_feature 1364..1378: note = RE
  misc_feature 4..225: note = bridgeRNA
cagtgagaatgatgtgtgtgggccagcgcaccgccggtctgactcttggactgactgacttcgtgtcttgaacgggatttgtcggccagtagggcgctggccccacatgcacctatccgcgatcgacgtgacctaataggagcctgcgctatcaggcgcccatcactgtcttgtccatcggttgttggcgcgtgctgcccacccgttcagaaccaacgagaggacagcgatgaccatcgtcgcagacccacccgcccccgtcgacaccctcgaggtcaccctcgggatcgacacccacgccgatacccatgtcgctgcggtgatcgacccgctgggtcgccacctcggacacgccaccttcgaaacaaccttgtctgggttcaaagcactcctggcgtgggcggccggcttcggcacgatcgcgctcgccggtgtggaaggcactggcgcatacggggcaggcctgacccggttccttaccactgagaccgtcccggtcgtcgaggtcgaccggccggatcgtaagacccgacgagatcagggcaagtccgacccgatcgacgcgtacgccgccgccagagccgccgcctccgggcgtgcgtcgggcaccccgaaagcccggaccggtgatgtcgaatcggtccgagctctgcgggtggcccggaacagtgcggtcaaagcccgagcaacggcgttgacccaactcaaatcactgatcgtgacggcccccgacacgctccgtgcccaactcgtcgatctcgacggagccgagctcgtcaccacgtgtgcacgactgcgacccgcccgcagccccaacccgacgccgccaccgtccacgaaacgagcacctcggcctgggccgctggccgaccccaccgctgcaacaaaacggtcgcttgcctcgatcgccacccggatcaaaaccctcagcaccgagatcaccgaactcgacgacgacctcgacgcgctcatcaccccactcgctccaaacctgctcggcctcctcggggtcggcctcgacgttgcgggccagctcctcgtcaccgccggagacaaccccgaccgcatccacaacgaatccgcgtttgctcacctctgcggcgtcgcaccaatacccgcaacatcaggcaaaaccgtcaatcgtcaccgcctcaaccgcggcggcgaccgggcagccaacgcagcgctctaccgcatcgccatatgccgactccgctgggaccccgacacccgcgcctacgttgagcgacgcaccaaggaaggcctctcaaagaaggacatcatccgctgcctcaagcgcttcatcgcccgcgaagtcctcgccgccatacgaaccgatctcaaccccagaaaccctgcttgacatccataggagcat

SEQ ID NO: 5666 - DNA, 1394 bp, unidentified
  source 1..1394: mol_type = unassigned DNA; note = element_8ad4d25
  misc_feature 1: note = core
  misc_feature 2..82: note = LE
  misc_feature 83..1099: note = CDS
  misc_feature 1100..1394: note = RE
  misc_feature 1144..1386: note = bridgeRNA
caatggaatggactcctcccactcaacggcatcgcaatgtgccaaactaaagattttagcaatcaaaaagcgggaggagattatgaatatagcacgtatcggaattgatttggcgaagcaggtattccagattcatggcgtggatagaacggagaaggtactggtacgcaggcaattgcgccgatcgcagatgctggattatttcagcaaactgacgccctgcctgattggcatggaagcatgcgggagtgcgcattactgggcgcgcgaactgggcaaattgggtcatgaagttcgattgatggcgccgcagtttgtgaaaccttacgtcaagagcggcaagaacgacgccaatgatgcggaggcgatctgtgaagctgttggccggccgaacatgcgttttgttgcgatcaagacggccgggcagcaggttattcaggcggaacaccgcatccgtgcccggctgatcaaatcacgcacggcgttaagcaatgagatacggggtttactggccgagtttggtattgtggtcgaaacatcgattgggagattgagaaaggcgttgcctgagttattggaagatagtgagaatgggttgccggggagttttcgtgtgttgctggccgggcttggcgaggagttgcgcgcactggatgatagcattgcaacctttgacgccagaattgtccaggcagtccgtgaggatggccgcatcaggcggctgcttgaagtagaaggaattggtccgatcactgccagtgcgctggtcgcggcagtgggcaacggcacacagtttaatagtggccgggacatgtctgcatggcttggtttgacgccgagacaatattccagcggtggcaagaacaggctcggcgggatcagtaaacgcggcgacaaatatatgcgcatgctgctgatacacggcgcccgtgctgcgcttaatgccgccaaaaataaagaggatggacgaagccgctgggtaaaaagtctggctacgcggcgcaacaaaaacattgcaacagtggcattagccaataagaacgcacgtattgcatggtcgatattgagtcgtggcgagtcttacaggaaggcagcgtagcgtctttcatgtagcacagcaagttttgtttagcagaggggaaaatcactggtaattgcgtagcaaaatgaagtgatggcaaacaggtcagaccggcgtaagtaattcagtcttttcaacaggctccctgcccggcgcatgacaaggcaaagccgccaggccgatttgaatcttacgcgcgaaatccatcatggctcggatagtaaagctatccaacgagaagccggatatacggaagcagttgcaccttaaaatcatcacaaattttgcttgcaaaacgggaggagtccatata

SEQ ID NO: 5667 - DNA, 1466 bp, unidentified
  source 1..1466: mol_type = unassigned DNA; note = element_8ad747e
  misc_feature 1..4: note = core
  misc_feature 5..229: note = LE
  misc_feature 230..1450: note = CDS
  misc_feature 1451..1466: note = RE
  misc_feature 1..228: note = bridgeRNA
ccccttaccttccttgtaggccgtgagcaagactcacggcttgggttgctcgacagcacgggcagggctttctgcccctgtcacacagatggcctggggggtgttgccacccgtgctgttgggcgcggttgacctctgacagggacatgccctcgggctgattcgtaaggtggttgacggcgacctcgcccgcgagctccctgcgaaccaaccagctccaggaggtgacatggccccagcggtgaccgagatcgacgtgttcgtcgggatcgacatggccaagcaagaccactacgcccaagcgatcagtcgcgacggcaccgaactgttcaagcgcccggtcctcaacgacgagaccgcgatcgtcaagctcatcgacgacgctcgcgcccgaggggctcgggtggcgatggtggtcgaccagccggcctcgggagcccaactgctgttgagtctcgccgccgcgcacggcgtcccggtcgcgtacgtgaccggcctgcagatgcgccgagctgcggacctctacgccggtgccgcgaagaccgaccccatcgacgcgtgggtccttgcggacttcgctcgccgcaacgcggaccggttgacgtggctccaggtgactgacgacctgttggtcgagctgcggatcctgaacggcagcgacgtggacttggcgaccgacgcgacacgcacgatcaaccgttgccgcgacgccatgacagcgatctctcctgcgttggaacgggcgattggctcgaggctcggccacgcaggtgtccgtgacgctctcacgagatggccaaccccgacggcgttgcgtgccgccgggcaagcacggatccgcacccgaatcgcgaagcgatccccgagactcgcagccaaggccaccgaggacatctgggaggcactcgacgcccagaccgtcacgctgcccggcgaggacgcgtggggccgcgtgatcaccgatctgtgctcggacctcgaccggatcatcacgcgtcgagaacagctcgcgaccgagatcgagacggtgttcatgacgcaccctctcggcatggtcctggtgaccctgtgcgggtttgggcccaggaccggagcacgaaccctcgccgagatcggtgacccgcaacgcttcgccaacggcggccgcctcgccgcctacgccggcctcgcacccgtcgaccgacgatccggacgctccatcaactcctcgtcgcaatcccgcgccgggaaccaccgactcaagaacgccatgttcctcgcagcgttcgtcgccgcacagcacgacccggccgccaaggcgtactaccaacgcaaacgcgctgagggaaagaagcacaacgccgcggtcatctgcctcgcccgcaaacgctgcgacatcatcctcgccatgctcaagaacgcgaccccctaccaacagcccacccacgaaaatctcctccaggctgcttgacaacaagacagggaca

SEQ ID NO: 5668 - DNA, 1569 bp, unidentified
  source 1..1569: mol_type = unassigned DNA; note = element_8addd73
  misc_feature 1..2: note = core
  misc_feature 3..249: note = LE
  misc_feature 250..1425: note = CDS
  misc_feature 1426..1569: note = RE
  misc_feature 3..225: note = bridgeRNA
ctcgtataataaagtagtagtatttatagaccctctccaaggtctgtgtgctataatgatagagatactgtggattgtttacaatctcctaccacttgatggtttttgaaaggctacaaccacagtctctttgtatatttgttaattagttagataccgcatgacggtttatttagaacgaggttacaatcgcaaggagtaccagtggtctaaacagtatcaaaaatacactcacaaggagttttcattatgatttatattggaattgatgttgctaaagataaacacgactgttttattaccaattcagatggtgaagtcttatttaaatcttttactatctctaacaatcgtgaaggctttgaaaccttatttcaaaaagtacaatccattttagatgatttaacaaaagtaaaagtaggacttgaagctaccggacactatagttacaatcttctgggatttcttcttgataaaggtttgccgacctacattatcaatccattacatacaaatctatacagaaaaagtttaagtcttagaaagacgaaaacagataaagttgatgcccgtacaattgcttctatgattatgtctgatgtgaacttaaagtcctacacaaatacatcataccacaatgaggagctaaagtcactaactagataccgttttgataaagtaaaagaaagagcaaaattaaaatcttctatttctagacttgtatgtatcctttttcctgaattagaaaaactcgttcctacacttcatatggcttcagtttatgccttattatctgaatttccatctgctaatgctattgcatcttcacaccttaccagacttaccaatttgctatctgaaaattcacatggacgatatggtaaagatacagccaatctaattcgtaatgctgccagaaattctattggttcacatatgccggcaaaatccttagaactaaaacacactattaagcttatcaaagaattaactactgaaattaatgaaattgaaacagaaatcaaatctattatggataaaattgattctccaatacttacaatcccaggtatcggttacaatacaggagctatgattatcgctgaaattggagatttcaatcgctttgattcagctgataaaatacttgcatatgcaggtatgtcaccttctacctaccaatccggtcaattagagaactgccattctcatatggaaaagcgtggttcaaggtacttacgatacgctctgtacaatgcaacaaaatatgtttgttactgggatgaatctttcggtgtatatcttggtaagaaacgctcagaaggcaaacattacaatgttgcattatcccatgcaacaaagaaacttgttcgcttaatttttgcaatggagaaatctaaacaaccataccaaccaacagtttaattcttttcataaatatcttatttttgagcaccatttatgatgctcttttttgtcatgctatttttacgattccaatacgatctaaaggatttttttgattaattcaaaatatcttcattatagccttgacttttaatagttagt

SEQ ID NO: 5669 - DNA, 1590 bp, unidentified
  source 1..1590: mol_type = unassigned DNA; note = element_8adea31
  misc_feature 1..2: note = core
  misc_feature 3..248: note = LE
  misc_feature 249..1421: note = CDS
  misc_feature 1422..1590: note = RE
  misc_feature 3..227: note = bridgeRNA
ctcgtattatagtgtcatagcccatttctttaccttgtctgggttttcggctatgctgttttagatgctgtggattggtgtttttttcctaccgctcgacggtttaagtaaggctccaaccacagtctctttgtcttattgttaatcagttagataccgcttgacggtttatgtagaacgaggttacatccgacaaggagccctgtggatccaagacagcaccaaatacttttcaggaggattcccttatgatctacattggtattgatgtcgccaaggataagcatgattgctgcatcctcggccctgatgctcagaagctctaccctgtgttctctatcccgaatacccgggccggctttgatgcgctgtacgaaaagatcctggccgtagaagacgatgcggaaaatataaaagtaggacttgaagctaccggtcactactcatacaatcttctttcatcgcttctggataacggcctcgccagctatgttatcaacccgttacatacgaatcttttcagaaaaggtcagagcctcagaaagacgaaaacggataaagtcgatgcatattcgattgctatgatgttgatgactgataagacactcaggccctactcagaaacatcctatcacaacgaagaactcaagtcactgactcgctaccgattcgataaggtaagagaacgtgccaagctaaaaacttctgtttctcgtctggtgaatatcctgttccctgagcttgaatcgatcgttccatcactccacatgaactctgtctatacgctgcttgctgaaatgcccggtgcttcttatgtcgcctccgctcatctgacgcatttgacaagccttctttcaaagacatccaaagggcattatggacgtgatatggcactttgtattcgggatgccgccgcttcttccatcggctctgtaatgcacgctaaatcgatggaacttaagcacacgctgcggctcattgaggttcttagcaaggaaatcgaagagatcgaaacctccatcaaggagatcatggacacctgcgattctcctatcacaacgattccgggaatcaagtatcgcatgggcgcaatgattctggcagaaattggtgatttctcccgttttgacaatcccgatcagatcctagcatatgcaggtctttctccctctacctatcaatccgggcagctgacatccagctactcgcatatggaaaagagaggatcaaggtatcttcggtatgccctgttcaatgcaacaatctacgtctgccgctgggatccaaccttccaagcatatctcgaaaagaaaaaaagcgaaggcaagcactattacgttgcaatttcacacgcagcaaagaaactcgtccgaaccatttaccgaatggagatgaaccgagaagttttccgaactgcttaaacttatatcaaatatcatttgtactcgtcgttgagcaccgcacaggtgctctattcgtcatgcagttttcaagaaactgattgaagcagaagcctgcttccgctataaaaacacatctctgtgtaattatctaatatctcaaaaattcgattgacttttaatagttagt

SEQ ID NO: 5670 - DNA, 1329 bp, unidentified
  source 1..1329: mol_type = unassigned DNA; note = element_8adecac
  misc_feature 1..2: note = core
  misc_feature 3..73: note = LE
  misc_feature 74..1090: note = CDS
  misc_feature 1091..1329: note = RE
  misc_feature 1069..1315: note = bridgeRNA
tgttggggtggacggccccacggcatcgcgtgccaaggttgggttgtcgaaacgccaacagaggaccgtccccatgaaatttaagcgcatcgccatcgacatttcaaagcacgcgttcacgctgcacggcgtggatgacgcggaccgtccagtgctgcggcgtgaccttcggcgggcggaggtggaaaccttttttgccaagatcgacagcaccgaggtgatcatggaggcgtgcggtggcgcgcaccactggggccgagttctagccgggctgggccacaaggtgcgcctgatcccagcgcagtatgtcaggccgtttgtaaggcgtgccaagaacgatcgaaccgacgccgaggcgatcaacgacgccgcatcccggcccggcatgccaacagtcgcggtcaagaccgcccaacaccaggccgagctaatcatcctcaagcatcgtgagatgctggtggcgcagcgcacccaggtgatcaacgcgctacgcgggcatgcagccgaatttggcgtcgtcgcggccaagggcaccgcccaggtccaacccttgctcgacaagctggccggcgatccggcgatcccggccgcggcacgcgcaatgtttgtgcggatcggtgaacacgcggcggagctgggtcggcagatcgccgccgtcgacgcggacctttccgcccagcacaaggccagctcagtcagccagatgttggccgaggtgccgggcatcggtccggtcaccgcgatcaccctggccgtgggcgtggaccctgcggcgtttgcctccgggcggcatttcgcggcttggctgggattgacccccaaagagcattcaacgggcgggaagcaccgcctcggccggatcagcaaggccggcaacgagagactgcgcagcctgctcgttgtcggcgccatggcagtgatccgccatgccaagccaggcaagcgctcggtttccccgtggttgctggccctactcgcacggaagccgcgaaagctggctgcggtagcgctggccaacaagatcgcccgcaccgtgtgggcgatgatggcgcgcggtgaagcgtatcggcatctgccggtcaccgcctgagccgcgcgcagacgccggggatttagggcagcacaagatgacgatcggtcgcgccgacaagcgagatatgccgtttatacctgtggccagatcaggccgcagtcttgtttggcactcgtttgcggaacccatctgggccagcggtcatgaggccgcgccaacaggccggacacatgagcgcacgcgatccccagccatcttcagtcaagccgccttgaaccccaggggccgtccacaca

SEQ ID NO: 5671 - DNA, 1387 bp, unidentified
  source 1..1387: mol_type = unassigned DNA; note = element_8af870d
  misc_feature 1..2: note = core
  misc_feature 3..88: note = LE
  misc_feature 89..1117: note = CDS
  misc_feature 1118..1387: note = RE
  misc_feature 1104..1374: note = bridgeRNA
agatggaatggttgccgccctccccagacggtatcgcaatgtgccagggtcgtggtgcttgcagccacaatatggagaggacggcgacatgaaagatatgatgattggggtcgatctggcaaagtctgtgtttcaagtacacggagttctgcagactggtgaggtactggttcgcaagaagctgacgcgaaagcagtttgtcgcgttcatggccaatcaagaaccctgtttggttgtattcgaggcttgcagtggcgcgcattattgggcgcgggaaatggaagctcttggccatgaggtcaaactgatcgcgccacaatacgtgcgcccttttgtgaagcgtcagaagaatgacgccgctgatgccgaggcgatcgtgatcgccgcccggcagccggaaatgcgttttgtagctatcaagacagttgagcagcaatcccgtgcggcactgttccgcggccgagagcgattggttcatcagaggactgaagatgttaacgctttacgagcgcttctgtatgagcatggctacatcttccctgtagggatacgttctctgggtcgcatggcagcgattttggaggatgaaactgcgaacctgccaacgctgatccgaggggaatgcaaggaactgctagcgcaagttgcagagaaaacagctcgtatcgttgaaaggaacaagaagctttcagctctggcgtcccagtcggacagagctcgtcggctgcagaccatgccgggtgtcggtccgatcacagccatcgcggtagaggccttcggacccgacatgtcccagttcaagaccgggcgtgactttgcagcctggctgggtcttgtgcccaaacagcactcctccggaggtaaggagcgcttgggacgcatgaccaaagcaggccaggcagatatccggcgccttctgatcattggcgcaatgtcgcgtcttaactggcttggggcgcgcgcggttgctgagggtagctggctatcacgcatgttggcgcgcaagcccaagatgctggtcgcgattgcgctggctaacaaaatggcccgacagatttgggcaatgcttacgaagcacgaagactacaaggatccggaacttgcgggctcggcatgatgctcatgtaagactgcaaggatcggggccatgaaagtgtgagaagacgatgacatgaatgggcgaaatgatcgaacagatctggatcaggaaaaccagttaatcgctgcgagcaaaaagctcgaaggttagatttggacctgacccgctgatcaccataccggcctgcggcttctgggaatgtcgcattgaaaggccttacagaagttcgcactcgatcacacaccttcagcgtcaaaaactccttgcactttgggcggcaaccacaga

SEQ ID NO: 5672 - DNA, 1313 bp, unidentified
  source 1..1313: mol_type = unassigned DNA; note = element_8b03402
  misc_feature 1..3: note = core
  misc_feature 4..213: note = LE
  misc_feature 214..1152: note = CDS
  misc_feature 1153..1313: note = RE
  misc_feature 35..196: note = bridgeRNA
cattgtatattgttttttttattatctttgcatagaaattcaacatcagggtgtggaataagaccgattcttcattagctttgcaagccgtgaaatatgttccgtccccacacccttacatcagaacctggatagttcaaagggcatagaccccgtattcgcaatgatagctcatgatgtatcgatgtttgtttaattataaatattatgactatgacttacgtaggaattgacgtcagcaaagcaaccttcgttgttgcttattcatctgccaaaagcagtgaaaccaaaactttcaagaataccacaaagggtatccgagagtttatccgaaccatctcttcagaagagaaccattgtgtgttggaagcaacaggcaactacagtatgctgcttgtctatttgctctccaaggcaggctttactgtcagcatggagaatcctctgaagataaagaactttgcacgtgtcatgctctctgttgtcaagacagacgagattgatgcccgcctcattgccttatatggtgagagaatgcaaccagcaccattcaagctccgtagtgattcccttttgttactcaagcagaaacgcactgtattacgtcaactgaagaagcagcttaccgctaacagaaaccttgaaggttcactaaaagtcctgccattcattgattccaagtgcaagaaagtcttagagaagactatcaagtttcttgagaaacaaatccaagaaatggaggaagagctaacgtccttggcagagattgaatacaagaagcagatggatttactcacttccataaaaggaataggagcaacccttgcagctgcactcatcattgccacaggcggattcacctactttgataatgctaaacaacttacccgatatttaggctgtcacctacttaccaacagtctggtacgtcagtcaatgtcaaagggcacattaatcgtaacggagatgcttacctgcgtagtcagctttatattggagctatggcatcattgcggtgcaacaccgaatgcaaagcatgctttgaccgtttgcgatcaaatgggaagccagggaaattggctattgtcgctgttgccaacaaactcatcagacaagccttcgctgttgttgcacatgagaagaaatatatagatggatataagtctgtaaagccataaaaccatctctccgtctgagggtacaccttggcggctaggggctgagatatcagtcctgaagaccctctatgtgcttacgaaaatgcatatttatgctaaatttcgttaaccgtattcatttttattattatagtt

SEQ ID NO: 5673 - DNA, 1430 bp, unidentified
  source 1..1430: mol_type = unassigned DNA; note = element_8b0e4f0
  misc_feature 1..2: note = core
  misc_feature 3..216: note = LE
  misc_feature 217..1173: note = CDS
  misc_feature 1174..1430: note = RE
ctcctacgtaaaagtatggtataaatattttagtcaaaaaataggcagggcaggacgacttagtgtcccttggctttcaagccattacgggagtctgtcgcctgcctttaaccatgataagttggttgggtttttaaccctcgtcacactggaggtttggttcagcaggcccctgccctcgccttttaacctattcaatcgaaaggaggttttagtatgtctcaaaacttctccatctttgtcggtattgacatctccaagcataagttcaacgcctgtgctatccaaaatcctaattctatcatcttcgaatctgctttcgatatgtccaaacaagggttttcctcctttgttcaaaagctctccgttttccctaagtcttctgtccttatcgctatggagtctactggctgttaccatcttaaccttctttctttcctctctctcaatgatttctcttgtgtcgttcttaatcctttgcttgttaacaaatctcttcccgttgggcttaggaaaactaaaactgacaaaatcgatgctcgctctattgctcttaccatcttctatacccatcacattcttcctacttcttctttcctcaactcagattttcgggatattgcaaggaaaaaggaaagcatcactcatcaaatctcaagagtcaaaaacgacatcgaaaagcttctttctctcctcttccctgaacttgaaaaagtgaccaacatctacaatgatgctatcttggatttgctttcttctttcccttctgctaaagctatccaaaaagcctccattgattctttacgtgttttcttttcaaaaacaatcggtagaaagttaaaacttactccagaaactcttaaagagcttgctaacaactccatcgctcagtattggccagtgaaagagaagattcttattcaaactatcaaggaacttcgatttttacaagagcaacttaatgagtttgatgagatgctcaaagaatattgcaaatgtgcttcgcttaatcaagatgttgaaatactcacgtccattgacggaattggtgaaaatagcgcactgtattttcttgccgaagttggcgatatttcaagatttagcacatacaaaaaactaattgcctattgtgggcttgacccaagcgtagatgaatcaggcagacacaaatgagccgcatatccaaaaggggcaatgcccacctgagacgaataatttggctgatgagtgtgaatgtagtgagacacaacgaatattttaaagcatattttcaaagaaaacgagcgcaagggttagtatacaaaaaagcgatgatgagtgtagcgcacaaattgctaaggacgatatttgctatgatgaaaaagcgcgagaaattcaacatcgatcatacattttcgtcttctactcaaaatttaattttacatagttga

SEQ ID NO: 5674 - DNA, 1381 bp, unidentified
  source 1..1381: mol_type = unassigned DNA; note = element_8b1dbec
  misc_feature 1: note = core
  misc_feature 2..70: note = LE
  misc_feature 71..1123: note = CDS
  misc_feature 1124..1381: note = RE
  misc_feature 1158..1372: note = bridgeRNA
taatgggatggaccggccgtgcttaccggtgcacccttcatcaggggcgcccagcacgaggatctgagccatgcctaaagctccgcttccgcccattgccacccttggcatcgacatcggcaaaaacagcttccacctcatcggcttggatgcgcgcggcgccatcgtcctgcgccagaagctctcgcgcggacaggttgagcagcgccttgccaatatgcccacctgcctgatcgggatggaagcctgcgtcggcgcccaccatctcagccgtcagttgctggcgctcggtcacgatgtgaagctgatcccagcgcagttcgtaatccccttccgtaagagccataaaaatgacttccgcgatgccgaagccatcgccgaggcggtgctccgccccaccatgcggttcgtgccaacgaagagcgtcgagcaactcgacctgcaagctctccaccgcgtccgctcacggctggtgagccagcggacagcggtgatcaaccagattcgcgcctttctgctcgagcgcgggattgcggtgcgccaaaggctgcgctcgctgcgccaggcattgccggacattctcgcccagcgaacggacgtgctcacgccgcggatgacgcacatgatcgaggcgttgatgcaggactggcagcatcttgacgagcgcatcgatgcagtgaccggcgagattgaagccttggtggcggcagacgatgcctgccagcgcgtgatgagcgtgccaggtgtcgggccgatcattgccagtgccatggtggcaacgatcggcaatggggcggctttccaacgcggtcgcgactttggggcctggctcggcttggtcccgcgccagatctccaccggtgacagaaccgtgctgggccgcctgtcgaagcgtggcaacagctacctgcgctccctgttgatccaggccgcccgtgtgctgctgctctggccggccaagtggcgccagcacagctttggtgaatggctgacggccgcctcgatgcgcctgcaccacaacgtactggcagcggctctggccaacaagctagcccgcatcgcttggagtgtgctgagccagaaccggacttatgaaccacgtacagcggctgtgatgggctaaggactgtaccccttacccggctcagccgcttgaagttcgccgaggtctgcgagagaaagacgagatggagaacggttgcgccgtcacattggtgctctggtgaccccgatggccgaaagggccgatccgctaatgagaaccgatgtgcgcggatacccatgatggccgggagcaaagctccgcacgggccggatacattagcgcaagaccatcctcaccatctcaaaaatctcttgcgacgcacggccggtccataca

SEQ ID NO: 5675 - DNA, 1534 bp, unidentified
  source 1..1534: mol_type = unassigned DNA; note = element_8b218e0
  misc_feature 1..2: note = core
  misc_feature 3..242: note = LE
  misc_feature 243..1418: note = CDS
  misc_feature 1419..1534: note = RE
  misc_feature 3..219: note = bridgeRNA
cttgtattatagagtagtagttattagagcccctctccaagggctgtgctacactggaagggatgctgtggattggttgctgtcctcctaccacaagatggtttcggaaaggttccaaccacagccctttgcagttttgttgatcagttaaataccgtcagacggtttatgtggaacaaggctacaaaagcaaagtgttctgtggatacagcatcacaattttaccgctggaggtattgtttatgatttgcgttgggattgatgtggccaaagacaaacacgactgttttatcctcaactccgagggtgtgatcctggcagatgtgttcaccatctccaataacatggagggtttcaacaccctgctggacaggctccacacctgctccacgccccaagacagcataaaagtagggcttgaggcgaccgggcattacagctacaacattctcgggtttcttcttgacaacggtctggccacctatgtcttgaaccctctgcgcaccaatctctaccgaaaaagtctcagtctcagaaaaaccaagacagaccgggtggatgcgcgaacgattgcggcaatgcttttgtccgatgcgggcctcaagccctacacggatacagcataccacaatgaggaactaaagtcactcaccagataccgttttgacaaggttaaagagcgggcccagttgaagcagtctgtttccaggctggtttgcatcctgtttccagagttggagagactggtatcctctctccacacagcttctgtatatgccctcttggaggagtttcctggagccaaacagattgcagcggcgaatcttactcggttgaagtccatgctggcagatagctccaagggccgctatgggagggatatggccatggagattcgagatgccgccagatgctctattggctccaagatgcccgccaaatctttggaattgcagcataccatccgcctcatccgggaactggatgccgagatcaaagaaattgaaaccgcaatccaggccattatggatgagctgcattctcccattaccaccattccggggattggatgtcgcatgggcgccatgatcctggccgaggttggtgacttctctcggttcgactccgccgacaagctgctggcctacgccggaatgtctccttctacctaccagtccgggcagctcaaaaattgttatccccacatggagaagcgtggctcccggtatctgcgctatgccctctacaatgctgccaaatacgtctgtctctgggatcctgcatttgctgcttacctcgccaagaaacgggctgagggaaagcattacaatgtcgctttatcccatgccgccaagaagctggtgcggctcatcttcgctctggagaaatccagacagccttactgccccgcagcctgatccgccttaattgccatccgagatcctgccggatctctgctttgctataccctttttgtgccatctatctttttcactccatccttcatttttggggttgacatctaatagttaat

SEQ ID NO: 5676 - DNA, 1341 bp, unidentified
  source 1..1341: mol_type = unassigned DNA; note = element_8b2de06
  misc_feature 1..2: note = core
  misc_feature 3..66: note = LE
  misc_feature 67..1098: note = CDS
  misc_feature 1099..1341: note = RE
  misc_feature 1125..1331: note = bridgeRNA
ttatgggatggcccgcccctcaacattcaacgtattttgacgacggaatggaagaggagaagaccaatggcgaatccagcgatcgaggttctgggagtggatcttgggaagaacagttgcagtgtcgcgggcctcgattctgccggtgcagtcgtaatgcgctgccgcaagacgcgtactggactgataaagttcgtatcgcagttgccgccatgcatcgtggcgatggaagcatgctgcggcgcgcattttctggcccggacattccagtcgcacgggcactcgatccggttgatgccaccggaatatgttcagccttacgtcaaagcgcagaaaaccgatgatcgggatgccgaggccatcgcagaagctgcgacccgcccgacgatgcgtctcgtgacgccgaaaaacgaagcccagctcgatctgcaaatcctgcaccgcgcacgcgcaaggttggttgcagagcggacccggctgaccaaccagttacgtgcgatgctgttggagcgcggcatcattctgccaaagcggcgtggtcctctgatcaaacgtcttggcgaactattggcaagtgatccgccgatcagtgccagaatgatgtgcctgcttcacgatctgcgagacgaatgggcagaacttgatcgcaggatcggtgcctatgacgacgaattggttgcgatgacgcgagaagacgatctggcccggcgcctacttacagttcccggcattggcgtgatcaatgccacggcactggtcgccgcagtgggcgatgccagcgccttcgccaaagcacgcgatctggctgcctggctcggtcttacaccgcgtcaacactcaaccggcggcaaaaccaaaatgctcgggatcagcaaacgcgggaatcgttacctgcgaacccagctcattcacggcgcgcgggcggcgatgcggcactttgctgagcagcaaacagctatgggagcctggctccgcaatctgcttgtccgtgcgcatcccaatgtcgtggtggtggcactggcggcgaaactggcgcgggtcgcctgggcagtccttcggcgcggcaacgcataccgatcgcaagcaaacttggcttgatgcaatgacggtccggtagacgggccgctcagcatgtctgtggaggtaagagagatggcataacggtcgaaccggcggacgggaaagcctggttaaaaatgtggtgcttgccaccgttggctttatgaggctcctgccgcgcggaacccatcttggccaggtcagcagacctgagaccggatacgttgatgcagacctgctacaccatccattttgcccttgcagacggggcgggccatacgt

SEQ ID NO: 5677 - DNA, 1390 bp, unidentified
  source 1..1390: mol_type = unassigned DNA; note = element_8b309a2
  misc_feature 1..2: note = core
  misc_feature 3..87: note = LE
  misc_feature 88..1116: note = CDS
  misc_feature 1117..1390: note = RE
  misc_feature 1153..1377: note = bridgeRNA
agatggggtggttgccgccctccccagacggcatcgcaatgtgccagggtggtgttgtgacagccacgaagtggaaagggcggcaagatgaaggatacgatgatcggggtggacctggcaaagcgcgtcttccaggtccacggcgccacgatgcgcggcgaggtgcagttccgccgcaagctgacgcgcgaacagttccgggcgttcatggcggcgcaggccccggctgtcgtggtcttcgaggcctgcccgagcgggagctactgggcgcgggagatggcggctctcggccacgaagtgcggctcgtcgcgccgcagtatgtccgaccgtttgtcaagcggcagaagaacgacgctgccgacgccgaggcgatcgtcgtcgcggcgcagcggccggagatgcggttcgtcgcgccgaagacggcggaccagcaggcgcgggccgtgctgttccgctgccgcgagcgcttggttcatcagcgcacggagctagtgaacgcgttgcgcacgacgctctacgagtatggtcatacggttccgcaaggtatcgctcacatcaggaggatcgtggccatcctcgacgcctcggatgcggacctgccggagctggtgcgggatgagtgccgggatctgctcgcgcagatcgacgagaagaccgcccgcatcgacgagcggacccgcaggatcaggacgctgtcggccgggaccgacaccgcgcgccggctgcagaccatgccgggcatcggcccgctgaccgcactggcggtcgaggccttcgcgccggagatgacgcagttccaccgcggacgcgacttcgcgtcatggctcggccttgtgccgcgccagcattcctccggaggcaaggagcggctcggccgagtctcgaaggcgggccaggccgatattcggcgactgctgatcatcggcgcgatggcgcgcctgacgcctttggggcgccgatcgattccggagggctcctggcttgccaggatgctggcgaggaagccgaggatgctggtcgcgatcgcgctggccaacaagatggcgcgcgcgatctgggccatgatgaccaagaaagaggattatcacgatccggcgcgggccgcggctgcatgaccgaaaggcgaggcagcgcagccccgcaccggtgaagggggtgtgagaaggcaacgacccgtatgggcgcaaggatcgaaagatccggaccgggaaaaccagcgtagtcgctcgagcttcgaagctcgttgctgagatttggacccgatccgcggatcaccatgccggccagcggccttcgagagcgccgcacgggaaggcctcacagaagaccgcactcgatcacgcgaacagatggaaaggagcctcttgcatcacgggcggcaaccacaga

SEQ ID NO: 5678 - DNA, 1354 bp, unidentified
  source 1..1354: mol_type = unassigned DNA; note = element_8b347b6
  misc_feature 1..2: note = core
  misc_feature 3..66: note = LE
  misc_feature 67..1095: note = CDS
  misc_feature 1096..1354: note = RE
  misc_feature 1118..1342: note = bridgeRNA
tgatgccgtggacggctctccaccaactgccgcagcctgtgttgcggctagagacggaggagagccatggggcaggttacgacaatcggactggacatagcgaagtcgatttttcaggtgcacggcgttgatgcagcgggcgaagttgtgctgcagcgacgtctgacgcgagcacggttggtgccggtttttgagaaggtcggaccttgcctagttggaatagaggcgtgtgccagctcgcatcattgggcgcgggagttacggaagctgggccacgatgtccgattgatgcctccgagttacgtcaaggcgtatgtgaagcgtcaaaagaacgacacggccgacgcggaggcgatttgcgaggcggtcaccaggccgacaatgcgtttcgtggaagtgaagacgccacaacagcagagcgtcatggttctgcacggaacgcggacgatgctgatgcgtcagcggattcaattatcgaacgtgatccgaggtcatatggccgagtttggggttgtggcgccgatcggacgcgaggggcttttgacacttgtagatgcgctgtatgaggagacggacgatcgcgtgccggccgaggcgcggcattgcttgcagatgctcgccgatcagctgcgattggtgaacgcccaaatcctggagaatgatcgcaagatcaggatcagcgcacgggcaacggatgtgggacgaagattgatggacattcccggcgttggtccggtgctcgccagcgcattcgtcgcgaccgtgccggatccttatgcgtttcgctcaggtcggagcctcgctgcgtggattggtcttgttccgcgccagaactcgagcgggggcaaggaacggctcggaggcatcaccaagcaaggaaatcggtatctgcgtcagttactgttcgtcggggccatggctgttattcgatacgcggaacggcatggcacacgccggccctggcttgcgcagttgttggctcgccgcacgacaaaggtcgcagcagccgcactcgccaacaaaaccgcacggatggtttgggccatcatgaccagcggacaatcttacagagaaccggaattgcgcgctgcctgacacttcaagcaggagagctcaacaagattgggaagggcggaacgaatgtaatgcaacaagccggtcgataccgggaacgggaaaacccactttcgccagtgcgcctcgagcgcgtggaaatggttgggacccggttccgcggaaggcactatggctagcggccaacgtgtgccgcatcaacaggccgaacacatggccgcaccgaccagccctgcagaaccgttcaattcacccttgccaaaggagagccgtccacaca

SEQ ID NO: 5679 - DNA, 1538 bp, unidentified
  source 1..1538: mol_type = unassigned DNA; note = element_8b39d85
  misc_feature 1..2: note = core
  misc_feature 3..243: note = LE
  misc_feature 244..1422: note = CDS
  misc_feature 1423..1538: note = RE
  misc_feature 3..220: note = bridgeRNA
cttgtattatagagtagtagttattaaagcccctctccaagggctatgtgctacactgtaagggatgctgtggattggttgcatcctcctaccacgagatggttccagaaaggttccaaccacagccccttacaattttgttgatcagttaaataccgccagacggtttatgtggaacaaggctacaaaagtaaggtgcactgtggatacagcatcacatatttatcgttggaggtatttgttatggtgatttctgttggcatcgatgtctcgaaagataagcatgattgctttattgtcagctctgaaggggaagtgctggcggatgtattcacgatccccaacaccatcgaagggttccactgtcttttacagcgaatccgggattgtaccgcaccgcaggacaaaataaaagtagggcttgaggcgacagggcattacagctacaatctgctcggttttcttcttgacaacggtctggccacctatgtcctgaatcccttgcgcacaaacctttaccgaaaaagcctcagtctgcgaaagaccaagaccgaccgggtggatgcacgaacgattgcttctatgctattatccgatgcgggcctcaaaccctacacagatacagcataccacaacgaggaattaaagtcactaaccagataccggtttgacaaggtgaaggaacgcgccaaactgaaaagctctattgcacggctggtctgcattctgtttccggaattggaaaaaatcgttccttctctgcatatcgcttctgtatacgccctgctggaggagtttcccggcgccaaacagattgccgcagcccatttaacgaggctgaaagcacttctcgtaaccgcctccaaaggccgctacaatcgggatatggcttttgaaatacgagatgccgccagaaactctattggttctcggatgcctgccaagtctcttgaattacagcacaccattcgtcttatccgtgaactggatgacgaaattgaggaaatcgaagaacagatccattccattatggatgagcttcattctcccattactactatccccgggttggggttccgcatggccgccatgattctggctgaagtcggcgacttcacccggtttgactccccggacaagctgttggcttatgccgggatgtccccctccacttaccagtccggacagctcaaaaattgctacccacacatggaaaagcgcggttcacgatatctgcgctacgctctttacaatgcagccaagtacgtctgtcagtgggacccgacattttctgcttatctcgccaagaaacgggcggagggcaagcattacaacgttgccatttcccatgcagtcaaaaagctggttcggctgatatttgctatggaaaaatccggagtgccgtacctcttggctgcctaacgtctttctaatagccaataggggcctgctcgggcctctgctttgctataccctttttgtaccatcttctttttcaccgccactcattttttaggggttgacttttaatagttaat

SEQ ID NO: 5680 - DNA, 1440 bp, unidentified
  source 1..1440: mol_type = unassigned DNA; note = element_8b3f498
  misc_feature 1..2: note = core
  misc_feature 3..84: note = LE
  misc_feature 85..1188: note = CDS
  misc_feature 1189..1440: note = RE
  misc_feature 1258..1379: note = bridgeRNA
taattggatggactcgccctcgccgaggcgtcgagcgcgccacggtggcaccctacgataaccaccgacagcgagggcaaggccatgcaaaagcgtacgacgaaaccgcaagctgcacacccggaaacgctctctctgtgcacgacagtcgctgttgatctggccaagcaggtgttccaaatcgccggcgaagaggcgcacggagagctggtgtacgaaaagcgtctccagtcgcgcgaggcgttcacgagttttttgtgccagatcgccaagggcgcgacggtcttgctggagaccgggccgggcgcacaagcctgggcaagacaggtgcaggccctgggttgtcaggtgcgcttgttacccgcacagcgagtcgccgagcaccgcagtggtgccaagaacgatcgcaacgatgcacaggcgatcttgcgcgccggacgcgataccaccatccatgccgtaccggtgaaaaccgtggaggccctggccatgcaggcggcgcatcgggtcagacagggctacatacggcgccggacgacgctgggtaatcaaatccgggggctgctgctcgagcatggcctggcgatcccgcaaggcgctgcagcgctcagcgaccgcgtgagccggattctggaggatgccacgttgccgctgccagacctgctgcgtgagctgatcgccgatatgcaggcggaatggctggctctggaaggccgtctcctgctgctgaccaaacggctggaacaatgtgcacgcgcggacaagaccgcctcgcgactgatgagcgtgcgcggggttgggccgatcatcgccactgccctggtcgccaagcaggtcgagcccgcgcgcttcccgaatgcacgccagttcgcggcctactttggcctggtacccgatcagcacagcagcggccagaaggttcggctcggcaagatgagcaaacgcggtgatggttatctgcgcagcctgatggtcgagggcgcccatgcggtgctccgcacgctcaaggctgactccgaggaagtggacgaccgtcggctgaaccgctggatgcagcggcacggacgcaagggtgcggccatacgtctggccaaccgcaacttgcgtatcgtctgggtgctgctgcagtcggacgcccgctactgccgtaatccctctgtccaaccgggagcaacgatagccgaatagatcccacgagatcccgccaccgaggcgctgagcgcctcaaccgctgctgagaacattgaccccaggtcagaccgtcgcgcgatgatgcctgccatcctactggcccctaagcctcttcgtaattggcacggcgcgagctcagacaatgttggcccggagcccctttgcggctcccttgctgaggcctgatacatagatgcaaccgggtttctctgttcaaagccggttgacagtaaaaggcgagtccataca

SEQ ID NO: 5681 - DNA, 1412 bp, unidentified
  source 1..1412: mol_type = unassigned DNA; note = element_8b40dfc
  misc_feature 1..3: note = core
  misc_feature 4..87: note = LE
  misc_feature 88..1137: note = CDS
  misc_feature 1138..1412: note = RE
  misc_feature 1153..1399: note = bridgeRNA
tgatgcggtggacggcgcccactctgcggcatcggagtgccatagggtagttgcgtcgaaacgcaaccacattgaggggagccgtccatgggcgaggttagcacgatcggagtcgatattgcgaagtcggtttttcaggttcacggcgtcgatgcggatggcacggtggtgatccgcaagcgcattggtcgggcaaaagttcttgagttttttgccgatctgccgccttgcctcgttggcatggaggcgtgtgcaacggcgcaccagtgggctcgtgagctcaagaagctcgggcatgacgtgcggctgatgccgccgacgtatgtcaaagcctacgtgaagcgcggcaagaatgatgcggccgatgcggcagcaatctgcgaggccgtgacgcggccatcgatgcgttttgtgccgatcaagagcgtcgagcagcagagcgcgctgatgctgcaccggacgcgggatctgctgatccgccagaggactcaactgatcaatgcgctgcgtgcccacctggccgaactcgggctggtggcagcgaaggggcatgaaggattgcaacaactggttatggccgtgacggagagcagcgatgagcggctaccgagtcacgcacgccttgcctgcctatcgattgtcgcgcaattgcacgcggcgcagacccagatcagcgggctcgacaagcgcatcacccaagcccatcgcgccaatgcggacagcaaacggctcgaagccattccagggttcggcgtgatcctgtccacggcggtggtggcaacgatgaccgatccaaaggcgttcaggactgggcgcgagtttgcagcctggatcggattggtgccacggcagaactccaccggcggtaaggaacgccgtggctcaatatccaagcagggtgatcgctatctgcggcggctgttcgtcctcggtgccatatccattgtcaggacagcacgcatgcggccagacaagtatccctgggtaactgaactgctggggcgtcggccgaccaagatcgttgcggtggcattggccaacaagatggcacggaccgcttgggccgtgctggccaagggcgagacctatcgggcgccgatacgcttgagcagcgctgccgtcgcggcggcggcctgaagatttcggcattgggaatgtgaggttacgtcaagggcgtacaggaacgtcgagggtgatgatggtttgatgcgaaccggttggaccggggatcgggagaacccgctaatgggtcaagcattcttgagtgcgagtgaatgatagggacccgatctgcggatcacatcagggccagcggctatgaacgccgcacaaacaggccggacacatgacttgcacccgaccgcaagctgaaagccaaaagaatcccttgacccgtgggcgccgtccacaca

SEQ ID NO: 5682 - DNA, 1311 bp, unidentified
  source 1..1311: mol_type = unassigned DNA; note = element_8b4665d
  misc_feature 1: note = core
  misc_feature 2..225: note = LE
  misc_feature 226..1296: note = CDS
  misc_feature 1297..1311: note = RE
  misc_feature 4..224: note = bridgeRNA
cagagatgatgttgatgagcacctcccgccgaggtctgacccagcgactgactgacttcgggtccttaaccggatttgtcggcctcggtcgggaggtgcttgtgcactcactggacgtggcgttgtgacttcataggagcctggccagaggccccatctctgtcttgtccgcgttgcccggctggtgcgtgccgccctgccccagtcacgagcgacaggacgacgatgcctcctattacacctgaccaagccgagatcgaggtcgccggtggagtcgacacgcatcaggacacgcacaccgcggcggtgatcgacctggtcgggcgagtgctgggtacccagcagttccccaccacaggggctgggtacgccgctctgctggcctggatgcgtgggttcggccgggtgtggcgggtcggggtcgagggaaccggcgcctacggggtaggactcgcccgccggctacgtggcgaaggtgtcgaggtgatcgaggtcgatcgaccccaccgtaagacccgccgtttccagggcaagtccgacccgatcgacgccatcgcagcggctaaggccgccctggccggcgagcggaccggcatccccaagcagcgcgacggccgcgtcgaagctctgcgtaacctacgggtggcccgccgcagcgcggtcgaccagcgcgccgacgcccagcgccagatcaaggccttgatcgtcaccgctcccgacgagctgcgtgcccggctgcgcggcctgaccgtcacgcggctgatcgccacctgcgcaaacctgcggcccgatcggaccgacgccgcgaccccggccaccgctgtcaagatcgccctacgttccctggcccgccgccaccagcagctgtccaccgagatcgccgacctggacgagctgctcgaaccgctggtggccgccatcaaccccagcctggtcgccgtcaacggcgtcggcgccgatgtcgccggccaactgctggtcaccgccggcgagaaccatgatcggctcacctccgaagccgggttcgccatgctctgcggcgccgccccgatccccgcgtcctccggcaagaccacccgacaccgactcaaccgcagcggtgaccgacaggccaacgccgccctctaccgcgtcgtgctctgccgcctgcgctgggacccccgcacccgcgcctacgccgaacgacgcaccaaggaaggcctgtccaagaaagagatcatccgatgcctcaaacgctacatcgcccgcgagctctaccagctcatcacaacaaatgatcttcaactcgccgcttgacatccataggagcat

SEQ ID NO: 5683 - DNA, 1529 bp, unidentified
  source 1..1529: mol_type = unassigned DNA; note = element_8b4e06e
  misc_feature 1: note = core
  misc_feature 2..237: note = LE
  misc_feature 238..1431: note = CDS
  misc_feature 1432..1529: note = RE
  misc_feature 5..257: note = bridgeRNA
tcgtactatataagagtagggaaagaacccctattcttattttttttgttatgatgagtctgattggttaacggcctaaatgtgggacatagctcccgaaattaaaagtgttaaccatcactcattatcactaattcgattaagcaagttgggattcgcttccgggtaactaacgaaaatgaattgataactgagtgctggacccaatcatactaattcacaaaggaggaaccccgtatgttagctgtaggtattgatgtatctaaatccaaaagcactgtcgcaattattcgctctgatgggactgttctgtcaaagccacatgacttttcacatactatcagcgatattactcaactcacagccttaattcattcataccaagaagagactaaagtcgctttggaatcaactggacattaccactatcccattcttaaagctctgcttgaagcaggattcaccgtattcgtgattaatccattcctggttaaaaagtttatggacaacagtatcagaaaaggaaagactgataaaaaggatgctgtccgcattgcacattttgtgttagaaaagtcatatcagttaaggccttacagccctaccgaccaaaagtatgaggacctaaaatttctgtccagacaatacagtcaaagcgtttctatgaaagtcaaagccagagtccaactctccaatctgttagatgatatcatgcctggtattcaaaatatcattcctatctcatccagatacctggaaaacacgcttttcttcgacttcgtagaaaaataccagagctatgaaaaaatctctcagatgggtgaaaaacggtttgtaaatagttacatcgcttttgcccaaaaacaccgatgtaggggttctcaaaagaaagctcttgcgatttatcaagccgcctctgatggcattatcacccgcagccccgatgttaccacttctcttgcgttatctcagtgcctgttaatgttaaagcaagccagctcctcagccgatttgatactgcgacaaatgcagtctatcgcttatacaatgccagagtattccattgtccgttccatgtatggcgttggagaccgcctggcccctatcctgattgccgagattggagatgtacggaggtttaccagtgctaaagcacttaatgcttacgccggtaatgatgcacctccttatcagtctgggcaattcgaagggaccaatcggcatatatcaaaacgtggctcagcctacttgcgtaaagcctgctatgaggtcatgcactcactcaaggtacataagcccgagaatgaccctgtttaccagttcatcatcaagaaagaatctgaaggtaagcacaagactgtagccaaaatggctggtgttaataagtttttgagaatttactatgcaagagtgatggagctttataaataacctacacttcttttttatcacctactgtggtgtttattaaagttacccttttttacgatccaatttttttcaaaaattgcttgacatttattagcaag

SEQ ID NO: 5684 - DNA, 1538 bp, unidentified
  source 1..1538: mol_type = unassigned DNA; note = element_8b4f6ca
  misc_feature 1..2: note = core
  misc_feature 3..250: note = LE
  misc_feature 251..1414: note = CDS
  misc_feature 1415..1538: note = RE
  misc_feature 3..230: note = bridgeRNA
cttgtatgatgtattagtagttaaatacatgcatacgctcctttctatttaactttgttataatcagtggtaacgctgtggactttttataaaatcctatagccttgactattttagggagtgtattgccacagttttatctaaatcatttatagttggataagtctttgaactttcatttcacgcaagtctatgatggtaaaactaggtggatagccacagtgattattatacgaaggagttaatttttatgatttacgttggtattgatattgccaagcaaacgcactatgcagctatcgtgaactcagatggagaagttctcgcagaacctttttcctttactaatgatcattctgggtttcaaaagttgctaaaacatctggattcactttctgtaaaggatacttttgttggtatggaatctacggctcattatgctgaaaatcttactagtttcctctttaccagaggctttcaggtttgtattattaatcccattcagacctcttctttacgaaagtcaaacatccgcaaaacaaaaacagattccgtggatacctacctcattatcaaagctctcattcttaatcactatcgactttttaccgcacgcgactttgattccttgcaattaaaaaacctctgtcgcttccgtcaaaaactcatgaaggcaaggacaaaggttaaaattcaacttgtgacttatgtggatttactgtttcctgaactccagtactttttcaaatctggtattcacggaaaggcttgttatgctttattaaaagaacaaccaaatcccgacagaattgctaaaatgcatctcacaaggcttacaaaccttctatcaaagtcctctcgcggacactttaaccagtctaatgctgtacgtttaaaagagcttgcatcacaatctgtcggtataaagaattctacactatctttacagatttttcaatccattcagcagattgagatgtatacccagcagcttgcagaggtggagcattccatccatgagattatggacaaaatggattctgttattaaaacaattcctggcattggttccttaaatggcgccatgattattggcgaaattggtgatatcactcggtttgaaaagccttgccaacttcttgcttatgctggattagatccttccgtttaccaatctggtaattttacagcagcaagaactcggatgtcaaaacgtggctccaaactactacgatatgcactaatcaatgctgcctggcaaaccaccttggtaaatcaaacctttaaggattattatgatttaaaaatttctcaggggcgtcgccattacaatgccttaggtcatgttgctcataaactagttcgtgtcattcataagatgatgaccgataatgttgcgtttaatttagcctagtcctacctatcaactatatttaattttcaaagagcaccttttgatgctttatttcctatacacttttttagttcaaacctttcatcaaaacttttgattttactattgactattcatagttggt

SEQ ID NO: 5685 - DNA, 1611 bp, unidentified
  source 1..1611: mol_type = unassigned DNA; note = element_8b53ebb
  misc_feature 1: note = core
  misc_feature 2..285: note = LE
  misc_feature 286..1473: note = CDS
  misc_feature 1474..1611: note = RE
  misc_feature 61..262: note = bridgeRNA
cctggtatattattattgactcatttagtagtcattaaaaatataccttttttcctttctttcaacatctgttgaatatttttgtaaaatttgttatattgaaaatgtgaatgtggatttgtatctctccttgtggctttgactacttcagaaaggttctcaccacaccttacaccaaaataatgattagttagatgagtcttgaattcgaatattgtaccaggttttgtggtttaaggatcgtggataacacatcacaaacaaattatgaaaggaagtattattatgatctcaattggaattgacattggtaaaaacagtcacactttttgtatttttaatcaaacaacaggtcaggaaattttagctccaactaacattaaaaataacaaaactggttttgactttttactaagtaaaatcaaagattacaaaaaagaagacttgttatttggcatggaagatacaggtcattaccattttgctttattaaaagcgttattatctaaaaattatactgttgctttaattaaccctgtggctacagatttaactcgtaaaatgcagggtggaatttcaaaaaatgataatttagattcttatacaatttgtgacgttatttcttcaaattctagaaagaaaccttatcgaattactaaaatcaataaattcgatttgtttgaacaacgagaattaacccgtcatcaccataatcttaaagaagaattaaatgtttacactaacagattacaaaaatgcattgatatcgtttttcctgaatttaattctctttttacttctaaatatggtattgtttatatggacattcttaaaaattttggtagtgcagctaatattgctagaactgatattagaacgcttgaaaactattttaactataaaggtagaggtaagcgtatttcattaactgcagatgaattaaaagcatctgctaagacttctattggtattgattctatctctgaagttattcaaattaaacatttaatttctcaaattgaattaattaatgttcaacttgaagaaatagacaaaaaaatagaagagtttagccgccagacaaactctcctattctaaccataccaggaatatcacatttttcctgcacttctattttatcagaatttggagatattagcaactattctagtgctaaaaaattaataaaatttgctggagttgctccatatgaacatcaatcaagtctatataaagctgaacatacatctataactaaaaaaggatctaaatatttaagaaaaacactttaccaaataatcatgcctgttatttggaataacgaagtatttaaacaatattatcaatttaaaatctcacaaggtaaaagccatctttgtgcactaggtcattgtgttagaaaattacttagagttatttatcatttgtgcacaactgaaaatggcaaattcgatgcatcattgctgaaatagccctattaataccgtttttaaaaaaagtctttaattaggctcttttcagcatgccttttttacatattcacatttcaaagaacaatttatagctaactaaaatattttttattatttacttgatttttatatagttag

SEQ ID NO: 5686 - DNA, 1450 bp, unidentified
  source 1..1450: mol_type = unassigned DNA; note = element_8b54a96
  misc_feature 1: note = core
  misc_feature 2..220: note = LE
  misc_feature 221..1249: note = CDS
  misc_feature 1250..1450: note = RE
  misc_feature 14..232: note = bridgeRNA
ctgattgatgatggaagagacgttgcggtggttccgtagcgttcggatgatccggctggtgggctctcgaagtgcctgccgctcgaacgggttggctttctaacgaactgtccgccggtcggtcatctgaccgtggtgtggctcgaaagaggcgagagcacatcgacccgaatcaggagtgcccacctcggtttcaccacttaccaaggaggaatctgccatgaccatgatcggtatcgatccccacaaaccaacccacaccgcggtcgcagttgacggcaacgaacacgttgtcgacgagttccaacttcgagcgtcgagtcaccaggccgaacggctccgagaatgggccgacaggttcgccgaacgcgagtgggcggtcgagtccgcgaacgggctcggctatctcgttgcccagcagctcgtcgctgccggcgaggtggtgttcgacgttccacccgtccttgcatcgagggtgcgggtgctcgacacgatccgttcacagaacaacgacccgaacgacgcccgctcggtcgcgatcgccgccatgcgctccgatcgcctcgccagagtgcgacccgatgaccatgcccgggtgctgcgcctgttggccaaacgccaccgcgacatggcacggctgcgcaacaagcactgcacccgtctgcacgctctgctgctcgagctggaacccggtgggatcagctcagagatcaccgtcaccaaggcaaacaccctgctcaacggtgtcacggtcgccgatcaggtgactcggcatcgagtgatgatcgcgcacgaactcgtcgatgacatcgcccgactcgacgttgcgttgaaagcgtcgaagaagcggatcgaggccgcagtcgtggcgtcgggaacgacgctcaccgagatcgtcgggatcggcccgatctgcgcagcgatcatcatcggctacaccggcgacatcggccggttcccgaccaaaggccacttcgcgacctacaacgcgaccgccccggtcgacgcgtcatcgggaccgcgcccgaagcaccggctgaaccagcgcggcaaccgcaaactcaaccacgcgatccacatcgccgcgatcgcgcagctccgcttcgacaccgagggacgcgcctactacgaacgcaaactcgccgagggcaagtcatccaaagacgcgatccgatccctgaaacggcggatctccgatcgggtctaccgacacctcaacatcgacgcccaacgcgctgccaccagctgagagcaggtgggcccgggaggacaaaacaggaacgactctgactccagcgtgaccggctcgacatcctgaacagccggctcttcggacaggtcactcccggacccgacaaccaacgctaggacccttcacgccgccaggcaagagggtcgagctgtcgcgccccgaccgcctcagaaattgccccttgacacaaagaggctt

SEQ ID NO: 5687 - DNA, 1334 bp, unidentified
  source 1..1334: mol_type = unassigned DNA; note = element_8b56b55
  misc_feature 1..2: note = core
  misc_feature 3..80: note = LE
  misc_feature 81..1115: note = CDS
  misc_feature 1116..1334: note = RE
  misc_feature 1090..1319: note = bridgeRNA
agataattggactcccctccttcaaaaggagggttaagatacttagctctcacacaaagttcttaattggagtccgtaatatgaagaatactattgttggtgttgatttggcaaaagatgttattcaggtatgtataaccaagcgaaacaaggtgctctccaataaagagatgataccgtctgaatttagcgcttggcttgcaacctctaattcagccaccatagtatttgaagcatgcagtactgccaatcattggcagcagcttgctcactcttatgggcatgatgcaaggcaaataagtgcaaaactggttgctaatattcgacaaaaccagaaaacagataagaacgatgcacttgcagtagctcaagcctgtagcttgccagaggtgaagttcgtctcaggtaaaacctttaagcagcaagagctgcagtctatagttcgaatcaaagaattgagcgtcaaacacaaagttgcggtagagaaccaaatccgagcgcttctacttgagtttggtattcgtacaccaactaaaggttcgatagtaaacgttgttgagctcactcttgaagatgctgacaacggtttttgcgatgaactgcgtgattctctggcaatagcttttaatggctatctcgacctagttggtgcaattaaaaagtatgaatccgcattagagcgagttgctaatagcaatgcagactgtcgtaagctcatggcgctagaaggcgtggggccgatgaatgccgttaacttatatatgctgctgtcatgtggtgaaatgggtacttttcgcacaggaaaggatgcatcagcttgtgtaggcttaacaccaatacagcattcaacgggtggaaaagccaagcttggcagtataggtaaacatatccgtaatcatagtatgcgaagtgtgttagtgagtggcgcgatggctgtatgtagccaggtcaaacgcagagtgccacgcacgacaaaagaaacttggctaaaagggttaatcgaacgtagagggatgcgttgcgctgccgttgctttagccaataaaaccgttagaaccgctttctccctgttagccaatgatactgaatataaagcaataccagtggctagctaggaagtaagaaccatcaatataaatgcttaatttagataaaaatcagcaactttagtcagtgaagcgctaagagcataatagctcgccatggagatatgacaaagtcgttcgcgtaaaaatcattgagcctgggatagcttcccaaacagagctcgtacataagcacgcattaaatctaaagcaaggcatatatgttgttgacacgggggagtccacata

SEQ ID NO: 5688 - DNA, 1335 bp, unidentified
  source 1..1335: mol_type = unassigned DNA; note = element_8b59ab2
  misc_feature 1..2: note = core
  misc_feature 3..77: note = LE
  misc_feature 78..1115: note = CDS
  misc_feature 1116..1335: note = RE
  misc_feature 1090..1319: note = bridgeRNA
agataattggactcccccaactcagtgagctgggttaatattttagttctcacacaaaaaatattatggagtccaacatgcacaatataatcacaggtgttgatttagcgaaagaagaaattcaggtttgcgtttgtaaacgcaacaaggtgcagtctaatcaggcgatgacaccgatagaatttggttcttggctagcgtcgtcaaaaccaatgacaattgtttttgaagcatgtagtacatcaaactactggaagcaaaaagcgttggaatatgggcatgatgctcgattaatttcagcaaaattggttgctagtgttaggcaaaatcagaaaacagataaaaacgacgccttagcggttgcgcaagctgctcaactcaccgatgtttcgtttattaacggcaaatcaaaagagcagcaagagctacaaaccttggttcgtctgcgagagttggccgttaagcataaagtcgcaatgcagcaacaaattaaatctttattgctagagtttaatatccgaatctcgcctagtcagggagggttaagtggcgttgttgaaggcgtactggaagatgctgaaaatggcttttccatggtttttaggcaagctctcagtactagctggcaacaactccagcgtggtattgagtcgataaagcagtacgatttatatttagaaaaagcagcaaacggccacgaaatatgtaaatcgctacaggccctagaaggtgtaggtccgttaaacgctgtgaatctttatatggcactgggctgtggagagatggggcaatttgaaaaaggtcgcgatgcatctgcctgtattggtttaacgcctattcaacattcgtcgggcggtaaagtaaaattgggctcggtgggcaagtacgttaaaaataatatgctacgaagttgcttagttagcggtgcaatgtcagcagttaatcaggcgatgagacgaccagcaaaaaccaaaaaagagatgtggatccagcagatggttgaacgcagaggtaagcgctgcacagcggtcgcgctagcaaataaaacagtaagaacggcattcgcgatgcttacaaatggcacagaatacaaagcagaactactcgctgcttaatagaggttttgcccaacaacaaaaatgctcaaaaaagatgaaaatcagcttgtttagtcagtgcttcgctcagagcttcgagctcgttatcgagatttgacaacaagttcgcgtaaatatcatagagcctgggatagcttccctattagagctcgtacataagcacgcatttattctttaactggctaatactgttgttgacaaagggggagtccacata

SEQ ID NO: 5689 - DNA, 1256 bp, unidentified
  source 1..1256: mol_type = unassigned DNA; note = element_8b5f155
  misc_feature 1..2: note = core
  misc_feature 3..222: note = LE
  misc_feature 223..1212: note = CDS
  misc_feature 1213..1256: note = RE
gtgataagtttgcagaataaaaatctacaatactaaaagttaaaaatattcattagaataatacattggaaatagcaacaggaaaaagaccgggaacttgtagatatttaatatcgttttaaacatttcgtccctgttgcctgttttctaaaaaccgaatagaatgctgtttgataaagataaactcttatcacattggtttaaaagaaaacgatttttccaatgaaagataaaaactttagtatggtaaatttaagtaaaaaagtaattggagtagatgtgagctcaaatgttttggtaatgagctttatgaacaaagaaggaaaacagaccattcttaatgtgtataacaacaagactgatattgagcgatgtttgaaaaagattgatgtgaactgttacaaaatagtagttgaagccaccggttcctacagtagtaaagttttatattatgcttatttgctggggtttgaagtatatcaggtaagcggtttgtctgttaaaaagtacggcgaggcgaaaaatcagattagcaagaccgatgaagaggatgcacgattgataaggaattttggagaaacaatgaagatgcttccctatgagcctaaaaaagaaaatattgaactgctggatcaggaacttaccctttggcatgatttagagcaggaaaaagcgagattttcattaaaattaaagtcacttcgtcaaaaacctgttctcaataaagaagtcataaaacattatgaatctattattaaaagaataggaaaagatatagaaaaattgcaggaaagacttcccaaactagaagatgaagaattgaaggatactaaagagttattggaaagcatcaccggaattgggaagaaaacagccttacttttactggtgtcgaccaacaattttaaaaattttaaatcggcaaaagccttatctaaatattttggggtagcaccaagaatgtatcattccggaaataagaaaatcactattggaaaatgcaggaccagtaaaggattgataagaagtgttttgtatgtttgttcttggagtgccatacgatacaataagcattgcaaagctctttttgaaagaattttacagaaaggaaagtgcaaaaaactagctttaattgccgtatgcaacaaacttttaagattagtatttggaattgtaaataataaacgaaaatatcaaccagattatatctagaaaagatttttttaacttttaaaatttggatgttaacatagaat

SEQ ID NO: 5690 - DNA, 1233 bp, unidentified
  source 1..1233: mol_type = unassigned DNA; note = element_8b605fe
  misc_feature 1: note = core
  misc_feature 2..225: note = LE
  misc_feature 226..1206: note = CDS
  misc_feature 1207..1233: note = RE
  misc_feature 47..214: note = bridgeRNA
tcttaagttagccttatcaaatataaagttataaattaagtatcaaatcagaaagaacaaaaagagaggattaaggttatttcgtgtattgagactgcgatctcgttttccatgacaatcccctctctttgctactattatttcgaacagttctgtgagactttagatctcgtttttaagatgcagaaaagctagtagaccacttttttcgtaaacttcatacagatgagtgaaaatacaaattatttcggaatagacataagtaaagatgtcttcgatgttacgggatcagatagtaagcattatcagtttaaaaatgacctatccggttttaaaaagtttttgagattaaccaacaagtcttctcattgcgtgatggaatctacgggagtttatcacttacgcctatcctattatttatatgaaaaaggagtcgctgtaagtgttgagaatcctttgtccataaaacgctttatccagatgcgattgacaaaaataaaaacagacaaaagagactcacatatgatctatgaatatgccgtaagctctggggctgaacttcgtctgtggaaaggccagagtggcactcaaatagcttgttctcaaatcataggcctgaccaacttatatacaaaacaagcgacagcacttaaaaacaagttacagacagaagagtccatgggttctccctgtggcaatgtggtaaggtcactaaaaaggagtttgaaatacttgaaaaacgagatagataaactagaaggttcattactggagttggtaaaacaagacaatcaagatctacttacacgggtggagagtattcctggaatagggagaaggtcaggtatgttattgattgttctgacaggaggttttgaacgcttcaacaaagcttcagagctttgctcttttgcaggtctgacccctatgataagacagtcaggtagcagtataaggtctagaccaaggataagtaaaatgggaaatagacgattaagaaaaacattgttcatgtgcagtctctctgccaagaaacataataaggcatgtcgagacatctttaatagaattgtagcaaaaggaaagagtaaaaaagtagcattgatagctgtctgtaataagcttttaaaacaagcatttgccttagcaaaatcagggttgatatatgatcagaactatagaagtgttttagtgaatttaaattaataattacttgttttttaacacagttct

SEQ ID NO: 5691 - DNA, 1614 bp, unidentified
  source 1..1614: mol_type = unassigned DNA; note = element_8b62cb5
  misc_feature 1..7: note = core
  misc_feature 8..283: note = LE
  misc_feature 284..1462: note = CDS
  misc_feature 1463..1614: note = RE
gtttcctatcttctagttgttgcattttcgagccgaataccgaatgcttgaaggtgcaatgcagattctggcgggcaggaatgccgatcatggcgatgagagcgaaagcatctcgtaaaggaaactgacatcctgccccgttcgggcgaggccgcggataagctggatgagggagcttcgagaagcccacctcggatctcttctgggaagatgcggtcccgagcggttcgggcagcagggcccgccggtctggcgccgcgacttcttggaggagatgattgcaatgatctacgcgggtgtggacgtcgccaaggcgaaccacgtgatcggcgccgtcggcgatgacggccaaccgctctgcaagtccatggagttcaagaactccgatgccggcttcgagaggtgctcggcgtggctggagggcctggccgaggagccgtcggacgtcttcgtcggcatggaggccaccgggcactactggatggccctgttcgcgcggcttgccgccgagggctacagcgtgtgcgtgatcaaccccatggaggtcagggccgtccgcaagctcaagggcaagtcgagggtcaaaaacgatcgggtcgacgcgctgctcatcgccgagaccttgcgcatcggcgagtacgtggagaccaagctggcctccgacgaggtgcagtcgctccgcacgctcacccgctaccgccaggcgatcaaggaggaggccgcccaggtcaagattcggctgacctgcgtcatggactcctacttccccgagtacgccggcgttttctccgacatgttcggctcggcgtcgcttgccgtcctggagaagtcgcccatgccctccgagctgctcaggcgcaaggcgccgtcgctggccagcgacatctcgaaggccgccaggcggcagatcgggcaggccaaggcgtccgagctcaaggccgccgcgaaatccagcgtcggcataaccctcgggctcggcgcggcgtcgttcgaggtccgctcgatggtctcccaggtccgcttcctcgaggagcgcgcgtccgaggccgaggagcgcatcgaggagctgctcatgggcatcgagccgctcgtgctcaccatccccggcgtgtcgctggcgacaggggcccagatcgtcgccgaggtgggcgacgtgagccgcttccgcagcgccgccgcgctcgtcagctacgcgggcctgaactcgtcggtgagccagtccgggcagttcgactcggggggcggccccataaccaagcaaggagacccgtacctccggcgggcggtgtggctggcggcgaaccgcgcccgccagcacgacccggcgctcaaggccttctacgacaagaagagggccgagggcaagcgccaccgagtcgccgtcacggcggttgcgaggaagctctgccacatcgtgtacgccgtcatgcgcgaccaggtcccctacgacccgaaccgctaggctgccctgagaacctcctcgcctgcgggccgagcctccggccctgtttccgcatgcctgcaagcattcggtattcggctgtcaaagtgcgcgttccaatgcttcctataaacttcgaaaacttcgtttagggtattgacttcatatagctg

SEQ ID NO: 5692 - DNA, 1577 bp, unidentified
  source 1..1577: mol_type = unassigned DNA; note = element_8b7371d
  misc_feature 1..2: note = core
  misc_feature 3..280: note = LE
  misc_feature 281..1456: note = CDS
  misc_feature 1457..1577: note = RE
  misc_feature 32..257: note = bridgeRNA
cacgtataatccagttatcctcttatgaggttaatggattattctcctttctcccatttcttgggttttattgaatactccattataatacttaaagcactgtggatctgtacctatatcattacagctttgactgttcggaggtgactcagaccacagcttttcgtctattactgttaattagtttgttaacgcttgacgtttctatttacgtgattacacagccgaattctctgtggaagacagcagtgcttattctattatttaggaggttttatctatgtctctgtactttgttggaattgatatttccaagtacaaacacgattgttgcattatttctgcaaccgatcaaaaagttatttcaaagttctctatcaaaaatgataaagttggctttgaagaactgattaccacttttaattctctctccagtcctgaggatataagaatagggtttgaatcaacagcccattatgccctcaatcttgaactcttccttgaaaatgcccaccacagcttcatggaagttaatccagttttaatcaaggaatacaaaaagtctacaactttaaggcgtaccaaaaccgattctgttgactgcgaatcaatagctcgttggttaatgactgttgagtacaaaccccattcaaaaggattttaccacgcttattccttaaagtcattaactcgtttgcgtgacagactaattcgacagcgttctttttatcttgttaagataacaaatgtgttagatcacacatttcctgaattcaagccattctttaatgaacgtttatctaaaaccgctctatatctactagagaattatggctctgctgaaaagatggctcgcatgaattctgtttcttatgagaaacttcgatccatatctagaggtaagttttctcctcaacaattcattgctttgaaagagcttgcagctaatacagtaggtgtaaacaattctatctttgatgttgaattgaacagtctgcttactttgtataaaactcttgtaacagagattaacactcttgaaaaagaaatcaatcttctcatcgaagaagtccatcctcattacttatctgttcctggtattggctcaatttctgccgcaatcatctattctgaatacggggatatatcaaacttcgataatcctggtcagatgctcgcatttgcaggaatcgaacccggaatcaatgaatctggtacagaatctcatggtggtcgaatggtaaagcgaggttcttcacagttacgttatgccttgattaattgttgtcttcctttaatccgtttcgatatgacatttgcaacttattatgctaagaaacgtgcagaaggcaaaccacacagagttgcaatcactcacgttgccaagaagctgattcgtgttatctatgcattggagaggcaaaataccgatttctgcgttcagaagcttcgttaatacttacttttcttagaatgtgactgtcatctaaaatacgctgtatttagatggtttattaaggttacccttttttaatcataatttttcttccaaaaactattgactatttatagtttgt

SEQ ID NO: 5693 - DNA, 1224 bp, unidentified
  source 1..1224: mol_type = unassigned DNA; note = element_8b7bfe5
  misc_feature 1..2: note = core
  misc_feature 3..209: note = LE
  misc_feature 210..1124: note = CDS
  misc_feature 1125..1224: note = RE
  misc_feature 12..191: note = bridgeRNA
cttatctgttcggaatctggcagcgtaggcgtcgagagccggcgtgggccgccgtgcaagcctggatcttgacgatcgccatgtagcttggcgcccacgccggaatctcccttgatccgcccgaacagttgctggagctgacactcgcagtgataagactgggcgagcgggggagctctcgacccttccagactatacggagttgggcgatgaacgggatcgggattgatgtgagcaagcgtcagctggatgttggtacgacggacggggaaattctgcaggtcagaaacaccgcggccggctttgctgaattggaggcctggctgaaagaacacccggcagaccagatcgtgctggaggctaccggtggttatgaacagcgcgtgctggatttcctgcacaaggccggtcgtccggtggtccgcgccaatgccctgcgggcccgcaggctggcccagggtatgggccacgtggccaagaccgaccgcctggatgcctacgcattggcgaagatggccgtgctggtgaaactgcccgcctaccagccgctggagccttggcaacaaagaatgcgggaattcgtgcgggctcgccggcaggcgatgcaggcgctgaccgtggcgcgacagcagcaggagatggtcggtgatcgtgagttgcgccggctcctgcaggccaacattacacgcttgcagacgctggtcgcacgcttgggaaagcagatcggcgaacaggttgaacagcagcctcaactggccgtgatgaagtcgatgaagggcgtcggtcccgcgttacaggcggtactggccagccatctacccgagctgggcagaatcagcggcaaggccatcgccagcctggtcggcgtggccccgatgtcccacgacagcggcacgatgcgcggaaaacgaagtatccacggtggtagagccgagatccgccaagtgctctacatggccgccatgtcggccatgcggcatgagcctcggctgcgggatttctaccggtcgctgcgggcccgcggcaaggaaggcaaggtggccatcgtggcggtgatgcggaagatgctggtaatcctcaacgcccgcgtgcgtgacgctgaaagcggaccgatccccgcctgaagccagccaacacgggaacatccagaggctgccggccagcggccggcaccaccatgcccgtctgctggaggggcggcacgcccgctcagcaacacagttg

SEQ ID NO: 5694 - DNA, 1185 bp, unidentified
  source 1..1185: mol_type = unassigned DNA; note = element_8b87cca
  misc_feature 1..2: note = core
  misc_feature 3..216: note = LE
  misc_feature 217..1170: note = CDS
  misc_feature 1171..1185: note = RE
  misc_feature 27..196: note = bridgeRNA
cttgtatggtaaagcttaagagaatcgggaaaactttggatgtcgggatggagggacgtcgacaagtatctgctaagacagacctcgctgagaattcatcccatcgcgtcttccagagtcgatgaagaatctagcggttaaaccgccgatttgtgcacaagcttactcggcagacgcaccaccccgactctcttattttcaataggtggaggacgtatgacaagcgaaatgttgatcggtatcgatgtagcaaaagacgagttggtgattgattcagggcaaggtctagtctcgattgccaatacaacagaggccatcgatgcttggctgaagacgttgccgacggtgagttatattggtctggaagcgaccggcgcttaccatcaactcttggccgaccgcgcggtatccctaggccagatcgtctatgtgctcaatccccgcgacatgcgtcattatgcgctcggcttgggtcgacggggtaagacggatcgagtagatgctcaaatgatccggcgttttatcaccgctgaacggagtcatttacgcccctaccaacccgcgacggcagtgcagcaccaattggctttattgcaacggcgccgagcgacggtcgttaaacatcgtcaagccctgcaaaaagccttgcggagtgttaatgagctggaagagccgctacatgaaaccttgcttgctttagacaccttactgacacgtatcgaccaacaattgaatgaattattgacgttacagccagcactgaaagccaatgcgcgacgcctggaaagcataccgggtattggccgacaaacctcgacacagctggctgtcttatttgaccgagtaccgcttaaccgtagcgatgccgccgtagcgtttgtggggcttgatcccagagcctgtgattcagggctaaagcgaggacgcaggcgtgtctctaaacgtgggccgggggagttgcgcagactgctgtacaactgcgcccaggcagcggctaaaactgctgtgtggaaactctattaccaagccctacgcgctagagagttctcggccactcaggcattggtgattcttgccaggaaattattacgcatcgcattctcgctttggcaacaagacgaggccacatttgacgctcagaaaattggctgtctcaaaaatgcggtttgacaaaaaccatagaat

SEQ ID NO: 5695 - DNA, 1487 bp, unidentified
  source 1..1487: mol_type = unassigned DNA; note = element_8b8aadd
  misc_feature 1..4: note = core
  misc_feature 5..238: note = LE
  misc_feature 239..1471: note = CDS
  misc_feature 1472..1487: note = RE
gtcactagggcaccatcctttcggcggatgtctgatgggcgttcgttgaagggactcggcgggggccgaggtgacggccagtggtggtcgctcgtggagggcctgcatgacaccgccgccctcggtcctcccggggtcgcagaccggcatcaggaagacgcgccgcagagcgccagttagtgaccgtccggtggtcgatcccctcgccgcgtcgtcgctgccaacctgaggagatccgttgtcgaagagcaccacagaacccatttacgtcggtctggactgggccgctgccacacacgcggtgtgcatattgtctgcggtaggaaaagttttggcgcagttcacgattgatcacaccgccgagggcatcgctacgctgatccgcaaactcgcccggtacggtgatcccgctgatgtccagatcgggatcgaacggcccaacgggcggctggtcgacctgctgcttgaagccggccacccggtcatcccggtgtcccccaacgccatcaagacctggcgcgacggcgaagtcgtttccggcgcgaagtccgatgctggagatgcgctggtgatcgctgagtatctgcggctgcgccgccaccggctggaccccgtagcgccctacagtgcacagaccaaggcactgcggagcgtagtgcgtacccgcgacgacatcgtcgccatgcgggtctcggccaccaaccaactcagcgccctgcttgataactactggcccggcgccaaggcaatcttcgccgatgttgaatccccgattagcttggcgttcctgcgccagtatcccaccgcgatccgggcggcccgcctcggcgaaaaacgtttggccgccttcctggccaagcacggctactccggtcgccgaacagccagtgagctgctgggccggctgcgcggcgctcccgcgggcacgaccaccccagccctgtccgtcgcagtcgctgacgccgtgacagctctggtcaccgttctggaggccctcaacaccgcctgcaaaaacctcgaccgctccgtcatcgcccgcctcggggagcacccggacgccgagatcttcacgtcgctgccaaggtcgggtcagatcaacgccgcccaggtgctcgccgagtggggcgactcccgggcagcctacgacggacccgacgcagtggccgccttggccggcgctacacccgtaaccaaagcatccggcaagcaatacgctgtgcacttccgctgggcctgcaacaaacgcttccgccgggcactgaccaccttcgccgacaacagccgccaccaaagtccctgggccgccgacatctacacccgagcccgcgcccgcggccatgaccacccgcacgccgtacgcatcctcgcccgcgcctggatccgcgtcatctatcgctgctggcgcgacaaccgcccctacgaccccaacctgcacggcggaacacaaagactgctgcctcaaacggcctgaggttgactcaggaagt

SEQ ID NO: 5696 - DNA, 1663 bp, unidentified
  source 1..1663: mol_type = unassigned DNA; note = element_8b8bb8e
  misc_feature 1..2: note = core
  misc_feature 3..360: note = LE
  misc_feature 361..1521: note = CDS
  misc_feature 1522..1663: note = RE
  misc_feature 108..335: note = bridgeRNA
cttgtataatataataaagtttaaaatttaatatattatacttacctttctccattaattattttatttttatttctaaaaattttggtttaatggtaccattattttatattttaattttaaataattaacataattttactttgattttatttcattgtataattaatttattaacactgtggacttttttgttttccttatagctagactattcgaaggagcttattgccacagttttcgctttattggttattagttagatagggctttgactctttatatttagcaaggttacaaggctaaaactaagtggaatgtcacatgtgttaaaattcaaatttaaggagatgatttattatgatctttattggcatcgatattgccaaaaattctcactttgcatctgctgttaactcagataatgaagtgattgttaaaccttttaaatttactaatgatgataaaggttttaatttatttattaatacttttaaagattttgatttgtctaattgcctagtaggtttagaatctacaggaatttacggtgataatcttacaacttttctttttagtaaaggttttaagattggtcgtattaatcctattcaaactgactctcttcgttcttctaatattaggaaaacaaagaatgacaaaattgatacattactaattgcaaaatgccttatgcttggcaattatactttagttactgaaaaagatattgaaattatcaaattaagaactatttgtcgttttaaatttgatattaaaaaatctcaatcaaaagctaaaatacaactggttacttgccttgatattgtatttccagaacttagtaatttctttaatggcaatttgcacattaaatcttcttatgctttacttactaaatatccatccgcaaaaattattgctaatactagaattgatattttaacaaatttattatactcagcatcaaaaggacattttaaaactgataaagcaattgctctcaaagaattagctaaacattctattgcaatggacaatcctgcaattggtaaacaaattcaaatgttaatcgagcaaatccaaatgcttcaaaaacaaatagatttgctcgatatcgacattaccaatatcatggaaaaacttaattccccaattttgtcaattcctggtattggtatatggttaggtgccatcattattagtgaaattggcgatattactcgctttagttctgctacaaagttgcttgctttcgcaggattagacccttctgttagacaatctggtaattttaatgctactaacactaaaatttcaaagagaggttctaaacatttacgttttgcaatcaactatgcagctgaactgattatttggaatgatgataccttttatcaatattataccatgaaattggcacaaggcaaatcttatttaaatgcaattggacatgttgctcataaattaactagagtaatttttaaattgcttacaacaaacacaacattcaaagcttaagttaacaaattttaaagtacatatttccattatttaacagttttaaaaattgattttgaaactgttattagtcatggaaatttttatttatttaaaaaatcaaaaaaatttttattttttctattgacaattaatagttagt

SEQ ID NO: 5697 - DNA, 1315 bp, unidentified
  source 1..1315: mol_type = unassigned DNA; note = element_8b90bfc
  misc_feature 1..2: note = core
  misc_feature 3..265: note = LE
  misc_feature 266..1267: note = CDS
  misc_feature 1268..1315: note = RE
  misc_feature 37..214: note = bridgeRNA
cttgtatattaaaggcatctctaaaacacaggattatgtaagacaaaaaagtttatagtgacaactgattttctggggaagccgccccgaccttaagccttgagcttgttcgtagagaggctccccaccctcgtcatccatgccgtggagtatctgaggcctgtaagcgtaagcttctgagcctgcattcacaaggacggcagatgaagtgccagggttgggaaaccagttatcatcataacaaaatgaatgggggagatgaaaaatgaatcatgtgggaattgatgtcagcagcaaagaactggtcgttgtggtcagtgtaaaaggcaaggcccgcagtgccaaaacttttgaaaatacggcatccggacatcaagccattattggcatgctgtcaaaactgaaaggcggatcaagggcttgcattgaagcgacgggtatttatcattttgatttggcggtcgccctcagtcgtgccgaaggcattgaggtcatggttatcaacccaaaggtggcccataactttgccaaggtgttgatgaaacgcagcaaaaccgatgcggttgatgccggaaccttggcggtttattgtgaaaggatgtcttttgaagcgtggcaacgccccgctgacgggcaccttgccttacgggcggtttcgagaagaataaccgccttaaccaagctgaagacgcaaactaaaaaccagctgcatgcgttaaaagccaccggggggacgccggatttagtgatcgggcacaccgacgccttgattgaagtcttggagaagcaaattcaagcccaccgcgacagtgcgcttgaacttatcgcagggcatgacgggttagcaaccgcttttgcgttaatcacgggcatcaagggcattgcacaggcgagcgccgtccaactactgggcgaattgatgatattgccccaggacatgacggcaaaacaatgggtcgcctatgcaggcttagacccgcggcactttgaatcgggcagtagcgtgtcgaaaaagccgcgtatcagcaaggcgggcaataaatttatccgtcaggcactgtatatgccagctctggtggcaacgcgctatgagccgaatatcaaaggctattacgcccatttggttgaagacaatggcttgaagaagattcaagcggtctgtgctgtgatgcgcaagctattacatgccatccatggcatgttgaaagctaaaaaagaatttgacgggactcgtttttacacgcgacctgctcaagcaacttcataataatttttatgattttttgcaaaatgggcttgtgttttaagagagtat

SEQ ID NO: 5698 - DNA, 1208 bp, unidentified
  source 1..1208: mol_type = unassigned DNA; note = element_8b95f93
  misc_feature 1..2: note = core
  misc_feature 3..187: note = LE
  misc_feature 188..1174: note = CDS
  misc_feature 1175..1208: note = RE
  misc_feature 12..197: note = bridgeRNA
cttgtatgttgagattttggatgattagctatcaccaagctctaaaatcagtgaggatgcttgaccacataatgctagacattgttctgtagattatcccctgattttacttactcaaatactggatggtatccaagcgcatagctcggtagctaatgatgctgaatgtacaagtggagtcgttgatatgagtataaatgttggcattgatgtaagtaagggaagtctagatgtttgtgtacttaacaatcaaaccaagagcggacaacgatatcgtaagtttaagaacgataaagaggctcattctgacttgaactcttggttgctaaaaacagcaaagtgtaaagcagaagatatcttaatcactatggaggcgactggtgtctatcatgagccaatagctttttacttacatatggctggttttttggtgtttatatctaaccccggcaaagcaaaaaagttctctcaatcattgggccttatacataagaccgataaatcggattcatatatgctggctttgtatggtgatgcacagggaagccgagctcatctgtggacaccagatagcctaaacgtaaggaatatcaaatcattatctcgtcgcctgagtgctttagaaaaggatagactgagagaatcaaaccgtttggaagctagtgaaatcagtgatgctcatgagcgagtgatatgctcgataaagcgcgtcattagcttaatcgacgaagaaatagcctcgattgaggaagagattgatctagcaattagatcagaccctaccatgaataaaaatcatcaactattacaaagcatcgttggtgttggtaaggtcatgtctcgcgaacttgtttacttattcagtgctaaacagttttctagtgcaaagcaggccgcagcttttgttgggcccatccctagactaaatgaatcgggaaacctcaaaggtaggactaccttgagtaaggttggcccatcaagagttcgtgctaaattgttcttggcggcggtaagtgctagcacccacaaccctgatattaaagagcagaaacgaaggttgctggcagcaggtaaaaccaaaatgcaagcgcttggagcggcaatgaggaaacttattcagatttgctttgggatactcaaaacgcagactgaatatcagccccaaacgagctagaactatgcttgctgattaagttgagagatggtat

SEQ ID NO: 5699 - DNA, 1424 bp, unidentified
  source 1..1424: mol_type = unassigned DNA; note = element_8b98c64
  misc_feature 1..4: note = core
  misc_feature 5..207: note = LE
  misc_feature 208..1410: note = CDS
  misc_feature 1411..1424: note = RE
  misc_feature 1..194: note = bridgeRNA
ctccgtaagttgttaggcggcccgggagggccggatgtggctgatgtgtccttgtcttcagtggcttcacaggagtggccgtccggctctccggggcgccctggctgctgattgagatgtgcgcgccgtgtgcggtcgctgattacggagatgacagcggggtgttccttaggccgacggcatgccgtgcggaacgaggaggggcgagtgagcgagcggaagacccacgtctgggccggtatcgacgcgggcaaggcccatcactgggctgccgtggtcgacgagaccggtacgaccctgtggtcgaagaagattgacaacgacgagtcgacgatgctgaccacactcggcgagatcctggacctggcggacgaggtccactgggcggtggacatctcgggcacgtcctccgcgctgctgctggcgctgctcgcagcccacggccagcaggccgtctacgtgcccggccgtacggtcaaccgcatgtccggcgcctaccgcggcgaggcgaagacggatgcccgcgacgcctacgtcatcgccgaaaccgcccggcaccgacgggacttcgccgccatcgacgtacccgcgcagctggccgccgacctcgcgctgctgaccgcccaccgcaccgatctcgtggccgaccgggtgcggatgatcaaccggctccgcgacgtgctgaccggcgtcttccctgcgctggagcggtccttcgactacagcagccacaagggcgcgctgatcctgctgacgggctaccagactcccgccggcatccgccgctgcggccggacgcggctgacagcctggctggccaaccgcggcgtgcgcggcgccgacgcggtggccgcgaccgcgctggaggcggcccaggcccagcagaccgcgctgcccggcgaggacgtcgccgcgcagatcgtcgccgacctggccgtgcagatcctcgccctggacgaccggctcaagcgtgtagaccggcagatcagcgagacgttccgaagccaccctcaggccgagatcatcgagtccctgcccggaatgggcccgatactcggtgcggagttcgtcgtcgccgcgggcgacctgaccgcttacgcggacgccggccacctcgcctccgcggccgggctggtgcccgtcccgcgcgactccggccgtcgcaccggaaacctgcaccggcccaagcgttacagccgccgcctgcgccgggtcttctacatgtccgcgcagaccagcatgatgcgcgaggggcccaaccgggacttctacctcaaaaagcgcggcgaagggctcaagcacgtccaggccgtcatcgccctggcccgccgacgcgccagcgtcctgtgggcactcctgcgcgacaaccgggtcttcacctccgccccgccggtcacgcaaacggcttgactgcgtcattgaga

SEQ ID NO: 5700 - DNA, 1367 bp, unidentified
  source 1..1367: mol_type = unassigned DNA; note = element_8ba83ce
  misc_feature 1..3: note = core
  misc_feature 4..86: note = LE
  misc_feature 87..1109: note = CDS
  misc_feature 1110..1367: note = RE
  misc_feature 1135..1355: note = bridgeRNA
tgatgcggtggacggctcccacccgacggcatcgcgatgtgccaaagtgtggttactcatgaaccacagggaaataggagccgcccatgaacgaagttatcacaatcggtgtcgatcttgcgaagaacgtttttcaggtccacggcgttgacgatgaaggcattgtcgtgatccgccggcagttgcgccggtcccgggttttgccgttcttcgagaagcagccgccgtgcctggtcggcatggaggcctgcgccacggcgcatcactgggcgcggcaactgatcgggctcggccacgcggtcaagctgatgccgccggcgtatgtgaagccctatgtgaagcgcggcaagaacgacgcggcggacgcggcggccatctgcgaggcggtcactcgaccaaccatgcgcttcgtatccgtgaagagcgtggagcagcaaggcgtcttgatggtgcaccggacgcgggaactgctggtccgccagcgcaccatgctgatcaacgccatccgcgcccacatggccgagttcggcatcgtcgcgccggttggcgtgccgcaggtcaagaagctgctggcggtcatcgccgatgcggatgatgaccggttgccgcctgtcgcccgcacctgcctggaaagcctggctgcgcagtttttgtcgctcaacgacgagatccatgccgccgagaagcggatccatgcctggcaccgctcgaacgaggccagccggcggctggagaccatccccggcatcggaccgatcacggccagcgccctggcggcttcgatcaccgatcccggggtcttcaagaatggccgcgaactggcggcctggatcgggcttgtgccgcggcagacctcgaccggcggaaagcaacggctaggccggatatccaagcagggcaatcaatatctgcgctggctgctggttgccggggccatgtcggtgatcctgcatgcgaaacggcggggcacgaccaaccaggcctggcttgccgacatgatcgcccgcaagccgaccaaggtcgcggcggtggcgctggccaacaagatcgcccgtgtggcctgggtcgttctcatgcgcggcgagacctaccggccagcggctctataggcgtcgagacgacagacggaagttcaacagtttggcgggatgaaagtgatgtaatgcaaaatcggtcgaaccgggggtcgggaaaacccgtttgggtcagggcgcatcaagcgcgtgcttttgattgggacccgatccggcggatcgcattagggccagcggccatggaagccgcatcaacaggccggacacatgacagcacccgaccaatttgcatcaacgtcaaaaaacccttgccaacagggagccgtccacaca

SEQ ID NO: 5701 - DNA, 1544 bp, unidentified
  source 1..1544: mol_type = unassigned DNA; note = element_8babdf9
  misc_feature 1..2: note = core
  misc_feature 3..243: note = LE
  misc_feature 244..1416: note = CDS
  misc_feature 1417..1544: note = RE
  misc_feature 3..223: note = bridgeRNA
ctcgtattattaatttgtagtttttatagaccctcatcaaggtcttataatttctaacagacgctgtggattagtcttgttctcctaacgctttgacgtttttagacaggcaataaccacagctgtttgttttaacggtaattagttagataacgcatgacgtttcatatagcacgaggttacgtaagaacaaacgagtctgtggaccaaagcagtgtcaaatattcatttggaggttctgctatgttttacgcaggaattgatgtggcaatggataaacacgattgtgttgtcttggattctggcggtaatattgtctttgaagtctttacctttgagaacagccgagacggatttagaactcttaagaaggttctccaagcctgttccaagaatcccaagaagataaaagtaggactggaagctaccggtcactacagcgataatattctggctttcttgaacaattctggctacgaccccgtattgttcaatccgttacatactaatcttttcagaaaaggtctaagccttagaaagacgaaaacggatcacgtcgatgcgcataccattgcgactatgctgagaactgaagatctcaagtcctactcgcaacaatcttaccatcttgccgaattgaaatcactaactcgttatcgttcagcacttgtttcagactgtagccgtcacaagatctcactcgtcaggctttgtcagattctctttcctgaaattaaaaatcttgtcccgactctgcacatgtcctctgtatataccctgctttcagaatgtccttcagcagataagatagccaactgcaacctcactcatctcacatctttactctcttctgcatccaaaggacactatggtcgagataaagctattgagataagagatgctgccagaaaatctattggcataaagagtaccgtcaaggaactggagcttaagcagacaattgacctcatccaaatctatcttcagcagattgaaaccgttgatgaagaaatcaacaagcatatggatgagattgaaagcccaattacttccattcccggcattgccaatcgcatggccgccgtaatcctggcagaaacaaacaactttcaggactttgaacgcgcggaacaagtcctcgcattcgccggattggacccgtcggtataccagtcaggacaactgacttctacacattccaagatggtaaaacggggttctaaatatcttcgttatgctatcttcaatgcagccaaatacgtatgccattgggatccgacattcagaacttacctgcacaagaaacgggcagaaggaaagccttataacgttgccgtctcgcatgctgccaagaaactgacgagagttatgttccatctcgtaaaaacaaacaaggagttcatttcacaagcataaaccacatctgaatattattacttgtttttccaagcacctcgtgggggcttgattcgttatgcaattatcaaggttcgatgtaactagcgtttacgctacatttttcttattgacttttaatagttagt

SEQ ID NO: 5702 - DNA, 1436 bp, unidentified
  source 1..1436: mol_type = unassigned DNA; note = element_8bad61e
  misc_feature 1: note = core
  misc_feature 2..85: note = LE
  misc_feature 86..1129: note = CDS
  misc_feature 1130..1436: note = RE
  misc_feature 1196..1428: note = bridgeRNA
caatgggatggaccccacctcacctacggcatcgatgtgccagactgaaagtggttaacaacagtcacggtgagaggggtctgccatgaagattatcacgaagattattcgagttggtgtcgatattgcgaaggcggtgttccaggttcacgcggtggacaaggacggcaaaaccgtgtggaagcgcaaactacagcgagcaacgtggatcgacgaactgtgccaaaaaatcgaacccggttgcgagatcggcatggaggcgtgtggtggtgcgcaccactgggcgcgcgtgctacaagcacgaggatttgtcgtgacgctgatggcgccgcaattcgtcaagccgtacgtcaagagcaataaaaacgatgccaacgatgctgaagcgatttgcgaagcgatgtcacgaccgaacatgcgcttcgtcccggtgaagacggtcgaacagcaggatctgcaggcgctgcatcgcattcgtagcgaagtggtgtgcgcgcgcaccgccaaggccaaccagatccgcggcttggtggccgagtacggactagtcgcaccaaagcagatggcggaacttcgccaagcgataccactgtggctggaagatgcatcgaacggtttaacggctgacttccgtcggctgctgtccgaattgcagcaagacctgcaagggctggatgagcgcgtgaccgggctggatgtgcgaatcgagacgacggctgagtcgcacccactggcgaaacggttaatgcaattgcgtggtattggcccggtcaccgcgacagcgatgatcgccacgataggcgatggctcgcagttcaagaacggtcggcagatggctgcgtcgattggtttgacgccgaagcagcacagctcgggagggaaggacagactgctcggcattagcaagcggggcgactgttatttgcgcacgttgttgattcacggcgcgcgtgccgtactgcgttgttcgaagcagaagacggaccggctcagcctgtgggtgaacggtatagcgctacgtcggcatccgaatgtcgccgccacggcgctggccaacaaaaccgcacgtattgcctgggcaatgctgcacaacgccacggattaccaacctgactacgtggcgggctgacgcaggtggtaagcaacgaaaggcgtcagcaggaagggcttaacggagtgttagcgtaaggggcacatcaaccacgattgcgaagcaagccgaacgatggcaaacaggtcgaaccggcgccagcaaaaccagaccttctcgaagtgcaacaagcacgaccaaacgatatggaactggcgcgcgaatagcccatcaaggcccgacatcgaatttaaattcgatgcgcagtttgaggccggatatacgtgagcagtcgaacctacctgtcagtgaacggagtgcttgcaaacgaggtggggtccatata

SEQ ID NO: 5703 - DNA, 1178 bp, unidentified
  source 1..1178: mol_type = unassigned DNA; note = element_8bb1a01
  misc_feature 1..2: note = core
  misc_feature 3..212: note = LE
  misc_feature 213..1163: note = CDS
  misc_feature 1164..1178: note = RE
  misc_feature 19..189: note = bridgeRNA
cttgtatcttcatttagcacgtatgaacatagtcaaaaccaaacaggacgggatagaccgttgttgccttggtcgtgagaggccgtgcgtgagcatgggtcgtcccgtcctgcctccgcaaaagctcgaacagttgcctgggctaaccaagcccgcatcatttgcaaggccgagctatactggaggcatctagagaacaggaggatctgatcatggaagttgcccccatctttgttggcatcgacgtttctaaagcgcggctcgacatcgccctgcgcccgtctggtgccagagagtctatccccaacgaggaggcttcgattctggcgctggtcgagcggttgcgcgcgatccagctgactttgattgtgctggaggcaaccggaggcgtggaacgtcctgttgtccatgctctggctggcgctgagctcccggtcattgtcgttaaccctcgacaggtccgggacttcgccaaagccactggacagttggccaagaccgatagcatcgatgcagatatcctggcgcgctttgctgaggcggtgcgcccggcactgcgtcccttgcccgaccgggccaccgaggaactgcgggcactggttgcgcgccgacgccaactcaccgagatgattgtggcggaaagaaaccgactcagtggggctgctcgacctctgcgcaaacgtatcaaagctcacatccgttggttggaagccgagctggagggagtcgacagcgaacttgaccagagcattcgtcaaagcccgatctggcacgagcaagaggacttgctcaaaagcgtcccgggcatcggtcctgttgttagccgcaccttgctcgccgaactgcctgagttgggaagactcaaccgcaaacagattgctgcattggtcggcgtggcaccgctcaattgggacagcgggacacttagggggcgtcgcgcgatttggggtggtcgggcttgtgtgcgggcggcactctatatggctgcgttggttgctagccgacgcaatcccgcgatccgggagttctatagacgactgcgcgcagcaggcaaagcgcctaaggttgctttgactgcttgcatgcgcaagctgctggcaattcttaacgcgatgatcaaacatcgggttcgttggtctccagtgatggctaagactcattgactttcaagacagttg

SEQ ID NO: 5704 - DNA, 1393 bp, unidentified
  source 1..1393: mol_type = unassigned DNA; note = element_8bb6c5b
  misc_feature 1..2: note = core
  misc_feature 3..299: note = LE
  misc_feature 300..1106: note = CDS
  misc_feature 1107..1393: note = RE
  misc_feature 1159..1392: note = bridgeRNA
ataatgaaatggacccacccctccttgatcatcggcttcggtgagccaagatgagtttgtaacaacacatctaaaaaggggtgagtcacatgaagattagcgcaattggtcttgatatcgcaaagtctgtttttcatttctacgccgttaaccaagccggtaagcatgttcgcaagaaaatgttaaaacgcagccagctaatgccttattttgccaaaattgagccctgcttggtggcaatggaggcctgcggcagcgcccatcactgggctagagagttttaaaaactagggcatcaggtgaagctcatcgcgcctcaatatgtgaagccctacgtgaagggcaataaaaacgactataacgatgcggagggcatcgccgaggcggtcttacgccctaatatgcgctttgttccgattaaatcgttagagcagcatgatgtgcagatggtacataggctacgggagagactgacaaaaagccgtacagcactggcaaatcaaatacgtggcctgttggcagaatatggccttgtgattaacaaaggtctggcggctgtacgcagagaattgccgctgatattagaagatgccgacaatggcttaagcaccatgagcagggagtccttttttacgctgctcgatgagttacatgcgttagatgtccggcacgagcagtgtgagcaaaagatcaaaggaatcaaccggtccaatgacatatgtaggcgtcttaacgacattcagggcatcggccctgtgaccgcaaccgccgttttcgccgcagcggggaatggcaaagacttcagcaatggcaggcacttctccgcctggctcggactggtgccgaggcagcactcaagcggtggcaagaatacattgctgggcataagtaaacggggcaacgcctatttgaggacattatttattcacggtgccagagcggtgctgcgttgtgtggccaacaaaagtgatcgatttagccgctgggctagcgccttaatggagcgtcgcggccacaatcgagcttgtgtagcggttgccaacaagctagcaagaatcgcgtgggtcatcatggcaagaggcgaatcatacagtcccgcgatctagcctcgagacgtaatttaaggcccgtgataagcgggtcaccgagtaggtaaagcctacccagaagttgcttaggcactgagatttgatgttaaaacaggtcagaccggctcattaaaaacctgcttccgccataggcttactaagccgtaaggatgatgaggagaatgagcgcagatattcatcagggccagggagcgtaaaagccttccaccaacaggccgaatatatgggtgcaatgatttcgttttagatcggtcgcatgccttgcaaacggggtgggtccatat

SEQ ID NO: 5705 - DNA, 1612 bp, unidentified
  source 1..1612: mol_type = unassigned DNA; note = element_8bb7942
  misc_feature 1..3: note = core
  misc_feature 4..122: note = LE
  misc_feature 123..1394: note = CDS
  misc_feature 1395..1612: note = RE
agtaattatgtaataaagcatagcgcagtatgagcggtcattcaaaatctggagccgcatttaattaaattagtggcgataactgaaggtttcgcaattattaacaattaaaaaactgcactatgcttagtacaaatctgcaaaatccaatcgactttaatggtcaaaagttttatgtcggacttgatgtccacaaaaaatcatgggctgtaaccattcgtagcctgggtatcgagctcgctcgtttcacacagccgcccagcgccgatgccctgtcgggctatttacaaaagaatttcccgggagggcagtactattcagcctacgaagctggtttctgtggcaccagcactcacgaacagctttgcaagctgggaataaaaaatatcctggtacatgctgccgatataccatccacagataaacagaagaagaacaagacggacctgcatgacagccgttcgattgctgattatttggaaaaaggaagcctgcacagcattcatgtattaacacaggagcaacaggagttgcgaagtttgtttcgttttcgtgaggctaaagttatagaagtaaccagatctaataacaggctcaaaagctttctgatgtattatgacataaaaatacctgaaacggtttctaaaaaagagtatttgtcgctcaaagcattagcatggttaaactttgaaatgacaaccgcagctggtacaattgcattgcaggaactcattgaagaattgaaatatcaacgtaaacgactctttgaaataacgaaacaactgcgtaaacaaatacaggttcttcatgcagattcatataaatgcttgctttcagttcctggtatcggagcggttacagccatgggactgattgcagagatcgccgacttcggccgctttgatgatcctgatgagtattgcagctttcttggtttatgtccatgggaagacagttcgggggagactattaaaactaaagggatgcagccacggtgtaaccagcatttgcgtccgatacttattgaagcttcgtggacgacaatcaaaaagtcgcgaacattatttgcttattacagcaaacatgctggtaaagacagcaaaaaggccattgttaaagttgcccgcaagctggccctgattgcacgcggagttgttttgaagcaacagctctatcaggaaaactatctgcaacaaaagaaagcagaacaaagtcttcaaaaggaaacctccaaaagaaggttttcttcaggcattacggaacagcatattaacaagcatgctttatccggctgtaatatccctggcaggttgctcctcagcagagcctgcttccgtttcttacagcatcataaagataaaaataatgttaaacagttcaatatgaacagataaatatctcaaaagcttaaagaggaaaacgcacctctctgactgtggatcaccacatttcgaagtattcgtacctcttttgacttcacacaattactggcggctcctgatttagggatgaccgcatatagcagtcggagattattttgttatactgaactaaaaatataactttatgtgattaaaaaatctcatacctgtcctattgctttatacatagc

SEQ ID NO: 5706 - DNA, 1429 bp, unidentified
  source 1..1429: mol_type = unassigned DNA; note = element_8bbe91d
  misc_feature 1..2: note = core
  misc_feature 3..34: note = LE
  misc_feature 35..1150: note = CDS
  misc_feature 1151..1429: note = RE
  misc_feature 1173..1417: note = bridgeRNA
tgatgggttggacggcccccggagcggcatcatcgtgccaagatggtcgctgtggaaacgccatcgaaagggagccgtccgtgagcaagtctaccaccgatttttcatccgtcatccgcgtagggctcgatctggcaaagcatgtgtttcaggttcacgagacgccgccggcgcggtcgtcatcgcaaaggccgtgcgccgcggaaagctgctggagtttttcacggccctccctcgttgcgtcgtggcgatggaggcctgttcgaccgcgcatcactggggacgcgcgttgagcgcgctcggcttcaacgtgcggctcattccgccggcgcatgtgaagccatacgttcggcgcaacaagaacgacgccgccgatgcggcggcgatctgcgaggcggccgggcgaccgggacaacgcttcgttggcgtgcgttccatcgacaatcaggcgcagttgatgcgccatcgcacgcgcgaaatgctcgtcggtcagcgcactcaactgttcaacgccttgcgcgggcatctggcggagatcggcgtcatcgcgcctcaaggaccgcaacacgcttacgggctcaaagaactgcttacggacggcgccgacgaaaacggcgagatcgtggttccggagggcgtgcgggccgcgctggttccgcttggccatctgatcgacgaactcgacgcgcggatcgcggcaatcgacaaggagcttaagaagcaggccaaggccgacgcgacggctcggcgcttgatgagcataccgggggtcggtcccatcattgcttcggcggtcctggcgagcgtgcaggagatcggcgcattcggctcagcccgtgaatttgcggcttttctcggcttgacgccgcgtcagaattccagcggcggcaaggagcggcttggacgcatcacaaaaatgggcgatcgctatttgcgcaaattgctcgtctctggcgcttgttcggttctcttccgccgcaagggacataacgacgccttacgccactgggccgatcagctgctgacgcgcaaatcaggcgcgacgaagttcaagctggtcgccgtggcgctcgccaacaaactagcgcgcatcatcttcgccgttttgacacgcggcggtaaatacgaaccatgggcggttgcagcctgagcggcgcaaagctcggcaaggaattcagggatatatcgtcgcaaggcgatacagagatcgagggcgactacgaggtgatgtgaacaacggaatggctcgaaagcccgccaggggtcggcgtcactacgaacgcgtcgcgatgcaggggcaaagagccgagcggatcaaccatcagggccagcggcgttctcgcccgcgcaaacaggccgtagacatgaccgcgcccgagatgttcgcagagccgaaaagcgacccttgacaaagggggccgtccagaca

SEQ ID NO: 5707 - DNA, 1468 bp, unidentified
  source 1..1468: mol_type = unassigned DNA; note = element_8bc08de
  misc_feature 1..3: note = core
  misc_feature 4..121: note = LE
  misc_feature 122..1159: note = CDS
  misc_feature 1160..1468: note = RE
  misc_feature 1220..1421: note = bridgeRNA
agatggggtattcggccggcctgcgtgccctttggtgagagtggaggcgctgcgcttcaggttgatgataaacgtggtctgggttgggggcagccacaagcatcagttggagaagcgcagcatgaaacattatgcaggtttggatgtctcggtcaaagagacttcggtatgcatcatggatgaagccgggactgtctgccgcgaggtgaaagttccaagccatccgcaggatcttgttcgggtgctcaaggatcctgcctggcggatcgagcgcattgggcttgaagcaggtcccctgtcacaatggctgttcagtgggctagcggacgcgggcttgccagccatctgcatcgagacccggcacacgaaggcagtcctcaaggcccaggtaaacaagagcgatcggaatgatgcgcgcggcatcgcccaaatgatgcgcgtcaaccttttccggcccgtgcatgtgaagacgctggcgagccagaaacggcgtgctttgttgacggcgcgcaagctgctgcaagagaaagccatcgccatcgagaacgacatccgcggtctgctgcgcaacttcgggctcaaggttggagccgccggcgtgatcaaattcgaggaacgggtccgagaacttgtcgaaggcatgccggatcttgccgagatcatggcgtctcttctcgacgctcggcaaaagctccgcgagcaggtcagaaaactgcatcgcaagctgttgtcgattgtccgtgaagacaaggtgtgccggcggctgatgactgtcccgggtgtcggcccggtcgtgtcattggctttcactgcggccatcgacgacccggcacggttcaaaagctccaaggcagtcagaccggccctgggattaacgccggtactcaatcaatcggatgaaagctgccgtgttggccggatttcgcaatgtggcgacggcatgatgcggacgcttctctatgaagcggcgcaagtcatgctgacccgcaccatcaaatggtcctggctgaaagcctgggcgatgaatgtggccaaacgccgtggccggcaaaaggccattgtcgccctggcacgccggctcgccgtgatcatgcaccgcatttggtgcgatggaacggagtttcattggacaagggagaacgcgccggcgctcccctgatcaattgcttcgctggaacaccgcgcgccagaacgctgaatgccagaacaggagaatatccgagcttcgccatccggcggatagatgtccctcgcgggacgagggatgaggtgagttcgcgtagggctcttgtgccggtcgctgcacgcgatcagaacgcgcaccagattgggccacctcatcttcctgaccccataatgggagagccgaagagccgatcccgaagagaagagaggatccgcgagtgacagcaaacatcgcaatcgcagatagcctgaaagcgcttgacttcgatcggccaaatagaga

SEQ ID NO: 5708 - DNA, 1152 bp, unidentified
  source 1..1152: mol_type = unassigned DNA; note = element_8bc8791
  misc_feature 1..2: note = core
  misc_feature 3..171: note = LE
  misc_feature 172..1137: note = CDS
  misc_feature 1138..1152: note = RE
  misc_feature 14..195: note = bridgeRNA
cttgtatctttacgatttgatttcggaccggttcatgcagcccgatctacctctgggaccaagagcccgcccctgagccttgggcgcatgagctggaccgtctttctaaagcccgaacggttgtcggaaaccggttcgtggaatcgaagttcgcatagacaaggatgggacatgaaggacgtttctgaagccatattcattggcattgatgtatccaaagacacgcttgaggtggccagcagcgagcaggcctgcacctggcaggtagttaacgagaccgccggcatcgaggcgctgggggcgcaattgctggacctgcgccccgcccttgttgttctggaggccacgggcggctatgagttcgaggcggcctgcgcgctgcaatcgagcggattggacgtggccgtagtcaaccctcgccaggcgcgcgactttgctcgcgccatggggaccctggcaaagaccgacagcctcgatgccaggatgctggcggccttcgctcgcgtgctgcaccagcaccccgagcgcagccgcttcatcaagcccttggccgatgaagccctgcagcgcctgcaggcgctggtgcttcgcaggcgccagcttgtgggtatgctcaccagcgagcgccagcgcttgcgcatgtcccatgtgggcgcgcgtcccagcatcgagcgcaccatcgaattcctcaaagcacagatccaggagttggagacggactcgggcgagcacatcaaggcacatcacgcggcgctcgcgcaggccctgtccagcgtcaagggcgtgggcaagaccactgtgtccaccctgttggccgagctaccggagctcggccagctctgccgccggcgcatcgcagcgctcgttggtgttgccccgaggaaccgcgactcgggccagatgcgcgggcagcgctcgatctggggcggccgcgccgatgtgcgcaatgttctgtacatggccgcgctggtcgcgtcgcgaaccaatcccgtcttcaaggccttctatgagcgcctgctagcggccggaaagctcaagaaggtcgccctggtcgcagtcatgcgcaaactcctcaccaccctcaatgccatcgccaaatccggcaaccattggaaggattcgcttcatgcagcttgacttttaagacggttg

SEQ ID NO: 5709 - DNA, 1357 bp, unidentified
  source 1..1357: mol_type = unassigned DNA; note = element_8bddddb
  misc_feature 1: note = core
  misc_feature 2..73: note = LE
  misc_feature 74..1105: note = CDS
  misc_feature 1106..1357: note = RE
  misc_feature 1107..1347: note = bridgeRNA
tataggatggcccgccccttttccccggcagcgggtatgatgccggtgcttgagaagggaaaggaacggaccgatgtctattgtgatccttggcgttgatctgggcaagaacgcttgcagcatcgtcggtgtggatgcgaccggggcggttgtcctgcgccggtcgatgcgccgacaaacattgatcgattacgtctcgaagctaccagcatgcattgtagcgatggaggcgtgttgcggcgctcatcatatgggccgtctcttcgccggtcatgggcacgagatccggctgatgtcaccggaatacgttcgcccttacgtgaaagcgcagaaaaatgacgaccgggatgccgaaggcatcgctgaggcagcatcacgcccgacgatgcgcttcgtagaactcaaaagccaggatcagttagatatccagacccttcaccgcgtccggtcccgtttggtggctgagcgcaggagcctgatcaaccagttgcgcgccatcatgctggagcgcggcacgatttttccggttggtcgccgcaagctggaactcggtgttgatgctttgctccttcagggggaggcagggttgtcccctcgaattcgccggctcatcggcgatcttcgtacagaatggcgacacctcgacgagaaaatcgagagcctgaacgccgagtttgttgaacttgcccgcaatgatgccgccgcccggcgtctgacatccatccccggaatcggggtgctcaacgccaccgcgctgatcgcagcggtcggcaatgccggtagcttcgccaaggcccgagatctgggggcatggcttggtcttgtcccacgccagcataccaccggaggcaaaccacgactgctgggcatctcgaaacgcggcaacacctacttgcgaaccctgctgatccatggtgccagggccagcctgccctcgatctctcgaagtgacacaccgctcgggcgatggctcaaagcgatgctggaacgaggtgttcaccgcaatgctgccgtggtcgccctggccaataagctggcgcggatcgcctgggccgctttgcgcaagggcgcaaccttcgaacgcagctaccccgtcgccgtttgaaccgatcggcctgatgctcatctgggcataggccaacgttgtttgcaggaaggattggaaagatggcctgacagtcgaccagcatctggaaagcccggtcaaaaaaatggcacttgctgccgacgtctttattgcggctccagatgcgcggatctccatcttggccacgggcttgctcgtgagaccgtatacgttgacgcagactgatcagatcacctcaaaatcatgcttgcaaacggggcgggccatacg

SEQ ID NO: 5710 - DNA, 1509 bp, unidentified
  source 1..1509: mol_type = unassigned DNA; note = element_8bea280
  misc_feature 1..2: note = core
  misc_feature 3..250: note = LE
  misc_feature 251..1489: note = CDS
  misc_feature 1490..1509: note = RE
  misc_feature 6..231: note = bridgeRNA
ctaatggcttctatcgagcctgtttgacaggctcgattccggtagcgactagcaggtcagcactcttcggatctgacgcttgaggtctttcggcagaccgtgcgcctgctggtcgtgaggaggcgtaaaccgctgctgggatgttgtgccccgagaggtctgcggtgagcacttgaccattagatcgctggctgtctcctccacgctgccgaggtatctgcaaggtgcagacaccgggacgggagagccgatgctgttcgtgggagatgactgggcagagggccatcacgacatcgagatcgtcgatgacggggggaaggtgctggtccggcggcggttgcccgagggcctcgagggaatcacccggctgcatgcgttggtcgcggcgcagctgcctgatgactgggtcgatcgcgatcctgaggaggccgctggtttggtgaaggtcgggatcgagaccgaccgcggctcgtgggtcgggtccttggtcgcagcgggctatgaggtgttcgcggtcaacccgctctcggtggcccgctaccgcgagcggcactccacctcgggagccaaatcggatgctgctgacgcgcacctgttggctgagatggtccgtctggaccgggcccaccaccggccggtcgcagaagacaccgacctgggtgaggcgatcaagctgaccgcgcgcacccaccagtcgctgatctgggatcgcagccgtcatgtcgcccggctgcgctcgacgttgcgagagtactttcccgcggccctgttggcctttgaggacctggacgcacccgatgcactcgagctgctgggcagggcaccagagcccgaccaggccgcccggctcagcaagaccgcgatcggggctgctctcaaacgtgcccgccggcgtcgcgtcgaggaccgggcccggcggttgcagaacatcctgcgcgcacccgagctcaggcaaccgccggcgctacagagcgcctatgccgcggtggtggccagcgaggtcgcgatcatcaccgcactcaacgtgcaggtcgaccggctcggggcggtggtgggcgaacattttggccggcaccgggacgctgagatctacctcagcctgcccggcctcggagtgatcctcggcgcccggatcctgggcgagttcggcgacgacccggaccgctacgccgacgcgaaatcacgcaagaactacgccggcacctcaccagtcaccaaagcttctggcaccaagaaagttgtgctggcccgctacgcacgcaaccgcaggctcggcgacgccctccagcaatgggccttctgctcactgcgcggatcccccggagcaaaggcctactaccagcgactccgcgaccgcaagatcggccacgaggccgcgctacgacagctcgcgaaccgcttcgtcggcatcctgcacggctgcctgaagacccacaccacctacaacgaacacaccgcctgggcacacgactccacgaccgccgcttgactttctaaaacctgggatgt

SEQ ID NO: 5711 - DNA, 1548 bp, unidentified
  source 1..1548: mol_type = unassigned DNA; note = element_8beb0c8
  misc_feature 1..2: note = core
  misc_feature 3..346: note = LE
  misc_feature 347..1525: note = CDS
  misc_feature 1526..1548: note = RE
  misc_feature 98..322: note = bridgeRNA
ctactataataaagtcgtatctacgccaaccttcggtagagacaaaaacgatttggaaggggaaggagcgtagcgactgagccctccaaatcgcgcggcatttgccgcctccattgggtatcgaaatccgctttggattttgatataatattctcgtgcggacagaggatcacgttgtcctccatgtggttgctgtccacttttttaagagtgtgacctctgtccctgcgggatttcacttatgagccggatgtcgcagcatttctgctgtcttcgcatgtccaagtaggttttgacccgcttcgttcagaggactgtccgcaacttgatttttcgaggtgtttctatgctgttcgtcggtattgacattgccaagcgtaaccacgaagcgtccgtcatcgctcaggatgggcgtgttgttcgcaaagccatgcgctttgccaattcccaagcgggttacaacaaattcatggatatggtgggaggtctcagcgaacccgtcgtgttcggcatggaagcgacggggcactactggctgacgctctatgcccatctgcgcaatgacggcttcacggtgcatgtcatcaaccccattcagtctgatgcgctgcgcggcatgtacatccgcaaaacaaagacggattctgttgacagcgttatcatcgctgacgtcatccgcttcggcagatattgcgaaacctccgtagaacccggtgatcttcatgctatgcgtgaactgtgccgccagagattctatgtcattgacatggcctccgatctcaagcgcaaggtcattgccttgcttgaccaagtctttcctgaatacgagaagctcttttcggatacctttggggtatcctccatggagcttctgtcccagtatacaacgccggaagaaatgctgtctgtttcctcgcagcagcttgccgaggttctggaaaaggcaagtcgcggcaggctgggggcggaaaaagccgctgaaattcaggacgcagcccgaaattctttcggcattgtgctggcttccagcagtttctcgctcatcattcgccagtacatcgaacagattcgctctctggaagcgtctgtcgatgttttcgatgccgaaattgcccgcttgctgtccggttttgacacgcagcttacaaccattactggcattggaccaacccttgctgctgtcatcctctctgaaatcggcggggacatcaggcgtttctcttcacctgccaaactcgctgcttatgcaggtgtcgatccgactgtaaagcaatccggcgacttctccggcaccagaatgaagatgtccaagcgtggttcgccctacttgcgccgagccatctggctcgcttctacagttgccgccttcaaagaccccgcaattcatgcgctttatgagcgcaaacgcgctgagggcaaagaccacatgactgtaatcggtcatatctgccgcaaaatgatctccatcatcttcgctgttctccgtgacaacactccttatctcccggcggttattccggattaaccccttgacttttcatagccggt

SEQ ID NO: 5712 - DNA, 1447 bp, unidentified
  source 1..1447: mol_type = unassigned DNA; note = element_8bf2598
  misc_feature 1..2: note = core
  misc_feature 3..147: note = LE
  misc_feature 148..1197: note = CDS
  misc_feature 1198..1447: note = RE
  misc_feature 1210..1445: note = bridgeRNA
agatgagatggacgccgcccgctcttcgccttgatccagggatccagagtggttgaagcaggcgaggtggaacccctggagcccgaacggcatcgatgtgccagattggggttgcgtcacaaccacacacgggacaggggaaccacgatgaacgacgttacgacgtatgggctggatttggcaaagcgcgtttttcaagtgcattgggtcgatgtgcagagcggtgaggtgcaccgcaagacattgccgcgaacgcaggtgagtgtgttctttgcccgcgcaccgcgtggcgtggtcgcgatggaagcgtgtggctcagcgcaccattggggtcgactgttgcagacgatgggacatgcggtgaagttgatcgcggcgcagttcgtacggccgttcgtgaagaccaacaagaccgatgcggcggatgcacaggcgatctgggaagcggcacagcggcctgagatgcgcttcgtggcgctgaagagcgagcaacagcaagcggtgttgtcactacatcgactgcgcgcacagtgggtgaaggtccgcacgctgcaggccaaccagatccgagggttgctgtacgagttcggggtggtggtgccattgggttggcgagccttgctcaacgttgccaccgaacagctgacggatccgactgaaggatccgtgccggtgctattgcgcgacgaactgctcaagcagttgcaggcactacgcgatgcgactgcgcgcatcgtcgcactcgagaagcagctcgccagctggcaacgcaccgcggcggagtgtcaacgcatcatggccattcccggcgtcggtctgctcactgccaccgcggtcgtcgccagcgtggcggatgcgcaacagttccgctcggcgcgccagttcgccgcctatctcggcttggtaccgcgccagtcggggaccggcgggcgggtcaagttgttgggtatcagcaaacgcggtgacacttacttgcgcacgctgctcatacatggcgcccgctcagtattgttgagtcagagtcggcacggtcgatcagtcgatccatggctcggtgcgttgttgcagcgccgaccgagcaatgtcgtggtcgtggccttggccaacaagatggcacggacgatctgggcgttgttggcccagcgccgaacgttcgatgcgaactggcatcggggtgcgattcacggcgtggcgtaaagaattaaggcgtaggactgcaccaacagtgttgagcggtgacgatctcgtgatgggtagaacggtcggaccgtggggaagcaaacctgcctggtcgcacggacttcgagtccacgatggagatgaggacttccttcgcgaacattcatcagggcccagcgttcagacgctgcacaggccggatataagactgcttccgcctctctactcgatcgacctcgtcacttgccaaccgggcggcgtccatata

SEQ ID NO: 5713 - DNA, 1496 bp, unidentified
  source 1..1496: mol_type = unassigned DNA; note = element_8bf32e3
  misc_feature 1..4: note = core
  misc_feature 5..241: note = LE
  misc_feature 242..1480: note = CDS
  misc_feature 1481..1496: note = RE
  misc_feature 31..202: note = bridgeRNA
gtcactagggcaccatccttgctgcgggcaccgatatggtgcttgctgttcggactcggcggcagccggggtgacggtctaggtcggtcgctcgttgagagcctccatgacaccaccgcccccggttgtcctgaggccgcggactggcaacagggagatgcgccgtagagcgccggttagtgaccgcccaggtgccggcctcgtcgccgctgggtcgtcgctgccaccgcaaggagtcgtgttgtctgttgcgttgcctcccgcgcagttgttcgccgggctggactgggccgccgaggtccatgccgtgtgcgtgatggaccctgccggaacgatcgtcgcccggttcaccatcgcccacaccgccgacgggatcgccatgctgatccgccgcctggccaagctcgcggagcccggtgacgtgcaggtcgggatcgaacggcccaacggccgcctggtcgatctgctgctccaggccgggcacccggtcgtgcccgtctcgccgaacgccatcaagtcctggcgcgacggcgaggtcctgtccggggcgaagtccgacgccggtgacgccgccgtgatcgccgagtacctcaggttgcggcagcaccggctgcgcgtcgccacgccgtactccgacgacacccgcgcactgcggaccgtcgtgcggacccgcaccgaccttgtcgacatgcgcgtcgcggccaccaaccagctcgccgcgctgctggacgaccactggcccggcgccaaggccgtgttcgccgacgtcgagtcgcccatcagcctggagttcctgacccgctaccccacccccaacagcgccaagcacctcggcgagaagcgcatgcaggcgttcctgaccaagcacggctactccggccgccgcccggccacccaactgctggaacgcctgcggtcggcccccgccggcaccagcagcgacgcgttgaccgaggcactgcacgacaccgttctcgccctggccgacgtcctgaaagcactcaacacggccgtgaagaacctcgaccggtcggccaccgcccacctcggggagcatccggacggcgagatcttcacgtcgctgccaaggtcgggtcagatcaacgccgcccagatactcgccgagtggggcgactgccgccaagcctacgagacccccgactccgtcgccgcactcgccggctgcaccccggtcaccaaagagtccggaaaacaccgcgccgtgcacttccgctgggcctgcaacaaacgcttccgcgtcgcgttgaccaccttcgccgacaacagccgccacgccagcccctgggccgcccacatctacaaccaggcccgcgcatccggcaaagaccacccccacgccgtccgcgtcctcgcccgagcctggatccgcatcatctggcgctgctggcacgatggcgtcccctacgaccccgccaaacacggtgccgcagcggcgctcatcaaccccgttgcagcctgaggttgacacagggagt

SEQ ID NO: 5714 - DNA, 1565 bp, unidentified
  source 1..1565: mol_type = unassigned DNA; note = element_8bf637d
  misc_feature 1..2: note = core
  misc_feature 3..249: note = LE
  misc_feature 250..1419: note = CDS
  misc_feature 1420..1565: note = RE
  misc_feature 3..216: note = bridgeRNA
ctcgtattatataggcatacccattctttacctattctaggttatagggtatgctgttgaagatgctgtggattgattcaacctccctaccgcacagacggtttcaaataggctccaaccacagcctctttgctacaatgttaatcagttagataccgcatgacggtttatttggaacgaggttacatcggcagagagccctgtgagtctaccagcagcatcaaaatactttgaaggaggatcacctgcatgatctatgttggtattgatgtcgctaaggataaacacgattgctgtatccttggctcagatgccgaaaaactttatccagtgttctcaatctcaaacaacagggcaggctttaacgaactctatgagaaaatccattccgtagaaactgatatagaccaaataaaagtaggtcttgaggctaccggtcattactctctcaatcttctgggttcgctcattgataaaggtctgaccacctgtgttatcaatccgttacacactaatctttacagaaaaggtctaagccttagaaagacgaaaacggataaagtcgatgccagttcgattgctatgatgctcataaccgataagactctcaagccctactcggatacatcataccacaacgaggaactaaagtcactaactcgttatcgtttcatcaaagttcaggagcgcacaaaactgaaagtctccatcgctcgccttgtgaacatcctgttccctgaactggagaaacttgttccagatatccacatggcctccgtatatgccctgctctctgaattccctggtgcctccctcatcgcaggatgccacctgacacgactcaaaaatctgcttgaaacagcctccagaggacgctacgggcgtaacaaggctattgaaatcagaaccgcagctcaagcctctatcggctccgttatgcccgtaaagtcgctggagctaaaacacaccatccacctgatccatgtgttgactgaggagatcgaggaggtcgaggctgccatcaaaaagattgtggacaacagcgcctcccctatcatgacgatccccggtatcagttatcatatgggggcaatgatccttgccgaggtgggggatttctcccgtttcgagaatgcggatcagatacttgccttcgctggtttatcgccatccacttatcaatccggtcaactggagtcaagctatgcacatatggagaaacgcagctcccactatcttcgttatgctctgttcaatgccaccaagtttgtctgcaaatgggatgagacctttggcgcttaccttgccaagaagattcgagaaggcaaacactacaatgttgccgtttctcatgcagccaagaaactggtccggacaatctacagaatggaattaactggcgagacatacagaagatagtccagaaccactcctttgccttttctgcgagcacctgttcagatgctctggttgtcatgcgattttcaaggtactgatttataaaaaatgtatttctacactttttccaaaaacttcattttaggtattgacttttaatagttagt

SEQ ID NO: 5715 - DNA, 1504 bp, unidentified
  source 1..1504: mol_type = unassigned DNA; note = element_8c06e53
  misc_feature 1..2: note = core
  misc_feature 3..245: note = LE
  misc_feature 246..1484: note = CDS
  misc_feature 1485..1504: note = RE
ctaatggcttgtgccggggctgtttggcaggctcggttctggtagcggctggcgggtcagcactctagggcgctgatcctcggtgaggtcttgcaacagaccgtgcgcccgctggtcgtgaggagatgtaaccgctgctgggatgtcgtgccccgggcttgttccggtgagcacttgaccattaggacgcgggctgtctcctccgcgctgctggtttgtccgaacgagcacgcgggaggttatcgatgttgttcgtcggtgacgactgggccgaggatcatcacgatgtggagatcgtgaacgagcagggtcgccagttggcccggagacggttaccggaaggtctggacgggatcactcgccttcatgcgttgatcgcgcagttcttccccgaggagtgggccgacctcgaacctgcagaagcagcgtcgcgggtcaaggtcgggatcgagaccgaacgcggtccgtgggtgcaggcgttgatcgctgccggctatgaagtgttcgcgatcaacccgatgtcggtggctcgttaccgggagcggcactccacctccggtgcgaagtctgattccggggatgcgcacgtgttggccgagatcgtgcgcctggatcgcgcgcatcaccgcccggtggctggggattccgagctgggtgaggcaatcaagctggtggcccgtagccaccagagcctggtctgggaccggacccgtcacgtgctgcggctacgcggggtgttgagggaattcttccccgcagcgctggaggctttcgctgatctggacgctgccgacaccctcgagctgctcgcgatcgcacccgatccggatcgggccgcgcgggtgtccaaggcgaagatcactgcggcgttgcggcgcgccaaccgccgcagcgtcgaggagaaagccgcgcacatccagtcggtgctacgggcgccggcgctgcgccaacccgcccaggtccaagcggcgttcgcggcgatcaccgccagccaggtccggctcatcaccaccctcaacggtgagatcgcccagctgggcgaggtggtggcccaccattttggccgtcacccggacgctgagatctacgccagccaaccaggcctcggcgtgatcctcagcgcccgggtcctcgccgagttcggagatgaccggacccgcttcgccgatgccaaagcacgcaagaactacgccggtacctcaccgatcacccgggcctcggggaccaggaaagtggtgctggcccgctacgcccgcaacacccgcctcggcgacgccgcacagcaatgggccttcggcgcgttgaaaggctcacccggcgcccgcgcctattacgacgcgcttcgagcccgcaagatcggtcaccaagcagcgctacgccaactcgcgaaccggctcgtcggcatcctgcacggctgcctaaagaccggcacgctctacgacgaaaacaccgcgtgggcccaccaccacacggccgcagcttgacaaactaaaacctgggatgt

SEQ ID NO: 5716 - DNA, 1449 bp, unidentified
  source 1..1449: mol_type = unassigned DNA; note = element_8c0d502
  misc_feature 1..2: note = core
  misc_feature 3..225: note = LE
  misc_feature 226..1434: note = CDS
  misc_feature 1435..1449: note = RE
  misc_feature 11..199: note = bridgeRNA
cttgtagaatgaagccaaagggagtaataaaagaaatgtaaggtttggggtggggaacctcgactgcagccttgggtccggagcccgtgcaacagacagaggtccccgcttccgtaactgagtacgattaagtaggtttggccaagagccagtctaacccacaaggatgtgtgttacggaagccagggaacccgcccttattctctccttgggaggtgctatcccgtgagcagtgttttcgtaggtatcgacataggcaagaaaaaacaccagtccgctctgatgggagaaaagggcgagactctggcaagaaccctttcctttactaactccctcgctggctttcaatccctccttaaacagctggacccttggtcaaaagaggatatcctcataggccttgaggccacaggccactactggctggatctttacaccaggcttgtagatacaggttactccgtagtggtcatcaatccccttcagaccgacggtatccggaacatgtacgtcagaaaaaccaagaatgaccgttgcgatgccgttatcatagccgatgtcctgcgcttcggaagattccgcaaatcctccgttcccgaggaggatatcgcccagatgaaggccctctccaggctgaggaccggcatggtccagtccatgagcaacgtcaaaaggcagatcgtagccattcttgaccggctctttcccgaattcgaggcctgcttcaacgacatcttcagcaagtcctccatggcggtcctggacgagttcgcagatccggaagaactggcccgctgccccctggaggaacttgcggacctgctgttcgagaaaagcaacggcaggctgggcgcagccaaggctgaacatctcaaagagaccgcatccagatccttcggaaccggttacgccaagaggtccatgaaattcgagctcaaactgctcctcgaacaggtacgcttcacccaggagcagatcctcgagatcgaggttaaactgaaggagctcatgaaggaccaccagctcattacaaccattccaggcataagcgatatcctgggttccgccatcctgggggagataggggacatctccaggttcgaaaaccccaagcagctggtcgccttcgcagggctggacccttcggtgcaccagagcggtaatttcagtgccaccagcatgcacctgtccaaaaggggctctccacacttgagaagagctctctatatcgccgctcacgtcgcaaggatccacgacccggttctcaaggaacactacgaaaaactcatcaatcggggcaagcaccaccgccaggcgcagaacgccgtggctgcaaagcttgcaagaatagtattctcggtactttattccagggagccatatgacattgaaaagctaagatcaaaacctaaattagaagaaatgtcagcttgacatcacttagtaggt

SEQ ID NO: 5717 - DNA, 1579 bp, unidentified
  source 1..1579: mol_type = unassigned DNA; note = element_8c179b7
  misc_feature 1..2: note = core
  misc_feature 3..289: note = LE
  misc_feature 290..1468: note = CDS
  misc_feature 1469..1579: note = RE
  misc_feature 10..268: note = bridgeRNA
gtataatgtatttaggttgttcaagggatacctataaacccttagaccagcttctttacatctccagtgtaataggagataattgttttattagattgagaggatgatcgttttctccttgagcggttctgctcgtacttgaaagactgatccctctctctaataagcattccacgtatgagttggatgttggttgccccatggcttctctccgtatttcgcacaaggcagtggcgcttattagacgagttctctcccaatctgaaatctttctgttgaggtgacctttatgctgtttgttggtattgatattggtaaaaataatcatgttgcttctatgatggatgaatacggaaaagttgtttttaaagcattctctttctctaatactactgatggcggaaatgctcttttttctaaactttcctcctattcttctaatccttccgattttgagattggcatggaggctacaggccattattggctctctgtttattctttcctctttgagaaaggattccttctccatgttattaatccgatccaaaccgatggctggcgcaaaggtacagaaatccgtaagcggaaaaacgataccattgattctgttctgattgctgacctcatccgctatggacagttcgtacaaacacgtcttgcagatgaagatttattttccctgcgcactctgacacgtttccgcacttatctagtagaatccatcagtgatctaaaacgaaaggttgtctgtgtactagaccagatctttcctgagtaccagtccattttttccgacatttttggtaaaacttcaaaagaaatactccttcaattttcttcgccaatcgactttgaaactatttcatccgaatctctggcagagctgcttgctcaactcagcaggcagaaaattggcgccgcaaaagccgaacagttgaaggctgccgcttcttcttcctttggaattacctttgccaaaaacagctttacctttcaactgaaagcactgattgaacaaatttcttttattgaaaaccaggtgaaggaaacggaatcagaaatctctaatatcatgagaaaattggattctcctattactacgattaccggtatcggaaacgtcacaggagctgctattatcagtgaaattggggatatctcaaaatttgataatcccagaaaactggtcgcttttgccggactggacgccaccgttacacaatcaggggaatttgaagccagtcacaatgttatgagcaaacgcggctcaccctatcttcggaaggctatttttcaggcagccctgattgcttctttccatgatcctgtgttaagtgtgtattatcagaaaaagaaagccgaaggaaaacatcacctgacctgtgtaggagctgttgccagaaaaatgtgcaacattatttacgctgtcctaaaaaacaatcagccttatgttcctaaagcttaactccttatacccagattttggcttgcatgatagctggcctttttgtcatgctcttttttccagaaaatttctttttattttttctattacctgcttgactttttatagttg

SEQ ID NO: 5718 - DNA, 1440 bp, unidentified
  source 1..1440: mol_type = unassigned DNA; note = element_8c1b173
  misc_feature 1: note = core
  misc_feature 2..227: note = LE
  misc_feature 228..1427: note = CDS
  misc_feature 1428..1440: note = RE
  misc_feature 14..242: note = bridgeRNA
ctacttgtttcattgacgttaggaccggtgcctgcgcaggctctggtttaggtgcccgggttcgtcgctctcatccgcggctgcccacgatgatcgtgtggctctcacatggactgcgccgcccgggcaccgccgggcaggagaggctcaagaagggattgctctgctcgaagtagcggtgccctccacgcccaaccatctacaggtttgaggcaacggaggacgcggtgaacgaagacatctcgcgggtcgtgatcggcatggacccgcacaagcgcacggtgacgatcgaggtcatgaccgccgacgagacggtgctcgacggtggccggttcgacaccaccgtcgagggctaccgggcgatgctggccttcgtgtcggcgtggccggtccgggtctgggcgatcgagggttgtgagggtatcgggcggcacatcgcgcacaggctcctcgcggacgggcaggagatcgtcgacgtgccggcgaagctgtccgcgcgggcccgggtgttcgcgaccgggcagggccgcaagaccgatgcgaccgacgcgcactcggtcgccctggtcggcacgcggatggcggggctgcgcccggtcgtgtccgatgcccagctcgaggtgttgcagctgctcgtcgaccggcgccgctcgatcggtgaagaacacacccgcaaggtcagccagctacaccgaatcctgttggaaatgctgcctggtggcgcgaagaagcacctctcggccgcccaggccagggcgctgctgacaggcatacgaccgcgcgatgacgtcggcaagacccggaagcgggtcgcgatggagctggtcgtcgacctcgagcggatctacgcccggaagaaggccgccgacaaggagctgcggcagctcgtcgcggcgaccgggacctcgctgctgggcctgtacggtgtcggcccgtccggtgcggcgcggctgctcgtcgaggtcggagacctgtcccggttcccggaccgcaaccacttcgcctcctggaccgggacggcgccggtcgacgcgtcctccggtgagcacgtgcgccatcgcctgtcccggggtgggaaccgtcagatcaaccgggtcctgcacatcatggccaccgtgcagctgcggaccccgaccgagggccgcgcctacttcgaccggaagaaggccgcagggaagacttcgatggaagcgatgcgctgcctcaaacgacgcctgtccgacctggtcttccgcacgatgctcggcgactacgtcgccggcaggatcaccacggcgacgggccaggcgacaggcccgggagggcatcggggcaacgactctgactccagcgcgaccggctcacaaccccacaccggctcttcggacaagccacttcccggacccgtcaccacccagcgtagaaccccactcccgacggcgtcttgacacagaagggagc

SEQ ID NO: 5719 - DNA, 1367 bp, unidentified
  source 1..1367: mol_type = unassigned DNA; note = element_8c1c231
  misc_feature 1..2: note = core
  misc_feature 3..84: note = LE
  misc_feature 85..1110: note = CDS
  misc_feature 1111..1367: note = RE
  misc_feature 1084..1354: note = bridgeRNA
tgatggggtggatgcccccgcccgacggcatcgcgatgtgccaagatggtgatgttgaagtcaccataggaagaggaggcatccatgaatgaggttagcatcgtcggcgtcgacctggcaaagcaggtctttcaagttcacggagctgcggcagacgggcgggtcctgttccgcaagaagttgtctcgtccacagtttgcgaagttcatgacggccttacctcggtgcgtcgtggcaatggaggcttgcgggaccgcacattactggggccgggagctggcccggcacggccatgacgtccggctcatcccaccgatctacgtgaagccgttcgtgaagcggcagaagaacgatgcggctgatgcggaagctgtcgccgaggccgccctgcgcccgacgatgcgcagcgtggcggtgaagacggccggacagcaagcacaggcgatgctctttcgcacccgcgatttgctcgtcggacagcgcacccagttggtcaatgcgctccggggacatctcgctgagcacggcatcatcctgggcaagggcattggcaatatcgaccgtctcgccgcgcgcttcgaagaagacgaagacattccagacctggttcgcaacttggggcggctctacctcgatcggatcgcagggctcagcgccgaaatcggcgaactggacgggcgcattgcggcggcagcgaaggaaagcgatgtcgctcgcaaacttcagacgatgccggggatcggtccggtctgtgccatggcaatcggcaccttcgcgcccgatatgcgcgaattccgccgagcgcgcgacttctcggcctggctcgggctcgttccccggcaacattccagcggcggaaaacagaagctcggccgaacgtccaagatggggcagcgcgacattcgccgcctactgatcgtgggcgcgatgtccgtcgtgcattggaggggtcgcgagggcggcaagcccggatcgtggctctcccgcatgctggcccggaagccgcgcatgctggtcgctatcgccttggccaacaagatggcccggatgatttgggccatgctctcgcgcgatgaggattaccgagatccgaccggcgcggtctgctgaccgcggccgccggagcgtcggcgatgtgaggaggacgacgaccagcatgggcaaatgatcgacaagatccggaacgggtgagccagtggcacccaacgagctcaagctcgcaattttgatcaggcccccgatccgcgcatcaccataccggcccgcggcatgtcacggtcgcacctgagaggcctgaaacatgaccgcacccgatcacatgctcagaaggtcagaaaaatccttgcatcgaagggggcatccaaaca

SEQ ID NO: 5720 - DNA, 1172 bp, unidentified
  source 1..1172: mol_type = unassigned DNA; note = element_8c1c81f
  misc_feature 1..2: note = core
  misc_feature 3..206: note = LE
  misc_feature 207..1157: note = CDS
  misc_feature 1158..1172: note = RE
  misc_feature 19..193: note = bridgeRNA
cttgtatctagttctgtgaggagtttgcaggcattctggtcggggcgccagctcgatgtcgtctgggtggcgaacaccgtgcgttagccggagcggcgtcccgagtacctgtcgcaggagcccgaacagttgcgggggccgctctgcggagcgagcccggattcggacaagagcgggccgtggcgactctcacgtgaggaggggccatgctgatcgggatcgacgtcgcgaaagcggagctggtcgtcgccgcacgccccagcggcgagcggtggacagtgaccaatgatgatcagggagtgcaccacctcgtcgagcgcctgcgcggtagcacgccggtgctcatcgtgctcgaagccaccggtgggtatgagctgctctgcgtcggcgcgctggctgccgccgcgctgcccgtggtcgttgtgaatccgcgccaggtgcgcgacttcgccaaggcgaccgggcagctcgcgaagaccgaccgcatcgacgcggacatcctcgcgctgttcgccgagcgggtgcgccccgccgtgcgtgcgctggccgacgcagaggcccgggaactcgacgcgctgctcgcgcggcggcgccagctgctcgacatgctgcaggccgaacgcaaccgcctcgggcaggtcttcggtcgggataagcggctggtcaagcagagcctcaagagccacatcgcgtttctcgagcgcgaggtccgcatggccgacaccgagctcgggaccatgatccgccagagccccgcgtggcgtgagaaggacgacctgctccagagcgtgcctggcgtcgggcccgtgctctcgctcacgctgctggccgagctgccggagctgggccggctctcacggcgggagattgcgaagctcggcggcgtcgcgccactgagccgcgattcggggacgttgcgcgggcgacgcttcgtgcagggcggtcgcgccagcgtgcgcgcggtgctctacatggccgcgctcgtggccacgaagcgcaacgcggtgatccgcgctttctaccagcggctcgtcacggccggcaagccgaagaagctcgcgctcgtggcctgcatgcggaagctgctcacgatcctcaacaccatggcgcgaacgcacgaacggtggcgagccgacctgacactcaccaccgcttgacattcaagacagttg

SEQ ID NO: 5721 - DNA, 1532 bp, unidentified
  source 1..1532: mol_type = unassigned DNA; note = element_8c1d0ee
  misc_feature 1..3: note = core
  misc_feature 4..82: note = LE
  misc_feature 83..1120: note = CDS
  misc_feature 1121..1532: note = RE
  misc_feature 1302..1521: note = bridgeRNA
atgctgggtggacggccccctgacggcatcggatgtgccaagctggggtcgaaatgaacgaccagcgacggagaccgtccccatgaagcgtatcacgatcgggctggatatcgcgaaatcggtgttccaggttcacggcgaggactcgagcgggaagatcgttttgcagaagcggctgcggcgatcgcaagttttggcgtttttcgctgggctcgagccggcgctgattgggatcgaggcgtgcggctcggcccattactggggccgggagctgcgcgccttgggtcacgatgtgcgactgatcccggcggcctacgtgaagccgttcgttcggcgcaacaagaacgacgcgcgcgatgcggccgcgatctgcacagcggtcggccgtccggacatgcggtttgtggcgatcaagagcgtcgaaagccaagcctcgcgcgggctcgagcggtcgcgcgaactgctggtcaggcagcacacccagctgatgaacagcgtgcgcagccagctcgccgaactcggcatcgtcgcggcgccggggcggcgcggctttgccgagctgagccagctcgtcgcggtcagtgacgagcggatcccggcgatgctgctgtcggtcctgagcctgatgctgcagcagatcgaccagctgcgcgtcgccagcgctgccatcgaggcaaaaatcatggccgtggccaaggccgatccggcgatgcggcggctcgccaccatccccggcatcggtggtttgaccgcgcacgccatcgtcaccgccatcggcgatggcaagcagtttgcttcgtcccgcgacttcgccgcctggtgcggcttgaccccgcgcggtgcttcgagcggcttgaagcgccgccaaggcggcattagccgccagggcgatatccggctcagaaagctgctggcactgggggccagcacgatcatccgcagcgcccgctcgcgtgccgatcgcgcaacccaatggcagcgcggcatcctcgcccgccgtccggtcaaggtggcggtgctggcgcaggccgccaagaccgcccgcattgcctgggccgtgctcaccgccggcacgacttaccggcagccggcggccgctgcccaaccccagccagtttagcgccgtgctcgcgccgtcaagcccgctgcgcgccgtctccgacggtgacggcttgaccgcgcttgcgcgcgacgctctgcatagctcaggtcgggacgaaggaatggtccctccggtcaaacaaaggaatgacccggcttccacggacccacccacattcaccccttctggccatccggccagacacccgcaaggagcaccaagcagcgacggcaacatggtcaggacctggatcgcgacactccgcttcgtcatcgcgcctcaaaagcgcgccgcaatgctcggaacccgatccgcgcaacccatcggggccagcggtcagccgaccgcgccaacaggccggatacatgactgctccagaccacccgccaacgccgccaaattctccttgcccaaagggggccgtccatac

SEQ ID NO: 5722 - DNA, 1460 bp, unidentified
  source 1..1460: mol_type = unassigned DNA; note = element_8c20411
  misc_feature 1..2: note = core
  misc_feature 3..82: note = LE
  misc_feature 83..1192: note = CDS
  misc_feature 1193..1460: note = RE
  misc_feature 1164..1419: note = bridgeRNA
agaccagatgagcgttttgcggcgtgcggtccgcaagtgtggtttcctgacgaacacggagtagttcgaaggaagaacgcgaatgaccaacatgctttacgtgggacttgacgtccacaaagacaccattgccgtcgctgtggcagatgaaggccgaggcggcgagatccgcttctttggcactattgcgcacaaggctgattctgtactgcgcttgaccaagcagctttccaaatctggtaagacaccgaccttctgctatgaggccggcccgtgtggatacggtctgcatcgtcatcttacgaagctcggctttgagtgcgcggttgttgcccctgcgatgatcccgcgaaagactggggatcgggtcaagacggatcggcgggatgcggagatgctcgcccgattgtggcgagccggagagttgacggcaatctgggctcccgacgaggaacaggaggccatgcgagacctgatccgcacgcgaaagcaggcgatggatgctgtgaaagttgccaaacagcagttgctcagcttcctgctacgccatggactctgctacgagaatggcagctattggaccaagggccaccgccgctggctggccgagttgcggcgctttcgctttgattatcaacaattggccttcgaggaattgaagcgcgcggttgatcaggcagaggtccgtgtggctactctggaccgggcaattgaggatgcggtccagacgtggcgtttcgctcccgtcgttgatgcgcttcgcgccttgcgcggcgtgaacacaatcatcgcggcaaccgtggtggccgaaattggcgacatcacccgctttggaaacccgcgccagctgatggcatggcttgggttggtgccaagcgagcattccagcggcaacacaacgcgccgagggcggctaacgaagacaggaaacgcactggcgcggaccatgctgatcgaagccggatggtcttatcgtcatccgccgaaagaaggacaaccgtatctcaagcgctcggcccatctgccccaagaaatcagggatatcggctggaaggcgcagacccgcctgtacaagcggttccgccatttgtcgaactctggcaaaccccaaccacgcgtgttggccgcgatcgcgcgcgaactggcgggcttcatttgggacatcgcacgaaagacgccgctgcccgcgtgatcgatacgcgcaagctgcctgtgcagcacgctggagatggcagcagccaatgatagggaaatcctcggagtacgttgggaaacatatccgctcttagagagaggtcacccgtatcgaaccaggtcaggcggtatccaatccgcggatgagagcatgacaaccatcggttcggcccaccgtctccagcgcctgtacaggctatatctttgaccatcccctgtcagcggggtagtctcattgtgtcaggaaaaccaaaaacgctcatgag

SEQ ID NO: 5723 - DNA, 1160 bp, unidentified
  source 1..1160: mol_type = unassigned DNA; note = element_8c24196
  misc_feature 1..2: note = core
  misc_feature 3..296: note = LE
  misc_feature 297..1148: note = CDS
  misc_feature 1149..1160: note = RE
  misc_feature 22..216: note = bridgeRNA
cttgtctgttggagaagcggtaagctgctggtgtcttccgggacgtccgcctggtgttctcagcaccaggcggaccgccggcggagggaccgataacccctgagcgttttggcgctgcgggtgagcctggtcgccgctggcatatccatgacccggatggttgcagggacgtatgggtccggagccacaaggatgggatcgatggataggaacaagtctagcacaacgatcgccgggatcgatgtgggcaagcgccagttggatgcggccgtgctcggcaggccgagcagcatcgggtggccaacgacgcagcgggctgggaagggctgatcgcctggctggcggaacgcggcgtcagacgcgtggggctggaggcgacggcgggctacgagcgcggcgtgcgggccagacttgaggcggcggggctggaggtggtggtgcaccagccgctggaggtgaagctgttcgcgcgcctcaagcggcggcgggccaagaccgaccggctggatgcggcgctgatcgcggcggcgacggcgcaggtggacacggtgcgggcggcccaggacccgcgcctggcccatctggccgaacgcctgacggcctacgagcagatcagcgaccaggccgcccagctgaagaccttcatggagcatgtgaccctgcccgatctggccgccagcctgggcgagcagatccagagcctggcgcggctgaaggcccggctggcgcgcgagatcctggccgcgctcaaggcctggcccgaccttctggcccgctggacgctgctgcggtctctgccaggtgtcgggccgctggtggccgccagcctggtgatccgcatgcccgagctgggcgccctcaagcgcggccagcccgccagcctgctgggcgtggctcccttcgaccgccagtcgggccaatggaagggccagagcttcatcggcggcggtcgaagccgacctcgccgcatgctctatctggccgccatcgccgccaagcgcttcgatgccgccttcaagatcttcgccgatcgcctcctggccgccggcaaaccgcccaaggtcgccatcgtcgccgtcatgcgaaaactcgtcgaagccgcaaacctcgtcctcaagcgacagcagccctgggttcgccacgcctgatcaacatggttg

SEQ ID NO: 5724 - DNA, 1441 bp, unidentified
  source 1..1441: mol_type = unassigned DNA; note = element_8c364f4
  misc_feature 1: note = core
  misc_feature 2..228: note = LE
  misc_feature 229..1428: note = CDS
  misc_feature 1429..1441: note = RE
  misc_feature 13..243: note = bridgeRNA
ctactagatgattgctccaggaccggtgtctggccagactcggtctaggtgcccggcgggatgctcttatttgggctgcccacccgagcttccgggtgtggctcacttccggtctgcagcccgtcgggcaccgttgacgaggcgtggctcaagaagggactgccctgctcgtagtagcactgcccacctcgccgtccatatcggtacgagcgcagatgggagcagcacatggaacacgtgattatcggggtcgatccccacaagttgtcggcgacgatcgaggtcgtcgatgaccacgagcagcggttgggttcgggtcggttccccaccgatcaagccggttacgccgcgatgcggacctacgccaaggcctggccgcagcgggtctgggcggtggagggcgccaacggcgccggtcgaccactggcccaacggctcttggaggctggcgagcaggtcctggacgtgccggccaagctggccgcgcgggtgcgcctgttcgacaccgggcataaccgcaagactgacgcgcgcgatgctcactcgatcgcgatcgtcgcggtccgaacccagggactgcgtgtcctgaaggtcgacggtgaactcgagtcgctgcggatgctcaccgaccggcgcgaggcgctgactcgccgtcgggttcagaccgtcaaccgtctccaagccttgctcgccgaattgctgcctggccaggctaaacgcgacatcaccaccggtcaggccaagaccatgctggccagggtccgtccgcgcgacatcgctggtaagacccggcgccgcatcgccgcggaggagttgtccgagctggtcgcggttgacgcgaagattaagaaggccaccgccgagctcgagacgatggtcctggcccgcggctcacacctgatggacctacgaggtgtcgggcccgtcgtggccgcccgggtcctggccgatgttggtgacgtggccaggtttcctgaccgcaaccgcttcgcgtcctggacgggcactgcacctctggatgcctcctccggtgagcagaatcggcaccggctctcccgcgctggaaaccggcgggtgaaccacatgatccacatcgttgcggtcacccagctccggcacgattgccagggtcgtgcctactaccgacgcaaacgggccgagggcaaaaagcccctggaggccatgcgctgtctcaaacgccggatctccgacgtcatctaccgacaattgctcgccgacgcccaggcaatggctggcacgggtccgggagggcactgcggggcgactcaagaatccagcgcggccgacctacacccgcatatcgacacttcggatcagccactccccggacccgcgaaaccgacattacgcccgatgccgcgacctcggaagaccaaccatcccaagtccctcacaaggaccggttgacacagaagggagc

SEQ ID NO: 5725 - DNA, 1423 bp, unidentified
  source 1..1423: mol_type = unassigned DNA; note = element_8c3b76d
  misc_feature 1..3: note = core
  misc_feature 4..206: note = LE
  misc_feature 207..1409: note = CDS
  misc_feature 1410..1423: note = RE
  misc_feature 4..173: note = bridgeRNA
ttccttaagaatgttgggcggtccgggaggaccgggtgtggctgatggggtgtttgccgttgatggctcccggagaatggccgcccggtcctccgggacgctccgactgctgattgagaactgcgggcatcgctggttaaggacctgtcggcggagtgttccccgggccacagaagtgctggtcacggtggaacggagcgacgggcttgagcagggctcacgcgcggatatgggtcggcatcgacgcaggcaaggggcatcactgggcggtggcggtgaacgccgacggtgagacactgttctcgacgaaggtgctcaacgatgaggcccagatcctgacgctgatcgacacggcccgggagaaggccgacgaggtgcggtgggcggtggacatctccggccgtgcctccgccctgctgctggccctgctgatcgcgcacggtcagcaggtggtctacgtgcccggtcgcactgtcaaccggatgaccggcgcctaccgcggtgagggcaagaccgacgccaaggacgccctggtcatcgccgaccaggcccgcatgcgccgggacttcgccccgatcgggactccgccagagctggtttccacactgcagctgctgaccggctaccggcgggacctgatcgccgaccgggtccggctcatcaaccggctgcgcgacctgctggtcggcatctgcccggccctggagcgggcattcgactactccgcctccaagggcccggtcgtcatgctcaccgagtaccagaccccggccgccctgcggcggatcggcgtcaagcggctgaccacctggctggaacgacgcaaggtccgcagtgccgacaccgtcgcggccaaggccgtcgaggccgcccagtcccagaccaccgccctgcccggcgaggcccgggccgccaagctggtgcgcgacctggcccaccagctcctggccctggacgaacggatcaaggacaacgaccaggagatccgcgagaccttccgcaccgacgaccgcgccgagatcatcgagtccctgcccggcatgggcccgatcctgggtgccgagttcgtcgcaatcgtcggggacctctccggctaccgcgacgccggacgcctggcctcgcacgccggcctggcgccggtgcctcgcgactccggccgccgcaccggcaactaccaccggcccaaacgctacaaccggcgcctgcgctggctgttctacatgtccgcgcagtccgcgatgatgcgaccgggaccttcgagggactactacctcaagaaacgcgccgagggcctgatccacacgcaggcattgctcgcactcgcccgccgacgggtcaacgtgctgtgggcgatgctgcgtgacaagaggctgttcacctccgtcccgccagtcacgcaggcggcttgacacgatcattgaga

SEQ ID NO: 5726 - DNA, 1358 bp, unidentified
  source 1..1358: mol_type = unassigned DNA; note = element_8c3f2e0
  misc_feature 1..2: note = core
  misc_feature 3..75: note = LE
  misc_feature 76..1101: note = CDS
  misc_feature 1102..1358: note = RE
  misc_feature 1077..1346: note = bridgeRNA
tgatggagtggacgccccccgacggcatctgtgtgccaaggtggcggtgtcaaactgccaccgaaggaggcgtccatggagcaagctaccacgatcggtttggacatcgcgaaacacgtgttccacgtgcatggagcggatgctgccgggcatgtgctgttccgcaagcgcatcactcgcgcaaagcttctcggtttcctagcagtgcaagcccggtgcgtcgttgcgatggaagcctgtgccggcgcgcactactgggcgcgtgagatcgctaagttgggccatcatgtgcgcttgatcgcgccggtctacgtcaagccgttcatcaagcggcaaaagaacgacgccgccgatgcagaggccatctgtgaagcgtcgcagcggccaagcatgcgcttcgttccggtcaagagcgaagagcagcaggcgaacggcatcgtgttccgcgcccgcgatctcctggtgcgtcagcgtacccagtgcgtcaacgctcttcgtgggcacctgatggaatacggctatgtctttccgaagggcattacccatgttgaaacccttgtcgccgtggtcgaggatctacagtcctcacttcccgacagtgtgcgcgtcatcctaaagctgctggtcgacaccttcaccgcattggaggcgcagatcgccgcattggatgctgagatcaggcagcgctcgaagtcagacccgacggcacgccggttgatgacgataccgggcgtggggccaattgcctcgacggcaatcactgcgctcgtgcctgcggccgaggggttcccggccgggcgcgatttcgcggcctggctcggattgacgccgctgcagaaatcgaccggcggcaagcaaaaactcggtgccgtttcgaaacgcggcgaacggacgatccgccgcctattgatcattggggcgagtgccgtggttcaacaggccagccggcgcggcgcacccaagggctcgtggcttgcacagatgttggctcgcaagccgaaaatgctggttaccgttgctctggccagcaagatggcccgcatcatctgggccctgctggtcaaaggcggcacctacagaactccggccgcggcggcgtaggctgaccacgaccgcgaggacgtgagggcgagcggaaggagagtatggcgcaacagtcggcgagacggggctgggacaaccagggctcaccactgtgcttcgagcacgctttgggtgatgtggacccggtccgcgaactcccatacaggccggcggctgtcatcgtgccgcatccaaggccggacagatgacagcatccgaccacgcgcagcaacgaccccaccgttttcccttgcctggaggggggcgtccacaga

SEQ ID NO: 5727 - DNA, 1222 bp, unidentified
  source 1..1222: mol_type = unassigned DNA; note = element_8c40feb
  misc_feature 1..2: note = core
  misc_feature 3..220: note = LE
  misc_feature 221..1201: note = CDS
  misc_feature 1202..1222: note = RE
  misc_feature 11..191: note = bridgeRNA
cttgtatcttattcccgtcatggttagctaccttggcactgagacagaaagagcttgagcgtacccttaaggttcaaccttgccatgtagattaagccttttgtctcgcttctgatgccagctaagacactgaacggtagccaagggcgttgaccctgtatgcacaaggcaagtgggctcagttggttacatttgttatcagtcatagaaggcacccattatgtttttcatcggtattgatgtctctaaagctaagctcgattgcagccttttgctggatgtcgccagcagtaaacgtcgcgctaaatccgttgctaattccaaagctggtatcagcgaactgctggtttggtgcgtgaaacaacaggtcgccactcatgagctccatgccatcctggaaggcaccggcgtttatcatgaacaagccgcactggccttggccgatgcgggtgccacggtgtcgattgtcaatccggcccaggttaaagactttggccgcagtctcggtgtccgcactaaaactgacggcgttgatagtttggtactggcccgttttggcgccatgctcagccctcggccttggacgccccccactcaggaagctcgagtgttacaagcgttgttatcacgccgcgaagccattgctcaggatttgcagcgtgagcgtaatcgtctggaaaaagccgatgctactgatacgcccgcactcatccgtcagtctatcgtgacatctattacttttttggaacaacaactcgccaaattccagcaagacatcgacgagcatattaataaatatccccacctgaaagccgatcgcgacttactgatcagtattcccgccgtgggcccacaagtcggcaaccatttattggtggtcatgcacacgcatcagttccaatcggccgaacaactggcggcctatttggggctggtaccggtggagcgtcaatccggtacgtccgtgttggggcgaccaaggctatctaaagccggtcctgctcgcattcgtgctattttgtatatggcggctgtcgtcggcacgcaatataatccgcatatcaaagcgctgtaccaacgcttgcaggaccggggtaaaaccaaaatgtcagcgctgggggcagccatgcgtaagctagtgcatttgtgctttggcgtcttgaaaactaggcagccttatcaggctaattatgcaatttaatcttgactgccaagacggtat

SEQ ID NO: 5728 - DNA, 1417 bp, unidentified
  source 1..1417: mol_type = unassigned DNA; note = element_8c449ca
  misc_feature 1: note = core
  misc_feature 2..64: note = LE
  misc_feature 65..1102: note = CDS
  misc_feature 1103..1417: note = RE
  misc_feature 1192..1411: note = bridgeRNA
taatgagatggtccgccgccgagtacgattagcaactcggcagttcccatgaggaggatcatccatgcacatcgcatccatcggcatcgatttgggcaagaccacctttcacctggtcgccttaggcgaacataacaagattctgctgcgcaagaaattctcgcgttcgcaactgctggcccataccgcgaagttgccaaccgcgctcgtcggactggaagcgtgtgcgggatcgcatttcctgggagccgtactacgcgaacaggggcaccaggtgcgactgattccagcgcagtttgtgaagccctaccgcaagtccaacaagaacgactttctcgatgccgaagcgatcgccgaggctgtgaccaaacagaacatgcgctttgcccagctcaagacccaggagcaactggactggcaggccatgcaccgggtgcgggaccgactcgtgcaacgtcgaaccgcgctgatcaacgagattcgtggattcttgctggaacgcggcatcaccttcgctgcccagcccatccacctgcgcaagaatctgccagcggtgattgaagacgcggaacagaacctgagcccgcgtctgcgctggctgctgaatcgcatgtggcaagagtggaagcagatcgagatcgacatcgaggaactcacggacgagattgaacacataagtaatgacgacgcccgctgccggcaactacggcagatccccggcttcggcccgctggtctcgactgccacggtggccgccatcggcaatggctctgcctttcgccgcgggcgcgacttcgcagcatgggtgggagtggtgcctcgacagcactctaccggtggcaagcagaagctgtacggcatcagcaagcgcggcaacgtctatctgcgtcgcatgttgattcacggtgcccgctcggtattgttccgcgtgaagtacgacacgggaggattcgggcagtgggtgcggcggctggcgcagcgcgctccaagcaacaaggtcgtggtggcgatcgccaacaaattggcgcgcatcgcctgggccgtgttgtccagcggccgcgactaccgacatcagccgatgccgcaacgggcggctgcttgacgaccgtggaaaagacgctgcgcttggaaagcacaaaacgctttccacttttccaccgccacgaccacggatgttagagagagttccaccaaggtctgctgaggagagaacaagacgaccagaacagcccaatggcgtgccggaaaacctgatggcgaaaatgcgtccctagtgaccgagggatttataaggaccggcacgtgcgtatcatcatcgagtgcccggagaacattctccacttagaggccgaatacatttacgcggactgtccttcgtcaacttcaaacctcttgcagtcaggcggcggaccataca

SEQ ID NO: 5729 - DNA, 1611 bp, unidentified
  source 1..1611: mol_type = unassigned DNA; note = element_8c497f3
  misc_feature 1..3: note = core
  misc_feature 4..291: note = LE
  misc_feature 292..1473: note = CDS
  misc_feature 1474..1611: note = RE
tcacgtataatactgagtagtaaattgattaagtttgaaaagttgaaacttttgatatttactttataataatttatattcatttttataaaaatgaatataaatttctgcgattgagtttaggcaaattatatcaggggtctttgtatccataaaaatgacggtctagctcttttctttttattttcctggtttaagaatgtgaggattatttagttaatcttatataacaagcgtgatgaggaatattgagattcaagagttcaatcgtataagaaaggaagtatgattatgcaaaacgttttagccgttgatgtggctaaaggtaaaagtatgatttctttaattagttcttgtggtgaagttctaattgaaccatacgaagtcaatcattctattatagatttttctaatttacttaatagaattaataaattaaaattagataacatttctgtaataatggaatctactggaatttatcatagacctatagaaagatttttcttagaaaataattttaaagtgtttgttattaatgatttatattctaaaatgtataaaagaaatttaaggaaaactaaaactgataaacttgattgtatatcactttcagaattattctttaatactgattttagggaatatataaaacctgatgacatttatttaaatatgaatgctttgtctagacaatatcatgcactagatgaattatgtgttaatttaaaaaatagatataaaaatttagtttatttatgttttccagaatatgagttaatctttaaaaataaaactttttatagtgaattggcacttagttttattgaaaaatatccacatgctgatattatttctaatactagaatagatgcattacaaaatttctttaaaaaaaatggctttaggcattggaaaaagaaacctatgattattaaagaatatgcaattaattcttatccatctgtttcaaaagatgatgaaataacttctagtctttcacaacttgcaagattaattaatacttatcaaaatgaaattgaaacaattaaatataaaattatatttttagggaagaaaacaaaatattttgaaagtattaattctatatttggaattggggaatttacaacatctctaatcattgcagaactcggtgatataaatcgttttaaaaatataaaagaattaactgcttattgcggattagatccatcaataaaacaatctggtaaatcgataaatattaaagggccaatttctaaatcaggaaataaatatttaagaaaaattctatttgtatctatactaaacattttaagtttaacaagattatgtcacactgaaaatgatatagagaattattacagaaaaaaacgtaatgaaggaaaacatcattacgttgcaaccattgcatgtacaactaaattgttacgaaaaatctttgtactatgcaaaaaattagataagtaatcaacaccacttgattacatttatattatatactaaataaacacataatttcaaaattttaaaaaaattagaaatttcgtgtcttttcagtatgcattaatataacataaaaatttattattgacaaatcttagaatg

SEQ ID NO: 5730 - DNA, 1455 bp, unidentified
  source 1..1455: mol_type = unassigned DNA; note = element_8c4e8ee
  misc_feature 1..4: note = core
  misc_feature 5..237: note = LE
  misc_feature 238..1380: note = CDS
  misc_feature 1381..1455: note = RE
  misc_feature 12..200: note = bridgeRNA
tccttacctttcttgaagggtggtcgttgccctcggccgtaggcttcgaactgcccagggacgtcgggtatggctttcatgtggttgctgtgtttcatggccaggaaggattggccgcccggcgtcccgcgacgactcgaccgccaattgagaaatgcgatttgatcgctgtgtaaggacacgtcggcgtggtcgtcgttgggttgggtagggattacaacgatcacggaggtggctgtgaggcaacaactttgggccggtgtcgatgccggcaaagccgaccatcattgcgtggtcatcgatgtcgagggtgcgcggctgctgtcgcagcgcgtggccaacgacgaaaccgccttgctggagctgatcgatgcggtaatggcactggccgacggtggtgacgtgacctgggcgatcgacctgaacgccggtggggccgcgttgctgatcaccttgctcatcgcttccgagcagcggctgctctacattgccggccgcactatctatcacgcctcggccggttaccgccgtgacggtaataccgacgccaaagacgccgctgtcatcgccgaccaggcccggatgcgttgcgacctgcagccgctgcgatccggcgatgacatcgccgtcgagctgcgcatcctgaccactcggcgcaccgatctggtcaccgaccacactcgggcgatcaaccggctgcgcgtccagctgctcgaatacttccccgccctgaaacgcgccttcgactacagcaccagcaaggccgcactgatcctgctgagcggctaccaaacccccgacgggctgcgccgtaccggtactgcccgactgacaacctggcttgctcaacacaaggcccgcaacgcctctgctaccgcaaccaaagcaacccaggccaccaacgcccagcacaccaccgtgtgcggccaaaacctcgccgccaccatggtcgctggcttggctaaggagatgatgaccctcgacaccgagatcagcgcgaccgagacgatgatcgaggatcgatttcgccgccaccgccacgccgagatcatcttgagcatgcccggcttcggcgtggtacccggcgccgaattcctcgccgctaccggcgatgacatgagcaccttcgactccgtcgaccgcctcgccggcatgtccgggctggcaccggtaccccccgactccgggcgcatcagcgccaacctcaaacgcccccgccgctacgaccggcgtctgctgcgcgcccgctatccgtccgcccagatcgctatccacaccgacgcggcttcgcatactgactacgaccgcaaacgatccgaaggcaaaacccacacccaagccgtccccgccgtggcccgcccacgcccccacatcctgtaggccatgctgcgcgaccaccgggcctatcaacccaccgcgcctaacgccgcggcggcttgacaacttcattgagat

SEQ ID NO: 5731 - DNA, 1314 bp, unidentified
  source 1..1314: mol_type = unassigned DNA; note = element_8c50c1e
  misc_feature 1..2: note = core
  misc_feature 3..194: note = LE
  misc_feature 195..1154: note = CDS
  misc_feature 1155..1314: note = RE
  misc_feature 32..204: note = bridgeRNA
cttgtgtccgcgaaatctgccagaatgtgcgaacgggcggttctcgcaaaaccgcccgtcgctggaactgagcccgtgacgccccaaaggcggcagagcctgagatcagagcaagggacagctccggtggtcttcctcaacccgaatagttgcaagggcttcgagcccgaaccgagcaaggaagggagtagaagatggcacaaaacgacctcgttgtcgtcggtattgacgtggccaaagacaaggtggatgcctgcattcgcagattcacgttgcggcaaacgttcccgaacaccgcacaaggtcatcgcaagctggttgcctggctgagaagataccaagtgggcaaggcggtgatggaggcaagcggcggctacgagctggaatggcgcaacgtgctgcacaaagccggcatcgaggtgcggatcgtcgatcccaggcgggtccgcagctttgcgcagtcggccggacgcttggcgaagaacgatccgatcgacgcggagatgatcgcctggtttgccgagacgttcagccaggcgccgggccagacccctgatgccgcgcgtgaggaactcgcggcgctggcgaaagcgcgcacggccctggtcgacgtcaagatccgcctgcaggctcaggacgagcatgcggccccagaaccggcccggaaggcttatgcgcgtgtcttgaagaacctcgccgccgaaatggacaagctcgaggccgcaatctctgccaaggtcaaggccacaccggagtttgccgagcgtgccgagatcatcgagagtgttccgggcctcgcgcacgtgacgtccgcgatcctcattgcaggaatgcccgagctcggacaggtcagcgacgaggtcgccgccgccctgatcggcgttgccccttacgacgatgatagcggcaagcggcgcggcgagcgctacatcaagggcgggcgccgctgggtgcgaaacgcattctacatgccctgtctcggcgcagctacgcagtgtaatccggtgctcaaggccttctatcagcgtctgcttgccaagggaaaggagcccaaggttgcgctcgtcgcctgcatgcgcaagctgatcatcattctcaacacgatgctcgcacgccgccagaaatggaatcccggccgtcacgccacgggttgactgcgcgagcgcacttactgcgctcggtctccgaccgtgcgcatggaaagccaacagaccgacgagcgggcggggtcaaggccgtagccgccgaaggcgggggcgcgtcagcgccagccttgaggccgcccgatcgccgggctacttctcagcatggttg

SEQ ID NO: 5732 - DNA, 1180 bp, unidentified
  source 1..1180: mol_type = unassigned DNA; note = element_8c57724
  misc_feature 1..2: note = core
  misc_feature 3..205: note = LE
  misc_feature 206..1165: note = CDS
  misc_feature 1166..1180: note = RE
  misc_feature 23..208: note = bridgeRNA
cttgtatctagatcctcagcagagtttgcacagattctgatcggggcgccagctcgttgttgcctgggtggcgaacaccgtgcgttagccagagcggcgtcccgatcgtcgtcgcgagagcccgaacagttgcgggggccgagccatctcgagcccggattctgacaaggacgggcgcggcgacaccactcgagcggaggatccgatgctcgtcgggatcgatgtggcgaaggcggagttggtggttgcgacccggccgctgggggaacggtggaccgtggagaatgccgagcgcggcgtcaggacgctcatcgaacggctcggtcgcgatggagcaaccctgatcgtgctcgaagcgaccggcgggtacgaaatgttgtgtgtcgccgcattggccgcagcgaacttaccagtcgtcgttgtgaatccgcggcaggtgcgcgatttcgcgcgagcgacgggacaactcgcgaagaccgatcgcatcgatgccgacatcctggcgttgtttgcggaacgggtacggcccgaggtacgtgcgctccccgatgcggccgcgcaggagttggacgcgctgctcgcccgccggcgacaactgctcgagatgttgcaggcggaacggaaccgcctgggccaggtcttcggtcgtgggaaagcgcccgtgaagaaaagcctcaaggcccatattgcgtatctcgagcgggagctccgaatgacggatacggatctcggggagatggtgcatgacagtccggcatggcgagcgcgcgatgatctcctgcaaagtgtccccggcgtcgggccggtgcggtcgctgacgctgctcgctgaactgccggaactcggacggctatcccgacgtgagatcgcgaagctcgtcggcgttgctccactcagccgtgattccgggacgctacgcggtcgtcggttcgtgcagggcggccgcgcgagtgttcgggcggtgctctacatggccgctctcgtcgcgacgaagcgcaacgccgtgattagagcgttctatctgcgactcctcacggccggcaaaccgaagaagcttgcgctcgtcgcgtgtatgcgaaagctgctcacgatcctcaacacgatagtgcgaaccggagagcgctgggccgcggagcacaccaataccgaattgatccctgcttgactttcaagacagttg

SEQ ID NO: 5733 - DNA, 1383 bp, unidentified
  source 1..1383: mol_type = unassigned DNA; note = element_8c602b2
  misc_feature 1: note = core
  misc_feature 2..351: note = LE
  misc_feature 352..1116: note = CDS
  misc_feature 1117..1383: note = RE
  misc_feature 1159..1377: note = bridgeRNA
taatgagatggtccgccgcttgattgacctgcgcgggcagggttgatcgtggtggcagcttctaataaggaggatcatcgatatgcagatggtttcggttggcatcgatcttggcaagacaacgtttcacctggtagcacttggtgtagccggcaaggtgctagtgcggaagaagttcacgcaacgacagctgctgacgtacaccgccaacatgcagacgtcgctgatcgggctggaggcatgttccggagcacattttctcggacgcgcgttgcgcaatcaaggccatgatgtgcggttgattgcagcccagtttgtgaagccgttcgtaaagtccaacaagacgactttgtggatgcagaggcgatcgccgaagccgtggaacgcaagaacatgcgttttgtcccgatcaagaccgatgaccagctcgatctgcaggccatccatcgagttcgcgatcgcctgatctctcgacgcactgcggtcatcaaccaactgcgtgcgtttctgctcgagcgaggcctggttttcgcgaagactccagcgaagctgcgggctgcgttgcccgacattcttgagaacgctgaccttgacctgacaacgcagatgcggaacctaatcggtcttttatggaatgaatggaagacagtcgaggatcagattgaaggactcagcctggagttggaacggatctccgccgccgatccggggtgttctcgcatccggcagattccaggtatcgggcctatcgtggccacggccatcgttgccgccatcggcaacggcgcagccttccggaagggacgcgactttgctgcgtggctcggtgtcgtgccacggcagtattcgactggaggcaaggcgagattgctcggcatcagcaaacgcggcaacgtctaccttcgcaagatcctcatccacggagcacgggctgcggtattacggatcaagcgggatcgagcgccgatcggagcctggctggacgcgctcgatgcccgcgctccgaaaaacgtcgtcgtggtcgccatggcgaataagctcgcgcgcatcgcatgggctgtgctctccagcggagaaaactacagaccaatcagcaacatggtcacagcatcatgaactagcgcggaaaagactgcctgcggcttggaatttactgaccgaagtctgcacggaaacaataaggacgaaagaacagtcacaacggcgtgcctgagaacctgctggacgtgttcgtttacaacaaccgaccgactaataaggacggacacgcgcgcaactcatcctggctaggagggctgtgctccaccaaaggccgaatacatttgcgcagacttgtcttctcgcttctagctttttccttgcagtcggacggcggaccataca

SEQ ID NO: 5734 - DNA, 1436 bp, unidentified
  source 1..1436: mol_type = unassigned DNA; note = element_8c729aa
  misc_feature 1..2: note = core
  misc_feature 3..229: note = LE
  misc_feature 230..1420: note = CDS
  misc_feature 1421..1436: note = RE
  misc_feature 13..222: note = bridgeRNA
tccctacgttgttctgcgggaggtggtgagcccttcgtatggttcacccacccaggggcaccgggtgtggttgaaaaggctctgccgcttgtggctctcagtgattggccgctcggtgccccacgacgactcggctgccaattaggaattgcgaatgatcgctccgtagggaatcgacagcgaggtcgtccgtgggaggcaccagccgcacaccgcacggaggcaccacatggccgcgatctgggccggcattgacgcagacaagacccaccaccactgcgtcgcgatcgacgagagcggccgccggctgctgtcgcgacgcgtcgccaacgacgaacccgaactgctcgaacttcttgccgatgtactggcgtttggtgacgaggtgacctggggcatcgacctggccgacggcggagccgccctggccatcgccatccttctcaaccacgatcagccggtgcactacatctccggccgggccatccaccgcgcctccgagagctaccgtggcgaaggcaaaaccgacgccaaggacgccgccgtcatcgccgaccaggtccgcgtccgccgcgacctgcaccccttacgcgccgccgacgacaccatcaccgacctcaagatcctcacaggccgacgcatggacctggtcgccgaccgcacccgcacggtgaaccgcttgcgagcccagctcaccggcgtcttccccggcctggaacgggcgttggatctgaccaacactggcccgctcatattgctgaccggctaccagaccccagcggccatccgccgaatcggcaccaagcggctggagacctggctgcgcaaccgtcacgtcgcccgcgccgaccggctcgccgagatcgcagtccaggccgccgaacggcagcacaccagcctgcccggcgagaagctggccgcccagctggtgcacacgctggcgagggacgtaatgggcctcaaccagcaggtcgccgagctcgacaaggacatcgaggccaaatttcgcgaccaccacgccttcgacgtgatcaccagcatgcctggtctgggcgtgatcctcggcgccgagttcctggcagccaccggcggtgacatgacgatcttcggcaccgctgaccgtctcgccggcttcggcggcgtcgccccggtgccccgtgattccgggaagatcagcggcaacctgcggcgcccgcagcgctacaaccgccgcctccaacgcgtcttctacatctctgcgttgttcagcatccgacactgcgatgagtcgcgtcagttctacgaccgcaaacgcaccgagggcaaacgccacactcaggccgtcctggccctggcccgccgccgcgtgaatgtcctctgggcactcctacgcgatgggcggtgctacgagctcacgccgcccggcgccctcgcggcttgacagacagcattaggaa

SEQ ID NO: 5735 - DNA, 1636 bp, unidentified
  source 1..1636: mol_type = unassigned DNA; note = element_8c8d3e3
  misc_feature 1..3: note = core
  misc_feature 4..283: note = LE
  misc_feature 284..1492: note = CDS
  misc_feature 1493..1636: note = RE
  misc_feature 13..303: note = bridgeRNA
tttgctacaatatatttgcggtagggacacggcatccagccgtgtccttctccgtcttgttgcctaagctacaataagagggctaattggtctgacgtgcctccatttggaatttacatccgtaattgaaacagtcagccatcctcttattgcagcgttcggttcggcaggttgagccccgtgtcggcaacgacacgctgcgttcgtgttacacagcaaattgaatcggcaatgagtaaaaagatggtcgccaattgcagaataatttacaggaggaacacagatgaacgcagttggaatcgacgtatccaaaggaaaaagcatggtggctatcatgcgtcccttcggtgaggtcgtggcttcaccctttgaggtcatgcacaccggcagcgaactgggcgagctggcagacaagcttagaagcctgcacggtgagacaaaggtgattatggagtacacgggcagctactttcaacccatcgcctatgcactcaatgaggcgggactgtttgtgagcgcagtccacgccaagctgattcacgactatggcaacaacaccatccgcagagttaaaaccgataaggcagacgcaatcaaaatcgctaattatggcctgtctaattggatggaactcccgcagtacataccagaggatgatattcggcggatgctgaaagcctttagtcgtcaatacaccaagtaccagaaacttaaaactatgctcaaaaacaacttcatcgcattgaccgatcaaacctttcccggtgtgaatgagttgtttacatccccgccccgaaagagcgacggtcacgaaaaatggatggactttgcattcaagttctggcattgtgagtgtgtttgcagtctttcgtcaaaagcctttgcggagcgttaccgcaagtggtgtaaaaaagagggctactatttttccgagcaaaaagctgatgatatctacatttcctctttgggatactcgtctgtgatgcctaagaacgataccaccaggctgctcatcacgcagagcatcaatcaactcaatgccgtttctgaaaatattgccgtaatcgccaaagagatgaaacggcttgccgagcagttgccggagtacagggtcgtaatggatttctatggcgttggcgatatcctcggcccacagattatggccgagattggcgacatcacccggtttcgatctaagggctcgttggtctgcttcgctgggcttgaggctccaccgtatcagtcagggacgtttgaatcccaaaacaggcacatatccaagaggggttcgccacatctgcgtaaaactctattccaagtgatggattgcctgctcaaaaaagcacctgctgatgatccgatatatcagttccttgaccgcaaacgcgccgagggaaagcattattacagttacatgacggcggggtgcgccaagttactgcgcatttactacgcccgtgtgaatgaaatgatagacaagatggacgactagctcttagcctttaccttttacccttttttagcttttggcggcggctttcaatttttgcaatcttgccgccctgtttgccataccattcttttcgtgtcaatcccataaaaaaatccattttagggcttgacttctattggcagg

SEQ ID NO: 5736 - DNA, 1656 bp, unidentified
  source 1..1656: mol_type = unassigned DNA; note = element_8c8e8ca
  misc_feature 1: note = core
  misc_feature 2..297: note = LE
  misc_feature 298..1482: note = CDS
  misc_feature 1483..1656: note = RE
  misc_feature 59..274: note = bridgeRNA
cctggtatattataattgactcatttatcagtcattaaaatataccttctcctttctatcaactttattaatacgtagttgatgacgtttaggtttatatgtaaaattgaaatatgtgtttgtggatttgtatttttccgtgtggctttgactacttcaaggaggtttggaccactcacttattcctcaataacgatgagttagatgagtctttgaattcgcattttgaaccaggttttatggtctaagtgttgtgggtaccacatcacatgaaatttatttgaaaggatggtttttatgaaattagttggtattgatattggaaagcacaagcatttcgtcagcatcgttgacaagttgactggtgaaattattcttcagcctgtcgctttctctaataatgctcagggttttgaattccttatctctcagatcgctctctatcctgttgatagcgttcttatcggtatggaagatactggtcattatcatttcgctttattgcgctttcttttacagaagaactacagcgtcgctttgatcaatcctaaaactaccgatctcaatcgtagaatggatggtggcatcactaaaaacgataaacttgatactcttaatatatgcgatatattaagctcaaataaactcaagaaaccttatcgtttgacgtcatctaagaaatttgacctttatgaacagaagcagctgactaggttgcatcattccctcaaggaacagatcaatgttctttccaatcgtctgcagaaatgcatagatcttgtttttcctgaatataactcactttttaaatccaagtacggaaaagtctatatgtctattcttaaacagtttggcagtgcaaaggccattgcacaggctgacatcagaactttacgcaaatgctttgatattaccggcagaggcaatcgcatttctctgactgctgaaaagctaaaggaaagtgcaaaaacatctgttggcatttcttcgttggcagatgaaatgcagatcaaacatctaatagctcatatcgaactgcttaatgatcagctcaaagaaatagataaaaaaatagaagagttttccactgacttaaactctcctatcatctccgtaccaggaatttcgcatttctctggtacatcaattctagcagaatatggagatattttcaactattctaagccttcaaagataataaaggcagcgggtgtcgccccatttcactacgaatcaagtcagtacgaagccaagcatagtgccataaccaagcagggatcgagctatttaagaaagacgttatatcaggtcattgtgccagtcatcaggttcaacaaggtcttcaaggattactacgaccttaaacgctcacagggaaaaagtcatcgctgtgcgcagggccattgcatcaggaagctgttgagggtcatctatcatctggtaacgacaaatcagcagtttgatgcatcgttactgagatagaaatagaatgaaaccgtattcaaaaaagtctattccataggctgttttcgtcatgcccaaaaacacaaatcgtattcacatttcaaagatcttacatattgatgagctaccataatcaaatcatttaacattttcaaactttttcatcaaatgacttgaattttatatagttag

SEQ ID NO: 5737 - DNA, 1867 bp, unidentified
  source 1..1867: mol_type = unassigned DNA; note = element_8c8fb41
  misc_feature 1..3: note = core
  misc_feature 4..115: note = LE
  misc_feature 116..1408: note = CDS
  misc_feature 1409..1867: note = RE
  misc_feature 1535..1804: note = bridgeRNA
aggagcttcctgtataatttaaatggtggacgttgaaaattgaaaatacctcagagtaaaataagactactgactggcaggttggtaaatcttatcaaacagagaggtatctacaatgaagtctaacacacaaaatacaaaaattgaagcaattacagaaactactttggtgctcggaatcgatgtcggaagtgaaacgcattatgcaagagcttttgattaccgaggaatcgagtattctaagaaaccgtttaagtttagtaatgatgaggccggattcgtgatgtttaaggcatggattctggacatcaaagaaaagcatggtaaggacaaggtggttccgggaatggagcctaccggccactactggttcaatcttggtaagttccttcaggacaacgagatgaagccggttcttgtgaatcctcatcatgtaaagaaatcaaaagaactcgacgataacaatccgacaaagaacgatcgtaaagatccgaaagtcatagcaggactagttagagggggacgttacatgatcccatacctgccggagggtgtttatgcagatcttagaactgcatctaacatgagatttcagctacaagcggagcttacaagaattcagaataggatcagtcgttggttcaatatatattttcctgaatacaaaacagtgtacgggcagccggatgctaaaagcggaatgctgattctcaaggtggcgccacttccggaagatatcctgacgttgggtatcgatggggtgaaccaaatctggcgagatgcgaaggtgagagcagttgggaaagcgagggcaaagacactgatagaagctgctgagcacagtgttggaagcaaagaaggtgaaatatctgcaaggatggaaatccgtatgctgctggaggattatgagtccagaaatactcgtcttcaggaagtagtagctctgattgaagagctggtaaaaaagattccaatggctgaaaagctgttggaaattaagggagtaggaatcaagacggtgtcgggattcctggctgaagtgggcgatataagccgcttcaataaccccaaagaactgcagaaacttgcaggtttagcattggttgagaatagttcgggtaaacataagggtgagacaacaataagcagacgaggtcgaaagagactaagatatctgctcttcgaggttgcaatgtctcttgtgtcaaagaatccggaattcagggaactccactcatactatacaaccagaaagctgaatccattaaagaagatgcagtcgctgatggctgtggcggcaaagctgctccgtgtcttctttgcaatgctgaccaagggtgtggactatgatcccaaaaagctggttggtgatataaagagaccggcagtatatctgcaggtagcataagcgtacaatgtaatcaatacagcggccgtcctatgggaggtcactaaacaaagcagaatgtagcagataacgtccactgatcaaagtgctggtacaggaagcgagtcagtaatcaacaatacaaagaatgagccggtagtcggcaggaattgtaaccatggggcatgaccccgtaaaggagcatagctgacaccctggttatgggcaggcaggacgaaggaagttaggacctctggagacagagatgatcctggtggatataggaggttagctgccatagagggatgggtatacacaaggccagtaaagcgaaaaacaatgacgttttatttcgtgtacccttttaccgctatttcagtaccagatacaccgaaatgttcataactctggcttatttactgagacagacaaggtcaaaaaaccttgaattttcaataaaaaatacttgattatatgagg

SEQ ID NO: 5738 - DNA, 1382 bp, unidentified
  source 1..1382: mol_type = unassigned DNA; note = element_8c95cab
  misc_feature 1: note = core
  misc_feature 2..88: note = LE
  misc_feature 89..1117: note = CDS
  misc_feature 1118..1382: note = RE
  misc_feature 1143..1334: note = bridgeRNA
gaatgaaagggacttcccctcgatgtggttactttaaccatcttccgtgacattattggggtaaccaaaatattacaggggaataactatggccgttgtaactgttgggatcgacctcgctaaaaatctttttgccgttcatggcgttgataaaaatggcaatactgttctggtcaaacccaaagtaacccgggctgcgctgcctgaactcattgccaacctgcctccctgcactgtcggtatggaagcctgctcaggcgcccattactgggcaaggcttttcaggcagtatggtcacgacgttaaattaatggccccgaaattcgtttcaccataccgactggcaggtaaagccggtaaaaatgacgctgctgatgcactggctatttgcgaagccgtccggcaacctcacatgcgttttgtaccggtaaaagatgaagagcagcagtccatgcaatgtctgcatcgtacccgccagggttttattgaagaacgtaccgcatcatataaccggcttcgtggcctgatatctgaatttggcctgattgccccgcagagtacagaacaactgcggagactggccagagaacaccgcaaaaatttgcctggctgggtcagtcagtgcgttgatgatctactcagtcatattgacaatattgagctaaaaatcgctgagtatgatcgtatcctggccaaaatagccgcccgagacagtcgcagccaaaacatcatgaaacttaggggtgtcggttctataacagtcagggcgttgatcgccagtattggcagtggacatgattttaagaacggccgtcagcttgcagcgtggctgggtctgacgccatcacagtactgcagcgggggaaagacccggctggggaaaataacgaaagcgggtgacgcttatttgcgcactttactggtgcagggcgctcgctctgtaatgatcggcgtggagcataaacaggatcccttcagtcggtgggtatgttcactgatcaatcgccggggttactggcgtgcagccgtcgctattgctgcaaaaaacgcccgactatgctgggcatcattgaattatggtgatgactttaagctgtactcatcaccaaatagctgaaacacgttacctgaagaccaacaccttttctggctgcaagcgttgatgttaaagggtttgaccccgtgaggaatatctgcaaaacgtacaggatatctgtatccgcttagcgaacgagaacctcacgagcgtctttcatcagggtccgaatcgatgacgattcatcatgaccgtttatagtaccgcagtcttatccttttactatcagtggtagacagacagaaaaaaatcaaaccgacgttgactgttcggtgaagcccttata

SEQ ID NO: 5739 - DNA, 1390 bp, unidentified
  source 1..1390: mol_type = unassigned DNA; note = element_8ca6fe4
  misc_feature 1: note = core
  misc_feature 2..95: note = LE
  misc_feature 96..1127: note = CDS
  misc_feature 1128..1390: note = RE
  misc_feature 1171..1387: note = bridgeRNA
taatgtaatgaaccatccccattcccgctaagcatttgcattcttgttgcttagcgcccaagttgaaagcctttaacccgggaatggagatagacatgacaattagcgtattaggtatcgatattgcaaaaaacacgtttcagcttcacggcgcagacagtgctggtaactcaattcttagaaaacgcttaccgagaaacaaacttgctgctttcgtggctaatctaccacagtgtcaggttgtcatggaatcttgtggtggagccaattactgggccagagtattccagagcagcggtcattcagtaaagctgatcagcccgcaatttgtgaagccctttgtaaaaaccaataaaaatgatgcaaatgatgcccaggcgatagtggaagcggcaagcaggccgtctatgcattttgtgcccatcaagcgggtcgaacaacaagatattcaatcgatacacagagtccgtaaccggattgtcaaaaatagagccgccttgattaatgaaatcaggggattgtgctcggagtatggaatcatagttgctccaggggctgcaaaggttaaacgatctctgtgctcaatcattactgatgaaacaaacgagcttacccagtcatcccgagaatgtatgagtgatctttatggtgaactggtagagaacgaagtcaggttgacgaatctgaataagaagatccggcagatatgccatcaaaatgaaacctgccgccgcttactgaaaatacccggtgtcggtgagcttactgcaacggccattgttgcggctgtcccaaatgcaaatgaattcaaaaacgggcgccatatgtcggcttggttaagtctagtaccaaggcagtcctccagcggtgataagcaggttttgctgggtattagcaaacggggcgacagatatttacgcaccctgctgatccatggcgcaagggcagcgttaagtcactacaaaaagaccgagactggctatgggcgctggctagttgaaaggaaagcgacgctcagctttaacaaggctgctgttgcattagcaaataagaatgcaaggataatatggtcattgctgaatactagtgaagaatttaatagcaatattcaaatggctgctgcctgatactcaatatctagtggcttctttaattgaaaggaaaatatcccaagtttgctgtagttgatttcaatgatggctaataggtcaaaccaactcttctaaaacctgcaacttgtcacggcccaatgaggccatggtattgatgaggaaggagagagcggatttacatcagggcacaagctccgcttggaagccgaatatatgaccgcaacttagacatattgcaataattgaaaatcaacttgcaaaaggggatggttcatata

SEQ ID NO: 5740 - DNA, 1600 bp, unidentified
  source 1..1600: mol_type = unassigned DNA; note = element_8ca87b8
  misc_feature 1..2: note = core
  misc_feature 3..321: note = LE
  misc_feature 322..1542: note = CDS
  misc_feature 1543..1600: note = RE
ctggtataattctcacactattactttagtatgagttatctgttaataatgttaaaataaaagggtaatcctttttcagttgggagacagcttgcatatctccttaagacttcttttaaagaagatctttaaatatagagtgctgcttcctgcggttgtgcctgtgaatattcattcaggatactaaggggctctgttgatacaaagctacctttcatatcccaggctatatttaggccaaacctgctggaacatactcccataatctgaaaaagaactactcttaacaactttctatttatcaaaaggaggactgattttatgaactatcttggtatcgatatctcaaaatcaaccgcccgttgtgtcattctcgataatgacggcgaaaaaagcgtaaaaccatttacgcttaaaaacaacaaatatgaattcaatgagctgatcgaacgttttaaaaaacacagcctaaactctgaaaatctacttatcggcattgaagccaccggtatctggtgggaaaacatttattgttttctaactgaacaaaaatttaaaatagttgttcttaacccccatcagacaaacaagttcagagaagccctgcgtaaaaaagcaaaaactgacgatattgacgcttatgttatcgccggactcatgcgttcaaacgaatacgctcaaagctttgtacctgaagaaaccgttcaaatcctaaaggattttactaaactcaggtataggcttatcaaagatcaaaaagactacaaaagacaagcattaagcttactggctttagtctttcctgaatatgagcaaacaaagttaaaaaaaccttttggtatcgccgcggccagcattcttaaaaaattctctacagcaaaacacttagcccaggcaaaaccaaaacatattgagaaaatcgttcgctcaatcaaaggcaataattttaatatcaaagaaataatacatcttatacagacagctaaagactctatatattccggcagagcagctaatgctcgagccataaatcttaatattatgatagaacaagttcaaaatataaataaatctattgatgaactcaatcaagaaattgaaaatattctatcatctaaagatgacaatgaaccttttgatttccccggcggtaatttactctctatccccggtgtaggactaaaaactattgcctctatcatatctgccgtaggtgttgatgcccaatcttttaaagattctaaaaagattatcggatatgtaggtttttatcctaaaatctatcaatccggtgaaacttttaaagcaaataagatagctaaacgcggaccagcatatttacgttccgctttatatatagctgctgttgcttgtattaaacataatactgagtttagagcattatatcagaaaaaacgatctcaaggcaaagccggcaagcaagctttaatatatgttgccaaaaaattagctcatttatgcttaagcatgcttaaaagcggcgaattgtatcgccctgaaagagtttttatgcctgtttaattgtcaatgaacgttctttgaaaatttgttattttttactttatcctttataggatat

SEQ ID NO: 5741 - DNA, 1186 bp, unidentified
  source 1..1186: mol_type = unassigned DNA; note = element_8ca8f57
  misc_feature 1..2: note = core
  misc_feature 3..160: note = LE
  misc_feature 161..1114: note = CDS
  misc_feature 1115..1186: note = RE
  misc_feature 40..157: note = bridgeRNA
cttatataaaacatattagtcagatctgggtaatacagatctgactggggtgtaggccgttgacttccttgggcttaaagcccggtggggagcttggccgcctccaactcggaccggaagttgggcaaaaagcccgaataaaacataagggtgagtacaattggaggcacccagttcaggaatagacgtatcaaaagataaattaatcgtgtattttcaaggtaaactctacgagtttactaatgataagcgaggttatgaggagataagaaagattttgccaaagggttgcaaagtaggtattgagagtaccggagtttaccacgttaacctagcaaagtacttgagtaatgagtatgatgttaggattattaatccctttatactcaagaagttcaagggttttaggggtaagaagagtgataagaatgacgctaaaaagctagcagaaatagttgtaagtatgggtagtgagtttgtaacaagtgaagctagggagttaacaagccagtgggattttattactaggagtattgctagggttaagaataggttgaggagggatctagtacttttaggctatagtgatagtttgtcaaagaggaatttagaggaggttttgaggggtggtggggatggtattgtcttggctgaggttagatttcttttggaagagcttgagaggcttgagagtaggaagagggagattgaggataggcttagagagttagttcccaaggatagtttgattttcaccattcccggtattggtaaaaccttgggttgtattattttggctagggttggtgatgttaagcgctttagtgataggaagaggtttgttgcttattgtggtcttgacccagttgttgagtctagtggcaagagtgttatcacaaggggtatatccaagaggggtgatgccgttttgaggagggctttttacttggcagccttgactgctattaaggttaatcctgttatcaagcgtttttatgaggagcacaagggtaggcttagaggaaggaagttgattattgcgtgtgctagaaagttggctgttattacttgggctgtgctgtattacaataagccctttgatgctagtgagtaaagcaggtttcatcacttgcataagtagtgtggactatgctcaatttttaaggaaaactttttataccggaag

SEQ ID NO: 5742 - DNA, 1508 bp, unidentified
  source 1..1508: mol_type = unassigned DNA; note = element_8cb5bf1
  misc_feature 1..2: note = core
  misc_feature 3..252: note = LE
  misc_feature 253..1488: note = CDS
  misc_feature 1489..1508: note = RE
  misc_feature 7..248: note = bridgeRNA
ctaatgagagttagcgagtcgccatccggcagactcggtgtctggtggccgccggcaggtgagcacttttggctccagggctgcgagccctgaagaaagatcgtgcccctgccggctggccgggagagttgatcgctgctgggatgtcgtgcgcgcctgcctagtgcgggggcgtgagcactgtttcattagggcgctgattgttctcccgcaggctgctgacggaattcggcatctaggacgggagatctgatgcggctgttcgtgggggatgactgggctgaggatcatcacgacgtggaggtgatggacccggcgggccgggtgctggcccgcaagcggctgccggagggggtggccgggatggcccggctgcacgagctgatcgggcagcacctgggcgtcgatgctgaggatgcggaggtggtgatcgggatcgagactgaccgcggtccgtgggtggcggcgctggtcgcggccggatacacggtgtacgcggtgaacccgctgcaggcctcgcggtaccgggaacgccacggcgtgtccggcgccaagagcgatcgcggtgactcgcacatgctcacggacatggtgcgcaccgattctcaccagcttcgcgcggtggcgggcgacagcccggacgccggcgcggtcaaggtggtggccagggcccataagacgctgatctgggaacggacccggcaggtccagcggctgcggcaccagctgcgggagtacttccccgccgcgctggcggccttcgaggacctggacgccgccgacacgctggagctgctggctaaggcgccggatccggcgcgggccgtgaggctgacccgcgcgcaggtcagcgcggcgctcaagcgcgcccgccgccgcgacatcaccggcaaggccaccgcgatcctcgcggcgctgcgcagcgcccagctcggccagccgccggccatcaccgccgcctacgctcacaccgtccggtcccttatcgcggtgatcaccaccctcaacgagcaggtcaagaccctgcaagggcaggtggaggcggattttggccagcacccggatgctgagatctacctgtcccagcccggcctgggatccatcctcggcgcccgggtgctcggcgaattcggcgacgatcccgaccggtacgccagcggcaaggcccgcaagaactacgccgccacctccccgatcacccgcgcctccggcaagaagaaagtcgtcgccgcccggttcatccgcaacgaccggctcaccgacgcgctcatggcccaggccttcaccgccatcagcgcctcgcccggcgcccgcgccctctacgacgccgagcgcgcccgtggcaaggagcacaaccccgccctgcgcaaactcgccagccgcctcgtcggcatcctgcacggctgcctcaaaacccgcaccctctacgacgaggcaaccgcctggtcccaccggcaaaacctccctcaatcttccgtcgcggcttgacacctaagctcctgggatgt

SEQ ID NO: 5743 - DNA, 1443 bp, unidentified
  source 1..1443: mol_type = unassigned DNA; note = element_8cc9369
  misc_feature 1..2: note = core
  misc_feature 3..230: note = LE
  misc_feature 231..1427: note = CDS
  misc_feature 1428..1443: note = RE
  misc_feature 15..206: note = bridgeRNA
gtcctaccgttttagcgcgggccaactccggtcattcgtaggatcggtgagcctgagggctccgggtatggcagtgagcttgtcgccgcttgatggctgaaatgacttggccgcccggagcccgcgacggtcacaaccgctcattgggataagcgacttgatcgctgtgtaggacaacgtcggcaaggccgtccgcgggatcacagaacgaacagctggcggaggcgaccatgttcacgatctgggccggagtcgatatcggcaaagagcaccaccactgcgtggcactcgatgcccaaggggaacgacggctgtcgcgccgcgtcggcaacgacgagcccgcgctgttggagctcatccgcgatgtgctcgctctcgccgatccgggcgaggtgttgtgggcggtggacaccaaccacggcggcgccgctctgctcatcgggcttctgctcgaccaaggccagtcgatggtctatctcaccggcctgactgtccaccgtgccgcagccggctaccgcggccagagcaagaccgacgccaaggacgcccacgtcatcgccgatcaggcccgcatgcgccaggacctgggactcccgcggcccggcgacgaggtggccgtcgacctgcgcatcctcaccagccgccgcctcgatctcgtcaacgaccgcacccggcagatcaaccggctgcgcgagcagctcctgggcatcttcccggccctggaacgtgccttgccacggaagggccgggggttggttgtgctgctgaccggctatcagacgccgggcgcgatccgccgcctcggtgtccggcgcctcgaatcctggctgaagatgcgcggtgtcaagagcaccgcctcactcgctcggactgccgtcgaggcagcagaatcccaggccaccacgctgccaggagagaagattgctgcggacatggcggcccggatcgcgaaaagcgtgctggccctggacgcggagatcgccgaactcgacgctctgatcgtggcccgctttcatgaccatccacatgccaaggtgatcgagaccctgcccggcatggggccccgcctcggggccgagttcatcgcggccaccggcggagacctgacggcgtttggcaccccggaccggctggcgggcttcgccgggctggccccggtcccacgcgattccggacgtgtccgaggcaacctgcaccggcctcgccgctaccaccgcgggctgctgcgagcctgctacctcgccgcgatggccagcctgcgctgctgtcccgtctcccagcgctactaccagcgcaaacgcaacgaggggaagagtcatatccaagccgtgctggccctggcccgccgacgtctcaacgttctctgggccatgatccgcgacaacacctcctatgaactccgccctccgatccccactgcggcttgacgaccgctattgggaa

SEQ ID NO: 5744 - DNA, 1207 bp, unidentified
  source 1..1207: mol_type = unassigned DNA; note = element_8ccd8d7
  misc_feature 1..2: note = core
  misc_feature 3..205: note = LE
  misc_feature 206..1192: note = CDS
  misc_feature 1193..1207: note = RE
  misc_feature 12..188: note = bridgeRNA
cttgtatctttcatcccgtggtggttagctaccaccacccgaagcagaggcagcttgaagtctgcgctaaggcttgaccttgtcgagtagattaagccctctgcttcacctttcgccagcaaagacactgaacggtagccaaggggaaaaccctgaatgcacaaggcaagtgggcgaagttggcactattgtaacggaggttatcatgttatatctcggcatagatgtcgccaaggccaagctggattgttgtctgttgctggatgatgccagtggcaagcgcaagaccaaggtggtgaacaacaccaaatcaggagtcgttgatctgctggcttggattacaaaacagaatatttccacagaagaattgcatgtcgtcatggatgctaccggcgtctatcatgaacaagctgcactagcgctggcggatactggcgtaatagtttccattgtcaatccggcgcaggttaaagactttggacgtgggctggccgtgcgtaccaagaccgatggcgtggacagctttgtgctggcacgttatggcgctttgctcaaaccctctgcctggacaccgcccgccccggaagcacggatgctacaagcactgctggcgcggcgcgatgccattgcccaagacctgcaacgcgaacgcaaccggcaggagaaggccgacgccaccgacactccagagctgatccggaaatcacttgaagacagcatccagtttctggtcgcgcaattggctcagctccagcaagacattgacgaccacatcaacaggcatcccagcctgaagaaagatatgaacttgcttcagagtatccccggagtcgggccgcaggttggtggcaatatgctttcggtgttgagcagccatcacttcgagtcagccgaacaattggcggcatatcttggactggtgccagtagagaggcagtcaggcagttctgtgcttgggcgtgccaagctctccaaagccgggccagccagaatacgcgccgtgctgtacatggctgctgtcgcggcaaagcgctgcaacccgcacgtcaaagccgtctatgaccgcatgcttgcacgaggtaaatgcaagatgtctgcccttggcgctgcaatgcgaaaattggtgcacctgtgtttcggcgtactcaaaacacagcaaccataccagcgcgattatgcaaaaaacgcttgaccggaaagacggtat

SEQ ID NO: 5745 - DNA, 1183 bp, unidentified
  source 1..1183: mol_type = unassigned DNA; note = element_8cd6b50
  misc_feature 1..2: note = core
  misc_feature 3..193: note = LE
  misc_feature 194..1180: note = CDS
  misc_feature 1181..1183: note = RE
  misc_feature 30..183: note = bridgeRNA
tcctttagatttgaatttataatatatgcttaaatttaaaagcagaaagcggtacactatatcgaactcaaagctcaaagcttataacgtgattcagaccctttctgcctttatagaactcaaatagaaattcgggatttaaagcccattattaaggagttgagtccattttttaatctgttaattcaaagttatgaaaaccaattcaatttttgtcggtattgatattagtaaatcagtattagatatttgtattttacaacctacccctaattattttactatagaaaataataaaaaatctattaagacttttattaaaacacatttatcaaagatagccccttgtcatatatgtatggagaatacaggtaagtatggatggttattgattgatattttatctgagatggattattttatgtatgtagttaaccctatccatttgaagaaaagtttaggcttaattagaggtaaaaatgataaaatagacgcttttagaatcgcacaatttataaagaagaactatcaagaattaccaagacatgagaaaaaatctgtcgcactaataactcttcaagtattattgtctgaacgccagtacaaagtaaaacaacgtaaaagccttttaattaaactaaaagactatcaacttatagacaatccaaagcttcaagaattactaagagatcaaaataaaaaattaattattgagattactgatcaaattaaaataatagaaaaacagatcacccaagtaattaaacaagaaccaattttaaaaagtaaatatggtcaaataacatctgttcctggagtgggaaaagttttagcatggaatctattagtgaaaacaaatgcctttactcttattaataatccaagaaaattagcatgttttgctggtattgcaccatttgagaatcgttctggatcttctgtctttggcaaaagtagagtttctttatttgctgataaacatttaaaaacactattacatatggctagtataagcgctgtaaagtctaaaaatgatattcaattatatttccttagaaaaatagaacaaggaaaaaataaaatgagtgttcttaatgcagtaagaaataaaataatacatataatttgtgccttgattaaaaatcaatctttttttcaaaacaggttggttttatcatagaaa

SEQ ID NO: 5746 - DNA, 1437 bp, unidentified
  source 1..1437: mol_type = unassigned DNA; note = element_8cda852
  misc_feature 1..2: note = core
  misc_feature 3..6: note = LE
  misc_feature 7..1185: note = CDS
  misc_feature 1186..1437: note = RE
  misc_feature 1254..1375: note = bridgeRNA
taatcgatggactcgcccccgccgaggcatcacagtgccacggtggcgttcgaagaagccaacggcagcgagggcgagaccatgaaaaagcatagttcgaagcaaggttccctgtcttccactgatgtggagctttgcacaaccatctgcgtggacctggccaaacaggtcttccaattagcaggcgaggacgctaccggtcgggtgatctatgaagatcgcatcaaatcccgacagactttccatgacttcctgctcaagctgccaacgaccgtggccgtcttgatggagtgtggtccaggtgcacaagcttgggccagactgctgcaggccaaaggtaatccggttcgcatcctgccggcgcaacgtgtcgccgaacatcgcagcggtgcaaagaacgatcgtaacgactgctatgccattttgcgtgccggtcgcgatacgagcatcgcttcgataccgatcaagagcaccacagcactggctattcaagcgctgcaccgtatccggcgcggtaacatcaagcgacataccgcgctgggtaatcagatccgtggtttgctacttgagcatggcgtatccatgccccagggtgatgccgcgatcaataagcatgtgcctcaggcgcttgaggatgcttccttgcctctgcccgacctgttgcgcgaattgctcgatgagttgctgatggactggttgtctctaggtgaacgcatagcggtgctgagccggcggctcgaagcgactgcccaggaggataaagtcgctcagcgactgatcaccattcgtggcgtcggccctatcattgccacggcgatcgtggcgaaacagaccgaacccagccgcttcgccagtggccgaatgtattccgccttcttcggtatcgtgcccgatcagcacagcagcggaaacaaaatcagattgtgcaagatgagcaagcgcggtgacggctacatacgcagcctgctgatccagggcgcccatgctgttttgagtcagttaaggcctgattccgatcagccagatgatcgccgcctcttgcgctggctatcccgccttgggcgcaaggaggcggcgatcaggctggctaatcgaaatctgcggattatctgggccctgttacagagcgatcaggtttaccaacgcaaaccgaacgaaaaaccggaggcggctatgagcctctgaccaaccgggtaatgccaccggggcgctaggcgctccaacccctgctagtgaacattgaccctaggtaagaccgtcgcagaccgatgcctccgctcctacaggcctgatagtggcctcaatgtaaacggcacactgcgagctcaccacgatgttggccagaagcaaaaagcttcctcgaacaggcctgatacatagatgcaaccgggttcctatgttcaaaaagcagctagacagtgtgggcgagtccataca

SEQ ID NO: 5747 - DNA, 1323 bp, unidentified
  source 1..1323: mol_type = unassigned DNA; note = element_8ce534b
  misc_feature 1: note = core
  misc_feature 2..70: note = LE
  misc_feature 71..997: note = CDS
  misc_feature 998..1323: note = RE
  misc_feature 1099..1317: note = bridgeRNA
taatgggatggtccgccgcctctacccagcgagcagccggggtataagaggtgaacaaggaggcgtccccatgcaactacacacgatcggcattgatctcggcaagacagtctttcatctggttggccttaaccaacgtggcgaggttgtggtacgcaagaagttttcgcgcaaacaactgttgcacttcactgcgaacctgtacgtaaagacgaacaagagcgactacattgatgccgaggcgattgcggaggcagtcgagcggccgaagatgcgcttcgtaccgatcaagagcgatgaccaaccggatctgcagtccctgcatcgggtacgggagcgttgggtgatgcgtcgcaccgcagtcatcaaccagattcgtggcttgctgctcgaacgtggaatcactttgcgccaggggcgacgccatgtcgatgcggcattgccgggaatcctagaggacgcctgtgccaagctctccggcgcagtgcgcgtgcttctgatgcaactgaagctggaactcgatcacttgcaaatacgaatcgacgaagccgatgccatgatcaacaaggcggctgccgagaacgacgcctgccgacggctggtagcgattcctggcatcggacctgtgacggcgactgccatcatcgccgcgatcggcaacggagcagctttcaaaaaggggcgagggttttccgcgtggcttggaatcgtcccgggcgaatacaccacgggtggcaagcaaaagttgctggggatcagcaaacgcggcaactcttacttgcgaagactcttggtgcaaggggcccgtgccgttctgcaacagagcacgaagcaatcttccggtctgagtgcgtggctggcccaactcacaacccgcacccacagtaacgtggccgcagtggccttagcgaataagctggcccgcatgacctgggccgtgctcgccaagaatgaaacctatcggcccccattgttggtcggagcagttacaccatgaccggcctgcagatgacgcctggccgaggccaggcttggaaatcgcattcgcgattcccacatctacagaccagcgacggctacggagttgatgattttctgccaggtctgctggcgaactatgagatgacacaacggtcgaacccggcgctctcgaaacctgtaaaccggaaaagccttccaaggctgcattactaaataggacgagcgcgcagcgcattccatcaaggccaggagctttgtgctccaacgaaaggccgaatacatttgcgcagaccatcctgtcaactttcatttttcgcttgcgacaaggcggcggaccataca

SEQ ID NO: 5748 - DNA, 1561 bp, unidentified
  source 1..1561: mol_type = unassigned DNA; note = element_8ce7a4c
  misc_feature 1..2: note = core
  misc_feature 3..223: note = LE
  misc_feature 224..1441: note = CDS
  misc_feature 1442..1561: note = RE
  misc_feature 1..227: note = bridgeRNA
ccgttaccgtgatggtgtccccctcacgggggacggtcaccgggcccggcatggcttatctgccctgtagtttccatgatccggggggtgttgccaccgggcaccggggacaaccgctgacagctaatagggacacggcccaaacagaggtctcgtcgtaacgtgggtgcctgcaacggatgtccaagacaccggtgaccagccgcaacagaaggacaccaccatggaaccgtccaccacacccgacatcatcatcggcctcgacgtcggcaaaaccggccaccatgcctgcgcgctgaccaccaccggcgagagaatctacgacaagccgctgccccaagacgaagccgcactgcgcgaaatcctcgcgtccatgcaggcccacggcagcgttctcatggtcgtcgatcaacccaacaccatcggcgccctgcccatcgcagtggcccgcgactgcggttgcacggtcggatacctccccggcctagccatgcgaaaagcagccgatctctaccccgggcgatcaaaaaccgaccgccgggatgcattcatcatcgccgacaccgcccgcaccatgccgcacacactgcgggcagtcgaccgcgacgacgagacgctagcagcgctgaagatgctcgccggattcgacgacgacatcgccaaagacgccacccgaacgaagaaccgccttcgcagcgtgctcacacagattcaccccgcactcgagcgcgtcttcgcaggcgagattctctcgcgcacgctggtgctggacttgctcatccactacggcggtccgacaaaactggccgccgcaggtcgaggccgggtcctgaagtggatgcgcaaccgcgccaagaaggaccctgctgccctggttgacgcaattttcgccgcccttgccgagcaaaccgtcacggtacccggcactgcggcggcggaattggtcattccccagctggcggcgaacatcaaagcgcttcaagcacagcgcgacacgatcgccgaacaagtcgaggagatgctcgaatcgttccctcttgcccaggtcttgatgtcgatgcccggcgtaggcatcaagaccgcctccaacatcttgctgtccatcggcgattgctccgacttcgccgacgccgcacacctggccgcttacgctggcatcgcgccgatcacccggcggtcgggtacgtcgatccgcggagagtttcccaccaggaccggaaataaacgcttgaaaaacgcgatgtttcgatcggcgtggatcgcgtcgaactgccatcccgcgtcgcgcgactactacctgcgtaaacgggctgaaggaaagaagcacaatgctgcggtgatgtgccttgcccggcggcgctgcaacgtcatctatgccctgttgactcggcgtgagttcttccgagaaatccctgctagaaccatcgccacggctgcgtaggccgctgggttgatcaccaccggcccgcatgatgcggcccggcgatcagtcatggctacaacacccccatacgatgtacgtgaaagtcccgcctgactattgacaatccacatagggaca

SEQ ID NO: 5749 - DNA, 1356 bp, unidentified
  source 1..1356: mol_type = unassigned DNA; note = element_8cfcdf4
  misc_feature 1..2: note = core
  misc_feature 3..82: note = LE
  misc_feature 83..1108: note = CDS
  misc_feature 1109..1356: note = RE
  misc_feature 1127..1343: note = bridgeRNA
tgatgtggtggacggcctccgctcccggcatcgcaatgtgccaaagtgtggctgtcgaaagtcacatgagggagagccgtccatggagaagattaccacaattggtctggatatcgccaagcacgtctttcagattcacggtgtagacgcgttgggcgcagtagtcgtccgccgaaagctgcgtcgtgacgatgtagctggcttcttcaaggcattgccgccgtgcctgatcggaatcgaggcgtgcgcgaccggacaccactgggctcgggtcctcatggcgctgggtcacgaggttcggctaatgccggcctcgtacgtcaagccctatgtgaagaggcagaagaatgatgcgacggatgccgaggcgatctgcgaagcggtcacgcgaccgacgatgcgcttcgttccggtgaagagccaggagcagcagagtgtgctgatgctgcatcgggtccgtgagctgctgatccgccagcgaacgatgctggagaacgccctgcgtggccacctggcggagtttgggattgtaacgcgccaaggcattgctggtgtcggcacgctgatcgcactcgtcgaggaccaagatgctgaactccttctaccgcttgcgcaggccgcacttctccccatagtcgggcagttgcgggaggtgcacgagaagatcagcgagatggacagccagatccatgcttggcaccgctccaatgaactgagccgacgcctcgagacaattcctggaatcggcccaatcactgcaagcgcgatcgctgcgaccgtaacggacgcgacgctcttcaaatccggccggcagttggcggcatggataggcttggtgccgcggcagaactcatcgggtggcaaggaccgcctcggcaggatcagcaaacaaggtgatccttatctacgccgccttctcgtggtcggtgcccatgcagtgctccggttcagcggaaagggcaaagcggcgtctacccgctgggctgccgagctgctggcgaagaagccatacaacgtcgtcgccgtcgccttggcgaacaagatggcgaggatcgtctgggcgctgatgatgaccggccgatgttttgaggattccgccacccgttgaggcggtcgcggaggatgcagagattggtgaggtgctgatggtgtgatggcgaacggtcgagccgggatcggacaaacccgctcagtgggtgccgcttgaaagcgcgctgacctgtctgggtcccgatcagcggactacatcagggccagcggcatgaacgtcgctatcaaaggccgtatacatgcctgcacccgaccaaccgccagaagcgccgaaaaagcccttgccacgcggaggccgtccataca

SEQ ID NO: 5750 - DNA, 1570 bp, unidentified
  source 1..1570: mol_type = unassigned DNA; note = element_8d010c3
  misc_feature 1..2: note = core
  misc_feature 3..247: note = LE
  misc_feature 248..1423: note = CDS
  misc_feature 1424..1570: note = RE
  misc_feature 3..226: note = bridgeRNA
ctcgtattataaagtagtagtgtttatagaccctctccaaggtctgtatgctatactgtttggagatactgtggattggtgattctctcctaccacttgatggttacagaaaggctccaaccacagtctctttgtatcgttgttgatcagttagataccgcatgacggttgatttagaacgaggttacaagcgcaaagagtcctgtggatcccagcagtatctaaattttttactaaggagttttttatgatctacgttggaattgatgtcgctaaggataaacatgactgttttatcactaactcagacggagaaatcctctttcccgttttttccattcagaataaccgcgatggttttgacgatcttttttccaagattcgttctatttctacagatctgtccaatataaaagtaggactggaagccaccggacactactcttacaacctgctcggttatctcattgacaaaggtctccccaccttcgtcatcaatcctctccacacaaatctttacagaaaaagtctcagccttagaaagacgaaaacggataaggttgatgcccgaaccattgctatgatgctcatgtctgatgtgaacttgaagtcctactcagacacatcttatcacaacgaggagttaaagtcactcactcgttaccgttttgataaggtccaggaacgcgctcagctcaaacaatctgtctccaggcttgttgctatcctcttccccgaattggaaaaacttgttgccacgcttcatatcgcttctgtatacgccttgctttccgaactcccttctgccgggaagattgcttcctgccatctgactcacctgacgaagctgttgggaaacgcctcgaaaggccgttacagccgggagaaagcgattgaaatacgggaggctgccagagtctccatcggctcaaacatgcctgccaaatctctggaattgaggcatactcttaaactgatcggtgaactggattccgagatctctgaaattgaatccgagatcaaacggatcatggatcaaatttcttctccgatccttaccattcccggaatcagttaccgcatggatgcgatgatccttgctgagatcggggatttctcccgctttgattccccggataagatcctggcgtacgctggagcttctccatctacctatcaatccgggcagctggaatcctcgtattcccacatggaaaaacggggatcacgctatttacgatttgccctgatcaatgccactaagtatgtctgccactgggataaaacattcggtacatatcttcagaagaagatttctgaagggaaacactacaacgttgccatcactcacgccacaaagaaacttgtgcggttgatctatgcgatggaaagatccggaaagccttacaaaaaaatggcataactttttctgctctataaccttccctttgagcaccggtatacgatgctctgtttgtcatgcgattttcaaggtacaacaatatctgaaatgcgtttcagcaattcattcataaaatcttcattttagacttgacttttaatagttagt

SEQ ID NO: 5751 - DNA, 1399 bp, unidentified
  source 1..1399: mol_type = unassigned DNA; note = element_8d039c8
  misc_feature 1: note = core
  misc_feature 2..87: note = LE
  misc_feature 88..1125: note = CDS
  misc_feature 1126..1399: note = RE
  misc_feature 1177..1391: note = bridgeRNA
taatgggatggacgctcaccaccctaacggcatctaggtgccaaaatggtgatgcattaactcaccgaacgaatgggagcgtccgaaatgaaaattagcacgattggtattgacctcgctaaggaagtttttcagatccatgccgcagacgaacgcggtaaagtcgtccagagaaagaaactcaaacgaaaagagatgaccgcctactttgcgaatctggagccttgcctgattgggatggaagcatgtagcagttcacactactgggctcgtaagcttcagtcgatggggcatacggtgaagctcatggccccacagttcgtgaagccatacgtcaaaagcaacaagaacgatgtggcggatgcagaagccatctgcgaggcggtcacacgtccaaccatgcggtttgtcgggatcaaaaatgttaaccagcaaacggttctctgcttgcatcgagcgaggcgcctgctggtcgcagaaaggaccgcccaggccaaccagatacgagggttattggctgaatttggaatcgtgtcacctcaggggattcggaccttgaggaaccgcattcccgatatcctcgaggatgcggaaaacgagctgacagcggaaatgcgtgaactgctcaccatgatgagcgaacgaatcaaagacattgacgagaaggttggtgacctcgaattgaaaatcaggcagagcaaccagaggaatgaaatgatcgctgagcttcagaaaatccctgggataggtccactgactgcgagcgcagtagttgcaaccatcggagactttaaggaattcaggaatggcagggagttggctgcattcctcggaatcgtgccacgacagcattcctcaggtggcaagcaaaacctcctggggatcagtaaacgcggtgatggctacctgagaaccctcttggtccacggtgcccgctcagtgattcgctttgccgaaaccaagcaggagaaaaatgcctggctcgtcgacttgattgggcgacgaaataagaacattgccgcggttgcccttgcaaacaaaaacatccgaactatctgggccatgatgacccgaggcgagcaatttaatccagcgcatatcagtcaggctcctgtgccggtataggctcaggtaaccaataaattaacgacttcaaccaaaaggagaagacctcagcaagattgcaaaggcgatcacgtcagatggcggaacaggtaagaccgtggataactaaaccaggtaagtgcaaagcgcaaaaagcgcgcagtgttgatatggcgttatccagcgaattccattggggctaggccgtcaggccatgaaaaggccggatgtatggctgcaacttcaccgttccaaactcagataatgaccgttgcaattggtgagcgtccatgta

SEQ ID NO: 5752 - DNA, 1500 bp, unidentified
  source 1..1500: mol_type = unassigned DNA; note = element_8d08105
  misc_feature 1..2: note = core
  misc_feature 3..250: note = LE
  misc_feature 251..1480: note = CDS
  misc_feature 1481..1500: note = RE
ctaatgagggttggcgagcctgtcgtccggcagactcgtgtccggtagccgctggcaggtgagcactgttggctcttgggctccttcggggagccctacggctagatcgtgcccctgccggtgggccgggagggtagatcgctgctgggatgtcgtgccccgccgctgcggcgtgagcactggttcattaggtcgctgaaggctctcccgcgggctgccggggcaagctggcgccgaggacgggagaggcatgctgctggtgggagatgactgggccgaggatcatcacgacgtcgagctgatggactccgccggccgggtgctggccagggcgcggctgcccgaaggggcggcggggatggcccggctgcacgcgatgatcggcgagcagctcggcgaggatgccgaggcgggcggggtgcgggtggggattgagaccgaccggggcctgtgggtgatggcgctggccgcggccgggtatgcggtgttcgggattaatccgctgcaggtggcccgctaccgggagcggcatggtgtgtcgggcgccaagagcgatgccgctgatgcgcacaccctggcggacatgatgcgcaccgacgcccaccagctgcgcccggtggctgcggacagcccggccgcgcaggcggtgaaggtggtggcccgtgcgcacaagacgctgatctgggagcggacccggcaggtgcagcggctgcgccaccagctgcgcgactacttccccgccgcgctggaggcctacccggacctggccgcgcccggcacactggagctgctggccaaggccccagacccggcatcggcggcccagctgaccaccgcccaggtcagcgccgcgctcaagcgcgcccggcgccgtgacatcacggccagggccgccgcgatccgcgccgcgctgcgcggcgagcagctggcccagccgccagcggtcacggcggcctgcgccgcggtggcgcgggcgctggccgcggtcatcaccgccctcaacacccagatcaaggtgatggaggggcaggtggaggcgcattttctgcagcacccggacgctgagatcatcttgtcccagcccggcctgggacccatcctcggtgcccgggtgctcggcgagttcggcgacgacccgcaccgctacgccagcggcaaagcccgcaagaactacgcggccaccagccccatcacccgcgcctccggcaagcgcaagaccgtcatggcccggtacgtgcacaacgaccggctccgcgacgccctcgacggccaggccttcgccgccctgagcgcctctcccggagcccgggcctactacgaccgccagcgcgcgcgtggcctcagccaccggcccgccctgcgccagctcgccaaccggctcgtcggcatcctgcacggctgcctgaagacccgcacgctctacgacgaggcgaccgcctggccgcaccacgccagccaggaaatcaagcccgcggcttgacgttcaagctcctgggatgt

SEQ ID NO: 5753 - DNA, 1373 bp, unidentified
  source 1..1373: mol_type = unassigned DNA; note = element_8d0b451
  misc_feature 1: note = core
  misc_feature 2..230: note = LE
  misc_feature 231..1358: note = CDS
  misc_feature 1359..1373: note = RE
  misc_feature 4..229: note = bridgeRNA
cagtgagtatgccgtagggcctgcaccccgcccggtctgactcttcgcctgacagacctgtggtgtccttcaagggagccgtcgactgggtcggggtgcagggtccttgggcacgagctgtcggacgaagtgacctcattaggagcctgcgctatcaggcgcccatcactgtcctgtccgtcgtctggttgtgcgtgccgcccctcaacaggtgacgagaagggacggcgatgaccatggtgacagatcccgcggcggtgcagcaggtgttgtcggtgaccggcggggtggacacccacgccgacgtgcatgtggcggcggtgatcgacgcggtcggccgtgagcttggccaccgggaattcgcgaccactccggtgggctacgccgcgctgctggcgtggctgggctccttggggccgctcgagctggtcggggtggagggcaccggcatgtacggcgccgggctcacccgggtgctgcaagccgccggcgtgacggtggtcgaggtggatcggcctgaccgcaaggcgcgccgcttccagggcaagtccgacccgatcgacgccttcgccgacgcccgggccgccctgtcgggtcgtgcgtcgggcacgccgaagacgcgcaccggcacggtggagatgatccgcaccctgcgggtcgcgcgaagcggcgcggtgaaggccaaggctgtggcctggaaccagctcaaggcgctgatcaagaccacccccgacgagctgcgcgaacggctccgcggccttgacggcgctgccttgttggacaactgcgctggtctgcgtgccgcccgtggtccggctcctgagcacggtccccacgccaagcgccgtcgtcccggtgtgctggtcgaccccagcgcggcgtgcaagcgcagcctgtcggtgctcgcccggcgcatccgcgcgctggaggccgaggtcgccgacctcgacgacgacctcgaaccgctgatcaccgcgaccgccccgacgctgctggccatgtacggcgtgggcctggacgtcgccgggcagctgctcgcgaccgccggggacaacccggaccggctccgtagcgaggccgcgttcgcgcacctgtgcggtgccgccccgatctgcgcctcatcgggcaagacgacccggcaccggctcaaccggggcggcgaccgccatgccaaccacgcgctatggcgcatcgccatgacccggctgcgctacgaccccgaaacccgcgcctaccgcgaccggcgcgccaaggagcagaagaccaacaaagacatcatgcgctgcctcaagcgctacatcgcccgcgaagtccaccaagcactgctcgtcgacctcaccgccccatcagcggcttgacatccataggagcat

SEQ ID NO: 5754 - DNA, 1509 bp, unidentified
  source 1..1509: mol_type = unassigned DNA; note = element_8d0c3fb
  misc_feature 1..6: note = core
  misc_feature 7..570: note = LE
  misc_feature 571..1413: note = CDS
  misc_feature 1414..1509: note = RE
actaatctccattccgccgccttcggctggcggcgcaaatagtaatgaaagtgttccaactctctacactgtgctgtaaaatagtttgcaagaagctacactacaaagcacgggaggaggagttgtaataactttcttcgttttagacagcatactaatcagtgtaagttctgccttttcaagcacaaataagtgacatcatgaatccgtacactaagaattgtttaagcctttcgtttaattgtgtggcagttcagtcaatggcttcttatcattcacgaaaggagtctgactatgaaagttacttatcaaacctgttgtggtgtcgatgtccacaaatcttttctcgttgccacaattgtaaaaaccactggtggcattgagccttcttaccaaaagaagcgcttttccacctttaacaattcaattcttgaattcaagcaatggcttctcgacaatgattgccataatgtctgcatggaatccacaggtaaatactgagttcctgtctttaatcttctggaagatgatatcaatgttgtcattgccaatcctaaatgggtaaaggcggtgaaaggcaacaaagatgatacaaaagattctaaatggattggagatttgttccgccttggacttgtcaaaggcaattatattacttgcaagaaagtccgtattcttagggaatacactcgctatcgttacaagcttgtttcctgccgttcaagtgaaaagaatagatatcagaatgctcttaccgtttgtaatgttgcattagattctgttgtttccgatatctttgggaagtcatccacatccattatcgactatctgcttgaacaatcgggtacatctattaaccacgaagaaatcgcatctaagcttcttaggaggctcaaatccaaagaagatgctgtccagtttctctgtaccattccgggtgtcaaacgtgatagtgcaatcactgtcatctccgaaatcggtactgacatgtctcagttctcaagttctaaacgtttgtgttgctgggctggtttaacgccaggcagcaatgagtctgctggtaagaagaagtctgttcggattacacgtgccggtatctacctcaaacctgcattagtacagtgtgctcatgcagccgtaaaatctgacaaatctccttactacaaaaagaaatatgaatctcttgttaaacgtcgtggcaagaaaagagccattatcgcaattgcccgtatgattcttaccgccatctaccagatgctgtctactggcgagcagtggaatccgagcgacctttataaaatcgatatgcctgtagctcttgttgaaaaacaaaaggcaaaagctatcaagcaggctaagaaactgttgcagcgggagggactccttcctcctgatgagccattagcttcttaatccaattttttaactctataacacttcaaaaagttgcctgccttagacagcttattcaagtgcgccagtttatggctttcctctactttctttcac

SEQ ID NO: 5755 - DNA, 1583 bp, unidentified
  source 1..1583: mol_type = unassigned DNA; note = element_8d16b26
  misc_feature 1: note = core
  misc_feature 2..261: note = LE
  misc_feature 262..1461: note = CDS
  misc_feature 1462..1583: note = RE
  misc_feature 44..230: note = bridgeRNA
cgttacctttttagtagcccctctagttgagtaagaattggggtggttggcctgtcggtcccggcatgattaaatcccccagtcattgatgatccggggggtgttgtcaccggggtccgataggcgccaggggatcgctaatggggaccggaccagcacaggacaccagcgtgtaggtcagccgtaacgtggatgccgagccttgccgccgcaggacatgccaacaccgagttgcacaacacaatttctgggaggtttgcgttgatcaagagccatgaatccgtcgatatcttcataggcgtggacgtcggcaagagcaatcaccacgcggtcgcgatcgaccggcagggtaagaagctcctggatcgggccctgtcccaggacgaggggaaactccgggcgatcatcaaggccgtcgccgacaagggcaccgtgttgcttgtcgtggaccagccctcaacgatcggagccctgccggtcgccgtggcccaggccgagggcatcctggtcggctacattccgggcctggcgatgcgccgcatcgcggacctgcacccgggcgaggccaaaaccgacgcgagagacgctgccatcattgctgaggcggcacggtccctgccgcacaccctgcgctccatcgtggtcgccgacgagcaggcagcggagctgtcgatgctgtgcggtttcgatgacgacctggccaagcaggccacggccgcttccaaccggatccggggcctgctcacccagatccaccccgccttggaacgggtcatcggcccccacctggaccacccggcgatgcccgagctgctgatcaaatatccctcgccccaggcgctgcgcaaggcaggccgggcccgggtcgccacactgctggccaggcatgccccgcgggccgggaaacgctgggctgcagagattttcaccgccttgggcgagcagagcgtggtcgtcgccggaaccggcgccgcaggcattgtgctggcccagctggcggccatgctcaaacatctgcgcggcgcccgcgacgagctcctgacaaaggtcgaggccctcgtggaggcccaccctcttcacgaggtcctgacctcgatgccggcagtaggggtcaggaccgcagcacggatcatcacagaggttgccggcaaggaattccaatcctccgggcacctggcctcctacgccggtctggccccggtgacgtggcggtcagggacttcgatccgtggggaccacccctcgaaaaagggcaacaagaccctgaaacgggcgttcttcctctccgccttcgcggccctgaaggacccgctctcacgcgcctactacgaccggaaacgggccgaggggaaacggcacaaccaggccctgatcgccctcgcccggcgccgctgcgacgtcctgttcgccatgctccgcgacggcacgctctacgacgtaccggaacccagaaccacataacacccagcagctgccagccggcgggccacccaccgccggccatcccgccctgcccaaaacggctcccaaaaactttcaaaaaagtccccccaaaccccttgacgaaaaacatagggacaccc

SEQ ID NO: 5756 - DNA, 1162 bp, unidentified
  source 1..1162: mol_type = unassigned DNA; note = element_8d1bf09
  misc_feature 1..2: note = core
  misc_feature 3..211: note = LE
  misc_feature 212..1150: note = CDS
  misc_feature 1151..1162: note = RE
  misc_feature 11..220: note = bridgeRNA
cttgtcttatgtttttcctatcaatctgtaaggattgaaccagtgcccaccacgccattcttggtgagcagtggtggcggctggatcgatatgggctaggtcgtaaaggaccgtttctgagtatggtcagccgccgtcttcgcatgaggcctgaacggatacgcaagcttggatttttcatgggcttgcatgacaagcataggacatgacgatgatgacaaatgacagcataggcattgatatctcaaaggatttcctggatgcacatcgactgagtaatggagcgtcagctcgctttcccatgacaactgccggtttctgttccttatccaaatggttgggcgaggaagtactggctcgcgtcgtgttcgaggcaactggaccatatcataagaattttgaacgaacgttttcgggcaagtttcctttggtgaaggtcaatcctttgcaggcacgccgatttgcacaagcctgtgggacaagggtgaaaacggatgcggtagacgcacgtatgctcgcgaactttgggaatgccctgagacttgagccagatcagccgttagacgataaacaacacgaactcaaagagttgtttagttccagaggtgcactgatcaaggaccgcacccgattgattaaccgcctccaaacacaaaccctcgctctcgttaagagacagaccaaagcgcggatagatcaaataacccgtcagttgaaagcattacagcaggatatcaacgcaaaagtgcaaggctgtccaagccgcgcccgagccaacacgattcttcgctccatcccaggcattggtgaagtggctgctgcaaccattttaatcgagatgccggaaatcggaactctccataaaaagggagctgcgagcctaactggattggccccaatgacgcgccagtcaggaaagtggcgcggcaaagccactattcaaggtggccgaaaacaattgcgcaatgcgctctacatgcctgctctggttgccgcacggcacaaccccgacatgtgcagcaaatacaaagccatgatcgagcagggcaaaccacaaaaggtcgctctaactgcaataatgcgaaagctaattgaactcgcaaatgcattggtcaaagcagatcgtgaatgggttcaaaatggcacttgaccaagacggata

SEQ ID NO: 5757 - DNA, 1397 bp, unidentified
  source 1..1397: mol_type = unassigned DNA; note = element_8d218cb
  misc_feature 1: note = core
  misc_feature 2..7: note = LE
  misc_feature 8..1126: note = CDS
  misc_feature 1127..1397: note = RE
  misc_feature 1167..1387: note = bridgeRNA
caatgggatggacgcccccacccgtgccggcattgatgtgccaaagtggaagtgtcagcaactacttgaaccgaaaggggcgtccaccatgaagattacgactgctggcattgatttggcaaagaacgtgttccaggttcacgcagtggatgagcatggcaaggtcgcgtggcgcaagcaactgcggcgcgatcagatgacggcattcttcgtgaacttacctccgtgtctcattggcatggaggcgtgcggcagcgcccaccactgggcgcgcaccctgcagggctttggccacacggtgcgcttgatgtcaccccagttcgtcaagctctacgtgaagagcaacaagaatgaggtggccgatgccgaggccatttgcgaggccgtcaccagaccccatatgcggttcgtgccggtgaagagcgtcgagcagcaggccgtgttctcactgcaccgagcgcgccagggctttgtcatagcgcgtacggcgcaggcgaatcagattcgcagcctgctcggcgagttcggcctgctcatcccgaagggcatctgccacgtcgccaagcaagtccccgagctgcttgaagacgcgagcaaccagctgcccggaacgttccgccgactcatcgcgcgcctgaccgagcacctcaaggacctggacaagctggtcgacgagttcgaagaccagatcaaggcgtggcatcgcagcagcgagctcagcctccggctcgagaagatacccggcatcggaccgctgggagccagcgccctggttgcctccatcgcagatgcaaacagcttcgacaatggccggcagctctcggcttggctcggcctcgtgccgaggccgcattcgagcggcggcaagccaacgctccttggcatcagcaagcgcggggacgtgtacctgcgcaccttgctcattcacggcgcacgctcggccattgttgcggcgcagcgcaaggtcgtgaacaccaacgtgtggttggctggcctgctgaaccgacgacatccgaacgtggctgctgtggcactggccaacaagaacgtgcgaacggtctgggcactgctggcccacgggcgggagttccgacctaactacgtgccgcctcagctcgctgcgtagccgacccaacccatcaacacagaaggcaggagactgaaccaccgattgctcaggcaatcacgcagtgatggcaagacaggtaagaccgtggttggcgaagcccaaaacgtccggggccgtcggagtgcggacaaccgatagaggagccaaccagcaaaccccatcagggacagcggcgaaaagccgcagcgaaagtccgaatgtacgggtgcaatcgaaccttcaagtcatcaataactgaatgcctggcatattggggaacgtccatgta

SEQ ID NO: 5758 - DNA, 1502 bp, unidentified
  source 1..1502: mol_type = unassigned DNA; note = element_8d22cb0
  misc_feature 1..2: note = core
  misc_feature 3..249: note = LE
  misc_feature 250..1482: note = CDS
  misc_feature 1483..1502: note = RE
  misc_feature 14..245: note = bridgeRNA
ctaatgagttctgggagtgagccatccggcagactcctggtgggtaggtggccgccggcagacgagcactcctgtttcctggacgttgagtcctactgaaagatcgtgccgctgctggtcggtgtggagagttgatcgctgatgggatgtcgtgcccgcccggttgtggcgtgagcactgcttcattaggtcgctgatggttctccgcgtggctaccggtggtgatcggttcggaaggcgggagacgcgttgctgttcgtaggggacgactgggcggaggaccaccatgacgttgaggtgatggacgcgtccggtcgccgtttggccaaggcccgattgccggagggcgtggcgggcatgacgcggctgcacgtgatgatcgctcaggcgctcggtgacgacgtcgacgccgatgacgacaccgtccgggtgaagatcggcatcgagaccgatcggggtccgtgggtgcgagcgttggtcgccgcggggtacacggtgttcccggtcaatccattgcaggcggcccggtatcgggaacgcctggcgctgtcgggggccaagagcgacgcggccgacgcgcacatgctggccgacatggtgcgtaccgactcgcatcagctgcggccgatcgccggggacagccccgaggccgaggcggtcaaggtcgtcacccggatgcacaagacgttgatctgggaacgcacccgcgccggtcagcggttgcggcacgcgctgcgggattacttcccggccgcgctggccgcgttcgaggacctggacgccgccgacaccctggaactgctcgcgaaggcacccgacccggccgccgccgcgcggctgagcatcagccagatcagcgcggccctcaaacgggcccgccgccgcgacatcccggccaaggccgcggcgatccaggccgccctgcgtgtcgagcagctcggccagccggccgtgatcgtcgccgcgtacgccgcgacggtgcgggcgctggtcgcgttgttgggcaccctcaacgagcaggtcaaggctctgcaggggcaggtggaggcccattttggtcggcacccggacgctgagatcatcgggtcccagcccggactcggtgtgattctcggcgcccgggtgctcggcgagttcggcgacgaccatcaccggtacgtcaccgcgaaggcccgcaagaactacgccgcgaccagcccgatcacccgggcgtccgggaagaagagaaccgtcgcggcccggttcgtgcacaacgaccggctcgtcgacgcgctgatgacccaggctttcgccgcgttgaaagcctcgcccggcgcccgcgcccactacgaccagcaacgcgcccgcggcgtcagccacaacgccgcgctgcgccaactcgccaaccggctcgtcggcatcctgcacggatgcctcaagaccagcacccgctacgacgaagcgactgcctggtcgtatcacctcaacgaggctgctgcttgacattcaagctcctgggatgt

SEQ ID NO: 5759 - DNA, 1458 bp, unidentified
  source 1..1458: mol_type = unassigned DNA; note = element_8d38c32
  misc_feature 1: note = core
  misc_feature 2..240: note = LE
  misc_feature 241..1443: note = CDS
  misc_feature 1444..1458: note = RE
  misc_feature 9..238: note = bridgeRNA
cgttaccttcttcgtggccccgcgatggggctcccggtctccgggcctggcatgacttgtgccccctgtcggttcatgatcgaaaaggtggtgtcaccaagcccggaggcatcggcagaccgctgatgaggggcatgaccgccgacctccgtcgagggcggcagaggtctccgtaacgtggatgccggcacgctgatgccgcaggtgggaccgggaacgacacagctgtggagatgacacgtgaccgacaccagcggcatcggcgtcttctgcggcctggacgtcggcaagggcgaacatcacgccaccgccgtcactccagccgggaagaaggtacttgaccagcggctgcccaacagcgaagcgaagctccgggagataatcgaccgcctccagtcccggcacggcaccgtgctggtggtggtcgaccagcccgcctccatcggcgctctgccgctggcagtggcccgtgacgccggctgcaaggtggcctacctgcccggactcgcaatgcggcggatcgccgacctctatcccggcgaagccaaaaccgacgcccgggacgcgttcgtcatcgcggacgccgcccgcaccatgccgcacaccctgcgcgacctcgccccggacgacgagaccatcgccgagctgcacatgctcgtcggattcgacgacgacctcgcccaggagtccacccgcctgaccaaccgcctgcgcggactgctgacccagatccatcctccgctggaacgggtactcggccctcgcctggaccacccggcagtccgagccatcctcgaacgcttcggctctccggccgccatccgaaaggccggacgccgtcagctgctccgcctgacccggcccagggccccgcgcatggctgagcgcctggtggacgacatcttcacggccctggacgagcagaccgtcaccgtcccggggaccgacaccgccacgctgatcctccccagcctggccggctcattgggatccgtccacgatcagcgcgggctcctcgccacccgaatcgaggagctgctggaggcccaccctctttccaaggtcctgacctccctgcccggcgtcggggtcaggaccgcagcccgcatcctcatcgacgtcggcgacggctcggccttccccaccgccggacacctggccgcctacgcgggcctggcccccgccacccgcaccagcggctcctccatccgcggtgaacacccctccagacgcggcaacaagctcctcaaacgcgccttccacctctccgcgttcgccgcgctccgggaacccgcctcccgcgcctactacgacaagaaacgcgccgaaggcaaacaccacgtcgccgccctcacctgcctcgcacgccgccgcatcgacgtcctgttcgccatgctccgcgacggcaccctctaccagcctcccgcaacgtcagcggcttgacgaagcacatagggg

SEQ ID NO: 5760 - DNA, 1445 bp, unidentified
  source 1..1445: mol_type = unassigned DNA; note = element_8d4e50c
  misc_feature 1: note = core
  misc_feature 2..109: note = LE
  misc_feature 110..1138: note = CDS
  misc_feature 1139..1445: note = RE
  misc_feature 1147..1414: note = bridgeRNA
gaatggaagggacttcccagtccccgactggccgcattgcggtgaccggcgacagagtgccacgatgggaagtccgaactctcatcaactcacttcgaaggggaagtccatggctattctgttcgttgggatcgatctcgccaagaacgttttcgcggtgcacggcgtagacgagcgcggcaaggcagtgctggttcgaccgagcgttgttcgagccaggctgcacgaactcattgcctctttgccggcctgcacgatcggcatggaggcgtgctctggtgcgcaccactgggcacgtctcttcaagcgtcacggccacaccgttcggctcatggcgccgaagttcgtcgcgccgtatcgcatgagcggtgcgcgaggcaagaacgacgccgccgacgccgcggcgatttgcgaggcagtgcaacggccgaacatgcacttcgttccggtcaagagtgaggatgaacaagccaggctatgcgtacatcgggtcaggcaaggctttgtcgagcagcgcactgccacgatcaatcgcttgcgtggcttgcttagcgagttcggcatcgtcttgccacagaaggctgcgaccattcgtcgtgaggcgaccgcgcgtctcgaggatctgccgggctgggccaacgccgcggtgggcgactccttgagcgaggtgcatcacctggacgagcgcattgctgagtacgaccgccatgtgagtcagatggccgctggcgacgagcgcagccgcagactgatgcagctccaaggtgtgggctgcacgaccgccagcgcgctcgtcgccaccatcggcaacgcgcatgacttcaagaacggacgccagctggcggcgtggctgggcttggttccgggtcagtacagctcgggcggtaagacccgcctggggagcatcaccaaggccggtgatggctatctccgaacactgctggtgctgggggcgaagtcagtcttggccgcagccaagaacaagcaggaccggctcagtcgttgggccgtatcgctgcaagagcgacgcggctactggagagcagtggtcgcgatcgcagcgaagaatgcgcgcatggcttgggcagtactcgccaagggcgaaggcttcaagcccctggagccggaagcgacatagaaccgattcacaccaccgcgtgacgaagaagcgttgatgagttaagggttggacccgcgccgggaaggctcgacgatatctcggagcaatcgcaagatgtctcggctaacgaatggagccccggcgcgcgtctttcatcagggtccgcagccttagcgctgcacgaatgaccgtttgtagttttgcagtccgcactcttgctccgaccacgcccgagtccccacggtggaggatctacctctcttggtgcgtcgctgcgcggcccgtcaaggcttgagctcgcttgacagtgaggaaagcccttgta

SEQ ID NO: 5761 - DNA, 1426 bp, unidentified
  source 1..1426: mol_type = unassigned DNA; note = element_8d543d6
  misc_feature 1..2: note = core
  misc_feature 3..134: note = LE
  misc_feature 135..1163: note = CDS
  misc_feature 1164..1426: note = RE
  misc_feature 1178..1357: note = bridgeRNA
acatggggtaatcgcggatcgtactgaacccttttacgacttggacgggcgatatcggtgccatcaaagttcggcgctaagatgaagcgctggttggggaagtagcctgatcctgcctatgacggaggacgaccatgagcgcgtatgtcggtttggacgtttcgttgaaagagacagcggtatcggtgcgacggggcggcaaacgcatctggcgtggaaaatgtgcgtcagatccgaaggttttagctgatttgatccgcgcacgcgcgccggacgccgagcgggtcgtattcgaaaccggtcaattgtcgacgtggttctaccatgcgctcaaggccgatggtgttcctgccatctgcattgatgcgcggcacgcgaaagctgcgctggatatggccgcgaacaagacagacgcgaacgacgcggatggtctggcgcatattgcagaagtcggcttctaccgggaagttcgggtaaaggggttcgagagcatgctgatgcgtacgctggtcgcggcgcgagatcagattctcaaagtgatcgtccagatgtcgaaccagattcgcggactgatgaagacctttggcctagtcgtgccgaaaagtgctggtggtgcttttgagggccatgtccgtcgattactggcggataatacccagcttgaacggatcgtcttgccgatgctcgatgcctggcgagggttgcgtatgcaggctgctaaacttgatgggcaacttcgtgccgcctcgcggttggatcaacgatgcgctctactcatgtccattcctggcatcggtccggtcacggcgtcttcgttcgtcgcagccgtggaagaacctggcaatttcaaatcatctcgtgcggtaggcgcttggcttggtttgacgactaggcgctaccagtccggcgaagtcgattacggcggccacatatcccgtcggggagatccgcgcctccgcggcctgctttacgaggccgctgtcgtgatcctgacgcgttcgacgggcgaaagcactttgaaacagtggggtgtcggattgagggaacgtctcggcttcaagagagcagccgtggcggtcgctcgcaaacttgccgtcatcatgcaccgtatgctgcatacaggagagcttttcgaccggaccgctggcgctgccgtcagctgacaacagcttgaccgaaatgccagcctgaggatgcccctgccggggcgtaggccggatcattccgctatgtccgttgcgagaggcgacactgcctgaatgcgcatagaacattggaagatccgcttttacgaaaacccatcctgcggcgccaaatggcgaccgcgtagacgaccatgtaccggcagaagcagtcatcagatgatgtttttaacaggtaggaaatgcgcccgatgaaatctccttgaccccaccgcgattagacg

SEQ ID NO: 5762 - DNA, 1452 bp, unidentified
  source 1..1452: mol_type = unassigned DNA; note = element_8d58da8
  misc_feature 1: note = core
  misc_feature 2..228: note = LE
  misc_feature 229..1434: note = CDS
  misc_feature 1435..1452: note = RE
  misc_feature 1..232: note = bridgeRNA
cgttacctttttcgtagttcctgatcaaggagctgtggtcgccaggttcggcatgactgatgcccccagtcgagtccatgatccggggggtggtgtcaccgggcctggcggcatcgagggaccgctgaatagggacacggccgcccgcagggcaggtctcgtcgtaacgtgggtgccggccatcgatgcctgaccggcgaccacccgtgacggacgaaagaaccgtgcatgaccagcagtttcggcgtgttcctcggtctcgacgtcggcaagggcagccaccacgcggtgggcctggatccggtcggtaagcggctgcatgacgggcccttgcccaacagcgagcccaaacttcgcgcgttgttcgacaagctcgcccagctcggtccgctgctggtcgtggttgatcagccagccacgatcggcgcgctgccggtcgccgtcgcccgcgcagccggtcaccaagtcgcctatctgcccgggctggcgatgcgccgcatcgccgatctctacccgggcaaggccaaaaccgatgctcgcgacgcgttcatcatcgctgatgcggcccgctcgctgccgcacacgctgcgcccggtcgacgtcggggacgacaccctggccgagctggaggtgttggtcgggttcgacgacgacctggccggcgaggccacgcggatcgccaaccgcatccgcggcctgctcaccggcgtccaccccgctctcgaacgcgcgatcggcccgaagatcagtcatccggcggtcctggaaatcctgtcgcgctgcggcggccccaccggaatccgcaaggccgggcgccgcaaactcaccgcgatcgcgaaggcccacgccccgcgcatgggcgacacactcgtcaccgcgatccttgcggcactggacgagcaaaccgtcaccgtccccggaaccaccgccgcggacaccgtgctgcccagactcgccgacagcctcaaaaccgtgctcgagcaacgcacacaactcgccaccgaggtcgaggagatactcgatgcgcaccctcttgccggggtcctgacctcgatgcccggcatcggggtcaggaccgccgcccgcatcctgctcgagatcggtgacgcctccaacttcgccagctccgcccacctggccgcctacgccggcatcgcaccggtcacccgcacctcgggcaccagcatcaaaggcgaacaccccgcccgcaccggcaaccgcaaactcaaacgcgcgttcttcctcgccgccttcgccgcactgcacgacccgaccagccgcgcctactacgaccgcaagagagccgagggcaagaaacacaacgccgccctcatctgcctcgcccgacgccgctgcgacgtcctctacgccatgctccgcaacggcacccactaccgacaccccgaaccagcccacgccgcgacagcggcttgacgaacccatagggacacc

SEQ ID NO: 5763 - DNA, 1467 bp, unidentified
  source 1..1467: mol_type = unassigned DNA; note = element_8d5a662
  misc_feature 1..2: note = core
  misc_feature 3..27: note = LE
  misc_feature 28..1206: note = CDS
  misc_feature 1207..1467: note = RE
gaggtggcatgaaagaggccgcgcccgttgagagaacggatcactgagatgcaggtgatgatggagggacagccacacttccagcctttcggcttaccttattggggtttggtagatctcaacaagggagttggaagcatgactgcctcttatgaataccatatcggcgtcgactatcacaaatcctacagccatcttgtggtgcagaattcggctggtaagacgctgcgctctggccgggtgaagaacgatcgtcagtcgctgggtggatttctggaacgataccgtgagagctcgcatgcggttgtcgaggcgacgcgcaactggatggtgatgtacgactggctcgacgacatttgtgatgatgtcgtcctcgcccatccgctgaaggtcaaggcgatcgccgacgcgaagatcaagacggacaagatcgatgcgacggtgctggcgcatctgctccgggccgatttggtgccggaggcctgggcaccaagcgagaggtcgcgagaccttcgcgtcgcgctgcgcgagcggatgttttacgtgcggttgcgcacgatgacgaagaaccggatcgtcacggtgttcgaccgttacccggagcagacggcgcagttgaagaagctcggcgaccttttcggtaaggccggccgtgcccagctaaagcaggtgaacgtctcggagatcgaccgcatccaaatcgaccgcggcctcgccttcatcggcgacatcgatgggcgcatcaaacagtcggaagcaacaatccgggcaatgactaaggccaatgccaacgtcaagctgttgaagacgatccccggcatcggtgagttctttgcgaggctgatcgatgccgagatcgacgacatcagccgcttccgtaacccgaagaagcttgctgcctatgctggcctggtgccgtcgacttattcgagcggcggcaagacctttcacggcaagatcatcaagcagggcaacaagtggctgcgctgggctttcgtcgaggcggtaacgcccgccatcgccagcgatgctcagcttcgcgcccaatacgaacacctgaagatcagaggcattaataaagcgcgtgttgccatcgcgcgcaagcttttgacgatcgctttccagatcctgcatgatcagcgtgcttacgagccgcgcggcgccggtcctatggaaggcacgtcgacgatatcccggttgtcctgattgcagtttagcgggctcggcaggactgagccgcgctctcaaggagaatgggaaaccgggagccgaacgccactctgtgaccgaagccgcgaaggcatcaggatcacgcattggagattggttcgagaaccgaacggcagatgcctgtcgcgcggaagcgagagattgagccgatcggcgaaaatgccggtcaaaaagcaactgaacccaaggaaatgcccgcagatgctggtgctttaccccttgtgttctttcattgga

SEQ ID NO: 5764 - DNA, 1442 bp, unidentified
  source 1..1442: mol_type = unassigned DNA; note = element_8d6c494
  misc_feature 1: note = core
  misc_feature 2..247: note = LE
  misc_feature 248..1414: note = CDS
  misc_feature 1415..1442: note = RE
  misc_feature 32..230: note = bridgeRNA
tttttccctcctagttaaatttggttaaaaatatattattatataacttaagttctttgaaaaataaatttttaaaaaagaaaaagggagatgggaacaacattttccctgggcgaaatggcccataaaggagtctgttttctctccctttagtcccatataggttgattggggaataaaaccccatctgaaccgggaggttgggataaagggagtttcctctccctaaacaaaaggaggtgatattatgaaaaattttgattattctatcgggatagatgtaagtaaagataatttcgttgtctctattattaaggaggactattttataaaaactaatctctctttctctatggataaggcaggttttgaaagtttcctctattctacacatcaatttaaagattcttctatttgtgtttttgaaccaactggaatttatcatacaaatctttttaattttctcaaaataaatgggtataatgtatctatggttaatccttacaaagttaaacaattttttaaacttaaaaaaagtaagccaacaaaaacagataatattgactctaaagtattggctgaatttgctcagtttaatcaaaatacaactcaatctatatctgaagaaaaagaaaattttagacaacttataagagaaaaagaaaatatatctactcaaatcgctcaaattaaatctgaaattaaaagattgctttatcttctttttcctgaaattgtaagaaatggaaatgccttttcttctggtattatctctatactcaaaatctttccatctgcctgggctattaaaaatgtgtctgaagaaaaatttatatcctctgttgaaaaatatctccctaaaaagggtaaaagacccgatcttaaacttatttatcagatggcaaaaaattctattgcttatcactatcctcattatgaaaaaattcttaaaatgaaaatagattaccttgctttccttgaaaaccaaaaataccaacttgatcaacttattgaagagttcgctgataaactttataaaagagaaatagaaatacttacatctatcccgggaattgctaaaaactctgctatatatttcataagtgaaattatggatattagaagattccaagatgctaaaaaacttataggatattgcggtcttgaccctgtaataaaacaatctggaaaatataaaggacagtggaaaatatctaaaaagggaaatagtcacgcgagaagaattgtttttattatggccagttccgttagaaaaaactgcccttattttgaacaatattatgagaaaaaaagaaatgaagggaaatcttatatggaagcagtcatagctacttctacaaaattgattagagttatttattctttgctctttgaaaacaggtcgtttatttaattttcccatttttatttatatagttgac

SEQ ID NO: 5765 - DNA, 1280 bp, unidentified
  source 1..1280: mol_type = unassigned DNA; note = element_8d6e965
  misc_feature 1..2: note = core
  misc_feature 3..197: note = LE
  misc_feature 198..1178: note = CDS
  misc_feature 1179..1280: note = RE
  misc_feature 17..204: note = bridgeRNA
cttgtattatccttcctgtgcagaaagagccggccagctctttctgccatgcagtccgcatgccgtaccgggcctgaggctcacaacctgtaccgtagatttatgcagcggactgccgttctccacaagtgacagaccggacagtatcatggaccggtttattcccggtaacccgcattcacaaggttggtttcactatggaacaggaacttcactatatcggtatcgatgtctctaaagcgaagctggatgtcgatgtgctgcggcctgatggtcgtcaccgcagcaaaaaatttgccaacaccccgaagggccacgatgagctggtccgctggctgaacagccatcaggctgccccggcccatatctgcatggaagccaccagcacctatatggaagacgccgctgcccgcctcagcgatgccggcttcactgtctccgtcattaatcccgccctgggtaaggccttcgcgcagagcgaggggctgcgcagcaagacggatgcagttgatgcccggatgctggcggagttctgtcgccagaagcgtccggcggcgtgggaagccccccacccggttgaacgtgcgctgcgggcactggtgctgcgccaccagtcgctgacggacatgcacacccaggagctgaaccgtcaggatacagcccgtgacgtgcagcgcccgagtatcgacgcccatcttctgtggctggaagcggagctgaagcgtctggaaaaacagataaaggacctgacagacgatgacccggacatgaagtaccgccgcaggctgctgaacagcatcccgggtatcggggagaggacgtcagcggttctgctggcgtacatcggtctgaaggaacggttcggtcaggcaaggcagttcgctgccttcgcggggctgacgccgcgaaggcatgagtccgggagcagcgtgaggggcacaagccggatgagcaaagcgggtcatgtatcgctgcgcagggcgctgtacatgccggcgatagtggccctgtataaaaccgcgtggggcagggcgttcaggcagcgtctggaaaataacggtaagggagccaggctgataatcggggcgatgatgcgcaagctggcgcaggtggcctggggggtgctgaagtcaggcgagccgttcgatgcatcaagacactgcggcgtaacggcttaaaggcatgaagggaagaaacaacagcgcctgacggcgctgtggctggcatgcctgcaatccgggaacccggtacataaaaaagcttgcaggcgataacagtat

SEQ ID NO: 5766 - DNA, 1378 bp, unidentified
  source 1..1378: mol_type = unassigned DNA; note = element_8d768d6
  misc_feature 1..3: note = core
  misc_feature 4..45: note = LE
  misc_feature 46..1110: note = CDS
  misc_feature 1111..1378: note = RE
  misc_feature 1112..1366: note = bridgeRNA
atgatggtgtggatggctcctcccccgacggcatcgcgatgtgccatgctggtgctgtcatcgaccaacaaaggaatgggagccacccacatggagattacaacactcgggatcgatatcgccaagtccgtctttcaactgcacggcgtcgacgccgcgggtcaggtggtgctgaaaaagcgcctgcgccgaaatcaggtgctggagttcatggcccagcttccgcgttgtctggtgggcatcgaggcctgcgggacatcgcatcactgggcgcgggagatcgcggcgctcggccacgaggtccgtctgatcccgccggcctacgtgaagccctacgtaaagcggcagaagaacgacatggccgatgccgaggcgatctgcgaggcggtgacgcggccgaacatgcacttcgtgccgatcaagacgccggagcagcagggcgtgctcattctgcatcgcacccgcaagatgctgtcgcgccagcgcaccatgatactcaacgccttccgcagtcaccttgccgagttcggcatcgtcgcgccgaaaggcccgtatcacgtgatgcaactggccaaggcgctgcgcgagggagagcacgacctcccggaggtcgcgcgccgggcgctgatcgggttcgccgaccagctcgcggcgctggccgcggagatcaagtcgctcgatcggcagctccgcgcctggcacgccgacaatccggtcagccagcggctgcagacgatccccggcatcggcgtgatcacggcgacggcgctcgcggccagcattcccgacgcctcggtgttcaagtcgggccgtcacttcgccgcattcctcggcatcgtgccacggcagaactcgaccggcggcaaggatcggctcgggcggatctccaagatgggcgatccctatttgcgaaccttgcttgtgaatggggcgactgccgtgatccggcggatcgagcaagcggagggccggaccgcaatctggatccggcggctgctggacaggaagccggcacgggtcgcttcggtggcaatcgccaacaagactgcgcgcatcgcctgggccgtgatgttgcgcgaagaagactacagggcgcctgcaatgggctgagaaacagtgcggtgcggataacttgcgcgccgcttgacttgcgagggcatggacggtgatgatgatccgataggaaagaccgtagccgggacaccccgaagcagttgcctgggcatcattgctcgtcaacatgattgggacccggcctgcggacttcatcaaggccagcggtcagacagtaccgcgccaacaggccgaacacatgaccgcaatccgcagagatcacggtcacccgaaatatcccttgcaaaaccggagccatccacac

SEQ ID NO: 5767 - DNA, 1367 bp, unidentified
  source 1..1367: mol_type = unassigned DNA; note = element_8d77b2e
  misc_feature 1..2: note = core
  misc_feature 3..76: note = LE
  misc_feature 77..1102: note = CDS
  misc_feature 1103..1367: note = RE
  misc_feature 1086..1354: note = bridgeRNA
tgatggggtggacgccccctgacggcatcgctgtgccaaagtggtgtcgttgatcatcacttgaacggaggcgtccatgtcggaagttagcataatcgggttggatctggcgaagaacgtgttccaggcgcacggtgcagatgcatcgggagttgccctgtttagaaagaaacttcgccgcgatcaggtgcttaaattccttgatgggcagccggcttgcacggttgccatggaggcttgcggcagcagccattattgggcgcgggagatcacgaagctgggacatgatgtccggctgatcgctccgagctacgtcaagcccttcgtgaagaggcagaagaatgatgcagctgatgcggaagcgatctgcgaagccgcgcaacggccaacgatgcgtttcgtgacggccaagagcgagaagcaacaggctgcagcgatggtgtttcgcgctcgcgatcttctggtgcgccagcggactcagacaatcaatgccatacgtggtcatcttgccgaattcggtctggtggccgcgcagggcctattccatgttgccaagcttgcaatcgcgattgaggatgaaggctccgccattccagaggccgcccgtccgatcctgtttttgctcctggagcagttgcgctcgctggatgagagggtggctttgcttgaccgcgagatcgcccggcgtgccagggaagatgaagacgccagacgactcatgacaatccccggcatagggccggttaccgcgacggctctttctgcgttggcgccttctgccccaatcttcaagagagggcgtgatttcgcggcatggctcggcctcacgccgttgcaacgctccacgggcggaaagcagaagctcggtgagacctcgcggatgggcgagcgaaccctgcgccgactgctaatcataggggccagcgctgccgtgcgttgggcaatgcgtaagggcacgacggcagatccctggctttcgcgcatgctgagccgcaagccgcccatgctggtgatcgttgccctcgccaacaagacagcacgcattgtgtgggcattgatggccaaaggcggaacctatcggccgcccgggatggcggggtagtctggtccgcgcagccggcggactgccgaagtgtgagaaggtcgaacggagagtatggcgcaacggtcaatgagacgggatcgggaaaaccaggtcatggatacgcgccgtgagcgcgcgagattgaattggacccgctccgcgaactcccatacgggcccgcggcacgtcgaacgccgcatcggaggccggacacatgtcagcacccgaccacgctccgagctcttcaaaagattcttcttgcatcgacgggggcgtccacaca

SEQ ID NO: 5768 - DNA, 1580 bp, unidentified
  source 1..1580: mol_type = unassigned DNA; note = element_8d8012d
  misc_feature 1..2: note = core
  misc_feature 3..289: note = LE
  misc_feature 290..1468: note = CDS
  misc_feature 1469..1580: note = RE
  misc_feature 10..268: note = bridgeRNA
gtataatgtatttaggttgttcaagggatacctataaacccttagacctacttctttacatctccagtctgataggagataattgttttattagattgagaggatgatcgttttctccttgagcgcctctgctcgtacttgaaagactgatgcctctctctaataagctttccacgtatgagttggatgttggttgccgcatggtttctctccgtatttagcacaaggtagtggcgcttattagttgagtggcctcccaatctgaaatcttttttctgaggtgttttttatgttttttgttggtattgatattggtaaaaacaatcatgtcgcttccatgatgaatgaatctggaaaggttgtattcaaggctttttcctttcccaatacttcggatggtgggaattccttgttttcaaagctctcttcttattcttccagtacctccgactttgaaatcggtatggaagctaccggacactactggctctctgtttactcttttctttttgaaaagggctttcttctccatgtcatcaatccgattcagactgacggctggcgcagaggcacagaaatccgcaaacgcaaaaacgatatcatcgattctcttctgattgctgacctgatccgttacgggcagtttgtggaaaccaggcttgcagacgaggatttattctctctgcgcaccctgacccgtttccgcacttatcttgtggaatccatcagtgacttaaaacgaaaggttgtctgtgtgctggaccaggtttttcctgaatatcagtccatcttttccaacattttcggtaagacctcaaaagaaatccttctccagttttcttcgccaatcgattttgaggcggtttcatcggaaacactggccgaactgcttgcacagctcagcaggcagaaagttggtattgcaaaagcacaacagataaaagctgctgcatccagttcttttggcgttacctttgccaaaaacagcttcaccttccagctcaaaacgctgattgaacagatttcttttatcgaaaaacaggtaaaagaaacggaagcagaaatttccggtattatgggaaaactggaatctcctattactaccattaccggaatcggcagtgtcacaggtgcagccatcatcagcgaaattggcgatatctccaaatttgacagtcccagaaaactggtagcttttaccggtctggatgccactgttacgcaatccggtgaatttgaagcagtccacaatgtaatgagcaaacgtggatcaccgtatttgcggaaggccatttttcaggcagctttgattgcctcctttaaagaccctgtattaagtgcctattaccagaaaaagagggccgaaggcaaacatcatctgacatgcgttggtgctgttgcgagaaagatgtgcaacattatttatgccgtactgaaaaacaatcagccttacgttccaaaagcttaaatccttgttctcccattccggcttgcctgacagcaggccttattgtcgtactcttttttcctacaaaatttcttttgactttttcaattatctacttgacttttaatagttg

SEQ ID NO: 5769 - DNA, 1216 bp, unidentified
  source 1..1216: mol_type = unassigned DNA; note = element_8d82173
  misc_feature 1..2: note = core
  misc_feature 3..194: note = LE
  misc_feature 195..1181: note = CDS
  misc_feature 1182..1216: note = RE
  misc_feature 8..197: note = bridgeRNA
cttgtatcttgcaacgatgaatagttagctacttttcatcgtttggagtcagtgaggatgtttgaccactaaatgctcagacattgtaatgtagataatcccctggcttcaattttcttccacactggatggtatccaagcgccctatttaactaggtgacgctgcatgtacaagtaaagtcggtaggttaatgatgactaaatatgtaggtattgatatcggtaaagagcaagttgatatctgttggctgaaagaccccgaaacaggtaaaactaaaacaaagacatttaaaaataaacccgaagtatttcctagtatttgtctatggcttactagtcaaacggaagaaaaccccagtcagattacgatcctattagaggcgactggtgtttattacgaagcactcagttattttttatatgatcaaggattccagctgattgtttcaaatccaggaagagccaaaaaatttgctcaatcaattggcttgatccataaaacagacaaatcagattcgattatgttggcgaagtatggctttgctcaacatcatgggctaacactatggaagcctgaaagtattgaagtgcgagggctaaaggctatgatgcgacgtcttagttccttagaaaaagactgtcagcgagagaaaaaccgtttagaagctagcgccatcagtgatagttcggatcgagtattactatcattaaaaacgatgattactgtactggaaagcgagattacagcgctgaaaggtgatattgacagtcatattgatcagcacccagagcttcggaaaaacagacaattactactaacaattaaaggtgtgggcgaagttgttgcacgtgaaatggtttatttatttgcagccaaatcttttagcaatgctaagcaggttgcagcatatttagggttaattccaaaactcaatgagtcaggcgctttcaaagggcgaacaacattgagtaaatcaggcccctctagaatcagggctaagctgtacttggcatcagtttgtgcgagcacacataatagtcaaattaaagcacagcgtgatcgattaattggcgcaggtaaaacaaaaatgcaagctctgtgtgctgcaatgagaaaactcgtacagatgtgttttggggtgattaaaaaccaaacagaatatcaggttcaagcgccgtgatttagacgcttgagcttaattgcgagagatggtat

SEQ ID NO: 5770 - DNA, 1532 bp, unidentified
  source 1..1532: mol_type = unassigned DNA; note = element_8d82e2d
  misc_feature 1..2: note = core
  misc_feature 3..244: note = LE
  misc_feature 245..1411: note = CDS
  misc_feature 1412..1532: note = RE
  misc_feature 3..224: note = bridgeRNA
ctcgtatgctagattattaatagttccttattctgttcttgaatgagtatactgtttatagacactgtggattagttgaactttcctaacgctttgacgtttgttcataggctctaaccacagttgtctgcttcaatgttaatcacttagataacgcttgacgttttatttcgcacgaggctacattgcagacagttctgtgggttcaccatacagtgtcaatctattacaaaggagtactattatgatctacattggtattgatgttgccaaagataaacatgactgccttatttctaattctgatggggaaattctttttgatcactttaccatttctaattctctggaagggtttgacttccttttttcccggattcaagcctcctctgactctgcttcacaaataaaaatagggctggaagcaaccggtcattacagcagcaacatcttagagtttctcgttaacaaaaatcttcccattttcattcttaatccgttacataccagtctttacagaaaaagtctaagctttagaaagacgaagacggataaggccgatgttcactctatcgtatcgctgcttatgacgcagaagctaacgccctacatacctgcatcataccatagaagagaacttaagtcactaaccagataccgcttcaatctcgttcaggactgttctgtcttaaaagtttctttttcaagacttatgaacctgatctttcctgagttagaaaagattgtccaccaagtacaggtgaattctgtctatcagctcatgtctgaatatacctctgcttctgctctttcaactgcgaatctaacccatcttacaactcttcttcggaaatattccaaaggacactatggacgggagaaagctatcgaaatacgcagtgccgcaaagcagtccattggaaccagcgatgggatactaagcctcgaactgcagcaaacccttgtccgtatcaggcttcttcaagaacagatcagcattgttgaagcaagaatcaaagaaatcatcgaagaaatagattctccctttattacaatccctggtatttcctacatgactgcggcgatgatccatgctgaagttggtgatttttctaatttttcatcagccgaaaaaatactcgccttcgctggtatggaaccctccatttatcaatcaggacaatctacctctactcatgcaagaatggtgaaacgaggttcaaaatacctgcgttatgcactctttactgccgctaaaaatgttggcaactgggatgatactttcaaggaatttcttcagaaaaaactctctgaaggaaaacactacaatgtagcagtatcccatgtagccaaaaagcttgtccgaactttgtacagcatggaaatgaaccataccgcatacataaagtaattttattttctatcacattttttcaaagcagctgtgaaggtgctttatttgtcatgccattatcaaggttctaaaagaacatacttaactaacttttaataaaacacttgacatagttagt

SEQ ID NO: 5771 - DNA, 1222 bp, unidentified
  source 1..1222: mol_type = unassigned DNA; note = element_8d86a31
  misc_feature 1..2: note = core
  misc_feature 3..209: note = LE
  misc_feature 210..1124: note = CDS
  misc_feature 1125..1222: note = RE
  misc_feature 12..191: note = bridgeRNA
cttatctgatcggaatctggcagcgtaggtgccgagagccgtcgtgggccgccgtgtaagcctggatctcgacgatcgccatgtagcttggcgcccacgccggaatctcccttgatccgcccgaacagttgctggagctgacactcgcagtgataagactgggcaagcgggggagctctcgacccttccagactatacggagtccggtgatgaacgggatcggtgttgatgtcagcaagcgccaactggatgtcggcacgacggacggagagatcctgcaggtcagcaatagcgcttcgggttttgctgaattggatctctggctgaggaaacatccggcgagccagatcgtgctggaagccacaggtggctacgagcggccggtgctggattttctgcacgtggcgggccatccggtggtccgcgccaatgccctgcgggcccgtaggctggcccaggggttgggtcagctggccaagaccgaccggttggatgcctatgcattggcgcagatggcggccctggtcaaactgcccgcctaccaaccgctggagccttggcagcagaaaatgcgggaattcgtacgggcacgtcgacagacgatggaagccctgaccgtagcgcgacagcagcaggagatggtgaccgatcgcgagttgcgccgactgctgcaagccaacatcagtcgcctgcaggggatagttgggcgcctgggaaagcagattgccgagcaggttgcccagcagcctcaactggctgtcctgaagtcgatgaagggcgttggcccgggcttgcaggcggtactggccagctatctgccagagcttggcaggatcagcggcaagcgcatcgccagcttggtcggggtggccccgatgtcccacgacagcggaaccatgcgtggcaaacgaagcatccatggcggcagggccgagatccgtcaggtgctttacatggccagtatgtcggccatgcggcatgaacctcgactgcgcgacttctaccagtcgctgcgagcccgaggcaaggaaggaaaagtagccatcgtggcggtaatgcggaagatgctggtgattctcaacgcccgggtgcgcgacgcccaaggtggatcgatccccgcctgaagccagccccgtgcgcgctgcaagaggctgccggccagcggccggcactaccgtgcgcgactgtcggaggggccgaggcccctctctcaacacagttg

SEQ ID NO: 5772 - DNA, 1498 bp, unidentified
  source 1..1498: mol_type = unassigned DNA; note = element_8d97995
  misc_feature 1..2: note = core
  misc_feature 3..425: note = LE
  misc_feature 426..1244: note = CDS
  misc_feature 1245..1498: note = RE
  misc_feature 6..237: note = bridgeRNA
ctaatggcatttatcgggcctctttggcaggctcggttccggtagcggccggcgggtcagcactccactcatctgacctcgcaggtcttgcggcagaccgtgtgcccgctggtcgtgaggaggcgaaatcgctgctgggatgacgtgtcccgtgtgttgcggtgagcacttggccattagatcgctggctgtctcctccacgctgctgaccgtgtccgaatcgattctggaggcgcgatgttgttcgtgggagatgactgggccgaggaccatcacgatgtcgaggtcgtcgatgacaccggccgggtgctggcacccaggcggctgcccgagggtctggacggggttacccggctgcatgccctgatcggcgagcacaccccggttgagtgggcagacctgggccccgaccgcgggccgcggccatggtcaaggtcgggatcgagaccgatcgtggaccgtgggtggcggcgctggcagcggccgggtatgaggtgttcgcgatcaacccgatgtcggtggcccggtatcgggagcgtcactccacctcgggtgcgaagtccgatgccgccgacgcgcacctgctggccgagattgtccgtgtggaccgggcccatcatcgaccgctggccggcgacaccgcagaaggtgaggcgatcaagttgaccgcccgggcccaccagagtctggtgtgggaccgcacccggcacatgttgcgtcttcgctcggcgttgcgtgacttctttcccgctgcgttaaaggcttttcgcgacctggacgcccccgacacgctcgagctcctcgcgagggcaccgggccccgaccaggcgacccggctgaccaaaacgagaatcgaggccgcgctcaagcaggcccgccgtcactatgtcgcggccaaggccaccgagctggccgcgatcctggctgaggaccaactgcgacaaccaccagcgatccagtcagcctacgaggctgtcgtgagcagcgaggtcgccatcatcgtcgcgttgaacacccagatcgaccagctgggcacggtggtggccgcacattttggccagcacccggacgctgagatctacaccagccaaccaggcctgggtacgatcctcgccgcccgggtcctgggagagttcggcgaagaccctcaccgctacagcgacgccaaagcgcggaagaactacgctggcacctcaccaatcacccgggcctccggcaccaggaaaatcgtcctcgcacggtaggcacgcaaccggcgactggccgacgcactccaacaatgggctttctgcgcgatgcgcggatcactcggcgccaggagctactaccaacagttgcgggccaggaatatcggccaccaagcagccctacgacaactggccaaccggctcgtcggcatcctgcacggctgcctgaaaacccacacccgctacgacgaacacaccgcctgggcccaccccagaacagcagcagcttgacttcaaagaaccggggatgt

SEQ ID NO: 5773 - DNA, 1393 bp, unidentified
  source 1..1393: mol_type = unassigned DNA; note = element_8d997e6
  misc_feature 1..2: note = core
  misc_feature 3..1121: note = CDS
  misc_feature 1122..1393: note = RE
  misc_feature 1123..1380: note = bridgeRNA
tgatggtgtggacggccccctacggcatcgattgtgccagaatgaggttgttgaaatctcagacaagggagccgtccgtgaaccagattatccgcattggaatggatacgtcgaagcatttttttcagctgcacggtgttgatgctgctgagcagccggtgctgcgccggaagctgcgccgcaaggagatggtggcgttttttgccaaactagcaccgaccgtgatcgggatggaggcctgcggcgcttcgcattactgggcaagggagttgcgcaaactcggccacgaggtgaagctgatcgcgccgcaacacgtgaagccctacatcaagcgcaacaagaatgacggacgggacgccgagggactgtgcgaggcgatgagccggccgacgatgcggtttgtgccagtgaagaccgaagagcagcaggcggccctgatgctggcaggcctgcgcgagcagatggtcgcccggcgcacccagctcagcaatatgatccgcggctatgcggcggagttcggtatcacggcagccaagggtctcgacaagatcgagccgctactggctgacatcgccgccagccaaaccttgccggtgctggcgcgcgatctgttcgtgatgcatggccgggagtacgcgcaattgcaggccgaactgaagaaaatcgaagcccggctgatggcctggcatcgatccaatgccgacagccagcgtcttgcacagattccggggatcgggccgatcggcgccacggcgctggtcatgaaggcacccgatccacggctgttcccgtccggccggcagttcgcggcctggatcgggctgaccccgaaagaccattccaccgccggcaagacccggctcggtacgatcacccgcgccggagatgagaggctacgcagcgtgctggtggcgggagcgaccgcggtgatccagcaggcgagccgaggccgtggccgggcatcgccttggctgctcgcgctgctggcgcgcaagtcgtcgccgaagctcgccgcgatagcgctcgccaacaagattgcccgcatagcttggaagctgttggtgacgggcgcgagctatcacgccggcggcaagccgaccgcatcggcgcacgccgcgtaacagagatcggtcgggcggcgcgccttcgggctcgccatctcgaccggtgccggagctgcaagaggagtagatggtaggatcgatcgatccgaggtgcgagacactccgtgggacccaatggcccgtaaaggtcgccagcgtgtctggaactcgcgtcgcggaaaaccatcttggccagcggtcaccagccgcatcaacaggccggacatatggatgcaagcgatccgatcagacctcgaaaaaactcttgcggcacgggggccgtccacata

SEQ ID NO: 5774 - DNA, 1323 bp, unidentified
  source 1..1323: mol_type = unassigned DNA; note = element_8da08bc
  misc_feature 1..2: note = core
  misc_feature 3..67: note = LE
  misc_feature 68..1090: note = CDS
  misc_feature 1091..1323: note = RE
  misc_feature 1058..1310: note = bridgeRNA
cgttggggtggacggccccgcggcatctggtgccaaggttcgctgtcgaagtgaacaggagccgtccatgaccgagcttacccgcattgcgatcgacacgtccaagtccgtcttcaccctgcatggcacggatgccgacgggcgggcggtgctgcgacgcaatctgcgccgccaggacatggtgccattcttcgcgcgccgaccgccgatggaggtggtgctggaggcctgcggcggctcgcatcactggggccgtgtgctggctgggctcggccacacggtgcggttgatcccgccgcaatacgtcaaacccttcgtcaagcgcggcaagaacgatcgcaacgatgccgaggcgatcagcgaagccgcggcccggccggagatgcgcgaggtcgcggtcaagtcggcgaggcagcaggccaacgcgatgctgctgtcggtgcgcgagctcctggtgcgccaacgcacgcagctggtcaacgcgctgcgcggacacgcggccgagttcggtcatgtcggccgccttggccgccaaggcgtggcaaagctgctggccgacgtcgccgaggacgcggagctgccgacgccggcgaaggacgcattggcgttgctgggcgccgagatcggtcggctggatgcgcggctggccgaggtcgacgcccggctggtggcgcaacacaaacagacgccaaccagccagatgctggcggaggtgccggggatcgggccgatcggcgcgctgagcctggtgctgcgggtcgacttcagccagttcaagtcggggcggcatttcgcctcctggctggggctgactccgcgcgagcattccaccggcggcaagacgcggctgggcgggatcagccgcgccggcgatgagcggttgcgccagctgctggtgctggggagcaaccgcggtgatcaggcaggccaagccgggaagagcctcggcttggctcatcgctttgctggcaaggcggccgcgcaagctcgcggcggtcgccctggccaacaagatggcgcgcatcgtctgggcgatgatgacgagtggagaggcgtatcgccagccggccaccgcctgaccactctttgatgccaagggtgcagggctgaggaagagagatgctgatcggtcgagccgacgatccacagaacccgggtagcccggtggccatcaaggccgctaatccgtttgggcgtggatcgcggaacccatctgggccagcggacatcgtgccgcgcaaaacaggccggacacacgactgccatcgcaccagatcagattttctccccctcaccccttgcacccagggggccgtccacaca

SEQ ID NO: 5775 - DNA, 1324 bp, unidentified
  source 1..1324: mol_type = unassigned DNA; note = element_8daba93
  misc_feature 1..2: note = core
  misc_feature 3..150: note = LE
  misc_feature 151..1122: note = CDS
  misc_feature 1123..1324: note = RE
cttgtattagggcgatccgttatgatggcgccgttccatgaggaatggcccagcccgggtgacggcccgagctgggtcgccgttcgatcggatcggtacccatcgaagccttgagggctgtctggcgtagcaagatcgcgatcgacgaagatggccaagcataccacgatctgtgctgggatcgataccggcaaaaggaagctcgatgtggcgctcgagggcaaccgcgagcagttgcaggtggagaacacgtcggaaggccacgcggtgttgctggcatggctgcgacggcaccgcgtcaaacgtgtcgggatcgaagcgagcggcggttacgaacagccagtcgtcgtcgaactacgacgccagcggtttgtggtcgtggtgttccagccggcccaggtccgtgcctatgccaaattccacttgcagcgggccaagaacgacaagatcgatgccgctctcatcgcagcctgcaccgcggcggtgcggaagatccatgccgctcccgatcctcggttgctgccattcgccgagcagctgaccatgattgatcagatcaatgaggataccgcgcgcctcaagaaccggatcgagagctgccgcaatgcacggattaagaagctctggaacgaggatatcgcccgcctggagaagcgcgagaaggccgaactcaaggctctggtcgcgtcgatccgcaagcatcccgaccttgccaagaggcttgggctgatcaatagcgttcacggcatcggactgccaaccgccgtagccatcctggtgcgtctgcctgagatcggccagatcacccgagagcaagctgtcgctctcgcaggccttgcgccttatgacgacgatagcggggagcaggtgggcgttcgacatatcgagggcggccgaaagcggctgcgtcgcgccctttatactgcttcactggctgcatcgtttcgctggaaccagcagctcatccagctttaccaacggttgaccgcggccggaaaggaacacaagcgcgcgcttgtcgcctgcgccaggaagatgctcatcttcgccaacaccgtggttgctcgcgggaagccgtggcaggactgtccaccagagaaagcggccctgacaaccggatagcctctcgtttctttgttcgacccaaagcgacgtttcttcgtcccgacctgccgctccccacgacaccgcgcgcagcggctgtcaaggatggccgtcgctcttcgctgccccgctctccgcagccaccaggccatccttgacagccgtgagcacggtgtcacgctagactaggttaggcgatcaccatcgtccttaatggttg

SEQ ID NO: 5776 - DNA, 1383 bp, unidentified
  source 1..1383: mol_type = unassigned DNA; note = element_8db0631
  misc_feature 1: note = core
  misc_feature 2..303: note = LE
  misc_feature 304..1119: note = CDS
  misc_feature 1120..1383: note = RE
  misc_feature 1150..1374: note = bridgeRNA
caatgggatggacccctccccacacctacggcatcgagtgccagactgggaatgggaaatcaccagtcacggaatgaggaggggtcgtcatgaagcttactcgcgtgggtgtggatttggccaagcaggtcttccaggtgcacggcgtggatcgggcggagcgcccggtctggtgcaagcgtctgaagcgagctcgctggatcgctgatcttgagcgtgacgtcgagccaggcgtcgagatcggcatggaggcttgcggcagcgcatcactgggcgcgacttctgcagtccaaaggctaccgggtgaagctgatcgccccgcagttcgtaaagccgtacgtgaagacgaacaagacggatgcgaacgatgccgaggcgatctgcgaggcgatgagccggccgagcatgcggttcgtggcggtgaagacggtcgagcagcaggatctgcaggcggtgcatcgagtgcgctcgagcctgatccgggagcggactgccaaggcgaaccagctgcgtgggctcgtctacgagtacggcctggtggcgcctcgagagatcagttccctgcggcgagcggttcctcagtggctggaggatgcggagaatggcctgaccgtacgcttccgatcgctgctggctggcttgtacggtgatctgaagcaactcgacgagcgggtgcacgagctcgataaggaagtcgccgtgatcactcgtgagcacgagcccgtccggcgactcatgcagatcaacggcgttggcccgttgatcgccagcgcgctgtacgcgctggtcggcgatgcgaggcagtaccgcaacggtcgtgatctggcggtggcactgggactgacgccgcggcagcacagctcgggcggcaaggagaagctgcttggcatcagcaagcgcggcgacaagtacgtgcgcacgctgctaatccacggcgcacgctcggcgttgcgcacggcaccaggcaggacggatcggatcagtcgttgggctttggctctcgcggagcgctcacatccgaacgtcgcagtgacagcgctcgcaaacaagaccgcccgggtcgcctgggcgatgccgaggcatggagcggactctgaaccggagcgcgtggcggcctgaggccatgcgtcccgactgatcgagagaacatcaccgcggttgcgagcactccgaaggatggcgaacaggtcgaaccggcgtcggcataacctgagagtgtccaagggcgcgaagcccggcaaagcaatgagaaaccgacgcgcgaatagcccatcgtggcccgacctcggctgatcgaggtcagacagaggccggatatacgtgagcagtcgtacctcgtcgccggaaaacggagtgctagcaaagtggggtgcggtcgatata

SEQ ID NO: 5777 - DNA, 1345 bp, unidentified
  source 1..1345: mol_type = unassigned DNA; note = element_8db5040
  misc_feature 1..2: note = core
  misc_feature 3..68: note = LE
  misc_feature 69..1073: note = CDS
  misc_feature 1074..1345: note = RE
  misc_feature 1112..1343: note = bridgeRNA
ttaatgagatggtcacccccaccctgtgagcggtaagctgacagggttttctttttggagggatcatcatgcaaaacgttacgctcatcggcatcgaccttggtaagaattcattccatattcattgccaggaaaaacacggcaacacattattacgcaagaggttttcccgcattcaactcacccagtttctcgccacctgcccgccttgcattgtcgcgatggagtcctgtgccggggcccattttatggcccgtcatatcagccagttagggcatcaggtcaaactcatttctccgcagtttgtccgaccctttgttaaaagtaataaaaatgatttcatcgacgctgaggccatatgcgaagccgcttcccgtccctccatgcgctttgtgacacccagaaccgaagaccagcaggccatgtcggctctgcatcgtgtccgcgatgcactggtgagggagcgggtcaaagccaccaaccaaatgcatgcttttttacttgagtttggcataagcatgccacgcggtattgcggtgataaaacgactggcgactgtgcctgaggagcacgagctaccgccttatttggtgcgactgctcacccgacttcatcagcattatggctatctctgtgaacagatcgaagaaatcgaaagagagttaaaaaaccatctggccgatgatgaaacagcacaacgcctgctcaccattcccggtatcgggacaatcactgccagtttgctcgccaccaaactgggagatgggaaaaactacctcagcagccgggattttgctgcgtcaacgggattagtaccccgccaatacagtaccggcgggaaaagtaccctgatgggcatcagcaagcggggggataaaaatctgagacggctactggtgcagtgcgcgcgggtctatatgcaacggctggagtatcagtcaggacgactggcggagtgggttaatgggcaactgacacgacatcactcgaatgtggtggcctgcgcattagcgaacaaactggcgcgaatagcctgggcagtcaccacacaaggaaccgtcttcagtaaataaaagagccaacagtaaatctactgtcagctcaatgagttaccaagtgactttctggttttgcgacgactgattattgatgacatgaacggcacagcggcctgatgatgaacctgacacaaaaaatggctctttgaagccgacgggttttttaaggttcatcaggtgcggaactcatcatggcgcggacatttttgtccaccagacgccgaatagatttaagcaagcccatcataaatcaaaatcggtgttgcaaaaacgggggtgaccataga

SEQ ID NO: 5778 - DNA, 1504 bp, unidentified
  source 1..1504: mol_type = unassigned DNA; note = element_8db69fe
  misc_feature 1..2: note = core
  misc_feature 3..263: note = LE
  misc_feature 264..1484: note = CDS
  misc_feature 1485..1504: note = RE
  misc_feature 6..240: note = bridgeRNA
ctaatgggaggtaccaggtccctgcagcataaagatggcagagtctggtgctggtagccgccggtaggtgagcactctcgccccccgggccgtgagtccttgggtcagatcgtgcccttaccggtgtgccaggaggctgtgatcgctgatggggtgtcgtgcccgccggctacggcgtgagcacttgtccattaggtcgcgagcgggtctcctgcacggctgccgggccatgccggtcgacgtgttgcgggaggttgcggaaggtgttgttcatcggggacgactgggccgaggaccatcacgatgtggaggtccaggacgagcacggacgggtcctgcggcggggccggctaccggaggggatcgccgggatcagcgggttcgggcagctggtcggccggttcgtgaccgacgacatggagccctctgatgtgctggtgtgcatcgagaccgaccgcggcccatgggtcaaagcgctgatcgcggccgggtacacggtgttcggtgtcgacccgaaacaggctgcgcggcatcgggagatcttgagcagttcgggcgccaagagcgacaagagcgatgcccatgccctggccgacatggtccggacccgccggcaccagttgcgtcaggtcgccgcggattccgacatcgcggccggggtcaaggtcgttgctcgcacgcaccagacgatgatctgggaacggacccggcacatgctgcggctgcgggtggcgttgcgcgagtacttccccgccgcgctggaggcctacgcggggttcgagctgaccagccgggccgtgctggccttgttggccaaggcgccgaccccggcggcggccgccaagctgacgccgcggcagatcgcggtcgcgctcaagggctgtcgtgacatcgacgccaaggcggcggcgatccagcaggtgttgcggtccgagcacctcgggcaacccgaaccggtgaccgccgcgtacgcggcgacggtgcggtctctggtcgcggtcctgaccacgttgaacaccgagatcgcgagtttggagaaggaagtgaaggcccattttggccagcacccggacgctgagatcctgctcagccagcccggtctgggcgtcgtcctcgccgcccgggtgcttgccgagttcggggacgcccccgaccgctacgccagcgcgaaggcccgaaagaactatgccggaaccagtccgatcacccgacagtccgggaagatgcgggtcgtggccgcccgcttcgtccacaacgaccgactggtcgacgcgctgcacatgcaggcatcctgcgcgctgctgcacgacgagcaggcccgcgcctactacgaccagatccggggccgggacgtcagccacaacgccgccctccggcagctcggcaaccggctcgtcggcatcctccacggctgcctcaagacccacaccacctacgaccaggccaccgcctggtcacaccgccaacacaccgccgccgcttgacaccaaagctccaggggtgt

SEQ ID NO: 5779 - DNA, 1551 bp, unidentified
  source 1..1551: mol_type = unassigned DNA; note = element_8db8f0f
  misc_feature 1..2: note = core
  misc_feature 3..331: note = LE
  misc_feature 332..1426: note = CDS
  misc_feature 1427..1551: note = RE
  misc_feature 3..218: note = bridgeRNA
cttgtattatagagtagtagtttttagtgaccctctccaaggtcatgtgctacactgaaagggatgctgtggattggtgtattcaccctaccacaagatggttcaagaaaggctccaaccacagccccttgcagttatgttaatcagttagataccgccagacggttgatgtagaacaaggttacaaggcaaggtgttctgtggatacagcatcaaattttacatctggaggttctgttcatggtttgtgtcggtatcgacgttgcaaaggacaagcatgactgcttcatcctgtcctcagaggggaaagtgttggcggaggtgtttactattgccaacagcatggagggctttcaactccttctggaaaagatttactgctgtactttacctcaagacagtatacagtataaaagtaggacttgaggcgaccgggcattacagctataaccttctggggttccttcttgacagcggcctgccaacctatgtcttaaatcccctgcacaccaatctctaccgaaaaagtctctccttgcggaagaccaagaccgataaagttgacgcgcgtaccattgcggctatgctcttgtccgatttgggcctcaagccctacacagatacagcataccacaacgaagagctaaaatcactcacaagatacagatttgataaagtccgggagcgggccaagctcaagcagtcagtctcccgtctggtctgtattctgttccccgaattggaaaacctggtgccttctctccacatgagctccgtctatgctctcttggaggagttccctggagccaaacagattgcagactccaatctcactcggctcaagttccttttggctggcgcctccaagggcagatacgggcgggatatcgcggtggccatccgggacgcagccggagcttccattggctccatcatgcccgccaagtccctggaactccggcacaccatccgtctcatccgaggactggatgctgaaattgcagacattgaatcttctatccggtccgtcatggaggaactgcactctcccattactaccatccccggtatggggctgcgaatgggagccatgatcgtggccgaggtgggagacttctcccgttttgattctcccgacaaagtcctggcttacgccggcctgtctccctccatctaccagtccgggcagctcaacaacggctatgcccatatggagaagcggggctccagatacctgcgctttgccatttacaacgctgccaagtacgtctgcatttgggaccccacctttgccgcctaccttgccaagaagcgggctgaaggcgaacattacaatgtggcgtcccatgccgccaagaaactggtacggctcatctacgcaatggagaaatccaggcttccttaccggccggtaacagccacgtagtctaccctgggtcttctcactttggcgtcctcacgaacgtttgcttctttgcgctctttttccgtcttgtggttccacataccttcgttctccttcagcttaggacttgacttttaatagttagt

SEQ ID NO: 5780 - DNA, 1450 bp, unidentified
  source 1..1450: mol_type = unassigned DNA; note = element_8dbf3de
  misc_feature 1: note = core
  misc_feature 2..227: note = LE
  misc_feature 228..1436: note = CDS
  misc_feature 1437..1450: note = RE
  misc_feature 16..242: note = bridgeRNA
ctactagagactccccggcaggaccggcgtctggccagactcggtctcaggtgctcggcgggctcgctctcttttgggctgcccaccggcgtcgtcggtgtggccctcttccggtttgcggcccgctgagcactgctgacgaggcgtggctcaagaggggactgcccagctcgtagtagcaatgcccacctcgccgtccatctggaagcgaacaggcgggaaaccacatgagcaaggcaatcggccgggtcgtcatcggcgtcgatccacacaagctgtcagccacgatcgaggtcatcgaccaacacgagaagaagctcggcaacgggcggttcaccaccgaccacgccggctacacggccatgcgcgcctacgcgagcacctggcctgaccgggtctgggccgtcgaaggagccaacggcgccgggcgtccactggcccagcggctcctcgaagccggcgagaacgtcgtcgacgtcccagccaagctcgcagcccgagtccgcctgttcgacaccggccacaaccgcaagaccgacgccctcgatgcgcactccgtcgccgtcgtcggcgtccgcaccaagaccctccgcgtgctgcacgtggacgctgagctcgaggccatgcggatgctcaccgaccgccgcgaaaccctgacccgacgacgcgtccagatcgtgtgtcgcctgcaagcactgctcgcagaactccagccggggcaggcgaagaaggacctcacctccggccaggcgaaggccatgctcgccagcgtccgaccccgcgacatcgccggcaagacacgacgccgcatcgccgccgaggaactcgccgacctcatcgcgatcgaggtcaagatgaagaaggccaccgctgagctcaaagcgatggttcaagcccgcgagtcgcacctgatggacatccacggcatcggacccgtcgtcgccgcccggatccacgccgacgtcggggatgtcgcccggttcgctgaccgcaaccggttcgcctcctggaccggcaccgcgccactggacgcatcctccggcgaacagaaccggcaccgcctctcgcgagctggcaaccgccgggtcaaccacatgatccacatcgccgcggtcacacagctgcggctcgacaccgaaggccgtgcctactaccgccgcaaacgagcggcagggaagaagccccaagaggcgctgcgctgcctcaagcgccgaatctccgacgcgatctacaagcagctcgtcgccgacaccatcgcgtccccgacgagcccgggagggcactgcggggcgtctcaagaatccagcgcggtcgacctgcccccgcacatcgacacttcggatcagccactcccggacccgcacctacgacgctacgccgcccagcactcaacgcgacagagccccgaacagtcagacctcagaaacacgggttgacgacagaggggagc

SEQ ID NO: 5781 - DNA, 1445 bp, unidentified
  source 1..1445: mol_type = unassigned DNA; note = element_8dc1d02
  misc_feature 1..4: note = core
  misc_feature 5..234: note = LE
  misc_feature 235..1428: note = CDS
  misc_feature 1429..1445: note = RE
  misc_feature 1..238: note = bridgeRNA
ccccgttacctttttcgtagctcttgaccaaggggctacggtcgccagatccggtatgacttcctgcccctgtcgcacgcatgatccgggggtggtgtcgccggatgtggtggacgtcgatggaccgctgatagggacagggccgctcgatcgtggagcaggtctcctcgtaacgtgggtgccgggcatggacgtcggatcggcgaccgttctcgttcgacgagaagggacctgatgaacaccgactacgccgtgttctgcggcattgacgtggggaaaagcgaacatcacgccgtcgcgttgaccgccgacggcgcccgagtctacgacaaggcactgcccaacgacgatcgccgattgcgtgcggtcttcgaccggctcaccggccacggaccgatgctgatagtcgtcgatcagcccaacacgatcggcgccctaccggtgaccgtcgcccgcgcctgtggccacgatgtcggctacctgccaggcctgtcaatgcggcgagtggccgacctctacccaggccaggcaaaaaccgatgcccgcgacgcgttcatcatcgccgacactgcccgcaccatgccccacaccttgcgccacgtggacaccggcgacgagacgctggccgaactcggcgtcctcgtcggtttcgacgacgacctcgccggtgaagccacccggatcagcaaccgcatccgcggactgctcaccagcatccatcccgccctcgaacgtgtcctggggccacgcgtcacccatccggcggtgctggagatgctctcccgtcacggcgggccacaaggactgcgcaaagctgggcgccgcaaaccgaccactatcgccacgaagcacgcaccccgcatgggtgcccgcctcgtcgatgacatcttcaccgcactcgacacgcagacagtcaccgtgcccggcaccaccgcagccgacaccgttctaccgaaactcgccgacaccttgaaagagacactgctgcaaagaaaatcaatcgccgaccagatcgaggaaatgcttgatgcgcaccctctttcggaagtcctgacctcgatgcccggcatcggcgtcaggaccgcagcccgcatcctcctcgaagtcggtgacggctccgcgttcgccaccgccggccacctggccgcctacgccggcatcgccccagtcacccaccgatccggcacctccatccgcggcgagcaccccgcccgattcggcaaccgcaaactcaaacgcgccttcttcctctccgcgttcgccgcgctgcacgaccccaccagccgcgcatactacgaccgcaaacgcgccgaaggaaagaaacacaacgccgccctcatctgcctcgcccgccgacgctgcgacgtcctccacgccatgctcagaaaccgcgaaccctaccgccaaccatcaccagcagccgcttgacaagaaccatagggaca

SEQ ID NO: 5782 - DNA, 1412 bp, unidentified
  source 1..1412: mol_type = unassigned DNA; note = element_8dc32a0
  misc_feature 1: note = core
  misc_feature 2..249: note = LE
  misc_feature 250..1383: note = CDS
  misc_feature 1384..1412: note = RE
  misc_feature 5..239: note = bridgeRNA
cattacagtcgaaattgtcagcccgggaccgtctcgggctacgattgaggcgcgcccagaacgggccgccgaccgggcgcccgcgcacggccgaacgtccctgcccccgagagggcccgttgggtgctgccggcgcgggacgcgccgcccccgacggctgataggaaagtgccgggcaggtgccgcggctggtaatgtgagtgccgaggggaggccatccggtcgaacgactaccggaaggataccaccgtgaaagcgccatccaccagacccgcggccgtgctcggcctggacgtcggcaagtcgtcgcactgggcctgcctgatcgaccgcgacggggaggtgctggccagcgcccccgtccgcaacagggaggccgagctcgacgcgctgttcgcctccgcgcccgccggcacgctcgtcgtcgtcgaccagttccgcaacatagggtccctcgccgtgaggcgggcccgcgccgcagggctcggggtcgcctacctgcccgggctcgccgccagccgcgccgcgggcctgttcgccggcgaggccaagaccgacgagcgcgacgccgcggtgatcgcgcggaccgccctgggcgtgccggactccctgtcgggggtcccgggccgcggcgaggccctcgaggccgcccgcgccctctcgtcgcagcgcgaccacgtcgtcgcctgcgcgaccagggacaagaaccgcctgcgcgcggtgctgctcgagtcctgcccggccctcgaggccgcggtcgacctgtcggaccggcggtggctggagctgctcgccgggttcggcggggcgtgggggatcgcccgctccggggccgagggcccgcgggccgaggccgccggggaggccgcggccgcctccaccgcgcccccgccggcgctcgtcgaggccgagaacaggcaggtcaggttcctggccgcccggatatcggaggccctcgacgaggccggggccctcgaggccgagacggcggcgctgctcgagggcgacgagacctacgcgtgcctgctcaccgtgcccggcatcggcccgaggaccgcggcgcagctcgcggtgtcggtcgacatcgggaggttcccggaccacgaccacctggcctcgtactgcggcatagccccgagggtgaggagctccggcacgtcggtgaggtcggtcagggcgtccaggcgcggcgacgcgaggctcaagtccctgctgatcttctcgtgcaacagcctggtgaggtcctcggggcgctacggcgagtactaccgggcctgcagggcgcggggcatggggcacgggcgggcgctcaaggccgtcgcgaggaagcggctcagggcgatatacgccgtgatgcgcgaccgggtgccctaccgggagtagccccgacggttgacaaaactataggaaca

SEQ ID NO: 5783 - DNA, 1709 bp, unidentified
  source 1..1709: mol_type = unassigned DNA; note = element_8dcb241
  misc_feature 1..3: note = core
  misc_feature 4..226: note = LE
  misc_feature 227..1462: note = CDS
  misc_feature 1463..1709: note = RE
cttatacagtaaactaagaacaagccctctcgacacagggctggaacaagtgtacacttgttctatacgactgttgaacgcgccagggaaagtctcggttctccacccggctcgaccgattgagaaagctcgcacttccctggcactgttcctgagctagaccgatcatgagagagtcgcgcttcgagcgccacagtataagggcacgcgtgctcaggaacctatcttgcagagaggaacatttctgaggtggtacgctggtattgattgggcggacacgcaccatgacgctttggtcatcgatgagaagggaggtcaagtcgcttcgctgcgggtcgatcacaccccacaagggatgagcaagctgaacacctttttggagcagatcatcggcacggcgcccaaagagcagatggcctgcatcatcgagacgacccatggattgttgattgctcatctgttggaggcgggctggcccgtctatccggtcaatcctcgtacggtggatcgtcggcgatccgcatcgggtgccaagaccgatacgattgatgcctatttgctggccaagaccggacgtgcggacctggccgatttgcaccgccttactcccgacagcgagaaggtgagagaactcaagcaactcacacgcgatcaagatgccttgatccagatgcaaacgcgcctggtcaatcagctcactgcctgcctcaaagcctattacccagtgggcctggagttgtttaccaaactgcagcaaaagagcaccttggtgttcttgcaaacctacccgaccccacaagcagcgatggcggcctctggggaacaaattgagcacgtgctcagagcagcaaagcattccaatccctccctggtcgccgctcagattgtcgagcggctgcagcagccccacttgcaggccgatgtcgtgaccacgcacaccaaatcgcgcttgatggtggcgctggtgagtcaactgctgccgctgatcgcacaaattgctcagtataacaaggagattgccaccctttttttgactcatgaagaccacgagatctttgcgagcttgccgcgtgcaggcaaacgtctggctccgcggaggctttcggaaatcggggatgatcgcacgcgctatcaggatgccagcagtctgcaagcgctgggaggaacctcgcccgtgctgtttcaaagcgggatgtactccaaggcgcatcgccgtctgggctgcatcaaaccgttgcgcaatgcgctgcaccaatttgcctggcagaccacgcaaagcgagccgtgggccatgcggtattaccagcgcaagcgagcagaaggcaaaagccatacggtagcggtccgagcgcttgccaatgtgtgggtcaggatcatctttgccatgtggctgcatcatcgctgctatgagacggccacctttgagcacgcacaacagcagcatgcacgcccagcggcctagcagccccagctcgtactgatcaccgtcaacaagcgccaaaaatcctgcatttttttggccttcaacttggcatgcccagaaaagaccacgcaagctcacggttgtcaaggaaagcgaagcggcttgacaactgtgagcggcgtggtacactggctcatgcccagttgaagacatttctccacctctcatgcttctgaattttttcgcttgttccaaattggtcgttttagggcttgacatagagagt

SEQ ID NO: 5784 - DNA, 1817 bp, unidentified
  source 1..1817: mol_type = unassigned DNA; note = element_8dcd2b8
  misc_feature 1..2: note = core
  misc_feature 3..280: note = LE
  misc_feature 281..1501: note = CDS
  misc_feature 1502..1817: note = RE
  misc_feature 16..300: note = bridgeRNA
ctgttacaatatatttagtcgggtaaaacccttgcagccggtaagggattactcgcattcgttacttaagctataatggaagcggtaaccggattgacgatgtcctccatgagctaaaacgctcgttttttagacagtcatccgcgctttcattatagtgttcgttttgtgcagattgtgccaccgtagccggtgcgttcgtgtcacccaacagatagaataggtaatgaataaatgcgtggaattatccgattacaaaaaactatcaggagcgatgaaaatgaacgcagtaggaattgatgtatccaaaggaaaaagtacggttgcaatactccggcctttcggcgaagtggtggcagcaccttacgatgtgtcccacacggacagcgagctcgaccggcttgccaaagttatcaagaagctgcccggtgaaacacgggtcgtcatggaagcaacgggcgtttattatgaacctgttgcccggcgcctccacgaacatggtatatttgtttccgtagtcaatccggtgctgatcagcgactacggcgacaacacgctgcgaaaagccaaaacagataagaaggacgcggtaaagattgcttcttacgccctaaacacatggcttgatctcgttgaatacaagcccgaggaagaccgcaggagatctctgaaatcattgaacagacaggttaagaaagttatcaaggtaaacaccatgctgaaaagcaatctgatttctctcacggatacagctttcccggggataaacaagctgtttacttcacaggaaagagcttctgacggtcacttgaagtgggtggattttgttgcaaaattccctcaccgcgacaccgttgcgaagctttcgctgaacgcttttaagaaaaaatataagagttggtgcgaaaaaaacaaatatcactatcaggacagtaaagcagaagaagttcatgctcatgcaagaaaatgtgttgccggagtttctgccgaagaaaccttttgccttatgatcaccaaagctgcggaatttgtaaatgctgcctgcgaaaatgaaaacgctctgaaaaaagaaatggacaggttagcttccacgctgcccgaatatgaggttgttatgggcatgtacggagtcggcaaatcaaccggacctcaactcatggcggagatcggcgatacaagacgtttccgtaacagacgggctatcacggcatttttcggttacgataccgagcctgacgattcagggcaacatatttccaaatcccgtcccattaccaagaaaggctcaccctcgctcagaagaacacttttcgttatcatgaaaactttggtaacaaaaaaaccggttgataatcctgtttatgcatttcttgacaagaaacgttccgaaggaaaacattattattcttacatgactgccgcggcagcgaaattcttgcgcatatattacgcaaaggtcaacgaagtcctcaatgaaaagggtgcttcggtgtgcacataaatccgtctattcatagattccgaaccggaggcgatacgtaggcacggcgcagccgcctgaccttgacgggttatcataaaaatgctacaatcggcagtccgacggtcagcaaccttgtctattcatgagttcttcaccgtcggcacattttgacaagcatttttatgatgttctgtcaaggttgccgggcaaacttaaccaaatttttttgcagaccgctccggcggtctatttgctgtgcttgcattttctcagttttcagtgaaattttttcttagtgttttttcgctttactacttgacttttatttgcaggt

SEQ ID NO: 5785 - DNA, 1447 bp, unidentified
  source 1..1447: mol_type = unassigned DNA; note = element_8de0d09
  misc_feature 1..2: note = core
  misc_feature 3..301: note = LE
  misc_feature 302..1135: note = CDS
  misc_feature 1136..1447: note = RE
ctcctcctcctacggggaattcacgcaaaactagagaacgaataaaaccaagtattacaagagaaaaggaaataagcaaggaaggagaaaaacaacataagcccaagtccactaaggggataaaaccccatttaagtaggctggctgtgaagcccctagaacgatctaacaagaggggataaaaccccgagtaggaggttgtaaccaaatactctaggggctgaatgtaattaatattatgcaaagaaaacaagatattatgatggcaaaaaatatcttgagaaacgaataatattcaaccatggaattaaaggttatcaacaaggccttcgcaattgatatctcacaaagcaaaataacagcagcaaagggagaactagtagtaaatcaagacaagtcaacagtatacgtcaaggaagtaagggaattcaattacgacaacgagggaatagaagaactaatcaaattcttgggagaatacaaggaaggaataatagaggcaacgggaatatactacttccacctacacgaaagactaacggaaaagggatacaaggtaacagtaataaacccactacacttaacagaaatactagggaagaagactgacaaacttgacgcacaaaggttattagtagcacacatgactggcgtaatcaagggatcatacataccaactggagaaataaaagaactgagagaactaacgaggtatagggaaaccctagtagagaagataacacaagtgaagaacgagataaggaaaatattagaattcgcaggatataagatacaaccattcgacaagaagggaagacaattactggagaaactagctaagggggaggagttaagcaaggaagagaaggaggaactaaaagatagactagggagaaacttgaatgatgcggaaaaactagcattgaaacaactagttgaactgttaaaaagtttggagaacatggttaaggaggttgaggatatgataatttccaagattcctggagttggtttgattagtgctgcaaccatttacgctgagttcggtgatgtttcccgtttttctagttctaaggctgcttatgctggtttcgccctaagcagagtggtgatagtgagtcccactctggtatgattaggggtaataagtatttgcgtagggttctctacctggttgctagggttgctaggaatcttgaaccttttaacgggtattatgagaggcttattgctaggggtaagagtgctactcaagctacttgtgctcttgctggaaagcttgccagcatttgttatcacgttataaaggatggtgtttacaagggcgttgttaagaagagttttagagtacctaggggtaaggaagttaacgtcaaggacttcgacgtgggagacgcgctggactcgttatccccgtaggtttgttagaggcgctagcatgtggtgc

SEQ ID NO: 5786 - DNA, 1424 bp, unidentified
  source 1..1424: mol_type = unassigned DNA; note = element_8de5a9e
  misc_feature 1..4: note = core
  misc_feature 5..207: note = LE
  misc_feature 208..1410: note = CDS
  misc_feature 1411..1424: note = RE
  misc_feature 1..194: note = bridgeRNA
ctccgtaagttgttaggcggcccgggagggccggatgtggctgatggggtcttgccagtcgtggctccgaaggagtggccgtccggctctccggggcgccctggctgctgattgagatgtgcgcgccgtgtgcggtcgctgtttacggagctgacggcggggtgttcctcgggccgacggcatgccgtgcggaacgaggaggggcaagtgagcgagcgacgggcccaggtctgggccggtgtggatgcgggcaaaggccatcactgggcggcggtggtcgacgagaccggcgcgaccctgtggtcgaagaagatcgacaacgacgagtcggcgatcctcaccgcgctcggagagatcctggactttgcggacgaggtccactgggcggtggacatctccggcacttcctccgcgctgttgctggccctgctcgcggcccatggtcagcgggccgtctacgtgcccggccggaccgtcaaccgcatgtccggcgcctaccggggcgaggcgaagaccgatgcccgtgatgcctacgtcatcgccgagaccgcccgccaccgcaatgacttcaccgccatcgacgtgcccgcccagctggccgccgacctcgctctgctgaccgcgcaccgcgccgacctggtggccgaccgggtgcggatgatcaaccggctccgcgacgtgctgaccggcgtcttccccgccctggagcgggccttcgactacagcagccataagggcgcactggtactgctgaccgggtatcagacaccggccgccatcaggcgccgcgggcgggcccggctgacggcgtggctggccaaccgcagtgtccggggcgccgacacggtcgcggccactgccctggaagcggctcaggcgcagcaaaccgcgctgcccggcgaggacgtcgccgcgcagatcgttgccgacctggccgcgcagatcctggccctggacgaccgcttgaagcggatcgaccggcagatccgcgacaccttccgcagtcatccgcaggcggagatcatcgagtccctgcccggcatgggcccgatactgggagcagaattcgtggtcgccgctggtgacttgtccgcttacacggacgccggccatctggcttccgcggccgggctggtccccgtcccgcgtgactccggccgccgcaccggcaatctgcaccgccccaagcgctacagccgccgtctgcgtcgtgtgttctacatgtccgcgcagaccagcatgacgcgtgaggggccgaaccgagacttctacctcaagaagcgcggcgaaggcctcaaacacgtccaggcggtcatcgccctggcccgccgccgggccagtgttctgtgggccctcctgcgcgacaaccgggtcttcacctccgccccgccggtcgcgcagacggcttgactcagtcattgaga

SEQ ID NO: 5787 - DNA, 1384 bp, unidentified
  source 1..1384: mol_type = unassigned DNA; note = element_8ded9ef
  misc_feature 1..2: note = core
  misc_feature 3..129: note = LE
  misc_feature 130..1155: note = CDS
  misc_feature 1156..1384: note = RE
  misc_feature 1169..1349: note = bridgeRNA
acatggggtaatcgcgggaagcgagtcgcccagtcatcaggatatggataggggtggctgttccccgataagatgaaaatacgggctcatggcgtggtgccgggcccaagcatctgatgaagaacagccatgggagagtatatcggtcttgacgtctcgatgaaagacaccgcgatctcggtgcgatgcgacggcaagcgcgtctggcgaggcaagtgtgcgtcggatccggagaccattgcaaggacgatccgcaagcgagcacgagagcctgagcgggtgatcttcgaaaccggtccactgtcggtctggttttatcatgcgttgagggccgaagggctacccgtcatctgcgtcgatgcgcgtcatgccaaggcggcgctcgacatggcagccaacaagactgacgccaatgatgccgacgggctggcccacctcgctgaggtaggcttctatcgtgaggtaagggtcaagggcttcgacagcatgctaacccgtacgcttgtggcagcccgaaccaagctggtcaggatccagaccgagctctccaaccagatccgcggactgatgaaaacgttcggtcttgtagtgccggcaggcaaaggcagcaccttcgaggcgaatgtgcgcagccggcttgatgaaaacccagagcttgccacgatcatcaggcctttgttggaagcttggtgcagcatccgtcttcgtgccgctgagctgaccaaacggctgatcaatgatgcgcgccagagcgaggcctgccagctgctcatgtcgatccccggcgtcggcgtcgtgactgcctcggctttcgctaccgcagttgaagatccggcgaacttccggtcgtcgcgttcggttggcgcctggctcggcttgaccacacgacgatatcagtccggtcaggtcgactacaacggccatatctccagacgcggtgatcaccaggtccgcagcctcctttacgaggcggcttgcgtgatcctgacccgaagcactgcggacagcgccctacgagaatgggggctcaagcttagggagcgcatcggcttcaagcgcgctgccgtcgccgtagcgcgaaagcttgccgttatcatgcatgccatgctgaaatccggagagctgttcgacagaaaggtggtagcttccgcgtaagaacttcgtcggcaagcagccgtcaagcaaatccgtccctgccgggacgtgggctgagccattccgcttgatgggatgcaccggactttgccgagtgcgccgtccacctaggaaggctccgtcctgcgaagacccaccgtgcggcggcgcatgtcgaccgcgaagacgaccctgaacccggcatacggtcagctcagaaattgcttgccaaacagaccgcgattagacg

SEQ ID NO: 5788 - DNA, 1170 bp, unidentified
  source 1..1170: mol_type = unassigned DNA; note = element_8df2473
  misc_feature 1..2: note = core
  misc_feature 3..180: note = LE
  misc_feature 181..1149: note = CDS
  misc_feature 1150..1170: note = RE
  misc_feature 37..201: note = bridgeRNA
ctccttgtatcttgaaacttagctaccataacgatgaatagatttggcacggcgtatgcagcctgatttctctaggggttttaagcccgtgactaagcgactggcgcatacgctgagccactcatctgaaacccgaacagttgtccgtactccataacgcatttgcaaggatgggtaataatgagtctgccaggtccactttgtgtcggtattgatgtttcgaaagcaacgctggacattgctgccagcagcgcaattgagcctttttcggtcaccaatgacactgatggttttgattccatcattgctgagctgaggaaatactccgttgcgctcgtgctgatggaagccaccggagggcttgaagctgccgttgcctgtgcccttcaggccgaaggttttgagctcgcagtggtcaatccccggcaggctcgtgactttgcccgtgcgatgggatatctggcgaagaccgaccgtattgatgcgagagtacttgcgcagatggctgaggttatcaatcgccatccggaacgcagccgttttatccgggctttgccggatgtagaacgtcaggttctcaatgcaatggtagttcgcagacggcagttgatcgctatgctggttgctgagcgaaacaggttgtaccttgcttccccgcaaagcagaaaaagcattaataccatcatcaaagcgttggaagacgagcttgtgcggatcgatgatgatatgaataaccatatccgaagccacttcaaagaactctctgagcgattgagtagcattaagggcgtcggtgccatgaccgtagccgcactgctggccgaggttcctgaattgggtcgtctctcgagacgagaaattagcgctctcgtgggcgttgccccagtaaaccgggattctggcacgatgagaggccgacgaaccatctttggtggtcgggcgggtgtgcgaactgcgctgtacatggccgcactcgtagcaacccgctacaatccagttattaaagcgttttatacccggctggttgcagcaggaaaaccaaaaaaagtagcgctggttgcctgtatgcgcaaactgctgaccatcctgaatgcaatgctcagaaagaatgaagaatggaatgagtcgtaccatcatgtagctccataattttatcgttcaagacagttg

SEQ ID NO: 5789 - DNA, 1511 bp, unidentified
  source 1..1511: mol_type = unassigned DNA; note = element_8dfa82f
  misc_feature 1..2: note = core
  misc_feature 3..237: note = LE
  misc_feature 238..1491: note = CDS
  misc_feature 1492..1511: note = RE
  misc_feature 12..245: note = bridgeRNA
ctaatgagtgctagagcaaccgggtcgggccttcgggcaggctcgggtccggtagccgctggcgggtgagcacctatgcggcctggaccttgagtcctagtgtcagatcgtgcccctgccggtagcccgggagaccagaccgctgatgggatgtcgtgcccgcccgccgtggcgtgagcacttgatcattaggttgctggtagttctcccgcaggctaccgatgggaagcactgtggatggtgaggagggccagggagttgttgctgctggtgggagacgactgggctgaggaccaccacgacgtcgaactacaggacgagaccggtcgcaggttgggcagggcccggctgccggaggggatcgccgggatggcccggttgcacgcgatgatcggcgggcatgtgggcgaggacgatgacgagccggtgcaggtgatcgtcgggatcgagaccgaacgcggcccgtgggtgcaggcgctgatcgccgccggctacctggtgtatgcgatcaacccgttgcaggtggcccgctaccgggaacgtcatggcgtgtccggggctaaaagcgacgccggggatgcgcacaccctggcggacatggtgcgtaccgaccggcatcagctgcgcccggtcgccggcgacagcgacctggccgaggcggtgaaggtgatcacccgggcgcataagaccctgatctgggacaagacccgccacctgctgcggctgcgccgggcgctgctggacttcttccctgccgcggcggcagcctacgacgacctggccgcccctgacgtgttgcagctgctggatacggcacccgatccggtctcggcggccgcgctgggcaccgagcagatcgccgcggcactacgcggcgcccgccgtcgtgacatccccggcaagaccgcgaagatccaggccgcgctgcgggcgccacacctgagcctgccgggcgtggtggccggcgcctacgcggccacggtgcgtacccaggtggcgatcctgaccgtcctggccgcccagatcgaggccatgcaggggcaggtcgaggcgcattttggccagcacccggacgctgagatctaccgcagccagcccggcctgggtgtgctgctgggcgcccgggtgctggccgagttcggcgacgacaagacccgctatgtcgacgcgaaggcccgcaagaactacgccggcaccagcccgatcacccgccagtccggcaagaagaagatcgtactggcccgatacgtccacaacgaccggctcatcgacgccctcggcctgcaagccttcgccgccctgggcggctcacccggtgcccgcgcctaccacgaccagcagcaggcccgcggagccggccaccgggccgcgctgcgccaactcggcaaccggctcgtcggcatcctgcacggctgcctcaaaaccggcaccacctacgacgaggacaccgcctgggcacaccaccagaaagatcatgaacttgctgcttgacaacaacgctcatgggatgt

SEQ ID NO: 5790 - DNA, 1791 bp, unidentified
  source 1..1791: mol_type = unassigned DNA; note = element_8dfb6d4
  misc_feature 1..2: note = core
  misc_feature 3..409: note = LE
  misc_feature 410..1642: note = CDS
  misc_feature 1643..1791: note = RE
  misc_feature 91..375: note = bridgeRNA
ctcgtataatagtttttgtaaggtttagttaagactttttccagttagaaaccttacattaactccataaattaactggaaaatattttgttctttgataattaaataattgctattgaacttaactaatgctcgtgtaacaataattttaggctattgaggatggttctgtttttctcctgtaggacatttatgtcgcttctttttaagtcagttcccctggcctgatgttagctttataccgctgggtgtttttctcttttaatctctctcctgtatggcagttcaaggagcgtgcatagagatttaagaggtgtattctaattgcgaggatgttgatgcatcaggtaccacgggcattagttaagttcaatagctcacaaataatgttcggaaggaggtgatttcattgtcaaattcattattggtaggtattgatgtcagtctcaatgacaacaaagtccgtatcctccaccctgatggaaccagccttgctaaatttgttgttttaaactcagttcctggtgcaaaaactctttcccaaaaagtcacaggaattgcttcaaaaaacaactttgattccattgtcataggtcttgaagctacttctgtttatggtgatcctcttgtttacttcttaaaagaagatgccacagtgaacagttttaataccaaaatccatgtacttaatcctactcaggttcataagtttaaaatgatgtaccctgacctccccaaaaccgatgatatagatgcatgggttattgcggagcatctacgcttcgggcgtattaacaaggaggtctatatggatgataggtataaagcattacaaaagcttactagagcaagattccatactgttcaaaacctagcaagggagaaaaactggttcctaaacaacctttttctgaaattttcttcccttacacaacagaagattttttcagataagtttggtgctacctccagcagtatcattgaagaattcttttcggttgacgaaatctcctatatgccaattgaagagttggtcgattttatcaacgaaaaaggtaaaggccattttgagaacccggctgaaattgctgctgctgttcagaaggcagccagaagctcataccgtctccctaaagcggttacagactctgtcaatcaggtacttgctgtatcttttttagcgattaaagcttacaaagaacagcttaaaatctttgataaggcaatcgaggatcagataaagctgattccgaatacattgacctcagtcaaaggaattggtcctgtttactctgctggtattgtagcagaaattggtgatattcatcgtttcaaggatcaagcagcattagctaaatttgcgggtattgcctggactaaacatcagtctggcaattttacggctgcacatacccaattaattaaatttggtaaccgatatttgcgttactacatcatggaagcgactaacaaagtgagattgcacgatcacgagttaaaacgtttctatgataaaaagtacagccaaacccctaaaacaccacataaaagagcacttgcactaactgccagaaaatttgtccgtcttgtctatgctctgctgcatagcaaccggctttatactccaccaaaaggaatttaatttccagttggtgacccatttcctaccaaattttacaattgggtaatggtaggtctattagggtgtagcttttttatgctttttgggtcaaaatcctgttcttttatcaaaacttttttccaattacctcttgacattttaccgctgga

SEQ ID NO: 5791 - DNA, 1414 bp, unidentified
  source 1..1414: mol_type = unassigned DNA; note = element_8e001ad
  misc_feature 1: note = core
  misc_feature 2..89: note = LE
  misc_feature 90..1121: note = CDS
  misc_feature 1122..1414: note = RE
  misc_feature 1177..1406: note = bridgeRNA
caatgggatggacccctcctcacctaatcggcatcgaagtgccagactggaagtgtcatccaccagtcaacagagaggaggagtccgccatgaagcttattcgagttggggttgatttggcaaagagcgtatttcaggtccacggcgtggaccggaaagagaaggcagtctggcgccggcggcttgctcgggagagctgggtcaaggtgttgcttgagacggttgagccaggctgcaagattggcatggagtcctgcggtggcgctcactactgggcgcgcatgctacaggagaagggattcgcagtgaagttgattgcaccgcaattcgtgaagccgtacgtgaagagtaacaagaacgacgcgaatgacgccgaagcgatctgtgaggcgatgagtcggccagggatgcggtttgtagccgtgaagaacgttgagcaacaggacattcaagccgtacaccgtgttcgctccggattgatcgagcaacgcaccgccaaagccaaccagatccgcggcctggtcgccgagtacgggctaattgcgcccaaggaactgtcgcatctgcgaggggcattaccgctttggctcgaggacgcgcagaacggcctgacggatcggttccgtcggctgttgaacgcactctggggcgatctcctggggctggatgctcgtgtggtggaactggaccgagaaatcgcgctgatcgcgcaaagccatccggtcgcaaagcggctccagcagcttcgcggggtcggcccgatcatcgcaaccgcgttggtagcggcggtaggcgatggggcacagttcgccaatggccggcagatgtcggccgcgttcgggctcacgccaaaacagcacagctcagggggcaaggagcggttgctgggcatcagcaagcgaggtgacacttacctgcggaccttgctgattcacggggcgcgatctgtgatccgaactgccaatggcaagactgaccggctcagtcagtgggtcacccgtctggcagagcgtcgccacccaaatgtcgctgcggcggcgctggccaacaagaccacgcgcatggcttgggcaatgttgaagaacgacaccaattacgaaccggatcggattgtggcctgaagtcttctcgaaaaccgaatcaccgactcactttgtgagcaaaagcatggagcacatcatccacgattgctaagcaaacctgacgatggcaaacaggtcgaaccggcgccggcaagacccgggaaacgcgaagtgcgaaaagcacgactaaccgatagggagctggcgcgcgaatagcccatcatggcccggtgtcgatcaatcgacgcggtacttagaggccggatatacgtgagcagtcgtaccttaccgccaaagaacggtgtgcttgcaaacgaggaggggtccatata

SEQ ID NO: 5792 - DNA, 1435 bp, unidentified
  source 1..1435: mol_type = unassigned DNA; note = element_8e05f7f
  misc_feature 1..2: note = core
  misc_feature 3..121: note = LE
  misc_feature 122..1153: note = CDS
  misc_feature 1154..1435: note = RE
  misc_feature 1189..1389: note = bridgeRNA
agatggggtaatcggccggcgaacttgtggatagctgaagattttgggtgctgcgcttcaggctgatggtgaaacgaggtctcgcatttgcggcctcaagcatcagaaggagaagcgcagcatggagcattttgctggactggacgtgtcggtcaaggagaccagcgtctgcattgtggatgacacgggcaagatcgttcgggaagtaaaggtggctagcgaaccggaagcgttgttggcgatgctgaagaaccctgcctaccacttcaagcgaattggattggaagccgggccgctgtcgcagtggctttacagtgcactcgctgaagcggggttaccggtgatctgtgttgagacgcggcatatgcgggcggtgctgaaggcgcagatcaacaagaccgaccgtaacgatgcccgtggcatcgcgcagatgatgcgggcggggctttatcgtccggtgcatgtgaagacgttacgcagccagaagctacgcatgctgctgacccatcgcaagctgctgcaggcgaaggccatcgccatcgagaacgacctgcgcgccacgttacgcaactttggtctcaaggtgggcgtcgtaggaacggtgaagttcgaggcgcggatcaaggagcttgtcgagagcatccccgatctggccgagctggtcgaaccgctgctcgttgtccggcggacgctgcgcgagcagatcggcatcttgcatcgccgattgctggccatcgtccgggacgatgatgtgtgccggcgcctgatgtcggtccccggtgtcggtccagtggtggcgctgacctatcgcgccaccgtcgatatacctatccgcttccgaaactccaaagcagtcggggcggtgtttggactgacaccttcccggcatcaatcgggcgagagcgatcgaaccggcgggatatcacggtgcggcgacgaaatgatgcgggtcatgctctacgaagcggcccagatcatgctggtgcggtccgtgaaatggtcctggctcaaggcctgggcggtgaagatcgccaggcgccgcgggctgaagaaggcgattgtggccctggcgcgccggctggccgtgatcatgcaccgcatctgggttgacggcaccgagttccagtggacccgggaagaagccgcagcatgaaagccgtgcaggatcaaacccaataggaggaaactcgagctccaccgagcgtggaatgatgtccctcgcgggacgacggatgaggtgagatcgtatgtccgcttggacccgccgctcgtccgacggcgaggccgaccgaaagattgttccacctcgtcttcgaatccgatgatggaagggccctggtgccgattccgaagagaagcgcgagcccgcgagcgacatcaacattggtgcggtggatagtctgaaagtgcttgaccccaaacggccgattagaga

SEQ ID NO: 5793 - DNA, 1327 bp, unidentified
  source 1..1327: mol_type = unassigned DNA; note = element_8e08b5a
  misc_feature 1: note = core
  misc_feature 2..257: note = LE
  misc_feature 258..1316: note = CDS
  misc_feature 1317..1327: note = RE
  misc_feature 11..212: note = bridgeRNA
ctattggtacaagatggctgggccggaagcgccttcgacgggggtcgctccggtgcgggccgccgggtgactcggagaacacgtgccgacaggctttccgttgatatgtccacggcggtccggtgggcgagagccctgaccgggagtgacttgatagaagcttgctgagccgtcaactcgcaataggtgtgtccctcggtcagggctctcgaccgctgtcccgtcgttcgcagtggtgcagaagaagggacatctcgatggtgacagtgggcatcgacccgcacaagcacgttcatgtggcggtggctgttgatgccgtcggcagacaagtcggccggccgctgaccgtgaagaacggcccacatttgatcacgggactgctgacctggatccgctcgatcagcggcggcacaccggtgacctgggccatcgaggacggtcacggattcgcccgccggcttgctgacggtctgctcctcgccggccaagaagtggtctgggtcccgacccgcctcatggtcgcccaccgcaagttgcacgccgctaccagcgccaagtccgaccccgttgatgccgcggcggccgcctacgctgcgatcgccactcccgggctggatcgacaccgcatcgacgagcaggtgcgtgagttgcgggtgctcgtggatcaccgtgccgatctcgtcaagcgacgcaccatggtgatcaaccaactcaaggcgcagttgcacctttggctggatcacacccctggcgacctgctgcgggcgaagacggtggcctcggtgacggcactggtagccgatgcgtcgctgcgtccgcacgtccgtcagaccttgcacgacatgctcaccgaggtcgcggccctcaaccaccgagtccgcgccgacgacatcaccatcaaggagctggtcaacccactggcacccacgttgctgcaaatcaccgggatcagccacacctccgcggcagtgctcatcgccgagatcggcgacatcactcgcttctccagctcagccaaactcgcccgctacaccggctgcgccccgatcccggtctactcctcggacaacgagcgccaccgcctgcaccgaggaggcaatcgccgcctgaacagcgtcttctacaccgcggccatcgtgcagaaacgatgggacccagccgcccagaaactgctggcccgtcacgcgccggccaagggcactcgcggtgctcgccgcatcctccaacggcaccttgtcgacgtcgtccaccgggccatgcacgccgaccaggaaacatggacacaccaaatcgccaggtgccaacaggccgcttgacatagaagcat

SEQ ID NO: 5794 - DNA, 1192 bp, unidentified
  source 1..1192: mol_type = unassigned DNA; note = element_8e12f5a
  misc_feature 1..2: note = core
  misc_feature 3..220: note = LE
  misc_feature 221..1171: note = CDS
  misc_feature 1172..1192: note = RE
  misc_feature 63..231: note = bridgeRNA
cttatatctttcaattacttcaaaattcggcagtcaaggcgtggtttgtcgtcttgattgctgaacgggttgactcaccgacgtgcagcctgcgtctcctgcgagttcgagctcgaatcacagcacagggcgcacggcggtggtctctttgttctgctgcatcccgaatggttgatcgaacacatttcgtattcataaggctgggagctggagaacttttatgagtgaacttgtttacgtaggtattgatgtggccaagagcagcttcgaggtagctgtcactggcgaggtacagaccttgcgtctgggcaacgacgaggccggctataccgagttgtgtcaggtcttgggccccttggccccgcgcctggtgctgctggaggccactggtggctacgagcaggatctggccttggcgctggccgcggcaggattgcgggtgtcggtgatcaatccgcgccaggcccgtgacttcgctcgctgcgtgggcaaactggccaaaaccgatcgcatcgacgcattggccttgcgtgactttgccgccatgctcgatgcccagggacacgaaccgcgtgcgctggccgacgagcagcaacgcgagctcacggccctggtcacccgacgacgccagttggtggcgatgctggtagctgagcgccaacgcttgagcgtggcacatcccaaagccaagcgcagcatcttgcaaatcatggatgccattgctgcgcagttgcacaatgtagacggcgagttgcgcgatcacatccgggcacatcacgctgacctggctgcattgctgacctcggtcaaaggggtaggccccacgaccgccagtacgttgctggcgcaattgccagagctcggccagctcaaccgtaagcagatcacctcgctcgttggactggcaccgatgaaccgagactccggcacattgcgtggccagcgtcacatcttcggtggacgcgccgacgtacgccgggtgctctatgttgcggccctggtcggtacgcgcttcaatcctgtgctcaaggccttctacgccaagctggtcgctggcgggaaacccaagaaagtcgccctggtggcctgcatgcacaagctgctggtcatcctgaacgcaatcgcccgtaccaggtccccctggagcaacgagatcgcaatggtcgtttaacttaaacattcaagatggttg

SEQ ID NO: 5795 - DNA, 1563 bp, unidentified
  source 1..1563: mol_type = unassigned DNA; note = element_8e174ef
  misc_feature 1..2: note = core
  misc_feature 3..268: note = LE
  misc_feature 269..1447: note = CDS
  misc_feature 1448..1563: note = RE
  misc_feature 3..249: note = bridgeRNA
cttgtataatgaaaacatagggaaattcattatacattttcctttctagattattttctatataatctatattagacgctgtggattagtcaattcacctacagcagctatccctaaatagccgactgtttcctttgaggctctaaccacagctctatgtttatttgttgattagttagataacgcatgacgttttatatacagcaaggatacattcaacatagagttggtggaaacatagcgtactacatataaaggagttgattttatgctttttgttggtattgatgttgctaaagcaaaacacgattgctgtattattgattcagatggtgtgatttttactaattctttacgtattgctaattcaatgaaagggttcgaaactctttattcaactatcctttctgcccttagttccaaggacctaggcaacgtaaaaataggacttgaatcaaccggtcattacagcactaatatcacaaattatctgtattccaaagggtttcaggttcatatcctgaatccattggctactagtcttttccgtaaggctggtacccttaggaaaaccaaaacagataagaccgatgcgaaggtcattgcgactatgctctttactgatgaatcaaaatcctattcaccagtatcatatcaaatttctgagttaaagtcactaacgagacatcgttatcgtatgattggttatcgttctaagctcaaaatatcagttaatagactgattgatattgtatttcctgaactacctgatttagtctggtcaatacaccagaattcaagctattccttattacttgaattgcctacaccgaaggaaattagttcctgtcaccttacaaaacttacaaacctacttattagtacctcaaaaggcaaatacggtaaagctaaagcagttactttaaaagagcttgctcttaattctatcggttctagcaatcgttctacagcttttgaattacaacaaactattcgcctcattcaatcgattcaagttgaaataaataccttggataaacagattaaggccgttgtcaatgaactcaacactccacttgttagcattcctggcattggttatacccttgcagctattatgttagctgagatcggcgatatcgaacgtttttcaactcctgctaagctcttagcttttgccgggatggaaccgtctacctatcagtcaggtaaatacaatgcctccaaaactcctatggtaaaacgtggctctacatacctaagatgggctgttatgcaggcggctcgattagttgctatgcgtgatcatacctttgctttatatatggaaaagaagcgttcagaaggaaaacactactgcgtagcacaaaatcatgttggaaagaaacttttaagggtgatttattacttattgaaaaccaattcaaagtttgtaccacaaatataatacaacttaaatattttcatgagggcaactacgttgctttatttattgtgcatttttttatcagtataaataacacataaaatacatcaaaaaacccttgacttcatatagttagt

SEQ ID NO: 5796 - DNA, 1364 bp, unidentified
  source 1..1364: mol_type = unassigned DNA; note = element_8e210e6
  misc_feature 1..2: note = core
  misc_feature 3..84: note = LE
  misc_feature 85..1110: note = CDS
  misc_feature 1111..1364: note = RE
  misc_feature 1095..1351: note = bridgeRNA
tgatggggtggacggcccctactcgacggcgtcgtagtgcgccaaagtggttgttgcgaaacaaacccaagagaggagccgtccgtgtctgagcttagcatgataggttttgacctggcgaagagcgttttccaggttcatggggttgatgaggctggagaagttgtcgtgaagcggcagcttcgtcgggctgaggtactgaagtttttcgcccgattggatccttgtgttgtcgggatggaggcctgtgcgtctgcgcatcactgggcgcgagagctggtgaaactgggccacgatgtgcgcttgctaccgcctgcttatgtgaagccttacgttaaacgaggtcggaagaacgacgcggtggatgcggcggcgatctgcgaggcgctgcagcggcggcatattcaggcggttccgatcaagacggaggctcaacaagcggtgctgtcgctacatcgtgtgcgaagcctgctcatgacccagcggacgatgcttggcaatgcgctgaggtcacatatggccgagtttggcatcgtggggccacaaggtgatgcagggcttggcaggttagtggcgatggcgctcgatactgaggatcgcgccctgccgcaggctgcgcgagaagcatgggcgatgctggcggcgcaatggcgagagaccgatgcgaagatcgccgtgctcgaccgagaaatcctggtcagccaccgcgccgatgccgacagccggcgggtcgctaccatccccggcatcgggccgctcacagccagcgccttggttgtcaccattggcgatcctcgacgcttcgagaacggtcggcagttcgccgcctggctgggcttggtgccgaaacagaactccagcggtggtaaggagcggctgggtggcatcaccaagatgggggaccgctatctgcgatccctgctggtgttgggagcgaccgccatgctgcgccatcgacaaaaggaacagggcacatggctcgccaatctgcgggcacggaaatcggcgcgtcaggtcaccgtcgcgctggccaacaaaatggcgcgcatcgcctgggcgatcctcgccaaaggcggtgtctaccaagatcgggcggcgcaagcggcctaagaaaaacagcctgtcccaggcatagcattgcgagggcgatgaaagcgtgatggcgaccggtcagtccaacgaacggcaacacccagttctgtgtcctgatcttcgagatcgagcagatgattttgggcgccgattccgcggatcacatcatggccagcggtcacaggccgcgctaacaggccggacacatgactgcacccgactgctcgacattagcgccagattcaccttgcataaaaggggccgtccacaca

SEQ ID NO: 5797 - DNA, 1516 bp, unidentified
  source 1..1516: mol_type = unassigned DNA; note = element_8e22416
  misc_feature 1..2: note = core
  misc_feature 3..221: note = LE
  misc_feature 222..1496: note = CDS
  misc_feature 1497..1516: note = RE
  misc_feature 5..228: note = bridgeRNA
ctaatgagacgagcagtgccaggtttgagaggctctgctgtagcagcggccggtgggtcagcactcttggaaccgggcccctattggaggcctattgacagaccgtgcgccctccggttcgccggtggcctgactgctgatggggtgtcgtgcccgcttcgacgtgagcacttgttcattaggtcgcaggggccccgggacgctgtcggagtgtcgggcgtatgcgaagggagaaggcgctggtgctgttcgtcggcgacgactgggctgaggatcatcacgatatcgagatcgaggatgagaaggggcgccggctcgctcgcgcccggctgccggaaggcttggagggaatctcgcgactgcacgtgctggtggctgagcacgcgccggctgagtgggccgatttgccgccagagcaggtcgccgcccgtgtggtggtggggatcgagactgaccgcgggccgtgggtcgccgcgctggtcgctgcgggttacaaggtgtacgcaataaacccgcagtcggcggcgcagtaccgccagcggcattccacgtcgggagcgaagagcgacgccggggacgcgcacatgctcgccgagatcgtgcgactcgaccgcagccaccaccgcccgatcgccggcgacagcgagctggccgaggcgatcaagctgctcgcccgagcgcatcagagcgcgatctgggagcggacccgtcaggtgctgcggctgcggtcggtgctgcgggaattcttccctgctgcgatcgaggcgttcgacgacttggccggtgctgacgcgttggcgttgctcggccgcgcgccggacccggcccgtgccgcgaagctgacccgtgcgcagcttgccgcgatcctgcgtagcgcccgtcgccaccacgttgaagcgaagaccgaggcgctacttgcggtgctgcgtgcgccgtcgctgcgccagcccaaggtccttgaaggcgcctacgccgccgtcgtgacgggccaggtgggtctcatcgccgcgctgaacaaacaaatcgcggagttgcaggtggtggtgggcgagcattttcggcgtcacccggcggctgagatctactgcagccagccggggctcgcagaggttctcggcgcccgcgtactcggcgagttcggcgacgacccgggccggttcgccgacgcccgcagcaggaagaactactcgggccagagcccgatcacacgcgcctccggcaagaagacagtcgtactggcccgctatgccaacaaccaacgactcggcgatgcgttgcacaaacaggcatacgcggccctcagcggctcgccgggcgcacgcgcctactacgacagtttgcgtgcaagaaagatcggccatcatgccgcgctgcgccagctcgcgaaccgacttgtcggcatcctgcatggctgcctgaagaccggcacgcactacgacgagaaaacagcctggcagcatcacacgaaagaagccgacaacccggctgccgcttgacatgaatcgccatggggtgt

SEQ ID NO: 5798 - DNA, 1400 bp, unidentified
  source 1..1400: mol_type = unassigned DNA; note = element_8e25d82
  misc_feature 1: note = core
  misc_feature 2..89: note = LE
  misc_feature 90..1112: note = CDS
  misc_feature 1113..1400: note = RE
  misc_feature 1164..1398: note = bridgeRNA
atgatgagatggtctcctcccctcttaatcggcgtcgcgatgcgccaggatgggtggtatcaagccccaaacagaagcgggaggagaccatgagcaaccgtatcgtgattggactggatttggcaaaagacagcactgcggcagtggcactgggtggccagggccgggagcaatggcgccggacccttcgccgtcaacggctgctgcccttccttggtcgacaggccccctgcatcgtagcgatggaagcgtgcgccggggcgcactatctggcccggcaggcgcaacagtatgggcacgaggtgcgcttgtacccgcctaagcacatcaaggcttaccagcgtggccagaagaacgactacaacgacgccctggcggtggcggaagcggcccagcacgggcgcctgagatcggtaccggtcaagaccgtcgagcagcaggatgacgtactcgtggtccaacagcgtcgccagttaaagcgggagcaggtccggctgggcaatcatatccgggcgctgctggtcgagcgcggcttggttctgcccaaaggcaccgccgcactgcggcggcgcctgccgtcactgcttgaagacgccgacaacggcctgacgcccacggtgcggcgcgtgctgaacgggatctatcggcgttggttggcactgctggaagagctggcttggtatgaccaagagcttgagcgccaggcccgggaagaagacgcccgtcagcgactgtgtgagatgccgggtgtcggcgccgttattgccggtgccctcaaggcctggatgggcgatggcaagcagttccggcgggggcgtgacgcttcggccgccttggggttggtgccgcgtcagcatagtaccggtgggcgccaggtgcttggcggcatcagtaaacgtggcgatcgctacactcgagcgcagttgatcaatggcgcgcaggcggtgctgcgccaagcccataggaaagacgacgctctgcatcgttgggtggttcgtctgcaggccacccgagggcacaacaaggcggtgacggcactggccaacaagctggtgcgcattgcctgggtgatcctggcacgcggtgagcgttactcgcctcgatacgcctgatcagactcgcgacacccggaaagacgaacaaagagagaggaggttcccaccccaggttgcgaaggcaacggacacgcgatgacacaacaggtcagaccggcgtaccgaaaacctgatttggccatcggctcaccgaagccgtagggatgataaggataaggacggtacgcgcgcatctcatcgaggcccgaagcgttaaaccctcgcttcacgaacaggccggatatatggcagcaacctgtccctgcatcgatgcccggagccttgcaaacggggaggagaccatat

SEQ ID NO: 5799 - DNA, 1372 bp, unidentified
  source 1..1372: mol_type = unassigned DNA; note = element_8e2c949
  misc_feature 1: note = core
  misc_feature 2..75: note = LE
  misc_feature 76..1113: note = CDS
  misc_feature 1114..1372: note = RE
  misc_feature 1138..1367: note = bridgeRNA
taatggtatggacgctcccccctgaccggcttgcccggtgagatagtcgatgtgtcacttacaaaggagcccaccatgacaatcaagaccattggcctggatctagccaaacaagtcttccaggttcatgccgtcgatgagcgcggtcaggttgtaatgaagaaacagcttgcgcgtgcaaaactggctgctttctttgccaacctcccaccttgcctggtcggtatggaggcttgttcgagcgcgcatttctgggctatcaagctggccaggtttggacatgatgttcgcctgatggccccccaattcgttaagccttacgtcaaaggtagtaagaccgaccatgtggatgccgaggcgatttgcgaagcagtacagcggccaagcatgcggtttgtccctatcaaacaaccggagcagcaagctcttttggcactacaccgtgcaagacagggattcgtgaaagccagaaccgctcaggctaaccagttacgtggcttgctggctgagtttggcatcatcattccccaaggcatttccaagctgttccagcagttgccaatactcatggaggatgccgagcatggtttgccaggcatgatgcgtgagctggtatgcagattggcagcgcatttgcgcttgctcgacagccaagccaaggagttggagcaacgtatcgaacaatggcatcgccaatccgaatcatcacgccggttggccgcaattcctggcataggaccgattacagcgacagcattggttgctagcgtcgggaatgcacatgcattcgagaatgggcgtcaacttgctgcctggcttggactggttcccaggcaacactccagtggcggtaagcccgtactgcttggtattagtaaacgaggagatgtgtatctgcgaacgctgttaattcatggtgcgcgagcggtcatcgcgcacgcagaacatcgtatccaggatggtacgaactggctgagtcgcctgctgagcaggcgtaatcgtaatgtggcgacagtcgcattggccaacaagaatgcacggatagtatggacattgctgaccagtggccgcgatttcgagtcagggcatctttcattcccggcagtagcatgatttgaacagatagacatacgaagatttacccaccgattgccgcagcgatcatgcagtgatggcgagacaggtcagaccgtagctgagtaaacctgcttgtgcttggcacctcgagtgcactttgttgttcaggtcttggctagcggaattccatcagggacagagatacgttgtctcattaaagtccggatatatggctgcaatcgactctgactcattacccctcatgagcgcttggcaaaatgggagcgtccatata

SEQ ID NO: 5800 - DNA, 1608 bp, unidentified
  source 1..1608: mol_type = unassigned DNA; note = element_8e2f5a6
  misc_feature 1..2: note = core
  misc_feature 3..279: note = LE
  misc_feature 280..1494: note = CDS
  misc_feature 1495..1608: note = RE
  misc_feature 14..299: note = bridgeRNA
ctactactatataggtaaggatagtattcctaacagccagttaggatattaaccgtcttattgcttaagctgtagaatgagtgtagcaagatggtctggccacgcgttatccagaacctagcgttcgtatttcagtcagccaaccagctcctcattcgcggcgttcgttttatgcaggttgaacttttcgttcgcgtgaaaaacccagtagattgaataggcaatgagagaagttggtatcgaccattgcaaataatcttatagggaggatatctcacgatgaatgcagttggtattgatgtttcaaaagggaaaagcactgtcacaatccgcaagccgggtggtaaggtagttttagcgccacgagattataagcataaccgttcagctatcaatgctttaatcaatgagatcaagagtctcgaaggtgaaaccaaggtctgcatggaatgcactggtcgctattatgaacctatggccacatggctatctaatgctgggatttttgtaagtacagtaaatcctatgcttataaaagatttcagtgacgattcgctcagaacacccaaaaccgataaggccgattcgcaaaaaatagccagatacacccttgaccgatgggataaactgaagcagtatggtcttatggatgagacacgtaaccaactaaaaacaatgaataggcagttcgattattatatggagcagaagacatcgatgaagaataacctcatctctcttctggaccaaacatttcctggtgctaatgatctctttaccagccctcctcgtgcagacggaagccaaaaatgggtggattttgtctatacttattggcacgttgactgtgtggccggtaaatcacttgatgcttttacagatcactataggaactggtgtagccgaaaagactatggtttcagtgccaaacgtgcaagggaaatctatgagatttcaaaggatctaatagcagtacttcccaaaaacgaaacaacaaaactaatcattcataatgcagtcgatcaagttaattctatatcaaaaacagtggaaacactacgttcaaaactgtatgatactgcagcaacacttccagaattccccattgtaatggccatggatggtattggccctacccttggtccacagctcatggctgagataggggatgtcactcgttttaagcacagaggcgcattgacagcgttcgcaggtgtggatccaggtagcaatcaatccggacaatatgctcaaaaaagtgtccgaacctcaaaaaaaggctcgcctcatttacgcaagacactctttcaggtcatggatggacttatcaaacgctcacctgctgataatgacgtttatctttttatggcaaagaaacgtgctgaaggaaagccttattatgtttatatgactgcgggagctaataagtttcttcgcatctattacggacgcgtaaatgaatatctaaactcccttaatcaagaaacacagtaaacatcggatattcaatagaggccggcgttaaggcggtcttatttttgtgccaaaaatgcaagcataaaaacatcaaataatacgcaaaaataagcttgactttttatttgcaga

SEQ ID NO: 5801 - DNA, 1627 bp, unidentified
  source 1..1627: mol_type = unassigned DNA; note = element_8e35cc5
  misc_feature 1..3: note = core
  misc_feature 4..259: note = LE
  misc_feature 260..1495: note = CDS
  misc_feature 1496..1627: note = RE
  misc_feature 8..233: note = bridgeRNA
gttcgtattataaggttaaccagaatgctaaatatttctggttgaccttatttattttggtcttattatatcagtagccagggtagaacgtaactgcccgtggggctttgaccccgtcagctaaacagttcgccccctacttgtagaaacatgattgaggctggttgggacttagatctcgtataacaagcgaagctgtgatactgcatggaggattaggggttactggcaaattactagtttaggaggagattttagaatgaatccagtcattggtctggatgtttcaaaaggggaaagtcaagttcaggcatttttagataaaggcaaaccatacagtaagagttttaaagtttctcatactatagaaggtcttgatttacttgtagagtttctggaggtggttaagagagaaactggtaagagaccacctattgttctagaagcgacaggacattatcattcctctgttgttcaatacttagaggaccgtgggtatttaatgataatcattaatccattgatttcttataaggctaaaagttcaagtcttcggaaagtaaagacagatgcgatagatgcttaccatctctgcgagctgttttataaggaggatttagagccgtataagaagcgtggtgtgcagctattaaaccttcggaatcttacaagacagcacgaaaatattactggtgtattgattcaaacaaagctacaatttcaagcgattctggaccaggtcttccctgaatacagaggtgtttttggtgacttatattcggtagtatcactattaactctttcagagtttccctcatctgaagatattttagaggcaagtgaagaaacaattgccgacaaaatcgctgagttatgtaaaagtcgttcccatcgatgggctaaagaaaaagctactcagctcaaggctgcagcaaatcgaaatccgtttgaaaagaccgtttatcaaagccatattttaagtctaggtatgtatatcaatatcattcttcaatacaaagagcacctatccaagttagagtccgagatagatgccctcgctaaaggtgttgaagaatataatattatcaaatctatccctggtataggagaaaagatcgcggcaacaatcatttcagaaattggagagatagatcgatttactgatcctaaaaagctcgtagctttcgctggagttgatcctagtgtattcgaatctggtaagtttacagccaccaaaaaccgaatcaccaaaagaggttccagtaggcttcgtcacgccttatatatggcagttcgttgtgccattcgtgactgtcgtaaaaagaaaaaaactgatgaaattatcccacgaaacaagagaatgcgagagttttacgacaagaaacgtgatgaaggaaagccttttaaagtagccgtaatagcatgcgtaaataagctttcacattggatatttgcccttttaaagaacaaaactactttccaagatatagcttagaacctaaatctaactaaataacacaaaaccttccaaaattagactaatggagggttatttggcatgcatatttttagtataacatgagatattttaagtttttaataaaaaatattgacaaactattagctg

SEQ ID NO: 5802 - DNA, 1187 bp, unidentified
  source 1..1187: mol_type = unassigned DNA; note = element_8e3be1d
  misc_feature 1..2: note = core
  misc_feature 3..209: note = LE
  misc_feature 210..1172: note = CDS
  misc_feature 1173..1187: note = RE
  misc_feature 6..214: note = bridgeRNA
cttgtatgtttcaggccggaccagcgcggtagagtttgaccgccgatgaggcggccagaccggcccgtgcagtttggtagcggctggggtgatcgagcccgtttctgagtacacaacgcacggccgccgtgctggtcttcctgaagcccgaacggttacgcgctgcggcttgaccgacagcgcattcacaagcaggggatccgaagaccatgtctgcttcctcagtggtggtgggcatcgacgtggccaaggtgcacgtggatgtccgggtgctgggcgcccagctcgaggctgagcgattcgacaacgagcccgatgctcattcggcgctggcggcggccttgaagccgctgggcgtggcgctggtggtgatggaggccaccggcggctacgaggcggcgctggcctgcgcgctgcaggctgcgggtttgcccgtggcggtggtcaacccgcgtcaggcacgcgacttcgccaagtccatgggccagctggccaagaccgatcgcatcgatgcccgcatgttggccgagctcggggcgacgctggcccgccgcgacgatttggccgacttcatccgccctctggccgatgcccagcagcaggcactggcggcgatggtgacccgaaggcgccagctcgtgacgatgctgctgtcggagcgccagcggctgcaactggccattgccgtcgtgcgccccagcatcgaggccatgatcgaggcgatccgcaagcaactcgacgaggtggaagcgcagatggtcggccacgtccaggcgcactacgccgagctggacaggctgctgcgctcggccagcggcatcggtccagtggcgagcgccaccttgatcgccgagctgcccgaactcggcaagctcaaccgccgcgagatcgccgccctggtgggcgtggcgcctatggccaatgattcgggcagctccaagggacgaagacgcgtgcagggtgggcgcttcgagatccgccgtgtcctctacatggcaacactcaccgctaccaggcacaaccccgccatcaagaccttctacgaccgcctcctggccgccggcaagctgcccaaggtcgcactcatcgcctgcatgcgcaagctcctcaccatcctcaacgccatggtcaagaccaagcaaccctggaacaaatcgattcacggcgcttgactcgaaagacggtta

SEQ ID NO: 5803 - DNA, 1346 bp, unidentified
  source 1..1346: mol_type = unassigned DNA; note = element_8e44878
  misc_feature 1: note = core
  misc_feature 2..70: note = LE
  misc_feature 71..1084: note = CDS
  misc_feature 1085..1346: note = RE
  misc_feature 1114..1340: note = bridgeRNA
gaatgacatggactccccctcatcaggctctgccacactaggtaagtctgactaccgcctggaggccaccatgtcactatcaatttatggcattgatttagccaaacattcgttcagtatccacggcgaagatgagcaaggcaagatactgatccataaaacaataactcggtctaaagtcctttccacctttgccaatatcccgccagctattgtcgggatggaagcctgtggagcctctcactattgggctcgagagctcactaaacttgggcataccgttaggataatggcgtcaaaatatgtgacgcctttcaggacgggggccaaaaatgacctcaacgatgccgtcgctatctgcgtggctgtcacccgtccttcaacgcgcttcgttaaaatcaaatcacctgaccagcaagctattttgctgctacatcgagcccgtgataactgggttcatgagcgaacagccttacttaaccaactgcgagcaatgctggccgagtttggtattatcgccccaaagggtcgtcatgctatacaaaaagccattcccgaagcacttgaagatgctgaaaaccaactgcccgacttagcaagagctatcctctccgatagttacgagcacttactcaatatcaataagcgaatcgctgaccaagaacgctgctttgatatgctggtttcacgtagccataatgcacagaaaatcatgaaagtggctggcattggccctattaccgccaccgccgtcatagcaagcatcggtaaaggtgagcagttcgacaaagggcgcgactttgctgcttggctcgggctggttccgtcacaatactcaaccggaggtaagccccggcttggccgaataaccaaaaaaggcgataagtacctcaggacattattggttcatggtgccagagctgttatctccgccatcggtaacaagactgaccgcttgagtttatggtgtaaaaacttggtcgaacggcgaggcttcaagcgggccattgtggcactggccgccaaaaatgctcggataatatggtcgctactcagtaacggcaccgaataccaaccaatataaaagccaaactgttttctaaaggaataaatagcttcaccgggtcatggcaatagccaatgatgatgtaaggttcagaccttttgcgggaaaacctgataatgcggcgggcactgtagatgccttctaacgaatgaggacccgcaaccgcgtagtgtcatcagggtcatggcgttgaacgccagtaaacagaccgaatgtagagcggcagtcccaaatcttgcatcacctgacgctgttgttgacaaccgggggagtccatgta

SEQ ID NO: 5804 - DNA, 1624 bp, unidentified
  source 1..1624: mol_type = unassigned DNA; note = element_8e53598
  misc_feature 1..2: note = core
  misc_feature 3..255: note = LE
  misc_feature 256..1491: note = CDS
  misc_feature 1492..1624: note = RE
  misc_feature 7..231: note = bridgeRNA
ttcgtattataaggttaaccagaaatgaaaatatttctagttgaccattttttatatgggcttattataactgtagccggggtaaaacgtaactgccagtgggacagagatcccgtctgctaaacagtttgccccctacttgtagaaacatgattgaggctggttgggacatagatctcgtataacaagcgaagctgtgacactgcaagaaagataaggggtaccggcaaataaaagattaggagatgatggaggatgaatccagtcgttggtctggatatttcaaagggggaaagtcaagttcaagcttttttagataaaggcaaaccttttcgtaagagctttaaagtatcacatacacttgaggggcttggttcacttattgagtttttagaacaggtgcagcaagaaacaggtcaaagaccttgtgtgattctagaagcaactgggcattatcagacgccagttgttcaatatctagaagaacgtggatatttacttattattattaatccattaatttcttacaaggcaaaaagtacaagtctaagaaaagtaaagacagatgcagttgatgcttttcatctctgcgagctgtattacaaagaggaattagagccatataaaaaacgagggatacagctattaaatcttcggaatcttacgcgacaacacgaaaatatcacaggtgttatgattcaaactaagctccaatttcaagctgtacttgatcaagtatttcctgaatatcgaggggtttttggagatttgtattctgtcgtttcactcttaatactaaaagaatttccgtcatctgaagacatacttaaggcggatgatgaaacaatttcgagaaagattaaggaattatgtaaaagtcgctccattaggtgggcaaatgagaaagctataaaactaaaagaggcggcaattcgtaacccctttgaaaagaccgtctaccagagtcatatattaagcttaggtatttacattaacattattcttcaatacaaagagcatctatcaagattagagtcagagatagacgctctcgctaaagatattgaagagtataatattatcaaatccatccctggtattggagaaaaaatcgctgccacgattatttccgaaatcggtgagatagatcgatttaaccatcctaaaaagcttgtagctttcgctggtgtagatccgagtgtatttgaatccggtaaatttagagctacccaaaaccgtattacaaaaagaggatcaagtagacttcgtcatgccttgtatatggcagttcgttgtgccattcgtgattgtcgtaaaaagaaaaccacggatgaaatcatccctcgcaaccaaaaaatgcgaaaatattatgataaaaaacgcgaagaaggaaagccttttaaggtagctgttattgcttgtgtgaataagctcttacattgggtttttgccctgttaaaaagtaaaacaactttccaagatatagcatagaacctatatctaactaaataacgtaaaaccttccaattatgagaaataggaaggttatttggtatacccttttttagtataacatgaaatatttttagtttttaatgaaaaatattgacaaactattagctgg

SEQ ID NO: 5805 - DNA, 1370 bp, unidentified
  source 1..1370: mol_type = unassigned DNA; note = element_8e53c6e
  misc_feature 1..2: note = core
  misc_feature 3..82: note = LE
  misc_feature 83..1108: note = CDS
  misc_feature 1109..1370: note = RE
  misc_feature 1077..1357: note = bridgeRNA
tgatggattggatgcccctcctgttggttcattatagaaccgtccgagccatggtggtgcggacgtcttgcaggaggaacaaatgtcagaagcatttatcatcggtatcgacctggcgaagcgcgtttttcaaatacacggcgctgatgccgcaggtaaagttttataccgtagaaagctgagccggcctcagttcaataagtttctaaatgagcacccaagttgcatttttgcgatggaagcgtgcgcgtccgcccatcattgggggcgtgaagcgcttgctgcaggtcatgaggttcgattggtaccggcgcgatatgtgaaaccgtttgtcaaacgccacaagagtgatgttgtcgatgcagaggccattacagaagccgcgatgcgtccctcaatgcgcttcgtcccagtgaaagccccggaacagcaagcacaggcgatgttgtttcggacgcgggaattgttcgtgcggcagcgcacccagcttatcaattcgcttcgcggatacttggcggagtttgggattgtgctgcggctacgcattcggaacgctgatattctcaaacgagaagtagaggaacaggcacataaactgcccgacgaggccaaacgcttggcggaacggctcctagcgcagatcgagactatcagcgcagaagtcgaaggtctggatcattccatcaagatgcatgcagaaacgtcagaggaaacgcggcttatgcaaacgatgcctggcgtcggcccaatgtccgccatcgcaatttcggccttctgtcctcccgccaaaaactttcgcacggggcgggattttgcagcatggcttggtcttgtacctcgacagcattcgacaggtggtaaggaacggttggggcgcatcacaaaaatgggccagaaagatgtcaggcggttgctgatcatcggtgcaatgtccgttatcaattccatcgaacgatggaagcgttgtgccgaaccatggttagcgcgtatgcttgaaacacgcccccggatggttgttgctgttgctttggcaaaccgcatggctcggaggctttgggccatgttgatgacgggccagatttatcgcattcgcggggccgtcgcttagcggcagacccacggataccggcaggtatgtgaaggacgaaaggatcgactaaggaaagcggatcgacgagaacgaacatggaaaaaccagtgcaacccttcgcggcttcgagcccgataaactgatttggagccacgttcgcgcatctccataagggccagcagccaagtgtgctgcacaaacaggccggacacgtgactgcacccgatcatgctatctaaacgtcgaaacaatcacccacataaaccggggcatccacacg

SEQ ID NO: 5806 - DNA, 1411 bp, unidentified
  source 1..1411: mol_type = unassigned DNA; note = element_8e567da
  misc_feature 1: note = core
  misc_feature 2..231: note = LE
  misc_feature 232..1398: note = CDS
  misc_feature 1399..1411: note = RE
  misc_feature 14..246: note = bridgeRNA
ctacttgtttcattgacgcaggatcggtgcctggcgaggctcggtctaggcgctcggctcgtcgctctcatttcggctgcgcacgcgtcgtcgtgtggctctcaattggcctgcgcgagccgggcgtcgcttcagtgagcagggagaggctcaagaggggtttgtgctactcaaagtagtcgtgccctcccagctcgaacaccggtatcggagcgagcatggaggctcgaaatgactgcagtgatcatcggaatggacccacacaagcgatcggcgacgatcgaggtgatggctggcgacgaaacgattctcggtggcgggcggtatgccaccgacgtcgttggctatcgggagatgctgcgtttcgggaagcgattcccggagcggacctgggccgttgagggatgccaaggcatcggcaaacacatcgtgaaccggcttctcgctgacggtgagctggtagtggatgttccgccgaagttgtcggctcggactcggatgctcgttgcgggtcagggccgcaagactgatgagaccgacgctcacaccgtcgcggtggtcggcactcgaatgagtggtctgcgcccggtcgtgaacgacgaacagctcgcggtgttgcggatcttggttgaccgtcgccgctcattgggtgaggaccacacccggatggtgtcccagcttcaccagctgctgttggagttgattcccggcggtgcgcagaaatcgttgtccgcggcgcaggcgaaggcgctgcttgcgaaggtccgcccgcgtgatgccgcaggcaagacccggcgtcgtgtcgcagcagagttgatcagtgatctcgagcgggtctatgcccgcaagaaggccgcgaacaaagaactcaacgaactgctcgctgccaccgacaccactctcaccgacctgcacggtatcggcccgtccggcgcggcacgactgctcgtcgaagtcggtgacatcacccggttcccgtccaaggcgcacttcgcgtcctggaacggcaccgccccgatcgacgcctcctccggtgaccagacccgacaccgactgtcacgtcggggaaaccgtcagatcaaccgggtcctgcacatcatggccaccgtccaactacgaaacccgaccgaaggacgcgcctactacgaccgcaagaaagccgaaggcaagacatcgatggaggcgatgcgtgcgctgaaacggcgactgtccgatgtggtctatcgccagctactcaccgacgcgctgacgaccaaggcgacgggcccgggaggacaagcaggggcgtctcttcaatccagcgcggccgactcacaccccgatgccggcacttcggatcagtcacttcccggacccgccaccgacaagcctagaacggacctcgccgccgtgtcttgacacagaggggtgc

SEQ ID NO: 5807 - DNA, 1507 bp, unidentified
  source 1..1507: mol_type = unassigned DNA; note = element_8e591c0
  misc_feature 1..2: note = core
  misc_feature 3..247: note = LE
  misc_feature 248..1486: note = CDS
  misc_feature 1487..1507: note = RE
  misc_feature 6..241: note = bridgeRNA
ctaatgggttctaccgatcctgtggcaggctcggttccggtagcggccggcgggtcagcactttccgaatctgatcgttgaggtcttgcggcagaccgtgcgcctgtcggtcgtgaggaggcgtgaccgctgctgggatgacgtgcccctgttggtccgggtgagcacgtgaccattagatcgccgggagtcctcctccacgctgctgacctgtcggtttgcgcaacaaggagaagggagagcggtcatgctgttcgtgggtgatgactgggccgaggaccaccacgacgttgaggtcgtcgatgaccaggggaaggtgctggtacgaaggcgactgcccgaggggctaaccggggtgacccggtttcacgagatagtcgccgaacatgcaccggcggagtgggctggcctggacccgggcgaggcggccgcccaggtcgtggtcgggatcgagaccgaccggggcccctgggtcggggcgctggtggcggccgggtacacggtgtacgggttgaacccgctgtcggtggctcggtaccgggagcggcactccacctccggggcgaagtcggatgccgcggacgcgcacctgctggccgagatcgtccgtctggaccgggcccaccaccgcccggtcgccggcgacagtcccacgggtgaggcgatcaaggtgaccgcccgggcccaccagtcgctgatctgggaccggacccggcagatgctgcggctgcgttctgccctgcgggacttcttccccgccgcgctggccgcgttcgagcagctggacgcccccgagacccttgagctgctcgcccaggcacctgacccggataccgccttgcgactgtccaaggccaagatcgtccgggcccttaccaccgcgcaccggcgggacgtgtccgcccgtgcggaggcgatcaggcaggttctgacctcccccgtgctgcggcaacccggcccggtgcaacacgcctacgccgcgatcgtgacctgcgaggtcgcactcatcacggtcctgaacactcagatcgagcggctcgggcaggtggtggccgagcattttggccggcaccgggacgctgacatctacaccagcctgcctggtctaggtgtggtcctcggcgcccggatcctgggcgagttcggcgacgacccgtatcggtacgccgacgccaagtcccgcaaggcctacgccggcaccgcgcccatcacccgcgcctccggcacccgacgtgtcgtgctggccaggtacgcccgcaaccgccgcctcggcgacgccctgcaacagtgggcgttctgctccatgcgcggttcacccggcgcccgcacctactaccagtccatgaggtcccgcggcaccggccaccaggccacgctgcgacagctcgccaaacgctgggtcggcatcctgcacggctgcctgcgccacggcaccctttacgacgagaacaccgcttgggagcaccacctcaaaaccgccgcttgacagaaacagaacctgggatgt

SEQ ID NO: 5808 - DNA, 1352 bp, unidentified
  source 1..1352: mol_type = unassigned DNA; note = element_8e5f3e2
  misc_feature 1..2: note = core
  misc_feature 3..71: note = LE
  misc_feature 72..1100: note = CDS
  misc_feature 1101..1352: note = RE
  misc_feature 1104..1342: note = bridgeRNA
ttatggatggtccgcccctcccgccgatctccgtgtaggatgtcggtgttcaatggaggaaggagcggaccatgatcattgtgatcgttggcatcgacctgggcaagaacagctgcagcatcgtcggtctcgacagcctggggacagtggtggttcgacggcgattgcgtcgtgacagcgtcatcgcgttcgcgtcgaagctgccggcctgcatcatggccatggaggcgtgttgcggcgctcatcacatgggacggtcgctggcagcactggggcatgaggtccggctgatgtcgccggaatatgtccggccttacgtaaaggcgcagaagaatgatgatcgcgacgctgaggcaattgccgaagcggcaacccgtcccaccatgcgctttgtcgaactcaagagcgaggagcagctcgacgtccagacgctgcatcgggtgcgggatcggctggtcggagaacgcacgtcgctgaccaaccaaatcaggagccttctgctggaacggggacatgttgcggcacagggccatgcccggttgcgtcacttgctcgctgacctgctggaccccgccacgtgcagcctcagtgcccgcatggctttcctgctcggcgacatgcgcacgcggtgggacgagcttggccgccgcattgccgcttttgacgccgagttctcggccatggctcggaccgatgagcgagcacggcggctgacaagcattccgggcatcggtgcgctgaacgccaccgcattggtcgccgctgtcggcaacgccgcgacattcacgaaaggacgcgatctggccgcctggctgggtctggtgccgaggcaggcgacaacaggcggcaaaccaaagctgctcgggatcacaaagcgcggcagtcgatacctgcgcaagatgctgatccaaggcgcgcgatctgccatgccaacattggcgaaggcgaatacagcaataggcgcctggctgcgtgcgctgcttgtgcgcacccatcccaacatcgctgttgtcgcccttgcggcgaagatggcccgcactgtctgggcgcttctgcggcacgggcgaaattatgaagccgtgccgcaggcggccggttgaggaacacgcgcccgtcttgaacacagccgggcgcaacgagctgcgagtggtgaaaggaagatggcctgacagttgatcggcgttgcaaaaacctccggcgcaaaatggcccaccgaggccggcccctttatgaggattgtgacgcgcggatctccatcttggcggcggcctttgtgccgacatgccggatacgtttgtgcagactgatcatgttatcaaaaattgccgcttgcagacggggcggaccatacg

SEQ ID NO: 5809 - DNA, 1566 bp, unidentified
  source 1..1566: mol_type = unassigned DNA; note = element_8e8a943
  misc_feature 1..2: note = core
  misc_feature 3..246: note = LE
  misc_feature 247..1422: note = CDS
  misc_feature 1423..1566: note = RE
  misc_feature 3..225: note = bridgeRNA
ctcgtattataaagtagtagtgtttatagaccctctccaaggtctgtatgctatactgtttggagatactgtggattggtgcaatccccctaccgctcgatggtttgagaaaggctccaaccacagtctctttgttcatttgttaatcagttagataccgcatgacggttgatttagaacgaggttacaatcgcaaagagccctgtggttctaaacagtatcaatatatttcaaaggagatttattatggtttacattggaattgatgtttctaaggacaaacatgactgctttattacaaactcaaatggagaaatattatacaaatcttttacgatccccaacaatcgtgaaggttttgaaactttgtttcaaagaatcgaatccgtatctgatgattttacaaaagtaaaagtaggactggaagccaccggacactacagttacaatcttctggggtttcttcttgataaaggtctcaccaccttcatcatcaatccgttacataccaatttttacagaaaaagtctcagccttagaaagacgaaaacggataaggttgattcccgtaccattgccactatgattatgtccgatatgaacttaaagccctactcagacacatcctaccacaatgaggaattaaagtcactcacacgttaccgttttgataaggttcgggaacgggcaaaattaaaatcctccgtttcgcgtcttgttaatatcctttttccagagctagaaacgcttgtacccaagcttcatctgacttctgtttattctttattatctgaatttccaggcgcttctcatgtagcatatgctcatcttacaaagctgaccaatctactttctcaaacttctaatgggcgctatggaaaagatactgctattcttttccgagaggccgccagaaactctatcggctctgttatgcctgccaaatctctggaattaaggcacacactccggctgatcggcgaactggattccgagatttctgaaattgaatccgaaatcaaacggatcatggatcagatttcttctccaatcctcaccattcccggtatcagctaccgaatgggagctatgattcttgctgagattggtgatttcagtcgttttagttctgcagataagctattggcatatgctggaatgtctccctctacttaccaatcaggacaattagataactgctatgcccacatggaaaaacggggttcacgctatcttcgatatgccctttacaatgctacaaagtatgtctgtcactgggacgaaaccttcaaaacatattttgagaaaaaacggtctgaaggaaagcattataatgtcgctttgtctcacgcaacaaagaaacttattcgattgatttttgcaatggaaaaatcaggacggacgtatataccagcatcttaacttgttctgtaaatatctccttttagagcacctgcaaagatgttcttgttgtcatgcagttttcaaggttcaaaatatatctgaaatgcgtttctgcaattcattcaaaaattttcattttagacttgacttttaatagttagt

SEQ ID NO: 5810 - DNA, 1353 bp, unidentified
  source 1..1353: mol_type = unassigned DNA; note = element_8ea02dd
  misc_feature 1: note = core
  misc_feature 2..65: note = LE
  misc_feature 66..1100: note = CDS
  misc_feature 1101..1353: note = RE
  misc_feature 1114..1343: note = bridgeRNA
tatggaatggcccgcccctcaccacgcggcgttaagttggcgccggatattgtgaggaggaagacatgtccgagcaaatcatcgccgtccttggaatagatctaggcaagaacagcgtcagtctgaccgggctggacgcgaccggtgcggtgatcgtccgtaagcggacgacccgtgatggcgcgatcaagttcaccgccaaactgccctcttgtgtcgtggcaatggaggcgtgctgcggcgcccactttatggccaggatcatggtcggccaggggcacacgatccgactgatgtcgcccgagtacgtgaagccctatgtgaagacccagaagaacgacgatcgcgacgccgaagcgatcgccgaggcggcaactcgaccgacgatgcggttcgtcacgcagaagaccgaggcccagcttgatctacaaacgctccaccgggtgcgggagcgcatggtgatagccagaaccgcattgaccaatcagctccgtacgatactgctcgaacgcggcctgaccttcccgagggggcgcaagaccttaatgcgccgccttaatcaactgcctgccgagctcaatgggctgggcgcgcgaagacagcaactggtcactgacattcatgccgaaagcgcggaactcgacaaacggatcgaggcgttgaacgacgaactggccgaagtcgcccgccgggacgaatctgcccggcgattggcgacgatccctggagtaggtgtcatcaatgcgaccgcattggttgctgccatcggcgatggcagcgccttcgccaaggggcgcgacctaccggcgtggcttggtctcgttcctcggcaacacacaacgggtggcaagaccaaactcctgggcatcagcaagcggggcaatcagtatctgcgacggcagttgatccacggtgcgcgatccgtgttgctccgcctcaaggagacgcaaacacctttgggacactggctcaacacgctgcttgggcgcgtccaccctaatattgctgtggtcgccttggccagcaaacttgcccggatcgcctgggcattgctgcgccatcgtaccgacttcgatcggcgcgccttcgccggcgcctgatcttcatcgacgcgcggtcggcggcagccggtcgcccgtgaggtctgcgagaggtgcagaacagatggcctgaaggtctatgcctgcggttcggaagcctggttaaaaaaatggccctcgcggccgtcatgcttatgaggcctggatcgcgcggatctccatcttggccgagggtaaccccgagaccggatacgttgatgcagaccgatcgtgccatccgaactttacccttgccgacggggcgggccatacg

SEQ ID NO: 5811 - DNA, 1159 bp, unidentified
  source 1..1159: mol_type = unassigned DNA; note = element_8ea78fc
  misc_feature 1..2: note = core
  misc_feature 3..373: note = LE
  misc_feature 374..1147: note = CDS
  misc_feature 1148..1159: note = RE
  misc_feature 19..198: note = bridgeRNA
cttctgtatctcgagattgctatgctgcctccgtcagccaccttggccgaggttactggcggggcggtgtatggcgtctgagccttgtgggtttgaccacgtttgctagcgagccggcaccgtctctcttcatcatctcgaacagttggatgtggccaagttggaccacggatcagaaggaagagaacatggacacgttaacacagactgcaatcatcggcatagatgtcagccgcgattggctggacattcattgcttgcccaacaaccaaagggagcggctggccaatacagaagacgggcatgagcgcgtgtgcgaactggcaaagtcagcgcgtgcgctggtgtgttttgaggccaccggcgggcaggaatggcggttgtggtcggccttggacgccaaggggattgcgacgcggcagttacccctgcccagatcaaagccttcgctgcaagccggggtacacgggccaagaccgacaggatagatgcagaactcattgcgcggttcatggcgttcaggcctgacgcaggacgcggcctgccgcataaaaagatacgttttctcagggcgttggtgtccaagcgggggcagctcgtggaaacacgcaaacggcttctggcccagatcaaggcccatggaaagctgggatcggcagatatgttcgaggccatggatggtgaactcacggacctgctggaccgccagattgccgggctcgaagttcagatcgaacaggtcatcgccatagaggagagcctcgccaataccgccgacatcctacggtccgtgcccgggatcggcccggttgccagcacgatgctgatcgcggaaatgcctgaactcggccagatcaccggggaacaagccgccgcgctcaccgggcttgcgccaatcgcacacgacagtggagccatgcgtggcaagcgtgccatcggcggaggacgacggttgctgaggcatgtgatgttccaggccgctctcgtcgccagccatcacaatccagtcctcaagacattcgccgaccgtctccgcgccgccggaaagccacacaaggttgtcatcactgctgttgcgagaaagctggtcacaatcgtgaacgcactatgcaaatcgcgccaaaaatggacgctgcagacctcttgagaaatacagttg

SEQ ID NO: 5812 - DNA, 1555 bp, unidentified
  source 1..1555: mol_type = unassigned DNA; note = element_8eaa0bf
  misc_feature 1..3: note = core
  misc_feature 4..285: note = LE
  misc_feature 286..1449: note = CDS
  misc_feature 1450..1555: note = RE
  misc_feature 37..269: note = bridgeRNA
tcacgtataataaaaatcatccgaaaggggttgatttttattatatctcctttcttaaaaatcagattatattcgcagtagtagttacctgcggtataataaagacaagcactgtggatttgtttctatgtaaatacagctcagactggtcgaaggtgactcaaaccacagtggtttgtcctgaatggtaatcagttagttaacgcttagacgtttttatttgcgtgaatacaaagacaaaccgtctgtggaaaacagcagtgcagaaaagtaaaggaggaaaccatgtattacattggaatcgacatttcaaaattcaaacatgattgtgccgtaattgacgacgccggcgatgttgtcattccctcgtggtcatttgcaaatgaccacgagggatttttgcagttcaaagcgttgttggactctcttggcccggagacaagaataggacttgagtctaccggtcattacggcacgaaccttaaacttttccttgaatcgagcggcagcacgttcatggagtttaatcctctgctgatcaatcgctttgtcaaaagtaaaactcttagaaaaaccaaaacagatgcgattgattgcgagatgatcgcacggtatctgatgacggtagagtacaagccctatccatcatcattttaccacacagagaaactaaaatcactaacaagatttcgagacagccttatacggcagcgaagccgtcaacttgtagaactgacaaacatcttagacaaggtttttcctgagtttaagccatttttcaaaaggaaattctctgctactgcgttacatatccttgctgcatattcgtcacctgaaaggattgcgaatatgaatgcacgttcctatgaaacgctcagaaaattatctcgcggcagttttactgttactgacttcacgactcttaaacgccttgctcggaacactatcggacaccctaatgatttcttactgaatgaaatgactatgacaatagacattttcagtcgattggactcaaaggtgaatgaaaccgaagctctcatcagtgaatgtgtctcggagttaaatccacccatgctaaccattccgggtatcggagttgattctgctgctgttattcttgccgaattcggtgacttttccaagtacgaaagtccggctcagcttctttcattcgccggtatggaaccgggatattttcaatctggcacctccgaatctaccggtcgaatggtaaagcacggttcgtcttatttgcgatacgctcttatgaattgcgctcgttctgttgtaaactacgaacctacattcgcagaatattacgcaaagaaacgtgccgaaggcaagtcttaccgcgttgcgctttcccacactgccaagaagctcatccgagttctttttacccttcaaactaaaaatcttgtttacgatcctgattctatgagatgattctaactgatattttttaagtccttgaaacatagggcttgtttaagtgcgcctttttttctgttctctgaattttttaaaaaaacacttgacttttaatagttag

SEQ ID NO: 5813 - DNA, 1224 bp, unidentified
  source 1..1224: mol_type = unassigned DNA; note = element_8eb4a56
  misc_feature 1..2: note = core
  misc_feature 3..237: note = LE
  misc_feature 238..1209: note = CDS
  misc_feature 1210..1224: note = RE
  misc_feature 6..212: note = bridgeRNA
cttgtatctcgactaacgcctcgtcagaggcgatagttctcgactgatcatcgagggaagaccgagaagccgtccagctcctagggcctcgagcccgcattatagatacgtgctccggccttccacactcactcagcaagttcgaacggtatctagtggcccgcttcggcgtgagcacgtattggcaaggcagaaccgagtgcagtggtgatcttttcggatttcagggagaagaccatgtccgctttcgtgggtatcgacacagccaaaaacaccttcgacatcgctacgccgttggacaacggcaagttccgtacgaaggccaagctgcccaataacgcttcaggcttcagcgaggtcgaggcctggctggagaaacatgccgatccgcaagcctgggtcgtcatggaggctaccggcacctatcacgaggctctcgcagacttcctgcatgcaaaaggttatcgagtttgcatcgttaaccctgccgtcattcatgcgttcggcaaggaggatttgcgtcgggtcaaaaccgacaaagccgatgccaaactgatcgccgcctatgcccagcagaagcagcacaaactcagagcctgggtaccagaactgcctgctcgccgtcgtttaagggctttagtccggcgactggaggatctccaggaaatcctgcaaatggagaccaaccgcctggacgtcgcccaagccaacgtccaagcctcgatcctgtccgtgatcaatcacgtgaaaagtgagattgccgcgactcagaaggccatcaaagacaacattgatgacgatcctgacctacgtcagaagcgtgatttgatcgtgtccatcgacgggttgggtgaaacgagcgccgccttgatcctcgccgaactgggcgaccctctggactacagtggccctcgcgctgttgtggcatttgcaggcctgaatccattgatagaccaatcaggtaactacgttggtccgacgccgatatccaagaccggctcggccagcctacggaccggaatgtacatgcctgcgatggtggcgatgagatggaacccggcggtcagggcactgagcgagcgcctgaaagccaaaggaaaggcccctaaacagatcatctgtgcagcaatgcgcaagctgttacatctggtctacggagtgctcaaatcaggcataccgtttgacccaaacatcgcgcttgcgcgatgagggtcaagacggtat

SEQ ID NO: 5814 - DNA, 1375 bp, unidentified
  source 1..1375: mol_type = unassigned DNA; note = element_8eb65da
  misc_feature 1..4: note = core
  misc_feature 5..80: note = LE
  misc_feature 81..1112: note = CDS
  misc_feature 1113..1375: note = RE
  misc_feature 1116..1363: note = bridgeRNA
atgatggggtggacggcccccgaacggcatcgatgtgccagactggcgatgtgagtcgaaccagacaaaggggaccgtccatgacgaagattagcacgattgggttggatctggcgaagaacgtgtttcaggttcacgggattgatgcatcgggaacagttgtggtgaggcggcagctcaagcgggcggccgtagagaagttcttcgcggggttgccgccgtgcctggttggcatggaggcttgcgggagcgcgcatcattgggcccgggtgatcagacgccatggccatgaggtgcgactgatgccgccggcctatgtgaagccctacgtcaagcgcaacaagaacgacggccgggatgcagaaggtgtctgcgaggcagtgagccggccgacgatgcgctttgttgcggtcaagagcgtcgagcagcaggcgacactggccgttcacagcacgcgggccctgctggtgcggcagcggacgatggcggcgaacgcgttgcgagcggcattgagcgaagttgggatcgtggcggcgcagggatatgaggggctgcgcgagctgatgaccaggctcgaagagccgagcgaggagattccggagaatatgcgttgtgctctgttgctgctcgccaagcactggcaggcgctcgacgccgatgagcgcgtactcgaacggcagatcggcaaggccgcccgtggcgatcgggacgcgcgccgtctgatggaagtcccaagcgtcggcccgatcatcgccagcacggtgttggccaaagtgcccgatgcgaaggtgtttcgctccggtcgagacttcgcggcctggatcgggctcacgggcaaggaccacggaaccggaggcaagcatcgcccgggacgcatctctaaacagggcgaccgtatgttgcgggcgctgctgatcagcggagccagcgcccatctgcggcaacaaaagaggcgtggcgtcactgatccgtggctgcgcgatcttttggcccggcggccctacaaggtcgtcatggtcgccttcgccgccaaaaccgcccgcatcctctgggccatgctgagcaaaggagaagcttaccgagaccgcgcgagcgcgccggctgctgcctgatcgaagggcgacagccgccgcgctcgcgctcattcctatcggaagggcaatcaaggtgtgatggcaaatggtctggaaaccgggatcgaaacactccgacacgtcatcgcgcgtcatagcgcgccgcaatgattggaattcgatccgcgatctccatcagggcccgcggtcaatggccgcattcagaggccgtatacatgaccgctccccgatcgcttgccgaagcaccaagaaaacccttgccgagagggggccgtccatac

SEQ ID NO: 5815 - DNA, 1400 bp, unidentified
  source 1..1400: mol_type = unassigned DNA; note = element_8ec042b
  misc_feature 1: note = core
  misc_feature 2..89: note = LE
  misc_feature 90..1127: note = CDS
  misc_feature 1128..1400: note = RE
  misc_feature 1172..1392: note = bridgeRNA
caatgggatggacgcccccaccctaaacggcatcaacgtgccaaagtggaagtgtcgagcaaccacttgaaaggataggagcgtccaccatgaagattacaacggtcgggattgatttggcgaagaacgtgttccaagtgcatgggatcgacgagcggggtaaggcggttcttggcaaacaactgcggcgcgcccaagcagcggtattttttgcgaatctgccgccgtgcgtgattgggatggaggcctgcgcgagtgcgcatcactgggcacggacgttgctgcgctttggacatacggtacggcttattgcgccgcagtttgttaagccttacgtgaaaacgaacaaaaatgatgtggccgatgccgaagcgatctgtgaggcggtgggccggccgaatatgcgcttcgtgccgatcaagagtattgagcagcaggcaattttatcggtgcatcgggtgcgccaggggtttgtaaaggcccgcaccgcacaggccaatcagatccgcgggctgcttggtgaatttgggttggtgattcctcaaggcatctacaacgtggctaagcgggtgccggagctgctcgaggatgcgagcaatgaactacctgtgccgtttcgccacctgatcgatcgcttgactgagcatctgaaggagctggatcggcgagtgaaggaggtcgagagggaaataattgcctggcatcgcgacagcgagctcagccgtaagctcgagaagatcccgggcatcggcccgctggccgcgagtgcactgcttgcatcgatcgcggatgcgcgaagctttgacaacggtcggcaagtgtccgcgtggctgggtctggttccacgccaaagttccagcggcggcaagccgacgctgctcgggatgagcaaacgcggcgatgcgtacctacgcacgctgctgatccatggggcgcgctcggccatcctggcggcaaagaacaaggtcgacaacacccagggatggttgaccgatctgctcaagcaccggcatccgaatattgcggcggtagctttggccaacaaaaacgttcgcaccgtgtgggcgatcctcgcccacgggcgcgaatttaaacccgactatgtgccgacgcgcatggccgcataatccgctgagttgctgacaagaacggcagcataggagaacacaccaccgattgctcaggcgatcacgcagtgatggcaaaacaggttagaccgtggttggtcaaacccagaacggctgcagcacctcgagtgcgagaaggcgatagggagccaatcagccaaacccatcagggacagcggctcaggccgcatcaaaagtccgaatgtacggttgcaatctgatcctgttagccctcatgaactgaaagcttggccaagtgggggcgtccatgta

SEQ ID NO: 5816 - DNA, 1493 bp, unidentified
  source 1..1493: mol_type = unassigned DNA; note = element_8ec3c3e
  misc_feature 1..2: note = core
  misc_feature 3..243: note = LE
  misc_feature 244..1473: note = CDS
  misc_feature 1474..1493: note = RE
  misc_feature 13..230: note = bridgeRNA
ctaatgagttctgggagtgagccatccggcagactcctggatggacagccgccgacaggtgagcacttggtttcccaggacttcgagtcctgctgaaagatcgtgcccctgtcggtcggccgggagagttgatcgctgatgggatgtcgtgcccgcccgatctgggcgtgagcactggttcattaggtcgctgatagctctccggcaggctggcgaagcgatggggcggacgagggaggggctgtgcggctgttcatcggagacgactgggccgaggaccaccacgacgtggaactgatgaacgagcgcggcaagcgcctggccaaggcccggatcccggaaggcgtcgccgggatcgccaaactgcacaagctggtcgccgaacagctcggcgaggccgctgagagcgacgacaccgaggtcgtggttggcatcgagaccgaccgcggtccgtgggtgatggcgctgctcgctgccggatacacggtgctggcggtgaaccccctggtcgcggcccgctatcgggaacgcctggcggtgtccggcgccaagagcgacgccgccgacgcgcacatgctggccgacatggtgcgcgccgacggccaccagctgcgccccgtggccggcgacacggacctggccgaggcgatcaaggtggtgacccgggcgcataagaccctgatctgggaacgcacccggcacacccaacggctgcgacacgcgctgcgggacttcttccccgccgcactggccgccttcgaggacctggacgcccccgaggcgttggagctgctggccaaggcccccgacccggcctcggccgcccggctgtcgacgtcgcagatcaccgccgctctcaagcgcgcccggcgccgcgacgtggagaccaaggccgaccggatccaagccgcactgcgcgctccccacctggggcagccgccactgacaaccgcggcctacgccgcctccgtgcgcgcgctgaccgccgtactggccgtggtcgacacgcaagcgaccgctctgcaacaggaggtcgaggcccattttgggcagcacccggccgctaggatcgtcgtctcccagcccggtctgggaccgatcctcggcgcccgggtgctcgcagaattcggcgacgaccccgcccgctacgccgacgccaaagcccgcagaaactacgccgccaccagcccgatcacccgcgcctccggcaagaaacgcatcgtcgccgcccgctacgtccacaacgaccggctcatcgacgccctgatgttccaggcgtccaaggccatcgtctgctcgccgggcgcccgcgcctactacgacaagcagcgcgaacgcggcgccggctacaacgccgccctgcgccaggtcgccaaccggctcgtcggcatcctgcacggctgcctgaaaaccggcagcctctacgacgagaccaccgcctgggcaaaccagcccaaacccgctactgcttgacacattcatttcagggatgt

SEQ ID NO: 5817 - DNA, 1375 bp, unidentified
  source 1..1375: mol_type = unassigned DNA; note = element_8ec45e0
  misc_feature 1: note = core
  misc_feature 2..314: note = LE
  misc_feature 315..1121: note = CDS
  misc_feature 1122..1375: note = RE
  misc_feature 1116..1332: note = bridgeRNA
gaatgaaagggacttcccctaaattaaggttactgtactcacttttgtgccattatggggaagataaccaaaattcgaatataggggaagactatgattattacaaccgttgggatagaccttgctaaaaatgtctttgctgttcatggtgttgataaaaatggtattcctgtctagttaaccctaaagtgcctcgaaccgcattgccagagctaattgctaatttacctccttgcacgatcggcatggaggcctgttccggcgcacattactgggcaagattattcacgcggtatggtcataacgtccgactcatggcgcctaaatttgtttctccttatcgcttagcaggtaaagccgggaagaatgatgcggcggatgcgctggcgatttgtgaagcggttcgtcggccacatatgcgttttgttcctgttaaagatgaagaacaacagtcaatgcaatgcttgcaccgtacccgacagggatttattgaagggcggactgcatcttataaccgtcttcgtggattagtctctgaatttggtttcattgcaccacaacgtacggaatcgttacgccgcctggttgcagagcacagggaaaacctaccaggatgggtccggcagtgcatcgatactctgctagaacatattgatgccattgagttgaaaattgctgagtatgatcgcatcctggcaacaatcgctaagcaggatagccgcagccaaaatctgatgaaactcaaaggggtgggtccaacaacggcgagtgcgctggttgctagtattgacactgctcatgattttaaaaatgggcgtcagttggcagcttggctcggtttaacaccgtcacagtacagtagtgggggaaaatccagactgggaaaaatcaccaaagcgggtgatgcctacttacgcaccttgcttgtccaaggagcacgttctgtcatgattggtgtggagaagaaacaagatcctttcagtcagtgggtgagttcgctgagccaccgccgaggttactggcgtactgctgtggcaatcgcagccaaaaatgcccgtttatgttgggcgtccctgttttatggtgatgacttcaggttctacaataagtcatttaattgacgcagtaaaaatatcttatctgaactgtcagcgttgatgtaaaagggttagacccccgtgaggcatttctgtaaaagtactggatattattatccgtttagcgaacgagaatcttacgagcgtctttcatcagggtccgaatcgataatgattcatcatggccgtttatagtaccgcagtcttatccctttaacttcagtgatagatagccagacagaaaaaaccggggttgactaatcggggaagcccttata

SEQ ID NO: 5818 - DNA, 1467 bp, unidentified
  source 1..1467: mol_type = unassigned DNA; note = element_8ec46a9
  misc_feature 1: note = core
  misc_feature 2..87: note = LE
  misc_feature 88..1116: note = CDS
  misc_feature 1117..1467: note = RE
  misc_feature 1232..1462: note = bridgeRNA
taatgggatggtcgcccctacccgaaacggcatcagagtgccaaagtggcgaatggaaattcccaccaaccaagagaggcgaccgaaatgaagattacgacagttggcattgatctggcaaagaacgtgatccaagtgcatggcgttgatgagcgaggcaagaccgtgttgaagaagtcactcaaacgaatgcaggtattgccgttcttcgcgaatctgccggtgtgcctgattggcatggaagcctgtggcagcgcccaccactgggcaagaaagctacaaacgctgggacacaccgttaagttgatggcgcctcagttcgtcaaaccgtacgtcaagactaacaagaatgatgcggccgatgcggaagcgatttgcgaagcggtgactcgtccgacgatgcgctttgttccgatcaagaatggcgatcagcaagcggtactggctctgcaccgggcccgccaaagcttcgtcaaggcgaggacggcacaggccaaccagattcgtggcctcctgaccgaatacggaatcgtcatcccgcaagggatcagccacatcgccactcacctgccggatatcctggaagacggggagaacgggttgccgggggtgtttcgccagttgatcgatcggctcggcttgcatcttaaggaacttgaccaccaagtccgcgaactggagattcagattcaggcgtggcaccgagcaaacgaggatagccggaagctggcgcaaatcccgggcatcggcccgatcaccgccagtgctttggtggcttcgatcggtgacgcgaagcatttcgcagatggccggcaattggccgcttggctcggccttgttccccggcagcactccagtggcggaaagcaaaccctgcttggtatcagcaagcgtggcgatacctatctgagaacattgctgatccacggggctcgtgccgtgatccgggtggccgaaagaaaaacggatcatatggcttcctggctggccggcttgatcgggcgacggaacaagaacgtggccgccgtggctttggccaacaagaacgccagggtcgtctgggcgctcctggcgcaggatcgcgagtacaaaacgaattacgttcctttggcatgaataaccaccggccaccgcgccgtttcgccttcggtgatagaggcaccttcggcgaacggcgccgcaacacttcagacggtagcgcagcacaagggcaggacactttttagaaggagtaccccaccgattgctcaggcaatcatgacgtgatggcaaaacaggtcagaccgagatcggacaaggctgatgtgaacttcgtacctcgagtacagggggctgttgagcaaccgatctgcggattccatcagggacagggcctatggccccaatcaaagtccggatctatggctgcaatctttacctgctcaccatcatcaattgaaagcttggccaaatgggggcgaccatcta

SEQ ID NO: 5819 - DNA, 1651 bp, unidentified
  source 1..1651: mol_type = unassigned DNA; note = element_8ec63d1
  misc_feature 1..2: note = core
  misc_feature 3..263: note = LE
  misc_feature 264..1487: note = CDS
  misc_feature 1488..1651: note = RE
  misc_feature 80..231: note = bridgeRNA
cctgttctagtatactagacgtggatggctgtctggtgtacaacaccattgggaatccgtctcccagtggtgttgctccagcggcgatccggcctgggattgagaaccacgcatcagttgcgttgcgaacgccagcggcggactgttccccaggccaagcggaatcacggtcacaagcgtgttgcgtcgtgaacgccagaacaggcatactgtaacccgcgtccttttgccgctgccgtccctctgcgtcaaaggaggatggtatggctgtttacattggcatcgattggagtgcagcaaaacatgatgtctgcgtcttgaatgaaaatggtagtgtgatcgccaccacggtgttaccgcataccgcagacggcctgctcaagcttgaggcgctgcgccagaaactcggcgtcgttcctgctgagtgtctcataggcatcgaaaccgcgcatacgctcgtcatcgatttcctctgggcacgtgattacagccagatctatgtcatcccacccaacgtggtcaaaagtacgcgcggtcgctatcgccagagcggagcgcgtacggacaccagcgatgcgctgctcgtggctgacctgcttcggacagatcgtgcgcgcttgcacccctggcgacccgacagcctgctcacccaacaactgcgcaatcgcgtcggcctggtcagccatctcacgcaaaccgcagtacgcctgtctaatcgactgtacgccgtgctaatgcgctactatcccgcagggctgactatcttcagcgggctgcaaacacagatcgcgctgcagttcttacttgcctatccgacaccgactgcggcagacgcgctcacgtttgagcaattcaaggcatttgcgaccgagcagcgctatccgcatccgcagaagcttgctgccgcgtttgcccgcctcaaggaagcgcatccagtcagtgcggcgcaaaccatcaccgtgtttgaggccgaaatgcagcaactggcacacctgctgttggaggtcgtgcaggccaagtgcagccatgtgcgggagttgcagctcctgttccagcagcatcctgatttcagcatcttttcctcattgccaggagcgggtgacattctggcgccggctctgctgaccaaattcggtgacgaccgccagcgcttcccaagcgccgaaagtgtccaagcgcttgctgggacatgtcccgttaccgagcaaagtggcaagcgacgcgtcattagcttccgtaccgcctgcgatcacgactttcgcgctatcgtgcaacagtgggcaaaggcgtcactcaagcattcggtgtgggcacaggcatactggcagcaaacccgaccgcagtgtcggtctgacagtcacgggtatcgatgtctcgggaatcggtggctcgccatcgcgtggaagttgtggcaaacacgtacaccgtacgatgaagcgtatcatctccagcaacggctcaaacgacaacgaccacgtacggcataatgtgcctggatactataaacagcgctgcatgagggacagcaagcacgcgtgagacggatccactgacgtgttggcgtagcggttcgaacgacctgttcggcaccgtgacttccgtatgcccaaaagagcgcgaacaggcaaaaatgaatgcttgacaagcgtgt

SEQ ID NO: 5820 - DNA, 1428 bp, unidentified
  source 1..1428: mol_type = unassigned DNA; note = element_8ece399
  misc_feature 1: note = core
  misc_feature 2..61: note = LE
  misc_feature 62..1099: note = CDS
  misc_feature 1100..1428: note = RE
  misc_feature 1205..1422: note = bridgeRNA
tactggcatggtccgccgcctaagcccttgagggtgtagaggtgaacagaggaggcgttccatggagatccgcaccatcggtatcgatttggggaagacggtctttcaccttgttggcgttgacgcactgggtagggtggtagttcgcaagaagtgctcgcggactcagttgcttcgttttacatcgaaccttcgtgagtgcctgatcggcatggaggcctgcggtggatctcattttctcggccgtgccctgcgtgaacagggacatgatgttcgcctgatgccggcacagtacgtgaagccgtttgtgaagacgaacaagaacgactacatcgatgccgaagcgattgccgaagccgtcacacgttcgagcatgcgcttcgtgccgatcaagagcgataaccagctcgacctgcagtcgctgcaccgggtgcgcgagcggtgggtcgtgcggcgcaccgcggtgatcaaccagatgcgcggattgctgcttgagcgtggcatcacgatacgcaagggacgccggcatcttgaagcctctctacccagcatcctggaagacgccaacatcaagctgtccggtgcattgcgggtactgctgacacaactgcagatggagatgcagtacctgcacagacagatcgaggaatccgacaagctgatcgtgcgcatcgccggcgaacttgaagcatgcagacgcctggtcgcgatccccggaatcggccccttaatcgccacggccacgatcgcggccatcggcaacggggcagccttcaagaagggccgcggatttgctgcttggctgggagtagtgcccggcgagcactccaccgggggcaagcagaagctgactggtaccagcagacggggaaacaaatacctgcgaaagctctttgtacaaggagcccataccgtgctgctgcagagaaccaagcaagctccaggtctgagtatgtggctggccaatctcgtatcacgcaagcgcaagcaggtggccactgtggcactagccaacaagatggcgcgcatggcctgggcagttctgtttaaaggagaggcctatcgcccgccgcaaataccgcaaacagtcgcagcctgatatggcctgcacatgacgcctggcacgagcgccaggcttggaaagcgcttcgcgattcccacatctgcagcccaacgacgactgatctaagttatgagtttcctgccaggtttgctggcgaaccatgagatggcaaaacggtcgatcccggcgctcccgaaacctgtaaccggaaaatgccttgaaaggcagcctaactaaaaaggacgagggcgcagcgcattccattcaggccaggagatcgctactccaacaaaggccggatacattcgcgcagacaaactctgtcttcctcatttttcgcttgcaaaacggcggcggaccataca

SEQ ID NO: 5821 - DNA, 1461 bp, unidentified
  source 1..1461: mol_type = unassigned DNA; note = element_8ed49cd
  misc_feature 1: note = core
  misc_feature 2..235: note = LE
  misc_feature 236..1444: note = CDS
  misc_feature 1445..1461: note = RE
  misc_feature 41..214: note = bridgeRNA
ccgttaccttcttcaggtcgcttgagcggaggctccggcgacgtcggcctggacctttcggtatgactgagttctcctgtcggtgaacgactcattttgtgacgtcgccgggaggttcgggtggctggtgatcgctgataggggccgggccgctatttgagaggccgccgtaacgtggatgccgagactcgccaccgtggccaggccgacccgactcgagacgaaggaggatcggatggtgaaccaccccgtcggtgacgtggtaatcgatgtgttcgttggcgttgacgtgggcaaggccgagcaccacgccgtcgcgttggacgcggccggcgaagtgattctcgatcggtccttgccccaggacgagggtcgcctccgccagctaatcggcgacctgaaacagcgcggccgagtgcttttcgtcgtggatcagccagcgacgatcggcgcgctgcctcttgcggtcgcccgcgccgaagctgtcgaagtcggatatttgcccggcctggcgatgcggcgcatcgctgatatccacgcgggcgaagcgaagaccgacgcccgtgacgctgcggtgatagcgcacggcgcccgttcgatgccgcacgcgctgcgctcgttgcgccccgatgacgagacggtcgccgagctggcgatgctcgctgggttcgatcaggacttggctgagcagatcaaccaggcctccaaccgcatcaggggcctgttgacgcaggttcatccggcgctggaaagggcgatcggccctcgcatgcaacacccggcggtccttgatctcatcgggcgctacccgtcgccgcaggcgatgcgatcggccggcagggcccgactggcgagccggctgcgcaaggtggcgccccgactcgccgagcgggtcgccgacgaaatcgtggccgcactcgacgagcagaccgtcgtggtcaccggcaccgacgcagcagggcaagtccttgcccggcttgtcgaacagctcacggtccttcgccgccaacgcgacgagatcgcgctccaggtcgaaaggctggtggaggcgcaccctctttcgctcgtcctgacctcgatgcctggggtcgggttcaagacggccgccatcatcgtcgttgaggtctcaggcaagcatttcgcctcggcggcacacctcgccgcctacgccggcctcgcgccagtcaccagacgctcagggagctcgatccgcggggagcaccactcgcgtcgaggcaacaagcggctcaagcgcgccctctacctgtcagcgttcgccgcccttcgcgacccagcgtcgagaacctattacgaccgcaagcggcttgaacgcaaaggacaccaacaggcgctcatcgcgctcgcccgtcgtcgctgcgacgtcttgttcgccatgctccgcgacgccaccacctacgacgccgatcgccacgttgcggcttgacgcgcgacataggggca

SEQ ID NO: 5822 - DNA, 1416 bp, unidentified
  source 1..1416: mol_type = unassigned DNA; note = element_8edad3f
  misc_feature 1: note = core
  misc_feature 2..91: note = LE
  misc_feature 92..1123: note = CDS
  misc_feature 1124..1416: note = RE
  misc_feature 1179..1408: note = bridgeRNA
caatgggatggacccctcctcacctaatcggcatcgaagtgccagactggaagtgtagtccaccagtcaacgaagagaaggagtgtccaccatgaagcttatccgcgttggggttgatttggcaaagaacgtatttcaggtccacggcgtaggccggaaggagaaggcggtttggcgccggcggtttacccgggagaatcgggtcaaagcgttgcttgagacggttgagccaggttgcgagattgggatggagtcctgcggtggcgctcaccactgggcgcgtaagctgcaggagaagggatttacggtgaagctgatagcgccgcaattcgtgaatccgtacgtgaagagcaacaagaacgacgcgaatgacgccgaagcgatttgcgaggcgatgagccgcccggggatgcgctttgtagctgtgaagagtgttgagcaacaagatattcaagccgtacaccgtattcgtagcggattgatcgagcaacgtactgccaaagccaaccagatccacggtctggtcgccgagtatgggttgattgctcccaagcaactgtcgcatttgcgcgtggcgctaccgctttggctcgaggatgggcagaacggcctgaccgatcggttccgtcggttgttgaacgcactctggggcgatctgttggcgctggatgctcgtgtgaaggaactggaccgagaaatcgtgctgatcgctcaaagcaatccgctcgcaaagcggctagagcaactgcgcggcatcgggccgatcagcgcgacggcgctggcagcggcggtaggcgatggaacacaattcgccaatggccggcagatggccgcggcgctcgggcttacgccaagacagcacagctcaggtggcaaggagcggctgctgggcatcagcaagcggggcgacgcttacctgcggaccttgctgattcacggagcgcgatctgtggtccgaaccaccaaaggcaagactgaccggctcagtgtgtggatcacccgcctggcgcagcgtcgccaccccaatgtcgcggcagtggcgctggccaacaagaccgcgcggatggcttgggcgatgttgaagaacggcaccgattacgaacccaatcggcttgcggtctgaagctttggcccaaacaggattacagacgtacgttgtgagcaagaataaggagcacatcatccacgattgctaagcaagcctgacgatggcaaacaggtcgaaccggcgccggcaaaacccgagaaacacggggtgcacaaagcacgtccaaccgctagggagctggcgcgcgaatagcccatcatggcccagcgtcgatagatcggcgcggtagttcgaggccggatatacgtgcgcagtcgtacccgaccgccaaagaacggaatgcttgcaaacgaggaggggtccatata

SEQ ID NO: 5823 - DNA, 1340 bp, unidentified
  source 1..1340: mol_type = unassigned DNA; note = element_8edbc3a
  misc_feature 1..2: note = core
  misc_feature 3..273: note = LE
  misc_feature 274..1299: note = CDS
  misc_feature 1300..1340: note = RE
  misc_feature 6..222: note = bridgeRNA
cctttagctttgcatcgcaaaagtaatcatgaaaattattacctttgcagttaataagcgttaaccacaggaaaggaggtgaacacagcaaaaggctgagtcttcaaggactaaacgtggtattcgtaccttccttcctttccgcgggtggggtccaattaggatacaaggcttcgatgcctgttaaaggtcttagacgaacccgcgtgtggccaacgctaaattaaaaacgtggcaaagatatgaagacaaaaagtctttattggcatagacgtgtcaaaaaagacgtttgacgcagtggtttacgacgtgaaggctgccggcgtgcaggactgccagcactgcaggttcgacaacaacggcgacggcttcgcctcgttcagggaatgggctgtgtcgtcacgtggcgtgcgccgcggcagcgttgtggtgggcatggaggacacgggcatatacagcaccgacctgcgcgtattccttgaggacgccggtattgactactgctgcttcaacgccctgaagctcggcatggacatgggacgtcgccgcggcaaggacgacaggacggacgcataccgcatagggcggtacctctaccagaaccgagacacgctgcgcccgtcgcgtctcgagggcggcaccgtgctcaagctcagggaactggccgccgagagggcgcggctggtaaaacaggccgccatgagcaaggccctcgtcacagaccgaaagggacgcaggcccacagcgcaggtggagcgcgccaagaagctcatcgggtacatcgaaggactcgtcaaggaggtcgagcaagagatgcgcgcgacaatggaacaggacgacgaggtaagaagcaactacggcctgctcacctccatcaagggcgtaggcccggtcaacgccatggccgtcatcacctcgacggacaacttcagggcattctccaatgccaggcagtacgcatgctacgtcggggtggcgccgttcccgtacacatccggcacgagcgtcaggggcaggacacggacttcgaagttcgcaaacgcaggaataaaggccgtactgtcacaagccgcaaagtccgccgtcgtgcacaatccggagctaagggcatacttcatgaggaaaacaggggaggggaagcactacgcatgcgtgctcaatgccgtcaagttcaagcttgtgtgcaggatgttcgctgtcattaagagacgactcccttacgttgccgacagcaacgaatacaggattaggattgctatggacgattacacgccggctcggcacattaatgtttcttaactaaaactttaacctcaaatatttgcataagtcttagaata

SEQ ID NO: 5824 - DNA, 1479 bp, unidentified
  source 1..1479: mol_type = unassigned DNA; note = element_8f093da
  misc_feature 1..2: note = core
  misc_feature 3..239: note = LE
  misc_feature 240..1463: note = CDS
  misc_feature 1464..1479: note = RE
  misc_feature 1..215: note = bridgeRNA
ccttaccttgttggtaggccctgagtaagacttggggctgaccgctcgacatggcgggcagggctcctgccccctgtcacaccgatggcctggggggtgttgccacccgccgtgttcgggttgggttgacctctgacaggaacatgccttgagggctgattcgtaaggtggttgacggcgacctcacccatgagtcgagcggtttccacaaccggcagaccaagggggagaagcaaccgatgggagaccaaccaaccgccaccgatgtcgacgttttcgtcggggtcgacatggccaaagaagaccattacgcccacgcgatcgggcctgacgggaacgagctgtacgcgaggacggtccgcaacgaccaggctgatatcgaagccgcgatcgacaccgccagcgaggccgggaagccggtgttggtgatcgatatgacagcgtcgtcggcgcacttgttgttggcgaccgccgcagcacgacgggtcccggtcgcgtatgtgaccggcctgcagatgcgacgcgcagccgacctgtacgcagggtccgcgaagaccgacccgcgtgacgcgttcatcctcgccgactacgcccgccgtcacgtcgaccggctcacctggctcgatatcgacgacgaactgctggtccgtctgcgggtgttgaacggccgtgacgtcgatctggccggtgacgccacccgcacaatcaaccgatgccgagacgctctcgtggcgatctctccagcactggagcgggttgtgggccccaaactcacccacggaggtgtccaggatctgatgggccgttgggcgacaccgaccgcgttgcggacggccggcaagaccagggtgcggacgctgattgcgaaacggtccccgcgtttggccgacaagctcaccgaccagatctgggacgcgttggacgcccaaacattgacgctccccgccgaggacacgtggggcgaagtcatcgccgatctcgctggtgacctcaccaaaatcagcagccggcgtgacgccctgaagggcgacatcgaggaggcgttccttgcgcaccctctcgggaaggttctggtgaccctgtgcgggttcgggcccagaaccggagccaggaccctcgccgagatcggtgacccccaccgattcgcgaccggaggacacctcgcctcttacgccgcgctcgcacccgtgaaccggcaatccggacggacgctcgacaccgccaccaggcaacgccgagggaaccacaggctcaagaacgcgctgttcctcgccgcgttcgtcgcgacccaacacgaccccgacgcccgcgcctactaccaacgcaaacggaccgagggcaagaagcacaacgccgctgtcatctgcgtcgcgagacgacgctgcgacctcatcctggccatgctcaagaaccaagagccctaccggcaaccccaaccccagaatctcccccaagccgcttgacaacaagacaggaaca

SEQ ID NO: 5825 - DNA, 1423 bp, unidentified
  source 1..1423: mol_type = unassigned DNA; note = element_8f0d857
  misc_feature 1: note = core
  misc_feature 2..124: note = LE
  misc_feature 125..1144: note = CDS
  misc_feature 1145..1423: note = RE
  misc_feature 1181..1423: note = bridgeRNA
taatggaatgaacgcgtcccacccgtgaacgcaggagcaaaggaaggtggatcctcacgggccgacggcatcgatgtgcccgggtggaaaatgcacgcatttcccggcaaccggaggatccaaagtgaatgctacgcctgttggactcgacattgcaaagagcgtctttcaagtgcattacattgacccggaaaccggcgagatcgtaagccggcagatcaagcgggcgcagcttctcgagtatttcgcgaatcgtgcgccgtgccggatcggcatggaagcgtgcggtagcgcccatcactgggccaggcaactgatgcagatgggtcacgaggtcaagttgatgccggccaggttcgtgaaggcattcaacgtcggcaacaaaaacgatgcgatggacgcgcaggcaatctggttggcggtccagcaaccgcgcaaggcggtggcgatcaaaagtgaaatgcagcaagcagtgctgatgatgcatcgtcagcgtgagcaattggtccgattccgaacaatgcagatcaacggcttgcgcgggatgctggccgagttcggcgaggtgatgggcaaaggccgggccgcgatggtcaaggttattcccgacgcactcgcacgtgtcgaaactcgactaccgaaggtactgatcgatacgttgcgcgagcagtgggcgcgagtggagaagttggacgaagaaattgcgacgatcgagcgacggctacaagcgtggaagaaagatgacaaggcggtacaagcggttatcgagattccgggcgtcggcttgctgacggcgactgcagttgtcgcgatgatgggcgatccgaaagcgttcaaatcgggacgcgagttcgcggcgtggacgggattggtgccaaagcagactggcactggcggtaaggtgaacctgcacgggatatcgaagcgtggcgatacgtatttgcgcacgttgctgattcatggcgctcggtccgtcttggcgcatgcgaaggagcccggcccttgggtagagggtatgaaaaagcggcgaccgtctaatgtggtagtggtcgcgttggcgaacaagatggcgcggacgatctgggcggtgctcgctcacgaccgaccgtacaagaaagatcacgtgagcgtgcggccggtctaggcggccgcacggctcggaagattaacttttaacagggtggacgtcgaaaggttgcgttggcaatcgtgtgagatgacaagacaggtaggaccgggacttgctaaacctggagcgttcactgagcctcaagctcgtgaaggtaatgaggagcaagtcagcggatttcatcggggcccgcagcggacgtatcggctgcaacaaggccgaatacatagccgcaacccatcctgtcgcagtctgaacacccgaaaacttgcgcaaacgggacgcgttcataca

SEQ ID NO: 5826 - DNA, 1351 bp, unidentified
  source 1..1351: mol_type = unassigned DNA; note = element_8f0ee33
  misc_feature 1..2: note = core
  misc_feature 3..66: note = LE
  misc_feature 67..1092: note = CDS
  misc_feature 1093..1351: note = RE
  misc_feature 1118..1347: note = bridgeRNA
ttaatgagatggtccccccactgtctaaactgtttaagttagtggggaattttacggaggccatcaatggataaggtaacgctaataggaatcgatttaggtaagacatcctttcatcttcatggacaagacaaagcaggaaggatgatgtttcgcaagaaagtgacgcgcaagcaattgctgacgtttttcagcaactttcattcaatcacagtggtcatggaagcgtgcgctggagcccaccatatggctcgcaagctgaaggaattcgggcatcaggttaaactcatttctccgcaatttgtgcgcccattcgtcaagagcaacaagaatgactttgcagatgccgaagcgatttgtgaagcggcctcaaggccttcaatgagatttgtgacgccaaagacagaatcgcaactcgcgttatctgctctgcaccgagtacgcgaagcgttgattaaggatagaactagcacaatcaatcagattcatggttttctgctcgaatttggtgtgagtttgccggttggacacgcggttattaagcgtttgcctgccctattagctgaacacccactgccaccccggttagtggccatgctagaacggttgcacgcgcactataagtatctcgctgaacaagtaagcgatatcgagaaggaattgcacacgcaattggccgatgacgagattgcccagcggctcatgaccattccaggtattggcccgattacagcgagcgtgcttgcggcagatatgggcgatgggaaacaatatggttgtagccgagattttgccgcatctatcgggcttgtgccgcgccaatatagtacgggcggtagagccaacttgctggggattagtaaacgtggcgataaaaatatccgccggctccttgtgcaatgtgctcgttccattatgaaaaacgctgataaacgtgtcgatcagcttagcctctggatacaaatcatgctgacacgacgacactcgaatgtcgtcgcctgtgcactcgccaataagctggcaagaatcgcatgggcagttgttgctcgccataaagtgtttgaagaaaaggcttttgttatgcctgcttaagcatgtttttttaacaatttattaacacccacccactggttttgcgaacgctgaaatttgatgacgtaaacggcacagaggcccggtgaagaacctgttcacacaataagtcactaagactgagaaattttttaggatcactgggcgcggctctcatcgtggagcagggagatttctccctacaatgactccgaatagatttaggcaagccaccacagcatcaaaaatcagtcttgcaaaaaacggggggaccatagat

SEQ ID NO: 5827 - DNA, 1598 bp, unidentified
  source 1..1598: mol_type = unassigned DNA; note = element_8f1090b
  misc_feature 1..3: note = core
  misc_feature 4..262: note = LE
  misc_feature 263..1462: note = CDS
  misc_feature 1463..1598: note = RE
  misc_feature 23..282: note = bridgeRNA
tttggtactgtataagtgtaattgttagaccagtaaaaatggttaaatgattgcacttattttaatttataattaagggagtaatggtctggcgatgggttatttggattaaccacatccgtaaataaaactgtcagccatcccttgttataaacattcgattaagcaggttgaaaccatataggctttcgtgtaactaaccaaaatgaattgtaataagtgtaggtggaggcaattacaaaaataaagttggaggttacttatgataagtgtaggaattgatgtatcaaaagaaaaaagtacagtatgtatcttaaaaccatacggcgagatcgtcagatctccatatgagattacacatacggaaagtcagatggcggaattagcatcgatgataaaatgttttgatgatgaagtaagagttataatggaggcaacaggtaattatcatttaccagtgcttagttttcttaaagaacatgaaatttttgtatctgttattaatccgttgataatgaaaaaatattcaaacataattcttagaaaaggaaagacagataagatagattctataaagattgccaattatggtttggataattggtttcatttaactaatcatgagtctagtaaagacgtttatgtgcagctacgtcttcttggaagacagtacggtcactacataaaactcaagatagaaagcaaattgtcattaactacaatgcttgattatacaatgccaggaattaaaacagcattgaagagtcgttctgataaaccagaaaaagataaattaaatgattttgtagaagaatactggcattatgataatattacacaaaaaagtaaaaagcaatttattaaaagttataaaacttgggcaaaaaagaagggatatcaccaaagcgaagcgaaagccataaagatatataacttagctcagcaaggaatccccaccttatcttccaatgctccatcgaccaaaatgttagtattggaagcagttcgagttcttcgtgaaatagataaaactcttgcattgattttatcacaaatgcaggaattagcaaaatctttaaaggagtacaccgttgttcgtgaaatgagtggagtgggtgacattatagcaccgagacttatagcagagataggtgatattagaagatttcatagtggaaaggcattgatagcttatgcaggtatagatgcacctccatatcaatcaggtcggtttacaggaacacgtcgacgaatttcaaaaagaggatcatcggtattaagaaaaactggatatgaagtaatgaaatgtcttaaaagtaataaacccgaaacggacgcagtgtatttatttataataaaaaaagaagctgagggaaaggcatctaaagttgccaaaatggctggattgaataagtttctgagaatttactatgcaagagtgaaagaagtatataaaaattaaaaagtataataattaaataataatttatttagctagagcaaaaaaataaaaaatgttctggctaattagcatacagaaaaataagttaaagtaaatttaaaaacctgctctaaaagtattgacttttattagcagg

SEQ ID NO: 5828 - DNA, 1380 bp, unidentified
  source 1..1380: mol_type = unassigned DNA; note = element_8f10c77
  misc_feature 1..3: note = core
  misc_feature 4..90: note = LE
  misc_feature 91..1113: note = CDS
  misc_feature 1114..1380: note = RE
  misc_feature 1126..1367: note = bridgeRNA
tgatgaggtggatgccccctgctcagcggcatcagtgtaccatgaagtgtcctggtgatgggccaggaccactcagaggaggaggcatccatggatgaagttacgatgatcggtcttgatctggcgaagaatatttttcaggtgcatggcgtcgatgcggcagggcaagtggttctgcgacggaagcttcggcgcgacaacgtcgaggacttcttccgacgcctcccaccgcttaccatcggcatggaagcgtgtggcggtgctcactactggggccgcctgctggaagcgctgggacaccgggttcggctcatgccaccggcctacgtcaagccctatgtcaagcgcggcaagaccgatgctgccgacgccgaggcaatctgcgaggccatgacgcggccaacgatgcggttcgtgccaaccaagactgccgggcagcaggccgctgccgctgagttgaaggcccgccagttgctggtcgcgcaacgcaccaggacaatcaacgccctgcgcggacatatggccgaatttggcattgtcaccgcgaaaggcacgtggcggatcagcgacctcactgctgtcgtgcaggatgtggacgatacacggttgcctgatgtggcccgggcggcgctgcttatgctgacggagcagatcaagaacctggacgatcagatcgaaaggctcgaaacagccatggtccgccgctcgcgggtagacgagaccgccaggcggctcgcctccattcccggcatcggggcaatcacggcaaccgcgctccaggccctggtgccggatccttgtggatttaaatctggccgccactttgccgcctggcttggccttacgccgcgatcccattcaagcggtgggaaggagcggctggggcgcatctcgcgagcagggaattcgacgctacggtcgtttctcgtgctcggcgcgaccgccagattgcgctacgcccggcagaagccggaggcagcagactgggtgacgcgcctgctcgcacgacgcccgttcaaggtcgccgctgtcgcactcgccaacaagatggcgcggatcgcctgggcacttctgacaaagggcggcacctacaaggttccaacggccgcatagcggtccgacagcagctgaccgacggccgcggtcggcagggggagaggtgcaaagcagcgatgagagagagatcagcagatcggttgcgagagagaccgtgtccgtcaatgcgccgtcgagcgcgtcacattgatccggcactcgcaccgcgaagctcatcagggcccgcggccaatccggccgcatcagaggccggacacatgaccgcacccgtcctctccacccaccgcagctcatccaccttgacccgcagggggcatccacaca

SEQ ID NO: 5829 - DNA, 1356 bp, unidentified
  source 1..1356: mol_type = unassigned DNA; note = element_8f13b66
  misc_feature 1..3: note = core
  misc_feature 4..79: note = LE
  misc_feature 80..1099: note = CDS
  misc_feature 1100..1356: note = RE
  misc_feature 1078..1343: note = bridgeRNA
tgatggggtggatggccccctgacggcatctatgtgccaaggttgggttattgctaacaccaacaaacggaggccatccatgaataacgttagcactattgggctggatttggcgaagaaggttttccaagtgcacggcgtggaccaggcgggcgaggttttggttcgccgaacacttcgtcgctcgcaggtgttggcgtactttggcaagctggcgccctgccttgtcggcatggaagcgtgtgcgacggcccattactgggcgcgggagctgagcaaactgggtcacacggtgcggctgattccgccggcttacgccaaggcctatgtgcggcggaacaagaacgatccggcggacgcggcggcgatctgcgaggcggtggctcgcccagcgatgcggttcgtcacgatcaagacagcggagcagcaggccgcggcgggagtgcacaaggtacgcgagttattgatgaagcagcgcaccatgctgatgaactcgttgcgcggcctgatggcggagttcggtatcgtggtcgccgaggggccgcgtcacatcggcgagctggtatccatcttggccgatcccggcgaccagcgggttccggcgccactgcacggtggtttggccagaatggcggacgcgttgctccacctggagcggcagatcaaggtcgtcgacaagcaaatcctggactggggtcgcggcaacgcgatgtgccggcacttgatcactattcccggctttgggccgatcctgtcgagcgccatggccgcggtagtcgtcaatcccgcgaccttccgcagcgggcgcgacttctccgcctcgctcggcctggtgccgcgacaggatggcacgggtggcaaggtcaagctcggcccgatcagcaagcgtggcaacggctatctgcgccggctgctggtgagcggcgcgatgacggtattgtccggcaaacgagccaagcaggatccgtggctggtcaaattgctgaccaccaaggcgcgcaaggtcgcggccgttgcgctcgccaacaaaatggcgcgcatcgcctgggcgatgatgatgcgccaagaggactttcggaccgtgccggcggcggcctgaacggccggcgctggcgggcccagagggcttgcgagggtgaacacgcgtgatggcaacgtcggtcaaccgacggatcgagagcagccttttttgggtcaaggggcaacgtgaccccgtgcctttgatcaggtctcgatccacggctcccatcagggcctgcggctacggccgcgccaacaggccggacacatgaccgcaagtgaccgccaacttgccaacgcgaagaaaacccttgtcaagcgggggccatccacaca

SEQ ID NO: 5830 - DNA, 1359 bp, unidentified
  source 1..1359: mol_type = unassigned DNA; note = element_8f165dc
  misc_feature 1: note = core
  misc_feature 2..76: note = LE
  misc_feature 77..1102: note = CDS
  misc_feature 1103..1359: note = RE
  misc_feature 1132..1351: note = bridgeRNA
taatgaaatggtcgccccctacatcttgtgccacagtgggatgataaatcgtcactacttgagcggagcgaccatcatgagcgttaagactatcggcattgatttggcaaaagaggttttccagatccacggaattgacgaacacggcaatcggctgttcaacaagcaacttaaacgagcaaaaatgctttccttttttgccaatatccctccatgtttgatcggtatggaagcctgtgcttctgcccacttttgggccggaaaactaatatcgatgggccataacgtcaagctgatggcccctcagttcgtcaagccctatgtcaaaaccaataagcatgatgctgcagacgcagaggctatttgcgaagccgtcacacgacccaacatgcggttcgtaccggtcaagagccctgagcagcaagctgtattggcacttcaccggagtcgtcagagtttcatcaagcaacggaccgctcaggcgaatcaaattcggggactattggctgaatttggcctcgtcgtgccccgggggatccagcggctacaactacagttacctgagatcctggaagatgccgataactcattaccatctctatttcgtgtacagctgagtctgttgcagcaccatatgacatatctgttcgatgtcatcgctacgctcgacaaacagattgagcagtgctaccgccaaaatgcgctatgtcagcgtatcggaaagatcccaggcattggcccagtcactgccaccgcactcattgcgactatcggcaacgccagcaatttcgaaaatagccgacagttggctgcctggttaggactggttccacgtcagaattcaagtggtggcaaacaagtcttgctcgggataagtaaacgaggtgatgtttatttacgaaccttacttattcatggagccagggctgtgttgcagtcggttaaacgtaaacaggatgctgtatcgggatgggccagtcgactactggctcgccggaataacaacattgcctcggtagcattggctaataagaatgcgcggattgtatgggcactattggcaaaagatcaggagtacggtgcagcagtgatgaacgtttaactatctgagtcaataaggcagaaacaacaccaccgattgttcaggcaagcatgaagtgatggcaggacaggtcagaccatgatgttattcaaggctcctgaaagagcgttttgttgatagaggcctccatcagcgtattccatcagggacagaggtgtttcacataacctcggcaaagtccggatctatggctgcaattgatgacctgcaaatccaccataacatgtttagcttggcaaacaggaggcgaccatcta

SEQ ID NO: 5831 - DNA, 1523 bp, unidentified
  source 1..1523: mol_type = unassigned DNA; note = element_8f31d1c
  misc_feature 1..3: note = core
  misc_feature 4..246: note = LE
  misc_feature 247..1275: note = CDS
  misc_feature 1276..1523: note = RE
  misc_feature 3..220: note = bridgeRNA
cttatattatatttagcgcagttagctactgccaaagcccaagtggtatacttggaataagccactgtggattagtttattccctccaatcgcttgacgatttccgaaaggctctaaccacagttttttgtttcaattggtaatgagtttgataacgcatagacgttttatctcgtctaaggtaacaaggcaaaaagttcgtggataaccaagtagacttgaaatactacatctggaggtactcccatgctttatgtgggcattgatgtcgctaaaaataaacacgatgttacagccttgaatgttcaaggaaaaactgttcttaaaccactcactttttcaaataataaagctggttttgaactcttagatctgtctcttcgacagctcaaccaagactgtctcatcgctcttgaagatactggacattatgcctttaatctactgaacttcctgcatgaacaaggatataaagtttacacctacaatcctttgctcatcaagaaatttgccaaatcattatcacttcgcaagactaaaacggataagaaagacgctcatggcatcgctcttaaacttctttctgaccccaatcgtgaacaatttcaacacaataatcggcaagtagaactaaaaatactgactagacatattcatcgtctcaagaaaaaacagtctgattggaaagtacaatacactcgttgtcttgatatcatctttcctgagttggataaaatcgttggaaagcattcagaatatacctaccaactcttgacacgctaccctaatcctcagaaaaggattgaggcaggatttgataagctgatagaaattaagcgattgaccgcttctaaaattcaggatatcctctcagtcgcacctcgttctatcggaacaacatctcctgctcgtgaattcgaaatcatcgaaatcatcaaacattacaagaggctcattgacaaggcggaaacatgtgtcaatgacttgatggctgagttcaactcggtcatcacgacggttactgggattgggggtcgtttaggggcggtcattttagccgagattcgaaatattcatgcctttgataatcctgctcaattacaagctttcgctggactggattcttctatttatcagtcaggtcagattgatttagctggaagaatgatcaaacggggttcccctcatctgcggtgggcactcatacaagctgccaaagcatgcgctcgcttttcacctgcttttaaggcctatcttaagactaagttagaataaggaaaacattacaatgtagccatcatccaccttgcaaaaaaacttatccgaaccctgttttatatcctaaaaaagagctgccatttgacgaacaaaaagtgatgtaatttctgaaattaacacaggattacctttgaaaaaatggactttttcaagggctttttgccgtgctctaaaatcatcgccaaatcatcaaattgaaataagaaatagtttagataaaactattgacttttcttatagtttgt

SEQ ID NO: 5832 - DNA, 1343 bp, unidentified
  source 1..1343: mol_type = unassigned DNA; note = element_8f43510
  misc_feature 1: note = core
  misc_feature 2..61: note = LE
  misc_feature 62..1105: note = CDS
  misc_feature 1106..1343: note = RE
  misc_feature 1116..1334: note = bridgeRNA
taatgggatggtctgctccatccaccccgctatgctggagtcagcatcaaggaggctcatcatgactcaagcgcagatttacatttacgggatcgatttaggtaaaaactggtttcacctggtggctatggatcgcatggggcacgtattgaccaagcaaaagctcactcgttcacaactgaaacagttcatcagtacgaccccaccctgtcgggttgccttcgaggcatgtcctggttcgcaatactggggacgactgtttcaacaggcggggttcgagcccaagattattcccgctcaatttgttaagccctacctcaaatcgaacaagaatgacttcaacgatgccaccgcgattgccgaggctggtagcagaggcactatgcgctgtgtcccgttgaaatctcatgaacagttggccttgcaggcgactcatcgcgtccgtcaacgtttcatcattgaacgtaccgccacggtcaatcagatgagagcgttgctgctgggatatgggctcaccgtaccggcgggcagaaaagtcttcgaacgagccccaccggcaatccttgaagatgccgagaatggcttgcctgattttatccgcgcccttgtattgcgcctgagagaacggtggcaacagctggatattcagattgatgagatgagcctcatgctcgggcaagcctcaagcgcatcgagtttgtgccaaaaagtcagcaccgtccccagcattggaccgattgtctcaaccgcgttaattgccgcaattggcaatggctcacaattcaagaaagcccgcgatctttcggcttggttggggctggttcccagacaatattcagcgggtggcaaatctttgctcggcgggatcagtaagcgtggcaataactatttgaggcaaatggttattcagggcgccaaagcgctgaaaattcacatgaagcgtgacaaatcattgttaggcgaatgggtcgccaggctggaggtcggccatcaccatcatgtggtccttatcgccctggccaacaagataatgcgaatttgctggaaagtactgacatccggcagggattaccgaccatatcccaacgcaagcacaaccgtttaacagatagaactcatacccggttttgcgagccaaaaacagatgacagaagcgttcaccccacgacgttgcagcctggctaaaaaagcagtctctcgtgactggtagttttattaggacgacgacgtgcggatcccatcaaggccagagccagagaacggctcacagacaggccggatacattgacgcaaacgacttctggaaatcagttcacgcttgcagataaggagcagaccataca

SEQ ID NO: 5833 - DNA, 1535 bp, unidentified
  source 1..1535: mol_type = unassigned DNA; note = element_8f49fda
  misc_feature 1..4: note = core
  misc_feature 5..271: note = LE
  misc_feature 272..1525: note = CDS
  misc_feature 1526..1535: note = RE
ctcactggtccaccttcctggtgtcagcgttctcagatggagcgttgatgcacccgaggtgccaccaggccatcgccatgttcactcgacgcgattgaagtccagcatgagattcgcgaggtctggtggtcgcccgggacgtgtagaccgtcgacagggctgagcgcctccgagcgccaatcagtgagcgaaccggcaggcacggcccggcacctgcggcaccgtgaaatgagggtgcctccccactgggactagcagcgaggaggctgacgtgaagtctgccagcaacaccctgcccgaccaacccatcaacgacgtgaccgccggacttgactgggccatgcacgaccacgccgtgtccatcgtcgacggccgcggccgcgaactggcccgcaccatggtcgaacacaccgccgccggcttgcgtgagctggtcaccttcctgaaccgccacggagccggagaggtcgccatcgaacgacccgacggtccaatcatcgacaccctgctcgaagccaacctgaccgtcgtggtgatcagcccgaaccaggtcaagaacctgcggagccggtacggctcggcgggcaacaaagacgaccgcttcgacgcgttcgtgctggccgacaccctgcgcaccgaccgaccccgactgcgccacctccaacccgacacaccagagaccatcgccttgcgccgcacctgccgagcccgcaaagacctggtcgccgaccgggtcgccacaacaaaccagctgcgctcccacctgcgcaatgtcttccccggcgcgataggcctgttcgcgcatctggactccgagatcgccctggccttcctgacccgctttcccacccaagaccgcgccgattggctcacccccaaacgactgggcgactggctggccaagcagggctactccggcagatccgaccctgccctgctccacgcgcgcctgaccgccgcaccccgcggcatcaccgggcacgacgcgaccacccaagcccacatcacgaccgcctacctcgtggtcctgaccaccctggtcgaacagatcaagaacctcgccgtccaaatcgaccagcagctcaccgcgcacgccgactcccacatcttcacgtccctgccccgctcgggccgcgtgcgagccgcccgactgctcgccgagatcggcgactgccgcgccaagtaccccaccccggcctccctggcctgcctggcgggcgtcgcaccctcgacccgacaatccggcaagctccgcgccgtcaccttccgctgggcctgcgacaaacaactgcgcgacgccgtcaccgacttcgccggcgacaccagacacgacaacccctgggccgccgacctctaccaacgcgcccgcgaccgaggccacgaccacgcacacgccgtccgcatcctggcccgcgcctggctcttcgtcatctggcactgctggcaagacggcctcgcctacgaccccaccaaacacggagctctccaacgcttcctccaagccaccgaaaacgaaggggcttgacacagggctt

SEQ ID NO: 5834 - DNA, 1318 bp, unidentified
  source 1..1318: mol_type = unassigned DNA; note = element_8f549a8
  misc_feature 1..2: note = core
  misc_feature 3..62: note = LE
  misc_feature 63..1067: note = CDS
  misc_feature 1068..1318: note = RE
  misc_feature 1102..1306: note = bridgeRNA
ttatgggatggacgcctcccgcttttctgccaccattgttggcctgcaaaaggaggaaactcatgtcgctcgaattactcgctatagatctcggtaaacggtcgttccacatccatgctgtcgacagcgatggcgtggttatctcgcgtaagacaagtcgcgcaaagctgattgagacgattgaagagctgcgtccgatgacgatcgcgatggaagcttgcgccagtgcgcactattggggtcggcgctttctcatcgatggccgtcgggttctgctgatcaatccacgttttgtaaagccgttcgtaaagggttccaagaacgatgcggcggatgccgaaggaatttacgaagcggcgttacggccgacaatgcgtttcgtgccggtcaaatcgactgagcagcaggatcttcaatcgcttcatcgcacgcgtgatcgcgtcgtctgtgctcgaacagcccttatcaaccatatacgcggacttcttggcgagtatggcgttattttgccccaaggcgcatggcgtttcctggcgcaagcgcacgacgctgtcgctggcgccgaactgtcagacctcacgcgggaactcttcgccgacatgcttgatgaactcggtagcctcgatctccggctcgataaacttgatcgacagctcttggctatttgccggacgaatgaagcatgccgtcgcctttcgaaactgccgggggtcgggcccgtgatcgcaacggcgctcgtggccgcagttgacgatggccgccattttcggtctgggcgggaactcgcggcatggataggccttgtgccccgtcaatacacgaccggaggaaagcctcggctcggcggtattggcagacgcgccaatcattatctccggaggcagatgattcacggcgcgcgcgcggtgatgtttcgattgacgaaacatgacgatcgccgctcccagtggctaaaggggctcgcggcaaggcgaggcttcaatcgaacgattgtcgcgctcgccaataagacggcaagggtcgcctgggccttgctcacccgtaaggaggactatgtggccgcatgatcgcaacgcattggcgttgagctgaaggctgcatttgaatgcgaggtgaaaactgatggctcgtcggcaaggaccgcagcttccatgcctgatctacgacaaggccctcgcggccgatcatgttatgaggccagaagcagcggactcccatcaaggccaggggcgcgaacagtcccgcaacaggccggatagattcgtgcattccagccgccgacaccaaaagatcgccttgcgcgggaggcgtccataga

SEQ ID NO: 5835 - DNA, 1388 bp, unidentified
  source 1..1388: mol_type = unassigned DNA; note = element_8f651e5
  misc_feature 1..2: note = core
  misc_feature 3..213: note = LE
  misc_feature 214..1185: note = CDS
  misc_feature 1186..1388: note = RE
  misc_feature 41..219: note = bridgeRNA
cttgtattagcgcggtccgttatgctggcgtggttccgtgaggaacggcccagcccgggtggccgcccgggctaggccgccgatcgatcggatcgtaacccaccgaagccttgagggctctgtgtcgtagcaagatcgcgatcggtacttcatcgggacccggatggttgaacgaactcaaggttcgcattcacaagggagggatcgacgaagatggccaagcataccacgatctgtgccgggatcgataccggcaaaaggaagcttgatgtagcgctcgagggcagccgcgagcagttacaggtggagaacacgccggcaggccacacggtgttgctggtatggctgcgacggcatcgcgtcaaacgtgtcgggatcgaagcgagtggcggttacgaacagccggtcgtcgccgaactgcggcgcaaggggtttgtcgtcgtggtgttccagcctgcccaggtccgggcctatgcccaattccactcgcaacgggccaagaacgacaggatcgatgctgctctcatcgcagcctgcactgcggctgtccgcaagatccatgccgcacctgacgcccggctgctgccgtttgccgagcaactgaccatgatcgatcagatcggcgaggatatcgcgcgcctcaagaaccggatcgagagctgccgcgatgcgcagattaagaggctctggaaggaggatatcggccgcctggagaagcgagaaagggtcgagctcaaggctttgatcgcctcgatccgcaagcatcccgaccttgccaagaggctcgatctgatcaacagcatcgacggcattgggccgccaactgccgtcgccattctggtgcgcatgcccgagatcggccagattacccgggagcaagctgccgcgcttgccgggcttgccccctacgatgatgacagcggcgagcaggttggcacccgccacatcgagggcggccgtcaaaggctgcgccgagccttgtacaccgctgcgctggccgcgtcgttccgctggaacagccaactcatctctctttaccaaagactcatcgcggccggaaaagagcacaagcgcgcgctcgtggcctgcgcccggaagatgctcgtcttcgccaacaccgtcgtcgcgcgagggacgccctggcaggaccgtccacccgtgaaagctgccctgacaaccggatagcctcccgtttctttgttcgacccaaagcgccgtttcttcgtcccgacctgccacttcttacgacatcgcgcgcagcggccgtcaaggatggctgctgcgtccttgctgcccattcgacgctgttaccaggccatccttgacggccgcgagcacggtgtcatcctagcccaggtcgaccgattaccaccgtcatttaatggttg

SEQ ID NO: 5836 - DNA, 1487 bp, unidentified
  source 1..1487: mol_type = unassigned DNA; note = element_8f68cb2
  misc_feature 1..4: note = core
  misc_feature 5..238: note = LE
  misc_feature 239..1471: note = CDS
  misc_feature 1472..1487: note = RE
  misc_feature 9..240: note = bridgeRNA
gtcactagggcaccatctttcttgcgggcctcattgagaggttcgtggaagggactcggcggggaccgaggtgactgctcgtggtggtcgcccttcgagggcctgcatgacaccgcagccctcggtcctcccgaggtcgtagaccggcttcaggaagacgcgccgtagagcgccagttagtgaccgtccggtggtcggcctcctcgccgagtcgtcgctgccaacccgaggagagacgatgattatcgacgaggcactgcccgtctatgtcggcctggactgggccgctgagatccacgccgtatgcgtgctcgaccacaacggccaccacctggccgcgttcaccatcgagcacaccgcggacgggatcgcgctgctgatccgccgacttgccaagcacggtgcccctgccgacatccaggtcgggatcgagcgccccaacggccggttggtcgatctgctgctcgaagccgggcacccggtgatcccggtgtcgccgaacgcgatcaagacctggcgcgagggcgaggtcgtctctggggcgaagtccgacgccggggacgccgcggtgatcgcggagtacctgcggctgcgcaaccacaagcttcgaccggtgcagccctactccccacagaccaaggcgctgcgcaccgtggtccgcagccgcgacgacctggtccagatgcgggtcgcggcgaccaaccagctcgaggcgctgttggacgcgcactggcccggtgccaaggcgatcttcgccgacaccgcctccgcgatcagcttggcgttcctgcgccgctaccccacacctgccgctgctgcccacctcggggagaaacggctgacggccttcaccgccaaacagggctactcgggaaagcggccagccgctgagctcctcgcccggctgcgtaacgccccagccggcaccaccgatgaagctttgagcgctgcgatacacgattcggtctcggccttcgtggaggtcgtgaccgcactcaacaacgccatcaaacaactggacaagtcggtcgccacccgactcggagagcacccggacgcgaagatcttcacgtcgctgccaaggtcgggtcagatcaacgcagcccaggtgctcgccgagtggggcgacgtccgagaagcctacgaccatcccgacgccgtggcagccctcgccggcgtcaccccagtcaccaaggagtccggcaaacgccaacacgccgtgcacttccgctgggcatgcaacaaacgattccgtgtcgcactgaccaccttcgccgacaacagccgacacgccagcccctgggccgccgacatctacaaccgagcccgcgcccgcaacatcgaccacccccacgccatccgcatcctggcccgcgcctggatccgcgtgatctaccgctgctggaacgactccacgctctacgaccccagcctccacggcggcgcgcggaagctggacatcgcggcctgaggttgactcaggaagt

SEQ ID NO: 5837 - DNA, 1391 bp, unidentified
  source 1..1391: mol_type = unassigned DNA; note = element_8f6e7e9
  misc_feature 1..2: note = core
  misc_feature 3..128: note = LE
  misc_feature 129..1160: note = CDS
  misc_feature 1161..1391: note = RE
  misc_feature 1175..1353: note = bridgeRNA
acatggggtaatcgcgggagcgatgcccctctcgatccgatcatgatcttggatggcggctgttccccgataagatgaagtacgggctctcgactggacgccgggcccagcatcaacggagaacagccatgacagagtatatcggcctcgatgtatcaatgaaagagactgcagttgcaatccgccgagaaggcgtgcgtgtttggcgggggaaatgcatatcagatcctcacgttattgccgaacttatccgcaaacgcgcacccacggtgaaactcgtggtgtttgaaacgggaccgctctcggtgtggttttatcatgcgcttcgagcagagggcctgcctgtcatctgcatcgatgcacgacacgccaaagcggcgctcgacatggcgacgaacaaaacggacgcgaatgacgccgatggattggcgcacctggccgaagttggattcttccgagaggtccgcgtgaaggggttcgacagcatgttagcgcgcacgcttgtcgcggcgcgcacccggttagtccatatgacgaccgaactttccaatcagattcgcggcatcatgaaaacgtttggcctggtcgttccagcaggcaaaggaagcgtgtttgagaagaatgttcgagatcttgtctccagcgatcatgatctcgctcatatcgtgctaccgcttctcgacgcctggaaaggcctgcgtgcccgcgccgcggacctcgggcgcaagttggtcgctgatgcccgccaaagccaagcctgccgtatccttatgtccatccccggcgtgggagcaatcactgcaacctctttcgcgactgccattgaagagccgggaaacttcaggaagtctcggtccgtgggcgcgtggatcggcctcaccacgcgacgctaccaatccggcgaagtcgattacgacggccatatatcccgacgcggcgaccgccatctgcgtgggcttctctacgaagcagcgtcggtcattcttacgcgcagctccgtgcagagttccttgcaaacatgggggcttcaactccgcgagaggatcggcttcaaaagagctgctgtagccgtcgcacgaaagcttgcggtcatcatgcacaccatgctcaagaccggagagctcttcaatccaaatacaggagtggcagtgacagcatagtatcgaatagggctcaatactgagcacttgaagcgtccctgccgggacgtgagccgagccattccgttgatggggttgcatcgctgtctcagccgaatgcgtcgtccacattgaaggctcgtcccgcgaagctccatcatgcggcgactgatgtcgaccgcgaagacaaccatgcacctggcagcaccgcctcaacaacttaacgcttgacgccccagccgcgattagaca

SEQ ID NO: 5838 - DNA, 1292 bp, unidentified
  source 1..1292: mol_type = unassigned DNA; note = element_8f70a19
  misc_feature 1..2: note = core
  misc_feature 3..192: note = LE
  misc_feature 193..1188: note = CDS
  misc_feature 1189..1292: note = RE
  misc_feature 32..202: note = bridgeRNA
cttgtgtccagaaaatctgccagaatgtgcgaacgggcggttctcgcaaaaccgcccgtcgctggatctgagcccgttcgtgctcaaaggccttgagcctgtcggggagcgagggacagatccggtggtcttcctcaacccgaacagttgcatgggcttcgagcccgaaccgagcaaggaagggagtagatgatggcacaaaacgacgtccttgtcgctggcatcgacgtggccaaggacaaggtggatgtgtgcattcgctcattgtcacaacggcagacgttcgcgagcagcccagaaggtcggcgagcgctgatccgctggcttcgcaagcacaaggtcggcaaagccgccatggaggcttccggtggttatgagcgggagtgggccaaggtgctacgccaggatggtatcgaaggcttggtggtggatccaaagcgggtgcgcaacttcgccaaatcggctggacagctcgccaagaacgatccgatcgatgcggagatgattgcctggttcgccgagaccttcattgaggcaagggggcaagcctacgatgcggcacgcgagaagctggcgcagatcgtgagtgcgcgccaggctctgattgacgtgcagacgagcttgcgaaacaggacggagcattccactcctgacgtcgtgcagaagatgcaaaatcgcctgctgaagcggctcgccgccgaaattgccaagctggaagcagcgatcgcagccctgatcaagaccacaccgcgttttgccgaactcgccgagatcatcgagagcgtaccaggtcttgccgggggcacatccgccggactgatcggggcgatgccggaactcggccagataggcaacaaagtggccgcggccctgctgggtgctgcgccttatgacgacgacagcggcaaacgtcggggcgtccgtcatatccagggcggacgccgcaaggtccgcaacgtcttctacatggcgtccatgggagccgcgacccggcataaccccgtgctcaaggccttttacgatcgcctgatcgccaaaggcaaggagccgaaggttgcgctcaccgcctgcatgcgcaagctgatcgtgatcctgaacgtcatgatcgcacgcggcgagaaatgggacgccggccggtacgaagtgagcaactccgctcggcttccgccgagcgcttgcacgccctgaagaccggcgagcggacggggtcaaggccggaagccgccggaggcggtggcgcgccagcgccagccttgaggccggccgatcgccgggctacttcaacacagttg

SEQ ID NO: 5839 - DNA, 1382 bp, unidentified
  source 1..1382: mol_type = unassigned DNA; note = element_8f8476b
  misc_feature 1..2: note = core
  misc_feature 3..86: note = LE
  misc_feature 87..1118: note = CDS
  misc_feature 1119..1382: note = RE
  misc_feature 1149..1370: note = bridgeRNA
tgatgctgtggacggctccttcaccggcacatcggtgccatggatgtgggcgccgttaaggctcccacgattctaaggagcgagccatgcagacgatgacgacaatcggtttagatatcgcgaagtcggttttccaggttcacggcgttgacgccggcggacaggtgattgttcgccggcaattgaaacgtcgctatgtcctgacgttcttccagaagctgtcgccatgtcttgtcggtatcgaagcctgcggttcggcgcaccattggtcgcgcgagctccaggcactgggtcataccgtgcggttgatgccgccggcctatgtgaagccgtacgtcaagcggcagaagaatgacgcgactgacgcagaggccatttgcgaggcggtcaccagggtcaacatgcggttcgtgccgaccaagaccgccgagcagcagagcggtctggtgctgcaccgcgcccgccatttgttcgtccgccagcagacctcggtgatcaatgcaatccgggcccatcttgccgaattcggtatcgttgcgccggtcggtcgtcacggtgtcgaggaactgctcgatgtcgttaccgatccgaacgacaagcgagttccggacatagcgcgtgcgtgtctttcggcgctcggggatcaactgcaaagcatcaagaagcacgtactggagttcgaccggctgatcagggcctggcatcgatccaacgagatgagcatgaggctcgaggcagcccccggcgtcggtccggtactagccaccgctttggtcgctgccgttgctgatccaaagtccttccgatcagggcgcaacttctcggcctggatcggtatggtcccgaaacagcactccagtggaggcaagaacaggctcggcaatataagcaagcaaggtgaccgctatctgcgcggcctgttcgtggccggcgcgctttctgtcatccgctacgccaaggtccatggcaccaaacatcggccttggcttacggcgttgctgaccaggcggccgactaaggttgcggctatcgcgctcgccaacaagatcgcgcggatggtctgggccatgatggccacgggcgagcgatacaaagaacccgtcgcgcttgcgcgataaacgagatcgcgccgggcaactggcgtgatgtgaaggttgagagggcgaacagcacataatgcagagccggtcgatccggtgatcaggacaacccacatgtgccaaggcattcttgaatgcgagttgttggtagggacctgatccgcggagggcattatggccagcggtcatgtcaaccgcatcaaaaggccgaacacatggctgcaacgaccaatgctgcaaaaccgtgaagaaagctcttgccaaaccggggccgtccacaca

SEQ ID NO: 5840 - DNA, 1514 bp, unidentified
  source 1..1514: mol_type = unassigned DNA; note = element_8f893db
  misc_feature 1..3: note = core
  misc_feature 4..246: note = LE
  misc_feature 247..1266: note = CDS
  misc_feature 1267..1514: note = RE
  misc_feature 3..220: note = bridgeRNA
cttatattatatttaacgcagttagctactgccaaagcccaagtggtatacttggaataagccactgtggattagttcatttcctccaatcgcttgacgatttccgaaagggtctaacaacagctttttgtttcaattggtaatgagtttgataacgcatagacgttttatctcgtctaaggtaacaaggcaaaaagttcgtggataaccaagtagacttgaaatactatatctggaggtactcccatgctttatgtgggcattgatgtcgctaaaaataaacacgatgttacagccttgaatgtttcaggaaaaactgttcttaaaccactcactttttcaaataataaagctggttttgaactcttagatctgtcttttcgacagctcaaccaagactgtctcatcgctcttgaagatactggacattatgcctttaatctactgaacttcctgcatgaacaaggatataaagtttacacctacactcctttgctcatcaaggaatttgccaaatcattatcacttcgcaagactaaaacagataagaaagacgctcatggcatcgctcttaaacttctttctgaccccaatcgtgaacaatttcaacacgataatcggcaagtagaactaaaaatactggctagacatattcatcgtctcaaaaaaaaacagtctgattggaaagtacaatacactcgttgtcttgatatcatctttcctgagttggataaaatcgttggaaagcattcagaatatacctaccaactcttgacacgctaccctaatcctcagaaaaggcttgaggcaggatttgataagctgatagaaattaagcgattgaccgcttctaaaattcaggatatcctctcagtcgcacctcgttctatcggaacaacatctcctgctcgtgaattcgaaatcatcgaacattacaagaggctcattgacaaggcggaaacatgtgtcaatgacttgatggctgagttcaactcggtcatcacgacggttactgggattgggggtcgtttaggggcggtcattttagccgagattcgaaatattcatgcctttgataatcctgctcaattacaagctttcgctggactggattcttctatttatcagtcaggtcagattgatttagcaggaagaatgatcaaacggggttcccctcatctgcggtgggcactcatacaagctgccaaagcatgcgctcgcttttcacctgcttttaaggcctatcttaagactaagttagaataaggaaaacattacaatgtagccatcatccaccttgcaaaaaaacttatccgaaccctgttttatatcctaaaaaagagctgccatttgacgaacaaaaagtgatgtaatttctgaaattaacacaggattacctttgaaaaaatggactttttcaatagctttttgccgtgctctaaaatcatcgccaaatcatcaaattgaaataagaaatagtttagataaaactattgacttttcttatagtttgt

SEQ ID NO: 5841 - DNA, 1508 bp, unidentified
  source 1..1508: mol_type = unassigned DNA; note = element_8f94aad
  misc_feature 1..2: note = core
  misc_feature 3..243: note = LE
  misc_feature 244..1488: note = CDS
  misc_feature 1489..1508: note = RE
  misc_feature 7..241: note = bridgeRNA
ctaatgggatgtacggggttggtcgtgaggcagactccgtggtggtagccgctggcgggtgagcactccagggccctggatgttgagtccttgtcgaagatcgtgcacctgttggttggccgggagatggaactgctgctgggatgtcgtgcccgctggagagcgtgagcactgatccattaggtcgcggaggtctcctgcaggctgccggggaggctgggatcggacgacgggaggctacgcgtgttgttggtgggtgatgattgggccgaggaccatcacgatgtggagttgatggacccgaccgggcgggtgttggctcgggctcggctgcctgagggagtggtcgggatcgctggactgcacgcgatgatcgctgagcaagtcggcgaggacgctgacgatggtgatgtggaggtggtgatcgggatcgagaccgatcgagggccgtgggtagcggccctgatcgctgccggttacaccgtgtttgcgatcaacccgttgcaggtggcgaggtatcgcgaacgacacagtgtgtcgggggctaagagtgatcccgccgacgcgcacacgatagccgatatggtccgcaccgatgctcatcagctgcggccagtggccggcgataccgccgaggccgaggcggtcaaggtggtggcccgggcgcacaagcagttgatcatggaacgcacccgtcacgtgctgcggtggcggcacgcgttgcgggagtatttcccggctgctttgaaagccttcgacaggttggaagccgccgacacgttggagttgctgaccagggcacccgacccggcggcggccgcagcgctcacccaggcgcagatccgggcagcgttgaaacgcgcccgccgacgcaacatcgacgccaaggccgccgatatccaggccgtgctgcggaccgagcagctcggtcgtgaggacgtgatcaccgccgcgtatgcggccaccacccggtcggcggcagcggtgatcggcaccctgaacgagcagatcacgatcatggaagggcaggtggaggcccattttggccggcacccggacgctgagatcatcgtctcccagcccgggctgggaccgatcctcggagcccgggtgctggccgagttcggcgacgatccgcaccgatatgccaccgcgaaggggcggaagaactatgccggcacctcaccgatcacccgagcgtcgggcaaacgcaagatcgtcgccgcgcgctacgtccacaacgaccgcctgatcgacgccttgatggcccaagcgttcgccgcgttgaaggcctcgcccggagcccgcgcctactacgaccggcaacgagcccgcggggtcgatcacaatcccgccctacgacaggtcgcgaaccgactcgtcggcatcctccacggctgcctcaaaacccgcacccactacgacgaacagaccgcctgggcagcacatcaaaccgacagaccccagaagaccgccacagctgcttgacacccaaaaagctgggatgt

SEQ ID NO: 5842 - DNA, 1348 bp, unidentified
  source 1..1348: mol_type = unassigned DNA; note = element_8fa025f
  misc_feature 1..2: note = core
  misc_feature 3..78: note = LE
  misc_feature 79..1098: note = CDS
  misc_feature 1099..1348: note = RE
  misc_feature 1106..1344: note = bridgeRNA
ttaatgagatggtcagcctgacctcgaagcccagcaggctatgcttgctgggcttcttcttttgcagaggaccacgccatgaccactcccgccatcatcggtattgatctgggcaagcggaccttccatcttcatgctcagaaccgtcacggcaagcccttgttacgcaaagccctatcccgacagaaactgctgccacacttggctcagcagccagcctgcctcgtcgtgatggagtcctgcgccgggtgtcattactgggcccgccagatccaggcgcttgggcatgacgtgcggttggttcccccgcaatacgtcaagcctttcgtcaagaccaacaagaacgatttcgtcgatgccgaggccatctgcgaagcggcatcacgccccaccatgcgcttcgcagtcatcaagagcgaggatcaacagctcctctcggcgttacaccgctctcgccagggcttggtcgctgaacgcacggcggtcatgaatcgcctccacggtttcctgctcgaatttggtgtggcactgccggttggccatgcggcgattcgtcgtctcgatacttacctggagcatttgccgacggcgttcgtggcgctcgtgcggcgcctccaggcgcattaccacacgctgtgtgatgagatcgccgccttggaggaggaggtcgagcagctcacacgtcgtgatgatgccgctcggcggctgatgacgattccgggtattggcccgattacagccagtgcgatcgttgggacggcaggcgatgcctcgcactatcgctcgggtcgcgagtttgccgcatcattggggttggtaccccggcagtacgccacgggaggaaagccgcgcctgttggggatcagcaagcgaggtgatggccacctgagacggctactggtgcagggcgcccgcgcggtgatgcagcggcagaaccagcgcaacgatcgattaggtgattggctcagggagctgggctgtcggcggcattcgaacgtcgtggcctgcgccctggccaacaagatggccagaatcgcctgggcgatcctggccaagggtggtgagttccgtccatcaccgggcgcgacgctcgcctgagagattgacccagcctacggggtttgcggcgtaggatcacgatgacgacaaacggctcaccacctgtccgagaacctgatcgcaaaaatagcatcgcgatgctgaggcttttttgaggtcgaacaggtgcggcttctcatcgagggccgggcgccagtgatgtgtgcccatcaagagcccggatacattggcgcaagcccactttgtcagtgtcgaagatccacgttgcgaaagccaggctgaccataca

SEQ ID NO: 5843 - DNA, 1467 bp, unidentified
  source 1..1467: mol_type = unassigned DNA; note = element_8fcc1bc
  misc_feature 1: note = core
  misc_feature 2..218: note = LE
  misc_feature 219..1451: note = CDS
  misc_feature 1452..1467: note = RE
  misc_feature 1..217: note = bridgeRNA
ccgttaccttgctcgcaggcccgaaccgggccttccaggccaccgtctccggcatgactgactgcccctgtcgtccatgacctgggggtgttgtcaccggagacggcggacagatgtgaccgctgatagagacctggcgtgggtgatgcctgctcgtaacgtggctgccggcgcgctgtccccggcatggcctggccccgccaggagaggtgattcacttggaggatgtcgacaaccccgccgagccctacacggtgttcggcgggctcgacgttggcaaggccgcccaccacgcgaccgcgctgaacccggcggggaagaagctgcacgaccggccgctgcccaacgacgagccagccttgcgggcgctgttcgccaagctgggcgggcacggtcgcctgctggtgatcgtggatcagccggcgagtatcggcgcgttggcgatcgcggtcgcccgctcgatgagcatcgacgtcgcctaccttcccgggctggcgatgcggcgcattgccgacctgcaccccggtgagtcgaagaccgacgcccgcgacgcctacgtcatcgccgacgccgcccgcaccctgccccacacgttgcgccgggtcggcaccgacgatgacaccctggccgcactgaccgtcctcgtcggctacgacgccgacctggccgccgagtcgacccggctgtccaaccggctgcgcgacgccctgctgcatatccacccggccgcggaacgcctgctgggcagccacatccaccgccccggcgtcctcgagctgcttgccgccgccccgactccgacggactggaaccggctcggcgaggccaggatcgccgagctgatgcgcccgcggtcgccccggctggcgaagacactgccggccaagctgatcgccgccctgggcgagcagaccgtcgtcgtgcccggcacggccgccttcggccgggtcatcgccggcgtcgcccgcagcctgctcggcgtcctcgacgagcgcgcagacctggcccaggcggtcgaggccgccctggaggcgcaccctcttgccccggtcctgaactcgctgcccggagtcggggtcaggaccgccgccggcctgctcacgatcgtccgggatgtcaccgacttcccttccgccgcgcacctcgccgcctacgccggcctggcccctgtcacccgccgctccggcagctcgatcaagggcgaggtccgatcccagcgcgggaaccacgcgctgaaatcgacgctgttcttatcagcgttcgccagtctccatgatccgacctgccgggcctactacgaccgcaaacgcgcagagggcaaacggcacaacgccgccctgatctgcctcgcccgccgccgcgtcgacgtcctctacgccgtgatccgcgaccgcaagccctaccagccgatcaacccgaaacccgccaccgaccaggcccaagccgcttgacaacgccatagagaca

SEQ ID NO: 5844 - DNA, 1452 bp, unidentified
  source 1..1452: mol_type = unassigned DNA; note = element_8fd6476
  misc_feature 1..3: note = core
  misc_feature 4..120: note = LE
  misc_feature 121..1158: note = CDS
  misc_feature 1159..1452: note = RE
  misc_feature 1204..1405: note = bridgeRNA
agatggggtattcggccggcaggcgtccccagcggcgaaggcagcggcgctgcgcttcaggctgatgataaacgtggtctgcgttggggcagccacaagcatcagatggagaagcgcagcatgaaacattatgccggtctggacgtctcggtcaaagaaacttccgtgtgcatcgtggatgaggccgggaaggtctgccgcgaagtgaaagtctcgagccatccggaagaccttgtacaggtgctcaaggatccaagctggcggctcgagcgcgtcgggctcgaagccggcccgctatcgcaatggctcttcagcggggtggcggaggcgggtttgccggtcgtctgtatcgaaaccagacacacgaaggccttcctcaaggctcaggtgaacaagagcgatcgaaatgacgcacgcggcatcgcgcaaatgatgcgcgtcaacctgttccggcccgtgcatgtgaagacgctgacaagccaaaagcggcgcgccttgttgaccgcacgcaaactattgcaagagaaagccctcgccatcgagaacgacatccgcggcctgctgcgcaacttcgggctcaaggttggcgtcgtgggtttaatcaaattcgaggaacggattttcgaacttgtcgagggcatgccggagcttgccgagatcatggcgtctttgcttgacgctcgccgcaagctccgcgagcaggtcgcaaaattgcatcggaagctgttgtcgatcgtccgcgaagacgaggcgtgtcggcgattgatgacgatccccggggtcggcccggtcgtctcattggctttcaccgcgacgatcgacattccggcgcggttcaagacctccaaggcggtcgggccggctctgggattaacgcccattctcaatcaatcgggcgagagcaaccgcgtcggccggatctcgcaatgtggcgacggcatgatgcgaacgctgctctatgaagcggcgcaagtcatgctaactcgcacaatcaagtggtcctggttgaaagcctgggcgatgaacatcgccaagcgtcgcggtcggcaaaaagccatcgtcgccctggcacgcaggctcgccgtaatcatgcaccgcatttggagcgatggaacgaagttcctctggacgacggagagagcgccggccgccgtctgatcaattggtccgctggaacgctgcatcgctggataggacaatatccgacttccgccagccggcggatagatgtccctcgcgggacgatggacgaggtgagttcgtagtaggttcttgtgtcaattgctgagtgcgatcagaacgtgcaccagattgggccaccccatccttctgaccccatactgggagagccgctgagctgatcccgaagagaagagaggacccgcgagtgacatcaaacatcgaaggcgtcgatagcctgaaagcgcttgacctcaacccgccgaatagaga

SEQ ID NO: 5845 - DNA, 1418 bp, unidentified
  source 1..1418: mol_type = unassigned DNA; note = element_8fdb04d
  misc_feature 1..4: note = core
  misc_feature 5..201: note = LE
  misc_feature 202..1404: note = CDS
  misc_feature 1405..1418: note = RE
  misc_feature 1..188: note = bridgeRNA
ctccgtaagttgttgggtggcccgggagggctgggtgtggcacaggcgttcttgtctgcagtggctctgtgggagtggccgcccggccctccggggcgccctggctgctgattgagatgtgcgcttcggtcgctgattacggagatgacagcggggtgttcctcgggccgacggcatgccgtgtggaacgaggaggggcaagtgagcaagcgacgggcctgcgtctgggccggcatcgacgcgggtaagggccaccactggactgcggcggtcgacgagaccggggcgaccttgtggtcgaagaaggtcgacaatgacgagtcggcgatcctgagcgcgctcggcgagatcctggacctggcggatgaggtccgctgggcggttgacatctccggcacggcctccgcgctacttctggccctgctcgcggcgcacggccagcaggccgtctacgttcccggccgcacggtcaaccggatggccggggcctaccggggcgaggcgaaaaccgatgcccgtgacgcctacatcatcgccgagaccgcccggcaccgccgggactttgcgaccatcgatgtgcccgcccaactggcggccgaactagccctgttgaccgcccatcgctctgacctggttgcagacagggtgagaatgatcaaccgtctccgcgatgtcctgaccggcgtctttcccgctctggaacggtctttcgactactcggctcacaaaggtgccctggtgctgttgaccggctaccagacccccgccgcgatccgccgccgcggccgagcccggctcacggcctggctggccaaccggggcgtgcgcagcgctgacgccgtcgcggtcactgctctcgaggctgcccggacccagcagaccgcgctgcccggcgaggaggtcgccgcccaaatcgtcgctgacctagccgaacagatcctggccctggatgagcggctcaagcgcatcgagaagcgtatccgcgagaccttccgcagccatccacaagcggagatcatcgagtcgctgcccggcatggggcccatgctcggggccgagttcgtcgtggcggcaggtgacctgaccgcctacgcggacgctggtcacctggcgtcagcggccggacttgtacctgtgccacgcgactccggccggcggactgggaacctgcaccggcccaagcgttacagccgccgtctgcgaagggtgttctacctgtccgcgcagaccagcatcatccgcgagggccctaatcgggacttctacctcaagaagcgtggcgaggggtgcaagcacgtccaagccatcatcgccctggctcgccgacgagcgagcgtgttgtgggcattacttcgtgacggacgaatgttcacgaccgccccgccagtcacgcaggcggcttgacttcgtcattgaga

SEQ ID NO: 5846 - DNA, 1462 bp, unidentified
  source 1..1462: mol_type = unassigned DNA; note = element_8fe6c53
  misc_feature 1: note = core
  misc_feature 2..79: note = LE
  misc_feature 80..1135: note = CDS
  misc_feature 1136..1462: note = RE
  misc_feature 1227..1453: note = bridgeRNA
taatgggatggtccggccgtgcttctgccccgcttgctcgtaagctgtggggcttcgagccacgcaaggagcacgtctcatgtcacggtcttcttcctctgccgccattgccacgctcggtatcgatctgggcaagaacacgtttcatctcatcggccaggatgagcgcggcgccatcgtgctgcggatcaaactctcccgcgcccagctcactcagcggctggccaccatcccaccgtgcctgatcggcatggaggcctgcgccggggcccaccacatcggccggcaactccaggcgctcggccatgacgtgcggctgatcccggcccagtacgtgaagccgtttctgaaggggcacaaaaacgattatcgcgatgccgaagccatcgcggaggcagtgcaacggcccaccatgtccttcgtggcgatcaagacgcccgagcagatggatctgctcgccttgcaccgggtgcgctcgcgtctggtcagtcagcgcacgggcgtgaccaatcagatccgcactttcctgcttgagcgcggcatcaccgtgcgccaggggcttgcgcccttgcggcaggccttgccaggcatcctggcttcgccctctgacgccctgtcaccgcggatggttcgcctcatcgtcgatctggctgaggattggcgcggactcgacgagcgcattgccaatgtctcggccgagatcgaggcgctcgctgttcaagatgagcactgtcagcgcctgatgagtgtgcccggcgtcggacccgttatctcgtcggctgtcgtggcggcgattggaacgggcgctgggttcaagcaggggcgggacttcggggcttggcttgggctggtgcccaagcaggagtcgaccggcgaccgcatcattctgggcaagatctccaaacgcggcaacaagtacctgcgaacgctgttcgttcaagccgcccacattgtgctggtgcgccggccgcatggggccagactcggcctatggccatggatcgaggccgcgggccggaggctgcatcgcaacatgctggtgatcgcgctcgccaacaagctcgcccgcattgcctgggcggtgctggcccgcggacatgcttatcagcccaggaatgcgtctcaggcgatctgagtcgagcttgcccgcgagcctttccggaaccggttccggtcaaccaaagacaatgagggtttgatgatgtcagtcagcgaatcgacgactttcccgccgaggtctgcgagatgaaggaggagatggacgaacggtctgcccggcgcaaccatgagactgggtgccatgatggcccattgaggtctttctgttagcgagtcctggatgcgcgcggatacccatgatggcccggagctaaagctccacacagaggccgaatacattgatgcagctctcacgttcgtcagtctgccaacatcatcttgcgacgcacggccggaccataca

SEQ ID NO: 5847 - DNA, 1326 bp, unidentified
  source 1..1326: mol_type = unassigned DNA; note = element_8fed381
  misc_feature 1: note = core
  misc_feature 2..69: note = LE
  misc_feature 70..1110: note = CDS
  misc_feature 1111..1326: note = RE
  misc_feature 1109..1314: note = bridgeRNA
ctatgtatggactcctccaacctaatttcttaggttggaagtcgaccaaaacccaaagggagtccatacatgagctattcaacaacagtcggggtcgacttggcaaaaaatgttattcagatttcggtcgtatccggccgaggcaaagaactttccaaccgatctctcacgcgcaagaagtttgccgagtttctgggcaagcaaagcccgtcgctggttgcatttgaagcctgcgcgagcgcgcattactgggcgcgcgcggcgaagcgtcacggtcactcaactcggattattccggccaaggcagttgcaccgtttcgacaaggtcacaagacagacagcaatgacgcgttggctgtcgcagaagcggcgcgacgaccgaacatcaaagatgccccgatgaagacggttgagcagcaaggtttgcagtcgatccaacggtcgcggtttctcctgatccaggagtgcattgctttatcgaaccatatgcgcggcatccttctagagtttggcgtgacaatcccgcagggctttgcttcgctgttacgcacactaccggaggtgctggaagacggtgacaacgatctgcccgacctataccggccgacattgcaccgtctctacggtcgcatgctcgagctgcgtatcgacattgaagccatgaccaaggagatcgacagcctggtgaagcggcacccggtgtgcagtaagctgacggcactggaaggcgtcggtccgatcggcgcgctgtcgttgtatgcggcactcggctcgggtgccgcgtttaccaagagccgcgagttcgcggcctacctcggcctaacaccgaggcagcacagcagcggtggaaaaaccaacatcgtgggcttgagcaagaagatcggtaaccgcaggttgcgatcgatcctgatccagggtgcgctcgcctatgtttaccgcatgaaggagccacgaacgagcaaggatcgctggctgaaggatctcatcgagcgagccggaccgcgacgtgcggccgttgcgctcgccaacaaaaatgtacgaaccgcctgggcgcttgtaacccagggaactgaataccaacgtcgagagcaactggagatggctgcctagaaagtcctgcctacagaaaccacgtaacaggtaaagatatctgctccggtcaaacctgcaccgctttgaggccctagagcccactgacccttagaggaaccgaagagcgaatacatagcgggccaggagatagcctctccaacaaaaggccgaatatacaaacgcgtctgaattctgtttacgaaatctgtttgctagactggaggagtccatata

SEQ ID NO: 5848 - DNA, 1641 bp, unidentified
  source 1..1641: mol_type = unassigned DNA; note = element_8fefa05
  misc_feature 1..3: note = core
  misc_feature 4..68: note = LE
  misc_feature 69..1229: note = CDS
  misc_feature 1230..1641: note = RE
  misc_feature 1276..1482: note = bridgeRNA
aagatgctatggggcggcggcgaggctattgcatccatcgtcgctgatgtgaaccgatggagcgccccatgcaaaagttgaacgacctgagtcgatccctcaccgcccttgaaccggacgggacgctgattgcagtcatcgagatgagcctgtcgagctggctcattggcggcatcttacctggcgtcgagcgccagccgttgaagaagctcgcggtcgacgagagcgcattgctgaagttgttgcatcgatggcgggaagaagcggagaaagcgggacacaggatcgagcgcattgtagtcgccttcgaggccggccgtgacggcttctggttggcacgctggctcaaggcgcgcagcatcgaggcctacgtcattcacgccgcgagtgtggcagtgtcgcgcgagcatcggcgagcgaagaccgaccgtctcgactccgaactgctcaaacgcgcctttctcggctggctgcgcggcgagcgtgatcactgcaagatggtcgcgatcccgtcaataatggacgaagatgccaagcggccgaaccgcgagcgcgagagcctcattggcgagcaaagtcggatcgtcaaccgaatgaaggcggcgttgattcgactcggcatccgcggcttcaatcccaagctaaaaagggctgccggacgccttgacggcttgcacacgcctgagggcgagccaatcccgccgaacacactggctgagctgcgtcgtgatatggagcgccgacggctggtcagtaatcagatccggcggatcgagcaggcacgcctgcagcgtctcgagcaggagcccgatgatggaccacatgccatggtgcgcctgttggcgcgcgtgatcggggttggtatcgagacggccgacatgctggtgcgggaggtgctgtcacgaaacatgcgcgaccgacgggccgtagcgcgttatgccggcctcactggctcgcccgacgagagcgggaggaaatgccgggagaaagggctggctcgttcgggcaatgctcgggttcgacgaggtatgattcaattggcgtggcggctgctcatgttccagaagaacagcgccttggcgcagtggtttcgagcccgcaccgagaatgctcgcggcactcgcaaaaccatgatcgtggccttggcgcgcaagcttctgatcgccctgtggcggctcgtgcatgagggtgttgtaccggacggcatcgttttgcgtccggcacaatgaatggaggacgttgaaggaaccccgacagttttggccttgtccgtacgcttgtgacggggccgatgatggttcgaggtggcagattcccgacatgtcccttggccttcatgccgattggaagaatgggtctgccgcttcggagtttcgctgccgatgcgcatgactgcatcatggttcaggtccttggacctaccggatacaaggttgtggcgcgattgaatcgcgcccgaaagcgggctcccctctaatcgtcatcccgacagcaccaagcggcgccatcgtgctcgaagccgtcaaggcgtggcctagccatcgggacgaaggaacggactctcagatcgaacaaagaaactgacgaatgaaaaaagatgtgccgctctgcataaacttcttgactaaaaaaaccccatac

SEQ ID NO: 5849 - DNA, 1598 bp, unidentified
  source 1..1598: mol_type = unassigned DNA; note = element_8ff260c
  misc_feature 1..3: note = core
  misc_feature 4..450: note = LE
  misc_feature 451..1464: note = CDS
  misc_feature 1465..1598: note = RE
  misc_feature 13..282: note = bridgeRNA
tctattacaatataatttggttggaagcccagcatccggctgggcttctttccatctcgtgcctaagctacaataagaggagcaactggctgacgccccctttcttggacttgcatgcccgttgatgagactgtcagccatcctcttgttgcagcgttcggtttaagcaggttgagccttgagttcgcgtcatccaatagattgaatcggcagcgagaaaaagatgggttccggttgcaaattttgtgttggaggaatgaacgtgaactgtgtaggcattgatgtttccaaaggcaagagcatgattgccgtcatgcggcctttgggagagatggtgatcccgccctttgaggtgggacacactgatgctgagttgtgcgagttgtccagacggctagggggcttggagggcgagacccgcgtagtgacggagctacagggaactaccatttgccggttgccagcttcctttacgattccggtttttacgtctccgttgtaaatgccatgctggtacatggctacgggaacaacagtctgcggagggtaaagaccgacaagaaggacgcagtcaaactagccaactacggccttgaccactggctgacgctgccagatacatcagaagacgaggtacggcttatgctgaaaaccacttgccggcaataccagcaatgcaccaaagtacagaccatgctcaaaaacaacttaatctccttgcttgacaccgctttcttggacgcaaaccgcttgtttaccagtcccaccagagcggacggtagcgagaagtgggtggatttcatttctgccttttggcattgtgagtgtgtttgcgagctgtccgaaaaggcatttacagccaaataccagaaatggtgtaagaggcatggctataacttcagtcaggacaaggcgctggacatttacacctctgcctgcgggcacttcagcgtcatgccaaagaacgatactacaaagattctggtggaacaggcggtatcccagctccaggccacttccgctgcgctggccgcgctcaggaatgaaatgcagtccctggcggcatcgctgccggagcaccccattgtgatggggatgttcggagttggccccgcactcggcccccagcttatggcggagattggcgacgtgcgccgcttccactctaaaaaggcgctggtggcttttgcgggcattgacgccccgccgtaccagtccggccagatggaaatccgcagccgcagtatctctaagcgtggctctgccgttctgcgcaggacactgtttctggtgatgagcgccgttctccggtgttctcctgccgatgagccggtgtaccagtttatggacagaaaacgtatcgagggcaagccctaccgtgtttacatgatggcctccgccaacaagttcctgcgcatctactacgccactgtgaagcaatacctcgacagccttgaagcctgatctctaccctaatctgttcgtttcagccagcgccagaatttttcaatggcggtggcttggttttttataccctttttgcggtccctaaaaatttgcgattcctctcaatttagttcttgacatttgttagcagg

SEQ ID NO: 5850 - DNA, 1545 bp, unidentified
  source 1..1545: mol_type = unassigned DNA; note = element_8ff3ea8
  misc_feature 1..2: note = core
  misc_feature 3..240: note = LE
  misc_feature 241..1422: note = CDS
  misc_feature 1423..1545: note = RE
  misc_feature 3..218: note = bridgeRNA
cttgtattataaagtaatagtttatagcccctacccaaggggcgagtgctacactgtaagggatgctgtggattggttacttcctcctaccgcaagacggttcgtgaaaggctccaaccacagccctttacagtattgttaatcagttagataccgccagacggtttatgtggaacaaggttacaagagtaaagcgtcctgtggacccagcatcaaataaacataccggaggtattcattatgatttgtgtgggaattgacgttgccaaggacaagcacgactgcttcatcctcagctcggaaggtgaagtcctggcagatgtgttcaccatccaaaacaacgcggagggctttgacacgctgctgcaaaccattcgccgctgcacccgcccggaagataaaataaaagtagggcttgaggctaccggacactacagctacaacatcctcggatttctgcttgacaaaggcctgccaacctacgtcatcaatccgctgcacaccaacctctaccggaaaagcctaagccttcgcaaaaccaagactgaccgtgtcgatgcgcgaaccattgcagctatgctcatgtctgatgtggacctcaagtcctacacagacacagtataccacaacgaggagctaaagtcactcacaagataccggtttgacaaagttcatgagcgggcgaagctgaagcagtcggtttcccggctggtcacgattctgtttcctgagctggaaaagttggtgccttctctgcatctggcctctgtttacgcacttctcagcgagttccccggagccagacaggttgccggagcgcacctgacgcatttgaaggcagtcctatacgacgcctccaaagggcgctatgggagagatatggcagttacgcttcgggacgccgccagatgctctgtcggctctgttatgccggccaagtctctggaattgcggcatacgatccgcctgatccgcgaactggatgccgaaattgaggacatcgaggctgcaatccagtccatgatggacgaaatacagtcccccattacaacaattccgggcattggcgttcgtatgggtgctatgatccttgccgagattggcgacttttcccacttcgactcgccggataagatccttgcctatgctggcatgtcgccctccacttaccagtccgggcagctttcattgtctggaacctactcgcacatggagaaacgcggctcccgctatctgcgctacgcgctttacaacgccaccaaatatgtctgcctttgggatccaaccttcgccgcttatctcgctaagaagcgggctgagggtaagcactacaatgttgcgctctctcatgcggcaaagaagttggtgcgcctgatctacgccttggagaagtccagacagccatatcatatagctgcataactctgcccttacataggctcagcctggcgtcctaccgggcgtctgctttgctataccctttttgaaccgtctacactttttcaccattcctccgcattccgggcttgacttttaatagttagt

SEQ ID NO: 5851 - DNA, 1352 bp, unidentified
  source 1..1352: mol_type = unassigned DNA; note = element_8ffb8b7
  misc_feature 1..2: note = core
  misc_feature 3..69: note = LE
  misc_feature 70..1074: note = CDS
  misc_feature 1075..1352: note = RE
  misc_feature 1119..1350: note = bridgeRNA
ttaatgagatggtcttccccaccttgtgaaccatactctttatagagtattttttctggagagtccatcatgcaaaacgtcacccttattggtatcgatctcggcaagcattctttccatatccattgtcaggacaaattcggcaagactatgctgcgtaaacaatttacccgtccaaaattaatggaatttttagctgggtgtacatcgactaccgtcgtgatggaagcttgtgcgggtgcacattttatggctcgccggatcgctgatttaggccatgatgcgaagctgatatctccgcagtttgttcgtccttttgtcaaaagtaacaaaaatgatttcgttgatgcagaggcgatatgtgaagcggcatcacgcccctcaatgcgttttgtccagccgagaacggagacgcaacaggcgatgagagcactgcattgtgtcagagaatcactcatcaaagataaggtaaagaccactaaccaaatgcacgcctttttgctggcgtttggtatcagtctgccaaaaggcgaggcggtcattaaacggttatctctggttctggcagaacacgacgtgcccgattatctgagccgtttgctgatgaaattacatgcccactacctttatcttgtcgagcaaataaccccgttggaattagaattaaaacagtccatcaaagcggacgatgcgactcaacgcatgatgacaataccgggggtgggacccattaccgccagcctactttcatcccagcttggtgacggaaaacaattttcatgcagccgggattttgctgcttcgatggggcttgttccccgacaatacagtacaggggaaaaacagactctgctgggtatcagcaaacgcggcaacaaaaatttgcgccgattgctggttcaatgcgcccgggcgtttatgatgcggcttgagcatcagcatgggagacttgccgagtgggttcaggcacaactgagcaagaaacattcgaatgtggttgcctgtgcactggctaataagctggcacgaatagcctgggcaatcactactcggcaaaatgagtatcaggcctaatagaggctgactgattcaataacttgatgattaaaaagtgaaatacacgttacctatctggttttgcgaagactgattattgatgacatgaacggccaatcggcctgatgaataacctaagaaacaaaatggctcattgaagccggggagtttttaaggttcatcaggcgcagaactcatcgtggcgcgggcatctatactcatagagacgccggatagatttaagcaagccaaccatacatcaaaatgagtgttgcaaaaacggggaagaccataga

SEQ ID NO: 5852 - DNA, 1510 bp, unidentified
  source 1..1510: mol_type = unassigned DNA; note = element_90029e6
  misc_feature 1..4: note = core
  misc_feature 5..262: note = LE
  misc_feature 263..1285: note = CDS
  misc_feature 1286..1510: note = RE
  misc_feature 80..238: note = bridgeRNA
atagctatctcttaggtttgcagtttaaaataaatttgaaaagcaaggttaatttctttacttttgttgtaaaaaagcaaggaattaaccgactgtcaaaggtaaactatcgatagctataaagataatttatgtcccgaatcagaccttgacagtctagctgatcaacaccaaatagagttttggtatttaaagaccattaagagtagtagtgcaatcagctattggttaattccaagcaaaaaaaataaaacgtaaagttatgaaaaagttttttgttggaattgatttttcaaaattaaaatttgatgcagccatttacaatggtgaaaagaatgataatgcaaattatcaagtatttgacaatgacacaaatggatttaaggaatttgtaaagtgggttgaatctcaaacaaaaatggatcgtactgattggcttatttgcggagaacatactggactttattcctatgcgttgtcattatttctcagcgaaaatggaatcgacatttggctcgaatctggcttgcagataaaaaatagtcagggtatccagcgaggtaaaacagacaaaatagatgcatttcgtattgctgaatatgcctatcgttataatgataaagcaaaggtatttaaacctttgtccaaatcattggatggattaaaggacttattggcttatcgagaacgtttggtagaagcaaagaaagtgtttgttatttcaagcaaagagctcaaaagggtaaaacgagaaagaacaataacagactttataattacagagagttcattagaaatacaatctatagaactcaaaatcaagacctgtgagaagaagatagaagaaataattcaaagtgaaattgatttgtgtacgaattataagttgctgacttctataaagggaataggaatggtgaatgcagtaatggtattaaccgtaacagctaattttacactatttaccgacccacgaaagttcggttgttattgtggagttgttccctttaaacatgattctggcacaagcgttaaaggacgaacaaagataagtccattagcaaatagaaaaataaaaactttattgacacaagcagctagaacttgtgtaatgcatgatttagaaatgaaaacatattatcaaagaaaaagagcagaagggaagtcagataaaatagtaataaataatgttaggaataaacttattcacaggatgtttgctgtagttatgaatggcaatatgtataatcctaattatttaaatccattaaaacaggtagcctaacataatttttctgacttaataattttgctaacagacaaaaaatgtagaaaataaataaagcaagactttttgtaaaaatactatccgcctaccggcggatggagatttttgcaaaaaccgaaggcttggtcttgatatatttattttcggaatttatctttgtgcgcaaatttattaaaacaatataaatacattaattattaacatagaaaacttggattaacc

SEQ ID NO: 5853 - DNA, 1369 bp, unidentified
  source 1..1369: mol_type = unassigned DNA; note = element_9012747
  misc_feature 1..2: note = core
  misc_feature 3..319: note = LE
  misc_feature 320..1354: note = CDS
  misc_feature 1355..1369: note = RE
ggcgtatgaaatcccccggtgggttcctccttcgggagaaggttcccgggaccggccggaggtgactcgaaagcccaagtcgcggtcgatggcgcaccgctgacctttgacctgaccgtccctccgaccgggaccggccggaggtgactcgaaagcccaagtcgcggtcgatggcgcaccgctgacctttgacctgaccgtccctccgaccgggaccgggccggcggaagtgacttgatagaaggctggatctcaacccaacgcctggttgtcctcccgccagccaccatcgtaggtcggccgatggaaggaggccagcgtggaggtggcgatcggagtcgatcctgccaagggatcgctcgccgtggcggcggttgatcccctgggcagggtgctcgatgcacgggagttctccaacgacccgggagggcaccgggccttgctgggatggatccgcgaacgcggaccgaacagggtgatcgggatcgagtgctcgctcagctacggtgcatctgtgtcgaggcacctgctcggcgccggtgaggacgtccgggaggtgccgaccacgctgacggcccgggagcgacgccggcggcacgcccaggggaagtcggacctagttgactcggtggccatcgctcggatcgtggccagcggcgaggtcctgtcttcggcccaccgagtggaggcgctcactgatctcagggccctcgtcgactaccgcgatcagctcgttcgggccaggacccaggtggccaaccgggcccacgccgacctggtgaacatccgacctgggtacgagcgggaggtccccaacctcagggccaagcgtcaccaggccaaggccaggtcccggttgagaggagaccggtcggtgcgggcggagctcgtccgccggcgcctgggtgagctgtccaggctcgagggggagatcgttgcgatggaccggcggatcgaagccatggtccggaaggtccggacgaccctcaccgagatccccggtgtcggctcgctcatcgccgccaagatcctgggggaggttggcgatccctccagggtccggtccaaggccgccttcgctgtgctgtccgggacggctcctctctccgcctcctcaggacagacccaccgacaccgtctgaaccgaggagggaaccgtcagctgaactgggccctgcactacatcgccctggtccagtgccggatcttcccggaggcgcaggcctacatggcacgtcagcgggagacggggaagacccacaaggaggccatgcggtgcctgaagcgacagctttccaacgtggtctaccgtcacctcctggccgatgcgagaggcgttgagctggccgcttgacaacatagaaggtct

SEQ ID NO: 5854 - DNA, 1393 bp, unidentified
  source 1..1393: mol_type = unassigned DNA; note = element_901c3a9
  misc_feature 1..4: note = core
  misc_feature 5..83: note = LE
  misc_feature 84..1109: note = CDS
  misc_feature 1110..1393: note = RE
  misc_feature 1133..1383: note = bridgeRNA
atgatgatgtggacggcctctcctcaacggcatcatagtgccaaggcgtggtcgccggagcgccacaaagagggagaccatccatgaagaagtttatcagaattggagtcgatttggccaagaattattttcaggttcatgcgcttgagagcgaaaacggccccgccgtgacacgcaagttgaagcgctcgaagatgcacgagttcttttcgcaaatcgagccctgcctcattggcatggaggcctgcggctcggcgcattactgggcgcgtgaactcaaggcgatgggacacgaagtgctgctgatgccaccggcttacaccaagccgtatgtcaaacgcggaaagaacgatgcagtcgatgcggatgcgatatgtgaggctatgtcgcggcccggaatgcgctttgtgccaatcaagagcgcggagcagcaagcgacgctgatgctgcacaagacgcgcgaactgctgatcaagcagcggacgatgagcgtcaacgcgcttcgcagccatctttcggaattcggcattgtcgccgccaaggggatcggtcgcgtcgacgagttgctcgatctcgccgaaagtgatgcgacgcttccggctgccgccagggcgggcgtgaaggtcctggctcaggctcttgaggggctagacaaagcgattgacgatttggaagacgaaatcaccagcgccgatgcgcaaaatgagatggtccggttgcttgacaaggttcccggcatcgggaagctcatcgcttcggtgatcgcagccagcgtgccggacccgagcgtgttcaaatcggggcgcgatttcgccgcctggctcggcctcacgccgaggcaaaactcgagcggcggcaagcagacgcttggaggcataaccaagcagggtaaccgatacataaggaaactgctcatcttgggggggacctcgctgctcaacgtcttgggcaagcgcaaaggcgccttgcgcgactggattgtcgggctgctggcgaaaaagccggcgcgactagttacggtcgcgctggccaacaagctggcccggatcctctgggcgatgatgaagaccggcgaatgcttccgcactgagatgtttgcaaaggcgtaaggaagctgctcgccgttgcaaggcgtgttcacagaggagatttataggttcgagtttggcaagcgcaacgagacgtgatgaacgacacggtcgccaccgaagaccaggaacaaccattgcatgccatgagcttaaagctcgtttctatgatagggatcccagtcgtcggacttcatcaaggcccgcggacatatgctccgcaccgacagaggccggacatatgaccgcagccgaccaaatcgttcaaaccgctaaaaaagtgcttgccatggggccgtccacat

SEQ ID NO: 5855 - DNA, 1403 bp, unidentified
  source 1..1403: mol_type = unassigned DNA; note = element_902161c
  misc_feature 1..2: note = core
  misc_feature 3..321: note = LE
  misc_feature 322..1110: note = CDS
  misc_feature 1111..1403: note = RE
  misc_feature 1148..1389: note = bridgeRNA
tgatggtgtggacggctccacccaaacggcatcacgatgtgccatattggtgctgtttgaaaccaacagtgggaaggagccattcacatgacgattacaacactcgggattgatctcgccaagtcggttttccagttgcacggtgtgaacgcgcgaggggccgttgttttgcagaagaagctgcggcgtggcgctgttctcacttttctgagtaaactcgagccatgcctgatcggcatggaggcttgcgccacgtcgcattactgggcgcggtagattgcagctcttggacatacagtacgtttgatcccaccttcctatgtgaagccctacgtcaaacgacaaaagaacgatgccgcagatgctgaagccatctgtgaggcagtcacgcgcccgaacatgcgctttgtggccgtaaagactgaggagcagcaaggtgttcttgtactacaccgttctcgcgaccttctgatgcgacagcgtacgatgatcctcaatgcaatccgcgctcattttgctgagtttgggattatcactgcgcagggacctcgaaaggtgatcgacctggttagccgacttcgtgatgatgatagccttggactgccggatgttgtccgctccgcgcttttggctttggcgattcaactcgacagtctggctgtcgaggctcgaaatatcgaacggcgactgatggcatggcacaaacagagtgtggcaagtcagcgacttgagacaatcccgggcgtcggcatcctaacggcgaccgcgcttgccgccagcgtgcctgacccgagtgtgttcaaatccggtcgccagtttgcagcctatcttggcctcgtgcccagacagaactcgtcgggtggcaaagatcgtcttgggcatatatcgaagatgggcaacggttatctacgcaagctgcttgttgttggcgcgacctctgtcacgcgacgagcgccaaccatcgacacacgtactggcgtctgggtcagatccctcctcaaatgcaagccgatacgggttgtgacagtcgccatcgctaacaaggccgcacgtattgcgtgggcgctgctcacaaaggaagaagcctataaggcagcctcggctagctgaacagggccaactatggggccaactaaacggaaaagaacacgcggcgcacgatccagccgcaatgagatgcaagggctagcgtgagtgatgatgatcaaacgggaccgctaccaggacaccccgaagtggtgtctgggcattaaagctcgattgtctgattgggacctggcatgcggacttcatcagggccagtggctgtatgcatcgcgtcaaaaggccggacacatgaccgcaccccgcaacgatcaaaatcagctcaaatcagcccttgcgcaaaaggagccgtccacaca

SEQ ID NO: 5856 - DNA, 1272 bp, unidentified
  source 1..1272: mol_type = unassigned DNA; note = element_902b37f
  misc_feature 1..2: note = core
  misc_feature 3..229: note = LE
  misc_feature 230..1267: note = CDS
  misc_feature 1268..1272: note = RE
  misc_feature 38..232: note = bridgeRNA
ctgacttgtttggatgggtcaagcacccaggcgtcgcgagcccatagggtgcgaggccgatggccggctggctcccacgctccttgcccacctcggtgtggctctctcatagcgtgccggccggtcaccgaccgccgtggcgtggctcgatagaggcgtggatcgcttccttgaactcagggtgcccaccacggtcccacccatcggggcccgcaggcaggaggcgcacgtgatcaccatcggggtcgatccccacaagtcctcgcacaccgccgtggcgctcgacgaggccgggcaggtccacggcgagctgcgggtgccggccgacacggccacctggagaaggctgtggggatgggccgagcgctggcccgagcggacatgggccatcgagggggccaacggcctggggcgcctgctcgcccagcagctcgtcgccgccggcgaggtcgtggtcgacgtcccggccacgctcgccgcccgggcccgccagctcgaccggggccacgggaggaagaccgacggcatcgacgccaggaccgtggccgcggtggcccagcgccgacccgacctgcggcgggtggctcccgaagaccacgccatggtgctccggctgctgtccgatcggagggacgagctcgctgaggagcgccgccgggtggtcaatcggctccaccggctcctgcgcgatcttcatcccggcggtgcccccaccgagctctcggcggagggtgcggcagggcttctggggaggatccggcctcggggtgccgctgccctggagcgcaaggcgatggcccgccagctcgtggccgacctccggcgcctggaccgagccctcgcggacaaccggcgccggtgcgccgccgcggtcgcggcctccggcacgagcctcaccgccgtcttcgggatcagcgacgtcctggccgccaagatcctggggcacaccggtgacgtgggccgtttcgtgacggcggatcgcttcgcgagctacacgggcaccgccccggtcgaggtctccagcggagagctcacccgccatcggctgtcccggggcggcaaccgatcgctgaacaacgccctgcaccttgccgccagggtccagatcatgcacccgggaccgggacgagatcactacgcccgcaagctcgccgagcacaagtcctccaccgaggccctgaggagcctcaagcgccagctcgcgaagatcgtgtaccgccacatggtcgccgatcgtgccgttcgtctcgagcctgctttgacatagaggcg

SEQ ID NO: 5857 - DNA, 1348 bp, unidentified
  source 1..1348: mol_type = unassigned DNA; note = element_902cc66
  misc_feature 1..2: note = core
  misc_feature 3..65: note = LE
  misc_feature 66..1034: note = CDS
  misc_feature 1035..1348: note = RE
  misc_feature 1110..1336: note = bridgeRNA
tgatgctgtggacggctctcatccaaccagccagtctcctggagatggcgaagaggaggagagccatggaagcagcggttacgatcgggttggatctcggcaagtccgtttttcaggtgcatggtgttgatcagcgtggagccgtgatggtccagcggcggcttactcgagctcgattgctggcgttctttgcgaagcaacctgcgtgcttggttggcatggaggcctgtgcagcggctcaccactggggcagggagctgcagaagctaggccatcgagtgaagctgatgccgccccggtacgtcaaaccctacgtgaagcggcagaagaacgatgccgcggatgccgaggtgatctgtgaagcggtcactcggccgaacatgcggttcgtcgagatcaagacttgcgagcaacagggtgtgctggtccttcatcgtgtccggctgatgttaatgcgtcagcggattgcactgtcgaacgcgatccgtggccacatggcggagtacggcttggtggctcccgtcggccgcaatgggctgcaggggctcatagagttcattgccgacgtgcacgatgagcggttgccagcaatggctcgcagcttcctggtcaacctggtctcccagcttcagctggtgaacgagcaagtcctcgagaacgaccgtcgggtgagagtgaccgcccgatcgactgatatcgggcggcgattgatggaagtgccaggcgtcggcccggttctcgcgagcgccatcgtggcatcggtgcctgatcccacggcattccgatcaggaagggatctcgcggcatggatcgggctcgttccgaagcagaactccagcggcggtaggagaagctgggcggcatcaccaagcagggtgatcgctatctactccagttgctggtcgtcggcgcgctgtccgtcatccgttacgcccagaagcacggaacgcggcgaccctggttggttgcactgctctcccggcgatcacccaagatcgcggcagtcgctctggccaacaagatggcaagaatgatctgggcaatgatggtcaccggtgaacgctatagggagccagctctcgtcaccagcgtcggctgagacaacgaatcagggtttgggaagggcaacagcgatgtaatgcgtcctacggtcgaaaccgagagcgggagaacccatttgcgccatagcgcctcgagcgcgaggttttggtcgggacccggctccgcggaaggcattatggccaggggcctacgtgtgccgcatcaacaggccgcacacatggccgcaccgaccaagcggaagcatcgcatcaaagaaaacccttgccaggggagagccgtccacaca

SEQ ID NO: 5858 - DNA, 1504 bp, unidentified
  source 1..1504: mol_type = unassigned DNA; note = element_902fcba
  misc_feature 1..2: note = core
  misc_feature 3..136: note = LE
  misc_feature 137..1477: note = CDS
  misc_feature 1478..1504: note = RE
ctaatgggactcgtcgggtcgtgagagagactgcggcccgtggccgccggcaggtgagcactatccgaaccggaacccttgtgagttctggtgtgagagcgtgcccccgctggtcggccgggaggcctgactgctgatgggatggcgtgcccgcccgttgtcgggcgtgagcactggatccattagggcgcgagctgtgtcttccgcaggccgcacgcacgagttcgtcgagaggttggagaagcgggtgctgttcgtcggcgacgactgggccgaagaccatcacgatgtcgaggtccaggatgcgacgggccgcaggctcgccaccgcccggctgatggagggtgtcgagggcgtcgcgaagctgcacgccctgctcgcccggcacggcggggaggacctggagccggaggaggtggtggtcgggatcgagaccgaccgggggccgtgggtgcagtccctgctcgcggtcggttaccgggtctacgcggtcaacccgcgccaggcggcgcggttcaaggagcggtacgcgacgtccggagcgaagagtgaccgcggtgacacccacgcactggccgacatggtccgcatcgaccgtgcccagctgcggccgatcgcgggcgacagcgagcaggcccaggccgtgaaagtggtcgcccgcgcccaccagacgctgatctgggaacggacccgcgccttccaacggctgcggaccacgctgcgcgagtacttccccggcgccctggccgcctacgcgggcctggagctgaccagcaccgatgctttggaactcctggtcaaagcgcccacgcccgagacggggaggaagctgacgaaacaacagaccaccgcagtgctggcacggcaccgccgtcgcaaccgggaccagaagaccgccgcgatccagaaggagctgcgcgagccccagctcgacgtcgccgccccggtggccgccgcctatgccgccgcggccaccgcacacgcccggctgctgctcgccctgaacgagcagatagacgcgctggagatcgaggtgaaggcgcattttctcgcgcacccggacgctgagatctacctgtcgatgcccggcatcggcgagatcgtcggggcccgggtgctggccgagttcggcgacgaccccacacgctacgcatcggcgaaggctcggaagaactacgccggcaccagcccgatcacccgcgcctccggcaaggtccacaccgttcaggcccgctacgtccgcaacaaccggctcgccgacgcgctccaacgtcaggcgttctgcgcgctgcagaactcgccgggtgcccgccgttactacgacaagcagcgagctcgcgatctcgactacaacccagccctgcggcaggtcggcaaccgcctcgtcggcatcctgcacggctgcctcaagacccgcacccactacgacgaagccaccgcctgggcccaccacggccaactgccaacagcggcctgaatttgacaccccaaagcgatgggatgt

SEQ ID NO: 5859 - DNA, 1160 bp, unidentified
  source 1..1160: mol_type = unassigned DNA; note = element_903ded7
  misc_feature 1..2: note = core
  misc_feature 3..189: note = LE
  misc_feature 190..1149: note = CDS
  misc_feature 1150..1160: note = RE
  misc_feature 15..199: note = bridgeRNA
cttctgtatctgtgatctgctagtctgtgttcaccatcgaccttggcgaaggccgatggtgaggcggtgtatggcgtctgagccttgtgggtttgaccacgtttactagcgagccagcaccgtctctctttcatcgtctcgaacagttgaatgtggccgatcaggaccacggatcagaaggaagagagtatggatatgatatcacaaggcgccatcattggcatagatgtctcacgcgattggctggacattcattgtctacctgaaggccaatatgaacgcttccccaacacggatatgggccacgaacgcctgacagaactggcgcgcatgacgggagcggttgtctgttttgaggcgactggtggtcaggaatggcggctttgggcagagcttgatgccgccggaattgtaacacggcagttgccgcccgcacagattaaagcctttgccgccagccggggaacacgcgcgaagacggaccgaatagatgccgaactgatcgcgcggtttctttcgttcaggccggacgcaggacgcgccctgcctgcgcaaaagctgcgcgttctaagggctttgacgagcaaaagagggcaactcgtcgagacccgtaaacggcttttgggtcaaatcaaagcacgccaaaagcagggaatggatgagccattcgaagaaatggattcaacacttcgctgtcttcttgatacccaggtcgccaaactggaaaaccagattgaatgtttgatcgcagctgatgatgtgttggcccaaactgccagtatccttcgttccgtgcccggtattgggcctgtcgccagcaccatgttgatcgcagagatgcccgaacttggtcagatatcaggcgaacaggcagcagctctgacgggtctggctccgattgcccatgatagcggtgcactgcgtggaaaacgggccatcggtggcgggcgaaacctgttgcggcatgtgatgttccaagcggctttggtggcaagtcatcataacccgacactgaaacccttcgctgatcgcctgcgcgccgctggaaaaccgcacaaggtcgttattacagccgttgccagaaaactcgtcaccattgtgaatgcgctgtgcaaatcacgccagaattgggtgattcaagccaattgaagatacagttg

SEQ ID NO: 5860 - DNA, 1113 bp, unidentified
  source 1..1113: mol_type = unassigned DNA; note = element_903eda7
  misc_feature 1..2: note = core
  misc_feature 3..162: note = LE
  misc_feature 163..1107: note = CDS
  misc_feature 1108..1113: note = RE
  misc_feature 1..164: note = bridgeRNA
cctgtgtctgatggttctgtcatgatggggtgggcgggaagccgttgggtccctggcgcttgacgccgtgagccggctcggtctcccgcccgtttcgacccatcatcctgaacagttgcacgaggctgcaccaacagacctcgcatcacagggacaggccccatgatcctagcacttcgctatgtcggaatcgacgtctccaaacatatgctcgatattttcgatgacgccgtgggcgatgctcagagcattgccaacgcgccacagcccatcgcggagcaggtggcgcgttggcagtgcggcaacgtattcgtcgtgtttgaggcgaccggcatctacgaccgtgagcttacctcgcaattacacgaggccggcatccggttcgctcgcgttaatccggcacgagcccgggacttcgcccgcgccagcggaagattggccaagaccgatgccatcgatgcccgcatgcttgcagcctttgcaaggacgatggcgccagcggccgatcccgccgcggaccctgcacgcaatagcttggctttgctggcaaaacggcgtgatcagctggtgcatatgcgagcgcaggagaagaaccggcgcagcgaaagcgccgatcacacgacgatagaatccatcacccgtctactcgacttcctcaccgaggagatcaaagcgatcgagctcaagataaaaaccctcatcagcaagacaccccagatcgctgaacaagcacgtctgatgcgatccgccccaggcatcggccctgttgcctgcatgcaactcatcgcacagatgcccgaactcggtcgccttgctcccaagcagctcgccgcgctggccggccttgcacccttcaacgtagatagcggcaaacaccggggcaaacgcctaattggtggtggccgcaagcgcgtccgcgatgcactctatatggccgctctcaatgcggtccgccgcaatggcatcctcaaaaccttctatcaacggttacgaaccgccggtaaacctgccaaactcgccctcatcgccgttgcccgcaagctcctaacaatccttaatgctatgctgcgcgaccgcaaaatttacttgcctgctccacactcataacagttg

SEQ ID NO: 5861 - DNA, 1612 bp, unidentified
  source 1..1612: mol_type = unassigned DNA; note = element_903fa12
  misc_feature 1..3: note = core
  misc_feature 4..285: note = LE
  misc_feature 286..1275: note = CDS
  misc_feature 1276..1612: note = RE
aagtacctatgtttgatatccaaataaaatcggagtgagctttttcaaagctcatgaggaacgctcatcggggcccgctgccccgaccgctggggctagccccgcgaagtttttcatgagtctataaagaaagctaccggaattttggttaaattgaaaaaaagagaacaaacaaaaccaagataccagtagcttatggaagcacaaagaaaagcattatccttcaaaggacaaaacatttacatcggaatcgatgtgcatttgaagagctggtcggtgacattgatgtcggaggccacgcagctgaagaggttcagccagagtccggatccggacgcgctgtatgcgcatctggtgaggaactacccggaggcggagtatcactccgtgtacgaggctggtttctgcgggttctggatacactataggctcgtcgggctggggatacacaacattgttgtcaacccagcggatgtcccgacgacgaccagcgagaagctgaggaagacggacgcggtggacagcgccaaactcgccaggagtctccgcgccggagagctgaaagggatatacgtccccggaagcgagtcgctggagacacgttctttgataagattgagagactcgatcacgaaggaccagacgcggctgaagaaccgcatcaagtcccatctgcggtatctcgggatagagataccggaggagttctctggtccgggccgctgctggaacaggtgctttgtcgtctggctgaagggagcggagacgggcaccgcctacggacggcagactctcgacttcctcgtcaggcagtacgaggcgctgagaggccagaggctggagatgttgcgcgcggtcagggcattgtccaggacggagcggttcgagaagccccttgagaacctgatgacagtgccgggcatcggccagctgacaggcatgtccctcctctccgagattgacgacataaggcgcttcaagagcgcggaccagctcgcggccttcatcgggatgataccgatgtgccactcaagcggtgagcgcgagggcgtcggcgacataaccgtccgcaggagcgcaaggctcaggtccgtccttgtcgaagcctcatgggtggcggtaaggcaagaccccgccttgtccatggcgtatggcaactactgcaagaggatggcgccgggcaaggcgatcataaagatcgccaggaagcttgtcaaccgcatctacttcgtgatgaaacgcaaccagccgtatgtcaaatgcgtggttgcataggaatatatcctgtccggtgaacagacttttcaagggaagaatactgctatatcattgcggctttgaagtccgctcataaaaagtttgtacttcccacctttgtaaactaatgcagatacttgcggcaccgcaagccggatgtccgctatggaaagtctgtttaccgaaggatattcatcgagcctctgagtcgcgaccatctttgatggccgtcaggacgatatcgcttgcacgcaaacggcaaggccacttgccgactacataaaatattgattattaaaaatataaaggttaaaccaaaattatcaagtccaattttatttggatattaactgga

SEQ ID NO: 5862 - DNA, 1511 bp, unidentified
  source 1..1511: mol_type = unassigned DNA; note = element_903fd3d
  misc_feature 1..2: note = core
  misc_feature 3..251: note = LE
  misc_feature 252..1490: note = CDS
  misc_feature 1491..1511: note = RE
  misc_feature 6..244: note = bridgeRNA
ctaatgggttctaccgatcctctggcaggctcggttccggttccggtagcggccggcgggtcagcactctccgaatctgatcgttgaggtcttgcggcagaccgtgcgcccgctggtcgtgaggaggcgtgaccgctgctgggatgacgtgcccccagatgtctcgggtgagcacttgaccattagatccccgggagtcctcctccacgctgctgagaaagggccgcaacgagacgaaggaggagaaggcgatgttgttcattggtgatgactgggccgaggaccaccacgacgtcgagctggtcgatgaccagggacggatcctggcgcgaagacgtctgcccgaggggctgaccggggtgacccggttgcacgcgttggtggccgagcacgcaccgcaggagtgggccgacctggagccggccgaggcggccgcgcaggtggtggtcggtatcgagaccgaccggggcccgtgggtcggtgcgctggtcgcggccgggtacaccgtgtacgggctgaacccgatgtcggtcgcccggtatcgggagcggcactccacctcgggggcgaagtcggacaccgccgatgcgcacctgttggccgagatcgtccgcctggaccgggcccatcaccgccgggtcgctggcgacagcgccaccggggaggcggtcaaggtgaccgcccgggcgcaccagtcgctgatctgggaccggacccggcacgtgctgcggttgcgctcgaccctgcgcgacttcttccccgcggccctggccgcgttcaaggacctggacgatccggacaccctggtcctgctggcccaggcaccggacccggacaccgcctcgaggctgtcgcgggccaagatcgtgcgggcattgacggcggcgaaccggcgcgacgtacccgctcgtgcggagaagatccggcagatgttgaccgcgccggagctgcggcaacccggcccggtgcaggacgcctacgcggcgatcgtgacctcgcaggtcgcgctcatcagcgtgctgaacgcccagatcgagcggctcgggcaggtggtgggcgagcattttggccggcaccgggacgctgacatctacaccagcctgcccgggctcggcgtgaccctggcctcccgggtccttggcgagttcggcgacgacccgcaccgctacgccgacgccaaggcccgcaaggcctacgccggcaccgcacccatcacccgcgcgtcgggcacaagacgcgtcgtgctggcccggtacgcccgcaaccggcgcctcggtgatgccctgcagcagtgggccttctgctccatgcgcggctcagccggcgcccgcgcctactacaaggccctccgagggcgaggcgtcggccatcaggccgccctgcgccagctcgccaaccgctgggtcggcatcctccacggctgcttgcgctaccgcaccttctacgacgagaacaacgcctggcagcagcacctcgacaccgccgcttgacagaaccagaacctgggatgt

SEQ ID NO: 5863 - DNA, 1415 bp, unidentified
  source 1..1415: mol_type = unassigned DNA; note = element_9042200
  misc_feature 1: note = core
  misc_feature 2..318: note = LE
  misc_feature 319..1404: note = CDS
  misc_feature 1405..1415: note = RE
  misc_feature 80..323: note = bridgeRNA
cacttccccagaatggtgtgggtggggttgcggatttggccctgtcggtgtgtcttcggtgattcgcagcccggttcggcgagtcttggcccgtcttgccgccggaccccggcttggctccgcacgcaactgaccgcgtgagcgtgtcctgtgcccgaaccgccggccggggtctgacgggaggacgtgtaacccgcggggcccgggcggccgtgacttgataggagcctgacacacctctgttgtcccagaagtgttctgtccgtccgtcctgggctccgcggtgccatcccagtcctagcgaggaacggagacgacatgcccacgatcgcagatgcgggccggctggtcactggcggcgtcgatacccacgccggtatgcatgtggctggcgtgactgaccaggtcggccgggtcatgggaactagggagttcccggcgactaccgagggttatgcagcagcgctggcctggatgcgcgggcacggtgagctggccaaggtcggggtggaaggcaccgggagctacggtgccgggctggctcgctacctggccgcggagggcatcgaggtggccgaggtgatgcggccgaaccggcaggcgcggcgccggcgcggcaagtctgatgccgccgatgcgatcgctgccgcgctggctgccctgaacggcgaggcgtcggggcagccgaagtctggcgacggcgcggtggagtcgatccgggccctgcaagtggcccgccgcggcgcggtcaaggcccgcacccaggcgggcaaccagctccgcggcctgatcatcaccgccccccaggcgctgcgggagaaactggccggcctgtccgctcccgaacagatcaagctggccgcccggttccgccccggtgacctgaccagcccggccgaagcggttaaagcggccatggccaccgtggcccgccgccaccaggcgctggccgccgagatcgcccagctggataccgccctggaaacgctggtcgcgcacgccgccccggccgggttccgggaccggacaggcgtgggcacccgggtcgcggccacgctgctggtcaccgtcggcgacaacccagccaggctgcgcaccgaggccagcttcgccgcgctatgcggcgccagcccagtagacgcctcctccggcaagcagcgccgccaccgcctcaaccgcggcggagaccggcaagccaactccgccctctggcggatcgtcttcacccggatggccaccgacccgcgcacccaggcctacatgatccggcgcaccaccgagggcaagaccaccagagagatcgtgcgctgcctcaagcgctacgtcgctcgcgaggtctacaagaccctggccggcccgccccccgcccggccagccacgcccagaatctccatgattacttgacataggagctt

SEQ ID NO: 5864 - DNA, 1383 bp, unidentified
  source 1..1383: mol_type = unassigned DNA; note = element_905233f
  misc_feature 1..2: note = core
  misc_feature 3..325: note = LE
  misc_feature 326..1144: note = CDS
  misc_feature 1145..1383: note = RE
  misc_feature 1164..1352: note = bridgeRNA
acatagcgtcaatcgccgatgggcctcgccttgagggtggcggctctccacactggctggtggcaacccaggccaatgtgccgacgctatgaggagaaccgccatgaagcattatgccgggctggatgtcagccagcaaacgacctcgatctgcatcgtcgacgaggagggaggtattgtcgcggaacggaaggtgacgacatgccccgacgtgatagccgctgcactcgaaccgttcgccctgacgcgcgccgggctggagaccggccccttgtcggtctggctgtagaacggactgatggcgcgcggagtgccgatcgtctgcatggacgcgcgccatgccaacgcagccttgaggatgatgccggccaagactgaccgtaatgacgctgtaggactcgcgcagatcgtgcgaacgggctggtgcaagagcgtgcatgtgaagtcggcttcgagccacgaggtgcgcgcgctgctcgccacgcgcagccagttcgtccagatccgctgcgacctcgaaaaccagatccgaggtgttttgcgcaccttcggcatcgtgttcggcaagcgtgtcggcggcttcgccaagcgcgccgaggaaatcgtcagcggcgagttggacgcatcgccgacgatccgtactgtggtcgagtcgctgatgaaggcacgcgcggacatcctcgcccaaatccgggcgcttgacaccaaggttcgctcgaccgcgcgcagcaatgccactgtgcggcacctcatgactgtgcccggggtcggtgtcgtcactgcgctcgggtttgttgccactatcgacgaccccgcgcgtttccgccgatcatcgagcgctggcgcctatcttgggctcacgcccagaatttacgcttcaggcgaaaccatgaaagcgggccggatatcccggcgcggcgacgactttctcagacgcagtctctacgaggccgccaatgcgctgctgacgcgcatcgaccggttttcggcgctcaaaagctggggcctgcgcatcgccaagcgcggcggcttcaagaaagcgaaggttgccgtggcccgcaaactcgccaccatcctccatgccatgtggacgacgggcgaggagttccgctggtcatccgcagagaaggtgcaggacgcatgattgcaacccatcgtacgtcacgctgacgtcaacggaatcgtccggccaggacgatggcgcagccaaggccgatcccacggatgcgagcaccgaaaatatcggtgaccgcgaacaccacattggcctgctgaacctgtccaacgccatgctgaggcggcaacaaaccgccgacctcgaagagaaccatgagcctggtcgccgatatcccatcacaacagcttgacgaatgcgattagaga

SEQ ID NO: 5865 - DNA, 1330 bp, unidentified
  source 1..1330: mol_type = unassigned DNA; note = element_905d7c2
  misc_feature 1..2: note = core
  misc_feature 3..164: note = LE
  misc_feature 165..1118: note = CDS
  misc_feature 1119..1330: note = RE
  misc_feature 1093..1315: note = bridgeRNA
agataattggactccccaacctaataggttggtctaacatttacgttgtcacacacaaaggttaggtaggagtccatatatgtataatatgctcactggtgtagatttagcaaaaaaaagagattcaagtttgcgttgctaaatcgaataaaataaatcgcaatatggcgatgacgcccaccgctttttctaattggctagccactcaaaagccaatgacagttgttttcgaagcgtgtgcaacgtcaaattattggtatcaatgtgcgcgtgaatacgggcatgatgcccgtttaatatcagctaagcttgtatcgaatattcgtcaaaaccaaaagactgataagaatgatgccgaggcggttttacaggcatcacaacttagtaacgtgaaatttattagcgggaagtctaaggagcagcaagagcttcaatcgcttgttcgtatgcatcaactatcagtaaagcataaagttgcttacgggaatcaactttgttcgttacttttagaattcaacattaagttatcaccaacagatacggggttgaacagtgcaatacagtcgatattagaagatgcagaaaatggatttagcgcgatattcagagatgcattacacaaggcatggcatcaataccttaagagtatagaattcgtgaagcattacgaacagagtgtagctagagccagcagagcatcagaagcttgcaaaaatctcatgaagatagaaggtgttggcccgacaaatgcggttaacctgtacatagcgctaggttgctgtaagttgggtgttttcaaaaaagcgcgagacgctgctgcgtgtattggtttaacgccaatacaacattcttcaggtggaaaagtgcgcttgggttctataggtaaaaatatccggaattcgtcattgcgcgctaacttggttgcaggtgcgatgtcagcagtaaaccaggcagttaaacgtgattcacgaaccaagaaagatgaatggattaaagggttagtagagcggcgaggtaaacggtgcgctgctgtggcgctggccaacaaaacagttagaacggcattttcgttgctacgcaacggaactgaatataaagcagagttattagctgcttagttttaagttaacaactaaatgcgcgatacgagaaaaaaacagcttggtaagccagtgctgcgctcagggcataaaagcccgccagcgagatgtggcatcaagttcgcgtaaatatcatagagccgggatagcttcccattatgagctcgtacataagcacgcattacatcttgaatggtaaaaatagttgttgactatggggagtccacata

SEQ ID NO: 5866 - DNA, 1170 bp, unidentified
  source 1..1170: mol_type = unassigned DNA; note = element_90701bf
  misc_feature 1..2: note = core
  misc_feature 3..205: note = LE
  misc_feature 206..1141: note = CDS
  misc_feature 1142..1170: note = RE
  misc_feature 38..215: note = bridgeRNA
cttgtatgtttaaagtcacttcagttacccgtcaacagacgggtaaactgtcactgagtttgacctgatgccacagcccgttagccctctgggttttcaagcccgcgggtgagcgcatggcgtggcatcagttttcctgttaacccgaacagctgcctgggcggcctgtgccagcccgtatattacaaggccgggagacatgaacatgactgaacataccactgtcggcatcgatattgccaaagacacttttgacgtcttcatcagtcctgacggactgtttctccatctggagaacaccccacacgggcaccagcaactcctcgacactctcgcatcccgcaccgttgcccgcatcgtgatggaagccaccgggcgttaccacaaccttctggctgccacgcttgagcttgccgggcttcccgtcgccgtggtgaaccccgctcaggtcaaacatttcgcccgggcgctgggaacactcttcaagaccgacccgaatgatgcccgtattatctgcgagtttggccgcaggatgacgccggatgtacgccccgcaccggacgaacagacgcagcgtctggctatgatggtatcccgtcgtcgtcagctggtggacaacagaaccatggagcagaaccgctacggctcctgcactgacgaactcatccggataggtatcaaacggcatagtgactggctgaacggagagataaaggacacggatgacgacatcgaccggcagataaaagtgatgccactgtggcaggaaaaagtgaagcttctggaagatgttaaaggtatcgggcggacgacactggcggttctgctgtcgatgctgcccgagctggggcagcttaacagacgcaaaatcagtgccctggtcggagtgtgcccgtatgcgcatgacagcgggaaaatgaaaggaaaacgatgtatctggggaggacggagcgcagtgcgggcagcgctgtacatggctgcgatgtcagcagtgcgttataacccgatcatacaggcattttttgagagactcagagccaggggaaaggcgtttaaggtggcgatgacggcctgtgtcagaaagctggtgacaatcctgaatgcgatggtgcgggacaataaaaaatgggtggcagattagcagtcagccgttgactttaaacacagctg

SEQ ID NO: 5867 - DNA, 1255 bp, unidentified
  source 1..1255: mol_type = unassigned DNA; note = element_907b6d4
  misc_feature 1..2: note = core
  misc_feature 3..244: note = LE
  misc_feature 245..1240: note = CDS
  misc_feature 1241..1255: note = RE
  misc_feature 14..185: note = bridgeRNA
cttgtatgttcgccccagagattcaggtagggttttactcggttaccggggaggccgtttgctcctggaagcagcgtagtctgacttcgtctgtagagcggctccccgcctcattgcttactccgaagggtatccagaagcccgttaccgggacttcgcatacacaaggtcggcagtagcaaccagtacgaggtcggggaaccggtgatcattgtctctaatcaagtgcatggagtgaagtggcgtgtctgtttacgtgggtttggatatcagtgcttacaccgttgatgcggtcacccggcaaggcgataaagcctctaaagccgaaccgttcaagcagagcgtggaaggccatcaagccctgtgttcgcagcttaagcggcttcagccggagctgatcgtgatggaagccaccggcatctattacttcgacttggcggtgacgctggccgaagccggtctgccggtggcggtgatcaatcccaagagtttccgccacttcgccgaactgaagctgcaaaccagtaaaaccgacggcattgatgccggcctgttggccgaatacggtcagcggatggcaccggctctgtggacgccgccggaccagcaccaccaggcgttgcgcagcctggggcggcagattaaccggctgataggcagccgggcccaagccaagaaccggctgcatgcgttgaaggcgacccggtccacccccgcgctgctgatcgaggatgagcaggagggaatcgccaccctggatcgccgtatcaaccggctccgggaagcggcgcttgaactgctggccgaggcaccggtactgcaacgccagtatcagcacctgcaagcggcgaagggcatcggggaggcctcggcgctgtcgatcctggcggaattgtgtgtcctgccaagggggctcaagtccggccagatcagccgtcatgcgggcttggatgtccgacagtatcaatcgggcaccagcgtgaaccggccgacgaggatcagcaaggcgggcaatgtgtatctgagatcggcgctgtatatgccggccttgtcggcggtgcgttttgatccgaacgccaaggctttctacgagaccctggtggctcgtggcaagaagaaaatccaagccctggtggcggtgatgcgcaaatacctcaccggcctgtgggcctgtttgaagaccgatacgtcgttcgattcttcgcggttatttcagcctcaggcgtcgcaacagggttgacctccaacagggtat

SEQ ID NO: 5868 - DNA, 1695 bp, unidentified
  source 1..1695: mol_type = unassigned DNA; note = element_907c6c8
  misc_feature 1..4: note = core
  misc_feature 5..268: note = LE
  misc_feature 269..1513: note = CDS
  misc_feature 1514..1695: note = RE
  misc_feature 12..277: note = bridgeRNA
ttgctattattagtttagccccttacagctcggaaatgggtctgtaaagaggctcttacctaagctacaatgagagtgtaatcggtctttcgaggcattgcatgagctactacgctcgactggcaaactgtcaaccgaccccctcattgtagcgttcgatttaagcaggttgaaataacgggcatctccgtacattcgtataactaagcaagctgaatcggtaatgagccagggcggaaaccgattaacaaagataggaggaatgcacgtgaattacagtcccattacagcagtcggagttgacgtttccaaatccaagagtacggtagcaattcgcaggcccggcggagaagttgtaagactcccctttgatgttcagcacaacacggaggacattcagcaactcatatcgatgctccacaaagttgacggcgagattaaaattgtcatggagcataccggaatgtattggcggccccttgcactgactttggtgaatgctggtttctttgtcagtgttgttaatgcaatgcttatccacgattttagggacaattccattcgtaaagttaagacggacaaggctgactcgatggaaattgcaaactatgcgcttacctattgggcagaactgcgtccttacacatcggaagatgagaccaggaatatgctcaaaatccaaagccgtcattacgaaagaaccatgaatacgtccattgctttgagaaatggattgattgcgctgcttgaccaaagcttccccggtgtgaatcatctctttgggtctgaaatgagaaccagatccggtcatttgaaatggatcgatttttcacgccgattttggcacaaggattgcgtggcagccgtgtctctgaattcttttgcagactccctccaaaagtggtgtaaaagaaccggataccattacagctatgcagatgccgaaagaattcaccggattgccaaaagctcaattgccacatttcctaaaaatgatagtacaaaactgctcattacgcaagcggtagatagcttaaatgcagtttatgacgcactgaatattctccgttcggagttagtgcgactggcatcgttgcttccggaatatgatgttgtcacagcgatgcagggggcaggccccatcactgggctgcagcttatggcagagattggagatgttcgcagatttactcacaagggtgccttggttgcgtttgctggcatggatgcccctccgtttcaatccggcaccttcgattctaaaagtcggcaaatatctaagcgtggctcgccacacttgcgcaaagttctgttcaccatctgtagcatcattttgcagcattccaatccggagaaccctgtatttcaattcatggataagaagcgtagcgaaggcaagcatttctatgtttacatggttgccggaggtgcgaagtttcttcggatttattacgcccgagtcaaagaagtgctggacgctcaagatacgctgaatgcccaaatacaaagctgatggcagcattcatgccatgcttggcatgaatgggtgacatcagctctcgcagcaccgcagtgctgcgcaccccaagtctgcaaaattataagtttttgcaggctttgttgttatgctcattttgggtggtaaaaaatgcgccccattttttccaaattaggggttgaaatttattagcaggt

SEQ ID NO: 5869 - DNA, 1569 bp, unidentified
  source 1..1569: mol_type = unassigned DNA; note = element_907ce10
  misc_feature 1..2: note = core
  misc_feature 3..222: note = LE
  misc_feature 223..1437: note = CDS
  misc_feature 1438..1569: note = RE
  misc_feature 3..246: note = bridgeRNA
cttgtatgatgtttatagaagcaaaaacacctactttcctttcttttaatatcgtggttcaatacaactcagatactgtggacttttgatttttacctgtagccttgactacttaccttggagtgtattgccgctacctttatctgaattgtttataactggatgtgccggagcctctgctccaatgagtacttatttcaatcaagtctacgatgataatcgatggtggatatcacggtatcagactttatgaaagggaggtacaacctcatgatctacgtaggcattgacattgccaaacttaaccattttgcctctgccatatcctcagatggcaaaatactcattgagccgttcaaattcacaaatgactatgatggcttctatctgctgctctccaaactggatcctcttgatccggacagcatcatcataggtcttgagtcaacggcacactacggtgacaaccttgtccgtttcctaattacaaggaactacaaagtgtgtgttctgaatcccatcaagacttcgactatgcgtaagaacaacgtgcgcaagacgaagactgataaagtcgacacttttgttattgccaaaactcttatgatgcaggactctcttagattttcctccttagaggatctcgactacattgagctcaaggaactcggcaggttccgccagaagacccttaaacagcgtacacgcttaaaaatacagctgacttcctatgtcgaccaggtcttcccggagctccagtatttcttcaaatccggcctgcaccagaaagctgtctatgccctcttaaaggaggcccctatgccaaaagacattgcttccatgcatatgactcatctctccaatctgctggtgaaaaactcgcgaggtcatttcacaaaagagatggcgagggaattaagagttctcgcacagaagtctgtcggcttaaacgacagctctttatctatccagataactcagactatcacacagattgagttattggattcacagttatttgagacagagcttgaaatggcaaaccttgtcacctgcctgcactctgtcattatgaccatccccggtattggttttgtgaatggcgggatgatcctgggcgaagttggcgatatccaccgctttcccgcccccaacaagctgcttgcattcgctggtctggatccgacggtatatcagtcagggaacttccaggccaagagaaccagaatgtctaaaagaggctctaaggttctccgctatgcgcttatgaatgcagctcataatgctgtaaagaacaatgccactttcaaggcttactacaatgccaagagagcagaaggccggtcacactacaatgccctcggccactgtgccggcaaactcgtcagggtcatctggaagatgctcactgacaatgtagaattcaacctcgaataggcgatctgtataccaatatcgatagtacttgaaaaatgcacccttggggagctttgttaaagttacccttttttaccaccgatacggaaaatacattttttgctaatttagacttgacttttcatagctggt

SEQ ID NO: 5870 - DNA, 2109 bp, unidentified
  source 1..2109: mol_type = unassigned DNA; note = element_908cdf9
  misc_feature 1..2: note = core
  misc_feature 3..272: note = LE
  misc_feature 273..1490: note = CDS
  misc_feature 1491..2109: note = RE
  misc_feature 25..247: note = bridgeRNA
ctcgtataatagatttacgttttagatgtggtgggaaccgcatgaaaaccacttgttgtcccacaagccatgtgggataataaggccagcagacagagggcgcaggtcgcctccttgaagcatggcttccacggaaagaattgcgcctctgtctttgcgggttgacacgaatgagctggatagcggatatgcgctgtatatcaaacgaggttgtgttccgcaaagaagcgagagggaactctgtctggaaattgaagatgggaggtcacaccatgtactattgcgggatcgacatcgccaaatacaagcacgaagccacagtcatagacaaaaccgggaaagcgctgctggacagcatatcgttctccaaccgtgcggaaggctgcgaaaaattgttgatactgtttgagcggctgtcaattgccaaagatgaactgctcatcggtatggaagccacggggcattactggttgagcgtctatggataccttctggagaatggtttcgaagtgaaagtgatcaacccgatccagtccgaagcgttccggaagatgtacatccgccagacaaagaacgacagcaaagacagcttcatcattgcccagatcatgcgttttgggcagttttccgccaccagcctttcagacgaagtgatcatagccatgcgtcagctgagccgctaccgtctggccctggtggacaactgcggtgactgcaagcggcgagtcatagccctgttggatcaagtgtttcctgagtatgacagcctgttttcagatactttcggcgtcacgtccaaagaggtgcttgccaaatatccaacgccggaggatatgctctctgtttccacaggaaaactcacaaatctcctgggaaaggccagtcatggccggtttggcaaacagaaagcagaacagctcaagtcgatggctgctggttctttcggcgtcagttttgcaaaagacgcttttgctttccagatccggcagctcattgaacagctgaattttttagaaactcagattggagagctggaagagcagattgctgtgctgctgaagcagaccggcagctatatcaccaccatcccaggcattggcgatactctgggcgccatcatcctcagtgaaattggagatatccgacgcttcgacgctcccggcaaactggtggctttcgctggattggatgtccgcgtctctcaatccggcgagttcacaggtacccggcaaaaaatctccaaacgcggctcgccttatctgcgccgggctatctggctggccgcctccagggcggctttttgtgaccctgccctctcggagtattaccaggggctgagagccaggggcaaacaccacctcactgccatcggcgctgtctgccgaaaactctgcaacatcatttttgccatcctttcccaaaaccgcccttatcagatgcttcctccaaacgacaaaaaaacttctgtttcgtcattttcgccaacatgaaatgaatttcgtcgtttctgttttatcgctggtatattcttcctctgaaggaggatgtaccatgtcttttgaattcctgttttcttcccatgtctttcacgcccgtacctctcttggtttaaaacagccctttgttgcagatgcccttggaatttctcttcgtgaataccaaaatattgagtacggccgtgtcgcacctcagctaaaaactttcttaaagctggtctatcttttcaatctggatattgatgcttacagggaggtgctcggcgttgaaaaaattgctgttccttcccgttgagcaggagctgtttgctccttacatagggcactatcgttcttacggcatcgctgctgtttgtttttttcgttcacactgcgagattcccgcttttgtttctgatgtttccaccgacttctcttttgtttcccatttagctgaatttttcactctcaatcatttggaccctttgcatttgctcaatgtcattgaggactccctctaagttttctcgacactctcctggctcgatctctgcgggccttttcgtggcgcccttctctggccttttcctctttctccttctgctctttttcctcttgactttttatagctggt

SEQ ID NO: 5871 - DNA, 1157 bp, unidentified
  source 1..1157: mol_type = unassigned DNA; note = element_90c1832
  misc_feature 1..2: note = core
  misc_feature 3..195: note = LE
  misc_feature 196..1143: note = CDS
  misc_feature 1144..1157: note = RE
  misc_feature 15..208: note = bridgeRNA
cttgtctgttgaaggcctgctaggttgatgcgtcttccgggacacccgcctggtgttagccgcaccaggcgggtttcggcggaggggccgataaccccttggcgtttgggccgtgggtgagcagggccgccgccgaagtttcatgacccggatggttgcagggacgatgaggtccgaaaccacaaggatgggtcgatggaacggggtgagcctagcacgaaaatcggcgggatcgacgtaggcaagcggttgctggacgtggcggtacacggcgcgaatgagccgttccaggcggccaacgacgcggccggctgggatgagttggctgcctggctgaaggcgcgaggcgtgggacgcgtcgggctggaggcgacggccggctatgagcgcggggtgcgggccaggctggaggcgtcgggcttcgaagtggtggtgcaccagccgctggaggtgcggctgttcgcgcggctcaagcggcggcgggccaagaccgaccggctggatgcggccctgatcgcggcggcgacggcgcaggtggatacggtgcgggcggcccaggatccgcgcctgaccgagttggccgagcgcctgacggcctacgaacagatcagcgaccaagccgctcagctcaagacctgcatggagcaagtgacgctgcccgacctggccgccagcctcggcgagcagatcgagagcctgtcggcgctgaagatgcgcctgcaacaggagatcatggcccagatcaaagccttcgacgacctggccgcccgctggaggctgctgcagtccctgccgggcgtgggacccgtcgtggccgccagcctggtcattcgcatgcccgagctgggcgccctcaagcgcggccagcccgccagcctgatcggcgtggtgcctttcgaccgccagtcgggtcagtggcgcggccagagcttcatcggcggtggccgaagccggccccgccgcatgctctacctcgccgccgtctccgcaaagcgcttcgatcccggcttcaaggccttcgccgaccgcctcctggacgcgggcaagcccaccaagctcgccatcgtcgccgtcatgcgaaagctcatcgaggctgcaaacctcgtcctcgcaagacaacagccctggctaccgcgcccctgacatcaacatggttg

SEQ ID NO: 5872 - DNA, 1196 bp, unidentified
  source 1..1196: mol_type = unassigned DNA; note = element_90c26f0
  misc_feature 1..2: note = core
  misc_feature 3..229: note = LE
  misc_feature 230..1174: note = CDS
  misc_feature 1175..1196: note = RE
  misc_feature 24..205: note = bridgeRNA
cttgtatggtttcccggcaggtcttaagaaagagacttgtcggggtggagggaccaggtccgcttctgaccgttgcgtacagactgtgggagacatggccccaccccgcaccttcaaacgccgataaggaatccatcggctgagccaccactcagaccgacgatagcttgcaagccagcgttacggtgcgccccgacaagcacgattaacctagctgagagggcccatcatggcaatgcacgccacccgtcccgtcatcggtatcgacaccgccaaagaagaattggtgatccagcacgacgatgagaaacgccacctcgccgtcgacaataacccagccgccatccgccaatggttggccggtctgcccaagggctgcgatatcgccatcgaggcgaccagcacctaccacatggagattaccgaacgggcccacgccaagggacaccacgtctatgtggtggatggctatcggctcaagaactatcgagaaggcgtcggcggccgggccaagaccgacctgaccgacgcccagctgctggcgcgctatctgcgcaaagagaaagacgaattacggcgctggatgccgccgcccaaggcctaccggaccctgcaaagcctgctgcgccggcgggccgccctggtcaaggcccgcaccgccttgcgccaaagcctgagcgcggagcccttgctgaaaacggccctggcgaccttgctcaagcagatcgaccggatcgaccacctgatccaaaagcggctcagggaggccgcccacgccgcaggcttgcgcgatcaggtgcagcgctgccaggccatcgatggcatcggtgaactcaccgccaccgccttggtgatggccttcttgcgaggcgacttccggaacagcgacgccttcgtcgccttcctgggcctggatgtgcgcgtacgtgactcgggcaagctgaagggcaaacgtcgattaaccaagcaaggcgacacggaagtgcgccgcctgttgcactgttcggctatgagcggtgcccgccacccgacctggaaagccttttatcaacgctatcgggatcggggcctgaaaaccacacaggccctggtcatcctggctcgcaagctcgcccgcgtcgccttcgccttgatgaaataccaggagaactattgcgcccccaggctctcatgagccttgttaggcaccatagaat

SEQ ID NO: 5873 - DNA, 1238 bp, unidentified
  source 1..1238: mol_type = unassigned DNA; note = element_90c9690
  misc_feature 1..2: note = core
  misc_feature 3..260: note = LE
  misc_feature 261..1220: note = CDS
  misc_feature 1221..1238: note = RE
  misc_feature 6..213: note = bridgeRNA
cttatatcttgattctgagtttttaaaggctcagaatccccgattgatcatcgggagggcggcggggaagacgtgcccatcctaaggcttaaaagcctgtctcgtagattgtactccccgttgcccgcacttgccttgaagttcgaacggtatcctaaggacaaagttagctttgatcctgtattcataaggccgaaccccgcaagtgtcctttaagatcaaccgcttccttactcaacccattgcttttaattaacatcatgccacaaatcattataggtatcgatattgccaagctaaagttcgatgtcgccaggctttgcgaaggcaagtacaaacacgccaaattcgccaacaatgccgagggtttcgcggactttatcctctggctaaaccgttttggcgacaccgatgtccgcctttgcatggaggcaaccggcacttatagcctagcgctggccgaatccttgacaggccagggttattttgtcagcgtcattaatcctgcacaaatccatgcctttggcagaagcgagcttagccgcaccaaaaccgacaaagccgacgccaagctcgtcgcccgttatggcctacaagcccaattggacaggtggacgccgctgcctgccaatatccggtgcctgcaagccatgacccgccgcctggaacacttattggaaatgcacaggatggaacagaaccgactcgaaactgccgacaccgctatcatcccttccattaacgccgtcttggccaccttaaataccgagttgaaagccactcgccaagccatccgcgaccatattgacaacgaccctggcctcaagcagcgcagcgatttgctggaatccattccaggcattggccacgccactatcccttatttgctggtcgccatgagcccgcatcacggttatgccaacgccaaacaaatcgtcgcccatgccggacttgcccaggccatccgccagtccggacaatggacaggcaaaacccgacttgccaaaaacggcgaccccagattgcgcaaggcgctttatatgcccgctttagttgattggaaatataaccccgctattcgtgcttcttgccaacagctaaagactaacggcaaaaatggcaaactcatcgtttgtgccgccatgcgaaagcttattcatctggctttcgctatcttaaaatctggcaaaccgttcgaccctgacttttcgcttgcttaatggactttaagacggtat

SEQ ID NO: 5874 - DNA, 1364 bp, unidentified
  source 1..1364: mol_type = unassigned DNA; note = element_90cbcfd
  misc_feature 1..3: note = core
  misc_feature 4..246: note = LE
  misc_feature 247..1116: note = CDS
  misc_feature 1117..1364: note = RE
  misc_feature 3..220: note = bridgeRNA
cttatattatatttaacgcagttagctactgccaaagcccaagtggtatacttggaataagccactgtggattagttcatttcctccaatcgcttgacgatttccgaaagggtctaaccacagctttttgtttcaattggtaatgagtttgataacgcatagacgttttatctcgtctaaggtaacaaggcaaaaagttcgtggataaccaagtagacttgaaatactatatctggaggtactcccatgctttatgtgggcattgatgtcgctaaaaataaacacgatgttacagccttgaatgttcaaggaaaaactgttcttaaaccactcactttttcaaataataaagctggttttgaactcttagatctgtcttttcgacagctcaaccaagactgtctcatcgctcttaaacttctttctgaccccaatcgtgaacaatttcaacacgataatcggcaagtagaactaaaaatactggctagacatattcatcgtctcaagaaaaaacagtctgattggaaagtacaatacactcgttgtcttgatatcatctttcctgagttggataaaatcgttggaaagcattcagaatatacctaccaactcttgacacgctaccctaatcctcagaaaaggcttgaggcaggatttgataagctgatagaaattaagcgattgaccgcttctaaaattcaggatatcctctcagtcgcacctcgttctatcggaacaacatctcctgctcgtgaattcgaaatcatcgaaatcatcaaacattacaagaggctcattgacaaggcggaaacatgtgtcaatgacttgatggctgagttcaactcggtcatcacgacggttactgggattgggggtcgtttaggggcggtcattttagccgagattcgaaatattcatgcctttgataatcctgctcaattacaagctttcgctggactggattcttctatttatcagtcaggtcagattgatttagctggaagaatgatcaaacggggttcccctcatctgcggtgggcactcatacaagctgccaaagcatgcgctcgcttttcacctgcttttaaggcctatcttaagactaagttagaataaggaaaacattacaatgtagccatcatccaccttgcaaaaaaacttatccgaaccctgttttatatcctaaaaaagagctgccatttgacgaacaaaaagtgatgtaatttctgaaattaacacaggattacctttgaaaaaatggactttttcaagggctttttgccgtgctctaaaatcatcgccaaatcatcaaattgaaataagaaatagtttagataaaactattgacttttcttatagtttgt

SEQ ID NO: 5875 - DNA, 1352 bp, unidentified
  source 1..1352: mol_type = unassigned DNA; note = element_90cf46a
  misc_feature 1: note = core
  misc_feature 2..60: note = LE
  misc_feature 61..1113: note = CDS
  misc_feature 1114..1352: note = RE
  misc_feature 1125..1346: note = bridgeRNA
taatgggatgacccgccctgtccttccatgcacattcggcggactgagaaggaggtaattatgagcatacgcaaccaaccaagagatgcagccgtcttcggcatcgacattggcaaaacagtctttcacgttgtcggcctcgatgcggcccatgcaccgatccagaaggcgacattcaggcgggagacgttgctgcagtttttcgaacgcgcgtcgccggttctggtcgggatggaagcatgccccggttcgcagtggctggcgcgcaagctgctagggatggggcacacagttaggatcgtgccggcacaattcgtgaagcccttcgtaaagtcgaacaagaacgacatcatcgacgcggaagccattgcggaagccgtcactaggccgacgatgcgcttcgtagagataaggacaccggagcagatcgacctgcaagcactccaccgggtgcgagaccggatgatcgcccatcgaacgaggctgatcagccagatgcgcgccttctgtctcgagtatggtatcgcgatccatcagggcgcaggcaagttcaaggccgagataccgcgcgtgcttgcggatgagaccaacgagctcaccccttcgatgcgccggatcctgacggaggttcacggcgagatgatggaactcgaacagcgcatcacagccatgaaccacgagatcgaagccatcgccgcgcgcagcgataccgcacggcgcctgatgactgtgccgggcatcggaccgctggcctcgaccgctctgctggcggcggcagggtcgggacgtcagttccgcagggcacgtgatctcgctgcctggctcggtctagtgccgcgcgaacactcgaccggcgggaagactaagctgcttggcatcagcaagcgcggcaataaatacctgcgaaggatgatcgtccatggtgctcgatcctgtgttacacatctcgatagaagcagggaccgcttgggcccatggctcgacgggcttgagagcaggatgcacaagaacaaggtcacggtcgccctggctgccaagatcgctcgcgttgtctgggtgattctgaccaagccgggcgccacctacgagcggcgcgttccagcgttcggctgaacggcgccgccaccaactgcgaggttcgtaagagtgatgacgagacagtggaccagcgcatcgtaagccccgtcaaaaaagcgggcagaaagcccgaagcatttatctgggaacgaggcgcgcggatctcatcaaggcctggccgcaacagcggcccactcgcgagaggccggatacatttgtgcagactggcaccgtcaacaccaatcgacccttgcatggacagggcgggtcataca

SEQ ID NO: 5876 - DNA, 1678 bp, unidentified
  source 1..1678: mol_type = unassigned DNA; note = element_90d1854
  misc_feature 1..2: note = core
  misc_feature 3..330: note = LE
  misc_feature 331..1554: note = CDS
  misc_feature 1555..1678: note = RE
  misc_feature 12..350: note = bridgeRNA
ctcctacaatatagttacggtgaaaggcacggcagccagccgtgtcttttgtcgtctcaaagctgaagctgtagaatgagggagtaaatggcctgacgctattcaccttgggccaacacgcccgaaaagaagtccgtcagccgtctctctcattcgcagcattcgatttgcgcaggtagaaccatctcgtcggggtaaagtccccgccgaaccaggctttgctggtcatcggcgggatcctgattttggtgcgttcgtgttactcaggagattgaacaagcggcgaggaaacagaggcgggagccatatcctatcacacaggagggaactatgaacgcagtaggaatcgacgtatccaaagggaaaagcatgatgatggcgctgcaaccgatgaatcaagttgtgttgaagccaagggaatactcccataccaaagctggtttgggccagatggcccatgacattctgaggctgggagaagagacgcgggtgatcatggaggccacaggccgttatcatgagccggtagcggcagccctgcatgagtatggcatccgtgtcacggtgatgaatccgctgttcatcaaacagagcggcagcggttccatccgcaaggtcaagacagacaaagcggacgccaaaaagattgccaaatacgggcttgacaattggatggacctgcgggaatatgcgcctgtggaagcgatcagggaacagctgaagctggtctcacggcagttcaatttgtacatgaagaacgtggtggccttgcaaaataacctgatttctcttaccgacaaggtttttccaggggtaaacgaggtgttttccagcaaagaccgcgctgacggaagccaaaagtgggtggatttcatcacgaccttctggcactgtgagtgtatcgctctggtcagtgaggctgttttcacagaacgttaccgcaagtggtgcaagcggaaggggtatcatttcagcggcactaaagcggcggagctgtatattggcagcatcgggcatatcacaactctgcctaagaacagcaacaccaagctgatcatcaccactgccgccaaggaactggcctcggccaagagcacgctggccgtcctgcgtgctgagatggaccgtctggcccggcagcttccggaatacgatactgtccgagccatgtatggcgttggcgagaaaactgccccgcagctgatggcggagattggcgacgtgcgccgtttccctcgccgcagctccattgtgagctttgcgggcgttgatccggcggtagacgagtccggcaagcacatttccaagagcaatcccaccaccaagcgcggctcgcctcacctgcgcaagacgctgtaccagatcgtctgcacttacctgaaaaagtctcccactgacgagccggtgtaccagtttctggacaagaagcgggccgaaggcaagccatatttcgtctacatgaccgcagcccagaacaagttcctgcgtatctactatgcccgcgtgaaggagtgtctcattatggccagtgtccaggagtcctccgagagttaatcggcgctagaatccataaattgcgtggtctgcaaaaaattccgcttttgcaggcttggtttgctatgcccattttaccctatcaaaattttctcattttagggcttgacatttgtttgcagga

SEQ ID NO: 5877 - DNA, 1445 bp, unidentified
  source 1..1445: mol_type = unassigned DNA; note = element_90dd4cf
  misc_feature 1: note = core
  misc_feature 2..257: note = LE
  misc_feature 258..1295: note = CDS
  misc_feature 1296..1445: note = RE
  misc_feature 81..239: note = bridgeRNA
ctttaagtttgcagagtgaaaaggaatcgacccgagaataggtcagttgaacgggttgttcttacctttgttgtagtaaggtaaggacagcaaccagaaggtaatctatcgtccctacgaggcttcgagcctaagacttgttagagaccctctggagttcagctactcgagacttattagaaaggaaggctcagagcctaattaaagtaatagcctaatgtagcctagctgccttatcaagattcaagtacaaagttatgaaatactactttattggcatcgacgtttccaaagaaaaattggacgccaccctgattcactacgaatccgaatcagacagcgagcaacagctcgcctacaccactgtagaaaacaaccctaagggattcaagagccttgtctcttggagcaagaagaacgcaggtcgaggagtcaagaccgacgccatgctcttctgctgtgagactacaggaggatacgatcgcgcactctgtgactggctctatggcaacgggctaaacatctggcgcgagagcgccctgcagatcaagcgtagcatgggtctgcgcaaaggcaaggacgataaagctgactcggagatgatcgcttactacgccttacgcttccgctccaaagccactctctataaacctctggacgagaatatgcgcaacctacgcgaccttttcctctaccggcagtcactagttgccgataggcaggctaagctagttagtgccaaggaaaaacggcacatctctagcaagtctaaagccgacagcttcatctaccgagatgcccaaaaggctatcgacctcttgaccaaaagcatcaaagagtgcgagcgccgaatgcttgagatcatcaaggcagacgaggagatgtaccgcaactacctgcacctcatttcctgcaaaggagtgggtctcgtcacctccgtcatgctgatcatctacaccgacaacttcaagacttggagtgccaagaagatggctagctactgcggtatagcgcccttctacgagagctctgggagctcagtctttcacaaagccaacacaggaggctacagtaaccgacggctaaaaggaatcttgacccaagcagcccgaagtgccataacgcataacccaacattaagacaatactacctacgcatgaaagcccaaggcaagccctacggggttatcctcaacaatgtcaacaacaagctcgtacacattctcttctctttggttctgcacgactgtgacttcgagctagaccacgagacgaagagagctgctcgagcctagtccaagggaaggaaactcttcgctcggggagcgcctccgcggcaaggggtgggagcccccaccccgccgagcggttccccgccgagcagtcgaccgagctcgcgaaacgagaaaaaacttcgcattttacttgcatatgaacttagaaag

SEQ ID NO: 5878 - DNA, 1437 bp, unidentified
  source 1..1437: mol_type = unassigned DNA; note = element_90e329f
  misc_feature 1..2: note = core
  misc_feature 3..204: note = LE
  misc_feature 205..1422: note = CDS
  misc_feature 1423..1437: note = RE
  misc_feature 15..208: note = bridgeRNA
gtcctaccttcttgacgtggccctgctctggtcgttcgtaggatcggagggcccgggggcttcgggtatggctgtaaaggttgagccgctggatggcttacgggacttggccgcccgaagccccacgacgacccgaccgccaattgggatacgcgacttgatcgctgctgtaggacaacgccggcgaggtcgtctgcgggttccatgtgcgacgagctggcggaggggaacgtgcccgacatctgggccggtgtggacatcggcaagacacatcaccacgccgtggtgatcaacgcggagggcaagcggctgctgtcacgccggatccgcaatgacgagaccgaactgctgacactgatcggcgacgtgttggcgatatccgatgacgtgttgtgggccgtcgaccttaaccatggcggtgctgctctgctgatcggtctgctcaccgctcatggtcagtctgtcgcctacctcaccggcctggcagtgcaccgggcctcggcaacctaccggggcgagggaaagaccgacgcgaaggacgccttcgtcatcgccgaccaggcacgcatccgccgggacctgggactgctcaggcccggcgacgagatcgccatcgatctgcgcacgctcacgaccagacgtctggacctcgtcttcgatcgcactcgccagatcaaccggctccgcgcccaactgctggagatcttccctgggttggagcgggcactggatttgaccaacaagggtccggtgatgttgctgacgggttaccagactccggcagcaatcaggcgagcaggcacgaagcggatcgagacctggctcaagaaccgcaaggttaaaggtgccgcctcactggctcacgcggtgatggaagccgcccaggctcagcacgccgcgctgcccggcgagacggtggccgccgcgatggtggttcgcctcgcgaggggagtgatggccctcgaggaggaggttgcggaactcgacgccctcatcgaagcccggtttcacgaacatccgctggccgacgtgatccgcagcctgcccggcatgggcaccaggctcggcgcggagttcatcgccgcaacgggcggcgacatggacgccttcggcagtgccgaccgcctggctggcttcgccggtctggccccgcagccccgagattcgggccgtgtcagcggcaacctgcgcagaccccgccgctatcaccgcggcttgctccggaccatgtacttgtcggcgatggccagcctcaagtcctgtcctgactccaaggtgtactaccaacgcaagcggcgggaagggaaaggccacaagcaggctttactcgccctggctcgtcggcgcgtcaacgttctgtgggcgatgatccgtgacggatcgtgctatcagcagtcacttccagttgcggctgcgggttgacatcagcattgggaa

SEQ ID NO: 5879 - DNA, 1357 bp, unidentified
  source 1..1357: mol_type = unassigned DNA; note = element_90edc63
  misc_feature 1: note = core
  misc_feature 2..243: note = LE
  misc_feature 244..1212: note = CDS
  misc_feature 1213..1357: note = RE
  misc_feature 43..234: note = bridgeRNA
tcttaagtttgatttctcttaaaacaattaactttaattataaactagaaagaaacagagagaggatcaaggttattatatacattgaggacagaacctggtcaatcccgaagcctcgggataaaccccctctcttttactactaaaattacgttctcccgatacctatcgggactgtgaggtctagacctcgtttttaagatgttgtgtcattgatgattgttctttcataatctaattattatgaataaatataaagaaacttttggagttgacatcagtaaagatgtctttgatgttcatggcagcaaaagtggtcacaaccagtttagtaattcacctatcggatttaaattatttttgaagctcttgcccgagagcagcttagtcgttatggaggctacaggctactatcattacagtctctcacagtttctttgcaagcataaaatagtagtttctgtagtcaacccactgtctgtaaaatgttttatccagatgaaattatcgaggataaaaacagataagagagatgctcaggccatttgtgattacgggatctacaatacggttccgctctacaatcaaattagcgatatgcaatctgaatgtagacaattacttagcctaaaggcgaattacctcaagaggagaaccagtacaaagaacaagctacatggtgagggcgttttgggtataccatcaaaattggttgtacagtcattgctgttagacaaaaaacatattgatagagaactggctaagattgagaaaaggctactgttgctagttaaaacaacatcacagcgcgagctcaccctattgaaaagtagtcctggaataggggacaaaacggcagtttttttaattgttgctacggactcctttaataagttcagcaatgcttcgcagctttgtagttacttaggaactactcctatgataaaacgttctggcagcagtgttagagggcgcagcagaataagcaagatgggaaacagaaacctgagaaacctaatgtttatgtgttctatgtctgcctataaatataataagtcctgtaaggctattcacgataggattgtaagtaagggtaagagcagtaaactcgcattgatagccgtgtgcaacaaattgattcatcaagcatttgcaatcgtcaggtctggcgtggaatataacccacactacatttcaatacgaaaaaattaatttaaaaaattagcaacttgatggtaataatagcttgttggattggaaataaattgatgaaatcggtttattccacttcaataatgccaagcaacacttttgtcaaaaattaaatgaaattaaacttggattttaactcagttct

SEQ ID NO: 5880 - DNA, 1534 bp, unidentified
  source 1..1534: mol_type = unassigned DNA; note = element_90f9538
  misc_feature 1..2: note = core
  misc_feature 3..241: note = LE
  misc_feature 242..1411: note = CDS
  misc_feature 1412..1534: note = RE
  misc_feature 3..221: note = bridgeRNA
ctcgtataataaagtagtagttattaaagtccctctgcaaggacaaatatgctacactgaaaaagatgctgtggattggtatttatcacctaccgcaagacggttttagagaggctccagccacagccctttacagtattgttaatcagttagataccgcccgacggtttatttagaacgaggttacaagagtaaagtgttctgtggattcagcatcacaaataaatgtcggaggtaaaaaatgatttatgtaggaattgatgttgcaaaggacaagcacgactgctttatctgtaatggagatggtgaagtccttgcaaatgtttttacgattgaaaacagcaagtctggatttgagcatttgcttagtattatcaatacctgtacaggtgttgacggcaaaaagaaagtaggactcgaagccacaggacattacagttacaatcttcttggctttctccttgacaacggtttaccgacctatgttatcaatccgttacatacaaatctttacagaaaaagtcttagccttagaaagacgaaaacggataaggtagatgcaagaacaattgcttctatgttaatgtctgatgtgagcctcaagccctacagtcaaacattataccataatgaagacttaaagtcactatcccgttatcgctttgataaagttaaagaatgctccaaactgaaaacatctgtatcaagattaattaatattctttttcctgaattggataaacttgtttgttctgtgcatatgacttcaatctatgctcttttatccgaatttccctctgcaaaagatatttcatcagctcatttaaccagacttacaaatctgctttattcagtatccaaaggtcattacaacagagatactgcaatcaaattccgtgatgctgcaagaaattctatcggctgctatatgcccgctaaagctcttgaacttaaacacactatcaaactcatcagagaactgaataccgaaattaaagaaattgatattgaaatcaaaagaattatggatgatatcaattctcccattctttctgttcccggcattggatacagcttaggtgctatgattgtttctgaaatcggtgatttcaataacttcagcactcctgataaaattcttgcctttgcaggactctctccatcaacttatcaatcgggtaaacttgataatgcctatgctcatatggaaaagcgcggttcaagatatcttcgttatgctcttttcaatgccgccaaacttgtctgtacttgggataatactttttcagcatatcttgctaagaagcgtaatgagggcaaacattacaatgttgctgtttctcacgctgccaagaaattagtccgccttattttcgctttggaaaaatccggtcgaccttacaaagtttaaatttaacttcattaatcttttttcaattcagcgttttatacgctttatttcttatactcttttttactgtcttgctttttacaacatctttttgatttttattattgacttttaatagttagt

SEQ ID NO: 5881 - DNA, 1483 bp, unidentified
  source 1..1483: mol_type = unassigned DNA; note = element_9100bd7
  misc_feature 1..2: note = core
  misc_feature 3..238: note = LE
  misc_feature 239..1462: note = CDS
  misc_feature 1463..1483: note = RE
  misc_feature 7..236: note = bridgeRNA
ctaatgggaatcgatcaccttcgcccggttggtggagcgaggatggtcggctgagccaccagcaggtgagcactcgccgcgcctgggcccttgagccctggggttagaccgtgcccctgctggctggtgaggtctcctcggacagctggtgggatgtcgtgccccgagcactgatccattagggagctgcaggagtcctctggctcagggtcattgcgggatcggcgggaggagccagatgatctttatcggggtggactgggcggaagcccaccatgatgtgcacgtccaggacgagaacggcaagcggctgggcgggggccggctgcccgagggagtagaggggatcgcccggttccacgagctggccgcccggcacgcgccagagcccgctgaggtggtgatcgggatcgagactgaccggggcctgttcgccgcggcactggtcgcagccgggtaccaggtgttcgcggtgaacccgatgtccgcgtcccggtaccgggaccggtactcagtctccggggcgaagtctgacccgggcgatgcgaaggtactcgcggatatggtccgcaccgaccggcacaaccaccggccggccgccggggacagcgacctcgcggaagcggtcaaggtcctggcccgcgcccaccagtcgatgatctggtcccggcgccgccaggcgaacatgctccgctcgcagttgcgggagttctatcccgccgcgctggccgcgttcgacgacctgaccagcggcgacgcagtcgaggtcctccgcgccgccccggccccggccctgggaacggcgctgtcccgggccaagatcgccgcggcgctgcgccgcggcgggcggcagcgccgcatcgatgcgcgggccgggcagatccaggccgcgctgcgcaccccgcagctggcgcccgccccggtcatcgcagccgcgatgggcgccacagtcagcgcatccgtttcggtcatcgccgagatgaccacccagatcagagcgctcgagcggcagctggccgcggattttgaggcgcacccggacgcggaggtggtccgttccctgccaggactagggaccatcctcggcgcccgggtgctcggcgagttcggcgacgatccagaccgctacgccaccgccaagtgtcgcaagaactacgccggaacatcaccgatcaccagagcctccggcaccaggcgcgccgtgctggcccgccacgtccgcaaccagcgcctcgccgacgcgctctacctctgggccttcgccgccctcaccaccagtcccggcgcccgcgcctactacgacacccaccgcgccgccggcgacacccaccacgccgccctccgcgccctgggcaaccgcctcgtcggcatcctgcacggctgcctggcccaccacaccccctacagcgaaaccaccgcctgggcccaccgcaccagcaccaacctcacccaggccgcttgacaccttccagccgtgggatgt

SEQ ID NO: 5882 - DNA, 1215 bp, unidentified
  source 1..1215: mol_type = unassigned DNA; note = element_9105805
  misc_feature 1: note = core
  misc_feature 2..212: note = LE
  misc_feature 213..1184: note = CDS
  misc_feature 1185..1215: note = RE
  misc_feature 34..202: note = bridgeRNA
tcttaagtttacaattcactaaatttaagtataaaacagaaaagacaaaagagaggaataaggttaatatacacgcagagacctagatctcgtcaacattgaaaaccccctctcttttctacacagatttcgtacagttctatgaggcttttagacctcgctttcaagtcgttgaaactcgcgtagattgtcctttcaaaaaacattttcttatgaataaagatattaaatattttggtattgacattagtgcgttagtattcgatgttacagattctgatggtaattattatcagtttagaaacaatggattgggctttgagaagtttacaaaactcttaaataacactagtcattgtgtaatggaagctacgggttattatcattatcagttagcgtaccatttattagaatcaggtataaaagtatctgtagagaatccattatctgttaaacgttttattcagatgggcttatcaaaaattaagaccgacaagagcgattcaaaacttatttgttcttatgcagagcaggtggacttaaagctttggaaaggcaactctaagaatgaaatagaatgtcttcaaatcactagagctctttctgtttatacaaaacagagcactatgcttaaaaacaaattacatggtgagtctgtattgggcaatcctagtaaggtcgtgttgacgtctttaaaacgtagtttaagacagctccagagagagataaaactattagaggacaagttattagttttggtaaaagaggttcatcaagatttgttaacgcgattaaaaaccatacctggtataggtcctaaaacagccattacgctagtggttttaacaggtggatttgatcgttttacaagtgcaggtgagttatgcagttacgcaggtttaacgccagtgatacggcaaagtggaagcagtgtaaaagggaggccacgaataagtaaaataggaaaccagaaacttagaaatttattatttatgtgcagttttaacgcttgtcaatacaataaagcttgtcgtgatttatatgagcgaatcgtcgctaagggaaagagcaaaaaacttgcgctaatagcggtatgcaataagctgttgaaacaagcatttgctatagctaaatcaggtttgatatttgatcaagaatataagagtaagctagtgagaaattaatggaattttacttgttttttaccacagtact

SEQ ID NO: 5883 - DNA, 1404 bp, unidentified
  source 1..1404: mol_type = unassigned DNA; note = element_91083ff
  misc_feature 1: note = core
  misc_feature 2..90: note = LE
  misc_feature 91..1128: note = CDS
  misc_feature 1129..1404: note = RE
  misc_feature 1171..1400: note = bridgeRNA
ataatgggatggacgccccctatctcaaacggcatcgaggtgccaaagtggaggtgcgaaccgaccacttaactgagagggggcgtcacgatgaagactacgacagttgggatcgacttggcaaagtcggtgtttcaagtgcatggcgtggacgagcgtggcaaggcgctgctgtgcaagcagctcaagcgcaaggacgtgatgagcttcttcgcgaatctggaagcctgcctgatcggcatggaggcgtgcggcagtgcgcacttctgggcgcgcaaactctcgggtcttggccatacggtgcgtctgatggctccgcagttcgtgaagccgtatgtaaagacgaacaagagcgaccgcaacgatgccgaagcaatctgtgaggcggtggcacggccgaacatgcgctttgtgccggtaaagacaccggaaatgcaggcggtgctggcactacaccgggcgcgccagggattcgtgaagtcgcgcaccgcgcaaggcaaccagattcgcgggttgctggctgagttcgggattgtgatccccaagggcatcgggcacatcgccaagcgcttgcccgagatcctggaggacggcgagaacggtctgccagcaatgatgcgccagttgatcgcgcagctcggcgaacaactcaaggcgctggaccaacaagtcggggaactggaataccagatcaagctctggcaccacgagaacgagcgcagccgcaagctggaagacattgccggcatcgggccgatcaccgcgagcgcgttcgtggcctcggtgggcgatgcgaagagcttcaagaatgcgcggcaggtcaccgcctggctgggcatggtgccgcgccacgagggcaccgggggcaatgtgcggcttggcaggatcagcaagcgcggtgatgtgtacctgcgcacgatgctcattcacggggcacgctccgtggtcgcgcaggttgagcgcaagcccgatcaggccgatgagtggttgaagaagctgctggctcgacgcaacaagcaaattgccgcggtggcgctcgcggcgaagaatgcgcgcatcgcctgggcgctgctcgcgcacgagcgcagctacgagtccgattacgttgcgacacgcccgggcgcgtgattgcgctcggtcgaactcaacgacacagccatagaacggaggatcttccagcgattgcataggcaatcatgacgtgatggcaagacaggtaagaccgtgacggggtaaacctgaaattgactttgcactgcgggtgcgcggccacgatgaggactccgtcagccgattccatcagggaccgaggcgaaagcctcaaacaagtccggatctatggctgcaatcttcacctactcgctatcatcgactgatcgcttggcaaaccgggggcgtccatct

SEQ ID NO: 5884 - DNA, 1328 bp, unidentified
  source 1..1328: mol_type = unassigned DNA; note = element_910ab7c
  misc_feature 1..2: note = core
  misc_feature 3..252: note = LE
  misc_feature 253..1314: note = CDS
  misc_feature 1315..1328: note = RE
  misc_feature 27..264: note = bridgeRNA
ccgacttatatgagtgtcacgggacggtgaatgggatgcagcccatagcgtgtcgtagcagaccggaggaatgactcgcgaaattcctgtcacccgcggtgcgggttgaccctggtggggtgtgtcacccctccggtctgcgttcgcggcgtgactgaagagaggcgtgaccacaagctgctgtgagaggtacttgaagtcggattgtccgccgcggattcccacccacgcgagcgaagggaacccgtatccatgatcgtcatcggcgtcgatccgcacaagtccacccacaccgccaccgccttggacccggccaccaactccgatgtcgggtcggtgcgcatcgaggcatccctggccgagtaccagcgcctcatcagctgggcgaaggcgtggccggaccggacctgggcgatcgagaacgccgacggtcttgggcatcatctggcactgtggctgctggctcgcggcgaggtcgtcctcgacattccgacgaccgcgaccgcacgggttcgggagctctcccgtggcggtcgccgcaagaacgaccgcatcgatgctgctgccgctgcgagtgtggcagccttgcagggcgatgcccgtgaggtttacgccgagaccaccgccgattctctggcgctcctggatgagcgtcgggtcaacttgtcccacagtagaacccggactgtcaatcagttgcacgcgttactgcgcgacttgatggccggcggtgcaccgacctcgctgagtccggccagcgcgaccgccgcgttgcgcggcttccgcccccgcaccggcccggaccgaactcgggtcgcgctggccaaggagctcatcgccgacgtccggcgtttcgacgaacaactcgcggccaacgccaagacggtgaccgtgctgctcgacgagcacggcaccagactgcgcgaggtcgacggcgttggccccgtcctggccgcacggctgctgggccgcagcggctcccccaagaggttcgcctcggccgcagcgtacgcgaactacaccggcaccgcaccggtccaaatcgccagtgccgattcctctcagcaccggctgtcgcgctacggggaccggcagctgaactctgcgatctacaccgtcgcgatgatccagatccggatgcccgccagcgctggccgcgcctactacgacaagaagatcgccgagggcaagagtcctcgctacgcgacccgcgcgctcaaacgacacctcgccagtcatctctggcgagtcatgctcgccgacgaaagccgcaccgtgcgaataccttcggaaacggccgcgatcccctcttgacagatagagaggca

SEQ ID NO: 5885 - DNA, 1674 bp, unidentified
  source 1..1674: mol_type = unassigned DNA; note = element_9113005
  misc_feature 1..3: note = core
  misc_feature 4..246: note = LE
  misc_feature 247..1461: note = CDS
  misc_feature 1462..1674: note = RE
cttatacagtaaactaagaacagcccactcgacgcagggctggaacaaggatacacttgttctctaaatgtgttgaacgcgccagggaaaggctcgtcgttccacccggcttgaccgattaggaaagctcgtcttccctggcaccattcctgagccgaaccgattatgagagagtcgtcgcttcgagcgccacagtataagggcacgggatctcaggagcattttttgcagagaggaacgtttctgatgtggtataccggtattgattgggctgacgagcaccatgatgcactgaccctggatgaaaaaggacatcaagtgggttcgcttcgggtcgatcacacagcacaaggattgaacaaactgaacgcatttttggagcagattattggaacagcgccgaaagaccagatggcctgcattatcgagaccactcatggcttgttgattgctttcctcttggatgctggatggtttgtctatcccgttaatcctcgcacagttgatcggcgccgatcggcctctggagccaaaacagacctgatcgatgcgtatctgttggccaaaactgggcgtgctgactttgctgatttgcatcgtttgaccccagatagcgaaaaggtggccgagctgaaaatgctgacccgtgatcaaactgccctggtccagatgcaaacacgcctggtcaatcaaatcacggcttgcttgaaagcgtattatcccgtggcgctggagttgtttgggaaggtgcagcagaaatgcacgttggttttcttgcaaacctatcccaccccacaagaggcaagagctgcatcggttgatcagatccgggccttgctcaaacagtgcagacatcctcaagcagcgtcggcggcactcaccatggttgagcagctctctcaacctcaattgcaagccactgctgccacggtgcgggcaaaatcgcgcttgttgctggccctggtcagccaattgttgcccttgattgagcaaatcgccaactatgacaaggagatcgacaccctttttttgacccatgaggatcacgccatctttgcgagcttgccacgtgcgggcgaacgcctggctccaagcctgttggctgagattggagatgatcggaaacgataccttgatgcaagtagtctgcaagcgttgggagggacctcgccggtcctctatcagagtggcatgtactccaaagcgcatcgccggttggggtgcatcaaaccgctgcgcaacaccttgcatcattttgcgtggcagagcactcaaagtgaagcgtgggcgaaggactactatcaacgcaagcgagcggaggggaaaagccataccgtcgctatacgggcactgtctaatgtgtgggtcaggatcatttttgcgatgtgggtccatcgagagtgttatcagacggcaacttttgaacgagctcaactgcaacacgcccgcagagccgcttagtgctgtctccatcgccaggtgatgatcggctcgtacatgccaaaccacccatgctgatgtgcttgcatgtgcgatttggctgactttcatgccatacacattcgtgctagggaatacaaccttgtgatcttttcctagcatctcctcttcctcctttcttccattttttctctcgtttcaaattggcctcaaaaggacttgacaatagagagt

SEQ ID NO: 5886 - DNA, 1429 bp, unidentified
  source 1..1429: mol_type = unassigned DNA; note = element_911636f
  misc_feature 1: note = core
  misc_feature 2..127: note = LE
  misc_feature 128..1147: note = CDS
  misc_feature 1148..1429: note = RE
  misc_feature 1188..1428: note = bridgeRNA
atgatatgaacgcctcccacccgtgagtggcgtagcttgcaggaaggctgagccttacgggccaatggcatcaaagtgcccagatggaagaccataggggttttcctggcaaaccggaggctccgaaatgaagcacacgacagtgggtgtggacattgcaaagaacgtgatgcagctccattacatcgacgcagagacgggcgagatcgtaaataagccggtaaagcgagccgcgtttctggagcatttcgcaaatttgactccccgcctcatcggcatggaagcctgcggtggttcccaacactgggcccgtaagctgatcgcgatgggccatcaggtgaagttgatgccgggcaagttcgtcaaggcgttcgcaatgggtaacaagaacgatgcgactgatgcgcgagccatctggcttgccgtacagcatgcaggcaaggccgtcgcggtgaagactgaaacgcagcaggccgtgctggggctgcaccggatgcgagagcaactggtgaagttccgcacgatgcaggtcaatagtctgcgcggcttgttaaccgaatacggtgaagtgatggccaagggacgggctgcgctcgacaaggcaattccaagtgtcctggagcggctggttgatcgtctgccctcgatcctgatcgacacactgcgagagcagtggaatggattgtcggaactggacagacagattgccgaaattgagcggcgtctgcaggcgtggcagagagaggacaaggcatgcaaggcgattgttgccataccgggcgttggtctgctgacggcgacagcggcagtagccactatgggcgatgcgaagacgttccggtccgggcgcgagttcgcagcctggatcggactggtgccacggcagaccggtacgggtggcaaggtccagttgctggggatcagcaaacgaggagatacctatctgcgcaagctgttgatccacggggcccgaagcgtgctgtgtctcgcaaaggaacccggattatgggccgaaggcatcaagaagcggcgaccgttgaatgtagcagtcgtggcacaagcgaacaggatggctcgcacgatctgggcgatcttggcgcacgacaggcagtacgacaaggactatgtgagcgtgaaaccggtctgaccggcgcacgtcgcgtagaaggtagatcaatttttacaggatgacacgtcgaaaggttgcgctggcaatcgtatgtaatgacaaaacaggtcggaccgggactcgccaaacctgaatcgctgagtgagcttctagctcgtcggaaaaatgaggcgcgggtcagcggatttcatggtgggccgcagcatgtcaggctgcaacaagcccggatataaagctgcaacccatcctgtcgtagtcagcacacgcgaaaaaccttcgcaaacgggaggcgttcatata

SEQ ID NO: 5887 - DNA, 1581 bp, unidentified
  source 1..1581: mol_type = unassigned DNA; note = element_911b69d
  misc_feature 1: note = core
  misc_feature 2..245: note = LE
  misc_feature 246..1445: note = CDS
  misc_feature 1446..1581: note = RE
  misc_feature 6..219: note = bridgeRNA
tcgtattataaggttaaccagtttatctggttgacctattttttataggttattctttaagtagccgggtaggacgtaagcccccgtgggactctgatcccgtccagaatactgtccaccccctacttgtagaaacatgtttgaggctggttgggacctggatcccgaataacaagcgaagctatgacactacaagataggttaggggctgccggcaaatctaataaaaggagatgtgataaaacatggatccagtcattggcctggatgttgcgaagggaaaaagccaagtacaagcctttttacaaaagaaagatccttacaagaagagctttgttttcgagcataacgttctagggttacatgattttcatcggttatggttagagatggaagagatcacagggcgacctccggtcgtcgtttttgaatctaccggtcattaccatgaacccgttttacagttcttagaagagcatcaaatcgtctattatttggtgaatccggttctatctcatgaagctaaaaaaatgagcttaaggaaagtgaagaccgacgccattgatgcctttcgtttaggggaattgtattatctatatgatgatcttcaacctttcaaaaaaaaagccgtcaaaatcatgaacttgaggaacctaacccgtcaacatgacgctctaacaggaacttatgtacagattaaacttcaattccaaacggtattggatcaagtatttcctgaatataagacggtctttggatctctgtattcacccacctccttacaaacgttactccattatcaaacacctcaaggtgttcgggaggatacgaaggaaaagatagctgaagtcatcctccaacaaggagttaaacgctcttatggatgggcgctagataaagctcatcaactcaaagaggcagcaggacgagatcctttcaagcggaatctatattcgagtcatgtggtgagtttaacgatgtttattcaacttcttctccaataccaaaggcacctatcgaagctactgaaagagatagatgccctggctgaagaatttgatgaatataaaattatccgatcaattcccggtattggtggaaagattgcggcaacaatcctatccgagattggggatattgatcagtttaaccaccctaagaagctcgttgcatacgcggggattgacccaagtgtccatgaatcaggacagtttaaagcaaccattaaccgaatcacaaaacgcggatcgtctagccttcgcaaaagtctatataacgcagtccaatgcgggataaccaagaatcgtaatccaaaattaagagcttattacgataagaaacgcgaagaaggcaagccccataaagtggcgattattgcttgtgcaaacaagctcattcattggatctatgccatcttaaaaagtaaaaaggcttttgtgatttagaatcaaccaataaaaaacttttatagaaaatacttcaaatcgttattattgaagtttatttagcatgttcaattttattgtaccatgtctgattcatcttttttacccttacctgttgaccttctattagctggta

SEQ ID NO: 5888 - DNA, 1374 bp, unidentified
  source 1..1374: mol_type = unassigned DNA; note = element_9121dcb
  misc_feature 1..2: note = core
  misc_feature 3..88: note = LE
  misc_feature 89..1123: note = CDS
  misc_feature 1124..1374: note = RE
  misc_feature 1119..1356: note = bridgeRNA
tgattaggtggacggctcccgctccacggcatcgaagcgccaaaatggtggtcgttggaaaacgccacgacgagaggagccgtccgccatgcagattaccacgatcggtcttgatctcgccaagcactggtttcaagtccacggcgtcgacgccgccgggaaacccgtcgtcaagcggcggctgcgccgctccgaggtcgtcgagtttttcaaaagcttggggccgtgcctcgtcggcatggaggcttgcgcgacggcgcatcattgggcgcgcgaactgatcgccctggggcacgaggtcaagctcatgccgccggcctatgtgaaggcttacgtcaagcgcaacaagaacgacgcggcggacgccgaagcgatctgcgaggcggtgacgcggccgtcgatgagcttcgtgccgatcaaggatgtcgatcagcaatccgtgctgatgttgcatcgggcgcgggcgttgctgatacgccagcgcaccatgctggtcaacgcgctacgcgcccacatggccgagttcgggatcatcgcgccgcaaggattgcgcaacgtcgaacaattgatcgacgccatatcggacgcgcgcacggccttgccggagctggcgcggtcgatcctgcaactcattgtcgcccagttgaacgacaccgccgctcgcgttcggctactcgaagcgcgcctggccaaatggcatcggacgaacgccgtcagccgattgctggcgagcgttccgggcgttgggatcatgggcgcgagcgcgatcgccgcgacagtgaccgatccgagcctgtttcgctcggggcgcgaattcgcggcctggctcggcatgacgccgagacaaaattccagcggcggcaaggagcggctcggcggcatgagcaagcggggcgacaaatacttccggtcgttgttaatcgccggcgcggtcgccattcttcgccatgcccgcgatcgagcaacgaaagacgcggaatgggtgcgcgggatgctggcgcgaaagccggcgaaagtcgtcgccgtcgcgctcgccaacagaaccgcccgcattgtctgggcggtgatgcggcgaggcagtgcgtatcgcgccaaggaaagtctcgggcaggcggcggcgtgatcgcgccgagggcccgcaaaagaacgcgagggtgacgaggaggtgatgacgaacggtcgagccgtggagcgggaagacccgggaaattcaaggcgcattcttagcgcgaattcttgatagggacccgttccgcgaacttcatcagggccagcggccatatgcgccgcgtcaaagggccggacatatgaccgcacccgaccggagcgtcaaaatcgaaccgaaccccttcgcaggcgggagcagtccacata

SEQ ID NO: 5889 - DNA, 1399 bp, unidentified
  source 1..1399: mol_type = unassigned DNA; note = element_9122e0d
  misc_feature 1..2: note = core
  misc_feature 3..88: note = LE
  misc_feature 89..1120: note = CDS
  misc_feature 1121..1399: note = RE
  misc_feature 1158..1387: note = bridgeRNA
tgatgctgtggacggctcctccaccggcatccaggtgccacactgtggttgctgttgttgaagcgatcccagttgagaggagccatccatgcaagagattacaacgattggtttggatatcgccaagtcggtttttcaagttcacgggattgatgcattcggcgcggtgatcgtccgtcgacaactgaggcggtctcaggtcttgcccttctttcgcaagctgtcggggtgcgtgatcggcattgaggcctgtgcgactgcgcatcactgggctcgagagcttgagaaggtgggccatgaggtgcggctgatgccgccgcgctatgtgaagccttacgtcaagcgcaacaagaacgatgctgccgatgctgaggcgatctgtgaagcggttcaacgccccacgatgcgctttgtgccgatcaagagccctgagcagcaatcggtactgatgctacaccggacccggcagttgtttattcgccagcgtacggcgttgatcaacgcgatccgggcgcatcttgcagagttcggcattgttgccggtattggccgccacggcgtcgagaagttgttggatctcatcaccaggggcgaggatgagcgcataccaccggcagcccacgcgtgcctgatggccctggcggcacagcttgcaatggtgaagcgccagatcctggaagccgatcgacggttgcttgcatggcgccggaccagcaagaccagcaaacggcttgaagcgatccccggtgtcggtccgttgatcgccacagcccttgttgccagcatccctgatccaaatgtcttccgttcaggccgtgacttgagtgcctggatcgggctggtcccaaaacagagttccaccggcggcaaggaacgcctcggctctatcaccaaggcgggcaaccgatacttacgttcgttactggtcgttggcgccctgtcggtcatcagacgagcaaaacagttgggctacacacgccatccctggctcgtcaggctcatggagcgccgatcggtcaagatcgccgctatcgcactggccaataagatcgcgcgcatagcctgggcgatgatggcccacaatgagagctaccgaacaccgctgccggcatcagcataaggcagcaacacgaacgcgcggggaacttcccgtgcaacgaagttggaaagggcaatgatcgcataacgcacccaagccagtcggcccacggaccgggacaacccacaagtgccagagcgccacttgaagcgcgtgcttttgaccgggacccgatctgcggagagcattatggccagcggccatgaacagcgccgcatcaacaggccgaacacatggcagctccgaccagccgtgcgatagcgctcaaaaaacccttgccaacatggagccgtccacaca

SEQ ID NO: 5890 - DNA, 1588 bp, unidentified
  source 1..1588: mol_type = unassigned DNA; note = element_9127cfd
  misc_feature 1..2: note = core
  misc_feature 3..268: note = LE
  misc_feature 269..1447: note = CDS
  misc_feature 1448..1588: note = RE
  misc_feature 3..247: note = bridgeRNA
cttgtataatgaactcataaggaattcatatacattttcctttcttgattattttctatataatcataatcagacgctgtggattagtttaatcacctacagcagcttttcttataaagcagactgttttcattgaggctctaaccgcagctctgtgttgatttgttaattagttagataacgcatgacgttttatatatagcaaggatacatttaacatagagttcgtggaaacatggcgtactattattacaaaggagttgttactatgatttttgtaggcatcgatgttgctaaatctaaacatgattgctgtattattgactctgatggtgtattatacacagattcattacgcattaataatgataaagaaggatttgataagctttataatacaatcctttctatattggattcaaacaaagtcaacaatgtaaaaataggacttgaatcaacaggtcactatagcaataacattacaaattatctgcattccaaaggctttcaaatctctattttaaatcctttggctactaatctttttcgtaaggccagtacccttagaaaaaccaaaacagacaagactgacgctaaagtcattgcaacgatgctattatccgatgaatcaaaatcctattctcctttatcttaccaaattcaagaactaaagtcactaactagacatcgttacagaatggttggttatcgttctaaacttaaaatttctataactcgtctgctagatattatatttcctgagcttgaaggatttatctggtctattcatcagaattctagctatgccttattgctagaattgccaacacctcaagagattagttcttgccatctaacaaagcttacaaccatcctaaaaaaggcttctagaggtagatatggcaaggataaagctattgctttaaaagaattagcttctaattctattggttctagcaatcgttctacatcttttgaattacaacagaccatacgacttgttcaatcggtacaatctgaaatagatactttggataaacagataaaaatagttgtggatgaacttaatacacctctcttaactattccaggtatcagctatactctggcttctatcatgttagcggaaattggtgaaatagaaagattttctacaccagccaagcttctagcctttgcaggtatggaaccttccacctaccaatctggaaaatttaccgcttccagaacacctatggttaaacgtggatcgacttaccttagatgggctattattcaagccacgagacttgtttctatgcgtgatactaccttttcagaatacatgaataagaagcggtctgaaggtaagcattatttagttgcacaaagccatgtaggtaaaaagttaatacgtgtaattttttatctccttaaaaacaatgtagcatttgttccacaaaattaaatgtaatcaatattatattttttacgagggcaacaatgttgctctattagtcatgcattttttcaattctaaacatctttttaaaaacttaaaccttttctaaaaaagttacaagatttatcttgacttcatatagttagt

SEQ ID NO: 5891 - DNA, 1409 bp, unidentified
  source 1..1409: mol_type = unassigned DNA; note = element_912a74a
  misc_feature 1: note = core
  misc_feature 2..235: note = LE
  misc_feature 236..1396: note = CDS
  misc_feature 1397..1409: note = RE
  misc_feature 14..247: note = bridgeRNA
ctagttagacacttgctgacaggatcagatcctggccaggatttgatccaggttcccggtggggtgctcccaatattcggctgcccaccgtctgtactggtgtggctctctaatggcttgcctcccaccgggtgccgtgcagggagtggctgaagaggggcctgccccaagctcgaactagcggtgccctcccgcacggacaccactacgtttcgttgacatgggaggcacggcgatgaccgtcatcatcggaatggatccgcacaaacgctcggccaccatcgaagccctcgacccgaccagcaagattctggcgaccggcagatacagcaccgacaacaccggctatgcggaaatgctcactgctggaaggcaattccccgatcgagtctgggcggtcgagggatgcaacggcatcggccgccacctcgcacacaggctcgtccatgacggggaaaccgtaatcgacgtgccggcgaaactctccgcgcaggtgcgggtcttcgcgaccggcaacggccgcaaaaccgacccggtcgatgcccactcggtggccctggccgcgttgcatgcaccaaatcttcgtcgcgtcgaagccgacccggagctggtcgccttgggcatgctcgccgaccgccgtgacgaactcgggcgttcccgcaccgaaaccgtctgccggctgcaccggttgctgctcgagctgattcccggtggcgccaagacgttcctgtccgcccgccaagcccgcgaactgatcgccccgatcacaccgtcggatgccgccgcgagagtccgactgcggttggtcgtcgaattgatcgaggacctggaaaccatcgaccgcaaaaccaaagccgcggacaaagaactacggcaattggtcgccgaacggggctccacgctgatggacctgcacgggatcggcccttcttccgcggcaaggcttttggccgataccggcgatatccggcgatttcgggaccgggaccggttcgcgtcctggaacggcaccgcacccttggatgcgtcttcgggtgatcaacagcggcaccggctttcccgcgccggcaaccgcaaaatcaaccgggtcctgcacatcatggccatcgttcaactgcgcaaccgtactcccggccggctctattacgacggccgcagagcgggcgggaagacctcgatggaagcagtccgggcgctcaagcgccggttgtcgaacgtggtctatgcccggatgctcgccgatcagcggcagcgtgatttggcaggcccgggagggcaatcgggaacgactcttgactccagcgcgaccggttccaacccgcacaccgatccttcggacaagccacatcccggacccaacaaacaggctaaccccacaaccatgccgacgtcttgacatagaggggtgc

SEQ ID NO: 5892 - DNA, 1399 bp, unidentified
  source 1..1399: mol_type = unassigned DNA; note = element_91498ae
  misc_feature 1: note = core
  misc_feature 2..223: note = LE
  misc_feature 224..1375: note = CDS
  misc_feature 1376..1399: note = RE
  misc_feature 13..238: note = bridgeRNA
ctacttgttgactggtggcacaaccgcgcccggccaggcatggtcgaggtgaccggcggagtcgctctcaattcggctgcctacccgcgtcttggtgtggctcagatttggcatgcgcctgccggtcaccgcggcgcggagaggctcgagaggggtctgcccagctcaaagtagcggtgctctcctcgccggcagtcctgtcgggatcgaggaaggaaacggcatggcccgggtcgtcatcggtgtggatccgcacaagcgctccgccaccatcgagatcatcaacgagcgtgagcaagccgtcggtcaaggccgcttcggcaccgaccgtgacggctacaaagccatgctggccgccggccgtcaacacaacgaccgggtgtgggcggtcgagggctgcaacggcatcggccggcacgtcgcccaacgcctggtcgccgacggcgagaccgtactggacgtcccagcgaagctgtccgcccgggcccgggtcttcgccaccggccagagccgcaagaccgacccggtcgacgcccgcagcgtcgccgtggtcgctctgcgcaccgacggcctgcggcaagtcgtcgtggacgacaccacagtggcgttgcggctgctggtcgaccgccgtgaccaactcggccgcgcccgcaccgagaccgtcagtcgactgcaccacctgctgctcgagctcgttcccggcggcgccaagaagttcctgtccgcgcagcaggcccgcgcacttctgaacaccgtgcgcccccgtgacgtcgtcggcaagacccgccggtggctggcctctgaactgatccacgaactcaccgtgatcgacaagaagatcgaaatcgccaacgccgaactcaccgatctggtccacagcaccggcagcaccctgcaggaactgaacggcatcggcccatccggcgccgcccgcctgctcggcgacatcggtgacatcggccggttcaccagccgcgcccacgtcgcatcctggaacggcaccgctccgctggacgcatcgtccggcgaccagaaccggcaccgactctcccgcgccggcaaccggcgcatcaaccgcgttttgcacatcatggccgtcgttcaacttcgccgtgacaccgaaggccgcgcctactaccggcgcaaactcgccgccggcaagaccccgatggaagccatgcgctgcctcaaacggcgactgtccgacatcgtctaccggcagatgctcgccgacgccaagcggcttacgacgggcccgggaggacacgtgggggcgactctgcaatccagcgcggccgatcaaatccccatgatcggcacttcggagaagtcactcccggacccgccaacccacagcctaaaacagccctcatgatcaacacttgacttagaggggtgc

SEQ ID NO: 5893 - DNA, 1626 bp, unidentified
  source 1..1626: mol_type = unassigned DNA; note = element_914b27e
  misc_feature 1..3: note = core
  misc_feature 4..197: note = LE
  misc_feature 198..1493: note = CDS
  misc_feature 1494..1626: note = RE
  misc_feature 8..233: note = bridgeRNA
tttcgtattataaggttaaccagaatgttagatttttctggttgaccattttttatatggtcttattataacagtagccagggtagaacgtccgcccccgtgggacttagatcccgtccgttaaaccgttcaccccctactggtagaaacatgtttgaggctggttgggacaaagatctcgtataacaagcgaagctatgatactactaggaggattaggggttactggcaagatgaatatgaggaggagatggagaatgaatccagtcgttggtctggatgtatcgaaaggagaaagtgaggttcaggcctttttagataaaggaaaaccttacgggaaaagttttagtatcaagcataatctggaagggctaagctcactacttgagtttctggaaagtgtgaaagataaaacaggtattcaaccttcggttgtcctagaagcaactggccattaccatgcacctgtggttcagtttctggagcagcataactatttattaatcatcgtaaacccgttgatctctcatcgagctaaaagttctagtttacgaaaagttaaaacggatgccatcgatgcttatcgtctctgtgagctttattacaaagaggatttagaaccctatgaaagacgcggcattcagcttttgaacctacgtaacctcacaagacagcatgagaatattactgggatatatgttcaaaccaagctccaattccaagcagtgttggatcaaatcttcactgagtatagaggtgtgtttggagatttatattccgttgtgtccttgcttcttttaaaggaatttcccgcctcagaagatattctggctgtgagtgaagatgtgttggctgagaaaatcaaggaattctgtaagagtcgctctaagagatgggcagaagaaaaagctcgggatctaaagcaagctgcagcacggaatccatttaaaaagacgctttatcagagtcatttactgagtctaagtatgtatattgatatgcttcttcaatacaaagagcatctatccagaatggagtcagagatagacactctcgcaaaagaagttgaagaatataagattatccaatctatccctggtatcggagaaaagatcgccgccacgatcatttctgaaataggagagatagaccggtttaatcacccgaaaaagcttgtagcattcgctggggttgatccagaagtatttgaatcaggtaagtttaaagctactcttgttcgcattacaaaacgtggttctagcagattaaggcacgccttatatttggccgttcgctctggtattcgtgactgtcgcaaacaaaaaacaacagatgaaatcatccctagaaacaagagattgagagctttttatgataagaagcgtgaggaaggaaaactttataaagtagccgtcattgcttgtgtaaataagctcttacattggatctatgccatattaaaaaacagaaccactttccaagatatagcctaattaagatttccagctaaataagacaaaaccttccaaacatatgtctgtggaaggttatttggcatgcctattttcagtataacatgagttattttaagtttttattgaaaaatgttgacaaactattagctgg

SEQ ID NO: 5894 - DNA, 1248 bp, unidentified
  source 1..1248: mol_type = unassigned DNA; note = element_914f309
  misc_feature 1: note = core
  misc_feature 2..249: note = LE
  misc_feature 250..1017: note = CDS
  misc_feature 1018..1248: note = RE
  misc_feature 1027..1239: note = bridgeRNA
taatgggatggtccgccgccgagactctttaagtgtaaagtccggggccaggaggcattccatgaaactacatgtactcggcatcgatctgggtaagacggttttccatctggtgggtttggattcgactgggaaagcggtgattcgcaagagatgttctcgccgacagttgctggccttcaccgctaatttgcaagtgcagttgatacgtgaagccgtacgtgcagaccaacaagagcgactacatcgatgcgggctatagccgaagcagtgcaacggccgcggatgcgttttgtgccaattaagagcgaggagcagctagatttgcaagcgctgcatcgcgtgcgggaacgctgggtcatgcgacgcacggcggtggtcaatcagatccgcagtcttcttctagaacgtggcctcaccttacccaaaggccgccgttatgtggaggaggctctgccgcggatcttggaagatgccgagttgccgttatcgggttcgtttcggctgttgttggcacagctgaagctggaactcgagcagctctccgcacgcattgatcagctggatgtggctatcctggaaagagccaaagaggatgaggcctgccagcggctcaccaccattccaggagtgggcccagtcacggccactgcagtgatcgctgccgtgggtaacgggagtgcgtttggcagaggtcgagacctagcggcctggatcggcatggtgaccggcgagcattccagcggaggaaagcaaaccttaccgggcatcagtaaacgcggcaacccctacctacgacgactcttcgtgcaaggcgcacgcagcgtcctgcagcagcgacaccggcaggctccgggtctcagttcgtggttggctcaattgttggctcgcaaacacaagaacgtcgtcatcgcagcgttggccaataagctagtccgaatggcctgggccgtgttgtgcaaggtgaacgccatcgcgctcccgtccttgctctgtccacctaaaatcccggtttagaaaaacagttccttcccggtttgcggagagagatggcaatgaggtcgatcccacgctttcggaacctgcttccggaaaaggtccttacgagaccgtccagtttataggggcgaaggcgagcggatgtccattaaggccaggagtcattgactccaccaaaggccgaatacattggcgcagaccaactgccaagctcatctttccgcttgcaactcggcggcggaccataca

SEQ ID NO: 5895 - DNA, 1534 bp, unidentified
  source 1..1534: mol_type = unassigned DNA; note = element_9160926
  misc_feature 1..2: note = core
  misc_feature 3..240: note = LE
  misc_feature 241..1413: note = CDS
  misc_feature 1414..1534: note = RE
  misc_feature 3..218: note = bridgeRNA
cttgtattatagagtagtagttattagagcccctctccaagggctgtgctacactgtaagggatgctgtggattggttacttcctcctaccgcaagacggttcaggaaaggctccaaccacagccctttacagtattgttaatcagttagataccgccagacggtttatgtagaacaaggttacaagagtaaagcgtcctgtggaaccagcatcaaacaaacacaccggaggtattcatcatgatttgcgtgggtattgacgttgccaaggacaagcacgactgctttatcctcagctcggaaggtgaagtcctggcagatgtattcaccatccaaaacaatgccgagggctttgacatgctgctgcaaacgattcgccgctgcacccgtccagaagataaaataaaagtagggcttgaggctaccggacactacagctacaacattcttgggtttcttctggacaatggcctggacagcgttgtcattaaccccttgcacactaatctttaccggaaaagcctcagccttagaaagaccaagacagaccgtgtggatgcacgaacgattgcagctatgctcatgtctgatgtggatctcaagtcctacacggacacagcttaccacaacgaagagctgaagtcactcacgagataccgttttgacaaagtccgggcacgagccaagctcaaacagtctgttgccaggctggtcaatattctcttcccagaactcgaaaagttggttccttcacttcacgtggcatctgtttatgcacttctcagtgaactacccggtgcttaccaaattaccacctgcaacctgacgcacttgaaaaccatccttgccgacgcctccaaaggccgctacggcagagataagtccattgagattcgtaattctgccaggcaatctgttggttctcgaatgcctgcaaagtccttggaactgcaacacaccattcgcctcattcaagagatggatatggagatcaacgagattgaagtgcagattgaggctatgatggttgaaatcaattctcccctcatcaccatccctggcattggcacacgcatgggagccatgattttagccgagattggcgatttctcgcaatttgattctccagacaagattcttgcctatgctggcctttcaccatctatttaccaatccggccagtacataagcggccatgcccacatggaaaagcgcggttcgcgttatcttcggttcgcaatttataccgcaacaaaatacgtttgtctttgggatcctacttttgccacctaccttgccaagaaacgtgcagaaggaaaacactataatgttgccatctctcatgccgcaaaaaagcttgtgcgcttgatatttgccatggagagatccgggcaggcttatcgggcagcttaactctttcacttattgcttctttagggcgccttctacggacgcctttgtagttgcgcttttcttgccgtcttgccgattctccggttctcctgattttgaggcttgacttttaatagttagt

SEQ ID NO: 5896 - DNA, 1368 bp, unidentified
  source 1..1368: mol_type = unassigned DNA; note = element_9163ff7
  misc_feature 1..2: note = core
  misc_feature 3..86: note = LE
  misc_feature 87..1115: note = CDS
  misc_feature 1116..1368: note = RE
  misc_feature 1144..1366: note = bridgeRNA
acgatgaaatggtctcctcctctctaacggcatcgcaatgtgccaaacttggagttgataattcaagttaacaagagaagaagaccatgagtaatattacaactgttggattagatttagcaaagaatgtcagccattttgtgggctgcaatcaagcaggaaagattgttcgtaagagaatgcttaagcgctctgagatacttgcgtttttcactacacttgataagtgtgtagtcggcatagagtcttgtgcaagtgcgcattattgggcgcgtgagatacagaagttagggcatacagttaagcaaatcgcgccgcagcatgtgaaaccttatgttcgcggtaataaaacagactataacgatgctttggcaattgcagaagccgtcgtacgtcctgagatgcgagtagtgcgtacaaagacgcaaacacagcaggatatccaagcgctgcatgttatgcgtaaaaagtgcgagcgagataggacggcgaattgtaatgaaattcgtggcctgctttatgaatatggggtagtgctgcccatgggagtacataatgtgtataaagcccttcctgatttatatgatagacaagctgacaatggtttaagcgagttattcaaaacattgctcgagcagcactatcaaaagctggttgagttagacgtacatttagaatggtatacgaagaaaatccatgccctaagccaacatgaagcctgccagcgtttacagagtattccaggcgttggtccgatcatcgccagtgcgctgtatcaacacattggcaacggtagtgaatttaaaaatggacgagctgtatcggcttcagtgggtttagtgcccaagcaacatagctcaggtggcaaacagaatttattaggtatcagtaagcgaggggatggctatcttagaacgctattgatacacggagctcgggcagtgatgcgtgtgagtaaaaccaaagacacgccactggcgcgatgggtaaggcgcattgagcaaacacgcgggcgcaacaaagccgctgttgctctggccaataaactggcccgtatagcgtgggcactattagctcaaggtggccgttatacgcctgaatgggcatcggcttaatttaaacgaatttaacgagttcacttccaaggattgctgaataaacataatgtgatgacaacctggttagaccgacatatcgaaaacctgataggggctatggattaacaatccgtgtcaacgataaggacgatatgggcgaagttcatcgaggctcgaagttatagcacttcatcaagaagccggatatacgaacgcaaacctgactttcaaaacagccagtttattcttgcaatattggaggagaccatat

SEQ ID NO: 5897 - DNA, 1221 bp, unidentified
  source 1..1221: mol_type = unassigned DNA; note = element_916a18a
  misc_feature 1..3: note = core
  misc_feature 4..223: note = LE
  misc_feature 224..1186: note = CDS
  misc_feature 1187..1221: note = RE
  misc_feature 39..200: note = bridgeRNA
gttgtatatttaaaatatttgttgtatctttgcactcgatttaacatctatagtatggattaaggcagaataatcgttggtataaaaccgtctcgaacgtttagtccccatactattacatccaaaaactggatagttcattgggcttttagaccccgtatttgcaacgatagtgttcagatgtatcagatgttcaatcaatgcatataattaaataacgattatgacttacattggtattgacgttagcaaggattcgttcgtagtggcttatccaacaaagagtggttacacaactaaaacattccctaacaccacaggtgatgtgcgcaaatttattaactcgctcccggaagattgccattgtgtgatggaggcaaccggcaactacagcatgctgcttctttatctcctccaagagtctaacaaacctgttagcatggagaatccgcagaagataaagcattttgcacgtgctatgttgagtacgacaaagacagatgagatagatgctaaacttattgctatgtacggagagaagatgaatcctgctccatacaaaataccatcggagagtataattctgcttaagcagaaacgtactgtccttaggcagctcaagaagcaacttactgcgatgattaatctgcagcactctttgtctgttctacccaagcaagacccaacggctaaggttgctacagaacaaaccattaagttcctgcgtaagcaaatctctaagatagaggaggagattactaacctctctaataaagagtttaaacgccagatggaactacttacatccattaaaggcattggtgagaacatcgcttctgcactcataatggctactggtggttttacgtactttagcaacgctaaacagatttcgcggtttctgggactttgccccacctaccaacaatcgggtacgtcaatcaatatcaaaggtcacattaatcgcaatggagatacacatctacgtagtcaattatatattgctgcaatggcatcattaagatgtaacgctgcatgcaaggaaacatttgatcgattgatcgccaaaggtaaatctggcaaagtcgccatcatcgcagtagctaacaaactaatccgccaaatgtttgctattgtcacatataatcgcccctttataaatggatatgtatcatcttttgcataaaaagttaattttttattaaatttttaatatagttc

SEQ ID NO: 5898 - DNA, 1211 bp, unidentified
  source 1..1211: mol_type = unassigned DNA; note = element_917869b
  misc_feature 1..2: note = core
  misc_feature 3..224: note = LE
  misc_feature 225..1196: note = CDS
  misc_feature 1197..1211: note = RE
  misc_feature 6..198: note = bridgeRNA
cttgtatgttgactgtggttcctgtgaccatggtccccgactgatcatcgggcggcaggtgacaggccggtgtgcccctgaagcctcaagagcttggttcgtagatgggccgtcacctgccaacacactcagacatctggtgccggcgctgagcgcctgagcacgtattcgcaaggtagaacagagtgtggtgacgatcgcctgtcaacagagccggaggccccatgacctgcgttatcggaatcgacatcgccaagcacaccttcgacatcgccaagccgctggagcgcgataaataccgcaccaaagccaaactggcgaactcccccgaaggcttcaagcaatttgaccaatggttagagaaacatgctgagccacattgctgggtgctgatggaggcaacgagcgtgtaccacgaagcgctggcgacgcatctgcatcagcaaggctatcaggtctgtgtcatcaaccctgcacgcatcgccaaatatgcgcaaagcgagctgcgccgggttaaaaccgacaagaccgacgccaaattgatcgcccgctacgcacagcgccatctggaagaactgcgtccttgggagcccgagccagagagcatccgtcagctacgcggcctggtgcgtcggcttgccgacctgaaggagttggcgcagatggagcgcaaccgtctggacgttagcgcagaatcagcccaagcctctatccgtgttcatctggagcacctggacggccagatcgccttaatcaacaccgctatcaacgaccacatcgacaatgacccggacctacgagagcaaaagcggctaatgaagagcattgatggtgtcagtgatggcaccaccgccacgctgctggcagagctgggcagccccctgcgattcgacagcgcaaggcagctggcagcgttctgtggtctgactccgcgtttgcaggaatctgggatataccgaggcaagtcgaccatctctcgcaccgggtcaggccggttgcgcgcagcgctatacatgccagcgctgtcggcgatgacctacaacccggtcatcaaagcgatgaaagtgaggctggctgaacgcggtaaagctggtcggttggccgtctgcgcggccatgcgtaagctgctgcacatcatctacggcgtactgaaatcaggtcagccgttcgacccgatcagagcacttgcacgctgatcgggaagacggtat

SEQ ID NO: 5899 - DNA, 1161 bp, unidentified
  source 1..1161: mol_type = unassigned DNA; note = element_9179615
  misc_feature 1..2: note = core
  misc_feature 3..192: note = LE
  misc_feature 193..1146: note = CDS
  misc_feature 1147..1161: note = RE
  misc_feature 7..160: note = bridgeRNA
catgtatcttgccctccgagggaggctctaccgctcaagtttctgggctcccatgcccgcggctttgataggtagccacccgccccggcctccccgccgcacagtaacccggtcatggaagaccgcatccacatggaaggcccacggggtcgggtggccacctccctcagtctacacccaaggaggaaggccatgtgctgcgcagggattgacgtcagcaaaccccacctggatctggccctggtctttagcaccgctaaacccacccgcttccgcttccccaacaccccagaaggccgccaagccctccttgccgccctcgcccaccatcgccccgactgggtggccctggagcccaccggcccttaccacctcccccttctccacctcctggcgcaaaggggcttcccggtagccctggtcaacccctaccacctcgccgccttccgcagggccgcaggggaacgcaacaagaccgaccaccaggacgcccttcttcttgcccgctacgccttggtctaccgggaggaactccaggcctacaccctccccccagaaacccttcgggaactcaaggccctggtggggtaccgggaagatctggcccgccgggagagggccatcctgaaccaacaggaagccgcccactgggcggggagcgaggaggtcatccccttgctccagagggagctagcgtgcgtgaaggaacttctccgggaagtggaggagagaatccaagcccttctttccctcatccccgaggcggaggtcctgatggccctgcctggggtaggcccccaggtggcggcggcggtgctggcccttctgcccccgcacctttggggccaggccaagagggcggcggcttacgcagggctcatccctgagcgggaggtgtcggggaagagtgtagagaggagccggctttccaagaaggggcctcctcttttgcagcggaagcttttcatgggggctttggtggcggtgcgacatgacccgaggatgcgggccttctaccaccgcttgctttcccggggtaaaagaaagaagcaggccttggtggctgtggcccacaagctcttgaggtgcatgatgggaaggctcagggagtactacgccaaccgactgggccagggggtggcttgacagccaagacagtat

SEQ ID NO: 5900 - DNA, 1409 bp, unidentified
  source 1..1409: mol_type = unassigned DNA; note = element_917a823
  misc_feature 1: note = core
  misc_feature 2..92: note = LE
  misc_feature 93..1130: note = CDS
  misc_feature 1131..1409: note = RE
  misc_feature 1180..1404: note = bridgeRNA
taatgggatggacgcccccttcctgcaacggcatcgatgtgccaaagtgggaatgcattcaatccacttaaaagaggaaaggagcgtccgagatgaagattacgacaattgggatcgatttggcaaagaacgtgtttcaggtgcatggagtcgatgagcggggcaaggtggtgctgcgcaagcagctcaagcgcaaggacgtggtgaagttctttgcgaatctcgagccctgcctgatcggcatggaagcctgcggcagtgcgcattattgggccaggaagctctcggagttcggccacacggtgcgcctgatggccccgcaatttgtgaagccgtatgtgaagacgaacaagagcgaccgcaacgatgccgaggcgatctgtgaagcggtggggcgcccgaacatgtgttttgtgccggtgaagacggccgaagcgcaggcggtgctggcgctgcaccgcgcgcgccagggattcgtgaaggcgcgcaccgcgcaggcaaaccagatccgcgggttgctcgctgagttcgggatcgtgatccccaagggcatcgggcacattgccaagcgcctgccggaaatcctggaggacggcgagaacggtctgccggggatgatgcgccagttggtcagggcgctcggtgagcagctgaagggggtggacaaccaagttgaggaaatggagcggcagatcaagctttggcaccgcgacagcgagcccagccgcacgctggaggcgattgccgggatcgggccgattacggcgagcgcgtacgtggcctcggtgggcgatgcgaagagcttcaagaatgcccggcaagtaccggcctggctgggcatggtgccgcgccacgagggcaccggtggcaaagtgaagatgggccggatcagcaagcgcggggatgtgtatctgcgcacgctcctgatccacggggcacgcgcggtgattcgtcaggttgagcgcaagcccgatcaggccgatgggtggctgaagaaactgctggcccggcgcaacaagaacgtcgctgcggtggcactggcggcgaagaacgcacgcatcgcctgggcgctgctggcgcacgagcggacctaccagtccgattacgttgcgaaacgcacggccgcgtaatcgcggtcggttgaattgaacgaaagaactgtttagcaaaggagggcttccaccgattgctcaggcaatcatgacatgatggcaagataggtcagaccgtgacggggtaagcctgttccatccacagcacttcgagtgcgcgagggtgatgaggcccccgtcagccgattccatcagggaccgaggcataagcctcatacaaagtccggatctatggctgcatctttaccttctcgccgtcgttgattgatcgcttggcaaaccgggggcgtccatcta

SEQ ID NO: 5901 - DNA, 1453 bp, unidentified
  source 1..1453: mol_type = unassigned DNA; note = element_918052c
  misc_feature 1: note = core
  misc_feature 2..223: note = LE
  misc_feature 224..1252: note = CDS
  misc_feature 1253..1453: note = RE
  misc_feature 14..235: note = bridgeRNA
ctgattgatgatggcaggtgcgttgcggcggttccgtagcgttcggatgatccggctggtgggctcttcaagtgcccgccgcccgaacgggttggctttctaacgaactgtccgccggtcggtcatctgaccgtggtgtggctcgaaagaggccagacacatcgaccccaatcaggagtgcccacctcggttcaccaccatcaaccaggaaggcaccatccccatgacgatgatcggaatcgatcctcacaagcaatcccacactgtggtcgcgatcgacgaccacgagatagtcctcgacgagttcaaactcagagcgtcgagcgttcaggccgaccgactccgcgagtgggctgcccgcttcgacagctgccaatgggcagtggagtcagcgaacggcctcggctacctgttggctcagcaacttgtcgctgccggcgagaccgtgttcgacgttccaccggtgctcgcgtcgcgggtgcgggtgctcggctcaggccggtcgcagaagaacgaccccaacgacgcacgctcggttgcgatcgcagcgatgcgttcggatcgtctcggccgggtccgtgccgatgaccacgcccgagtactgcggctcctcgcgaaacgacaccgtgacatggctcagctgcgtaacaagcactgcacccgcctgcacgcattgttgggcgaactggctgcgggcgggatcggcaccgaactcactgtttccaaggccaacgctgtgctcgacacggttgtggtcgactccgaagtgctccggcatcgggtgctgatcgcaaccgaactaatcgatgacatcgcccgcctcgacaccatcttgaaagcatcgaagaagcgcgtcgagcgagctgtgtcagcgtcgggaacaacgttgtgttcgatcgttgggatcggcccgatcaacgccgcgacgatcctcggctactccggcgacatcgcccggttcgcgaccaaagcccagttcgcttcctacaacgggaccgccccgatcgaggcgtcatcgggcggacgggtccggcaccgactgaaccctcgagggaaccgcaagatcaaccatgccctccacgtcgcagccatctgccagctccgctacgacggcgaaggacgcacctacttcgaccgaaaagtcgccgagggtaaatcgtccaaagaagccatccgggctctcaagcgacgcatctcggatcgcgtgttccgcgtcatcatcgacgacacccgccgcagcgggctcgactgaaacaggtgggcccgggaggacaatcaggaacgacacgaaatccagcgtgaccggctcgacatcctgaacagccggttcttcggataagtcactcccgaacccaacagccaacgctacgaccctccggccggccgatcaagagggtcaactccgacgcgccctcaacgacctctgaaactgccccttgacacaaagaggctt

SEQ ID NO: 5902 - DNA, 1355 bp, unidentified
  source 1..1355: mol_type = unassigned DNA; note = element_918f45b
  misc_feature 1..2: note = core
  misc_feature 3..82: note = LE
  misc_feature 83..1105: note = CDS
  misc_feature 1106..1355: note = RE
  misc_feature 1113..1351: note = bridgeRNA
ttaatgagatggtcagcctgaccgagaagccctgcaggtttacgcttgcagggcttttctcgttttcggcggaggatctctcatgaacacgatgacgcttctcggcatcgacattggtaaacacagtttccatctgcacggccaggacgccaaaggtcatcaggttttgcgcaagaaaaccagccgcagccaattgctcggcacattggcccaactgccggcctgcacggtggtgatggagtcgtgtggcggtgcccactggctggctcgacaggttgaggcattgggccacgaggtaaaactgattgccccgcaatacgttaagccgttcgtcaaaggcaacaaaaacgacttcattgatgccgaagcgatttgcgaggcggcgagccgccccgcgatgcgcttctgctcgattaaaaccgcagagcaacaaacgctttcagctttgcatcgtgtccgagattccttgattggccatcgcaccgtcgcgaccaatcagattcatggttttttgctggaattcgggatcagcctgcccattggcgcaacggcgttgaaccgcgtgccagcgctgctggacgatccacaacatccggttccattgcgcctaaagagcgtggtgatgcgtcttcatcgtcaaatccaacagctgaatgatgaaatcaaggacatcgagtccgacctgaaacagcagttgaaagaagacgatgccggaaatcgtttgcagagtattcctggcatcggcccaatcaccgccagtgcggtattggcggatgtgggcgatgcgtcgaactatcgaagtggacgcgattttgccgcttcgctggggctggtgccgaggcagtattcgacgggtgggaagacggtgcttctggggatcagcaagcgtggcgacaagcacatccgccaattgctggtacagggcgcgcgatccgttattcagcatatcgataagcgagaggacgccttggggccttgggttcgagagctactgacgcgtcgccactccaatgtcgtcgcgtgtgcgctagcaaacaaactggcgcgaatcgtgtgggcggtactggccaaaggcggccagtacgacccacatccgaacgcttgaatgcacagcgttaccaccggcttttgcgacgtcactgactgatgacagtaaacggcaaacggcccgactgagaacctggcaataaaatcagctttagaagctgagggttttttcaggacagtcgggagcggctactcatcgagggccgagcgttgttgcagcaacgctcacaacgagcccggatacattagcgcaagccagctttaccgaaaacagcccatgaggttgcaggagaagggctgaccataca

SEQ ID NO: 5903 - DNA, 1181 bp, unidentified
  source 1..1181: mol_type = unassigned DNA; note = element_91991ed
  misc_feature 1..2: note = core
  misc_feature 3..235: note = LE
  misc_feature 236..1165: note = CDS
  misc_feature 1166..1181: note = RE
cctctatcttctttaaaggcaccttgatttggtgcaaaagggcggcaggtccgagatcctcgctgcagctgcttccgatcaacagatcgagagcgtcggttagtgtgatccgtgcctgcccttgggcgtgtagagaaaactcgaacagttactggagcgaccaagccggtcttttaccccgagggcaggaccggcctggccagctcgcatcttagaagcaggagagttctatcacgtgaaagaggagtttgtctatcttggagtcgatatcgccaagtcgtatttggacgcagcgattgggagtgagaagcgtcgttttgctaacgacgcagttggtcatcgagcattgatcaagtggattaaagaaattgaagggttagtgcaggtgatatgtgaaccgagtggtggttacgagcgagcattgattcgggccctggttggtacgcagatcagagtgagtttggtaccagcgaaccgggttcgccaatttgctcgggccgcgggtattttagccaagaccgatcggatcgacgcgaaagtgctgtgcatctttgcagaggcgatgcagccggggaccataagtggctcgcagctagaacaggagcatttacgtgagctggagagtcagcgccggcatttaacacatctgctggtgatggaacagaatcgaggtgcacgagtcagtgatgtttgcgtgcgcagattaaatcgcactctgataaaccagatcaaaaagcagatcgagcaactcgatctgctcattaaaaatcatatcgaagaatcggctgaactgtcggtcaaagcagccaaactgacggcgatcagtggagttggggagcggacggcagcgttgctcctggcgcagatgccggaattggggcgactcaatcgtcgcgaagttgccgcattggtcggagtcgcaccctttaatcgcgacagcggaagaatgcgcgcaacgcgaaccatctatggcggccgtcgtcccgtacgtcacggcttgtatatggcggcactggtcgctgcccggcacaatccgatcctgcgcgcgttttatcaacgattgcgaactgctggcaaaccggccaaggtggcattgaccgcaacgatgagaaaactcctgatcgtgcttaatagtgccctgaaatccgatctaagttatgcttgaaaccaagacagttact

SEQ ID NO: 5904 - DNA, 1427 bp, unidentified
  source 1..1427: mol_type = unassigned DNA; note = element_919fee6
  misc_feature 1: note = core
  misc_feature 2..219: note = LE
  misc_feature 220..1242: note = CDS
  misc_feature 1243..1427: note = RE
  misc_feature 16..228: note = bridgeRNA
ctggttgagacttgttggtagatgctgcgacatgttcgtagcgttagaagtccagacggggtagctctcgatgtgcctgccgtcggctctggctgactggctttctaacgagtggctgcctgtctggacttcgccgcgagtggctcgaaagaggaacaggcacgagattcaaaccaggagtgccctcgcggttcctaaccgaccacgaaggaggaaatgatgactgtgatcatcgggattgaccctcacaaggcgtcccatacagcagtggccatcggctgcgatgagcggcagctgggccagatcaaggtgcgggctacctgccagcagacagcgcggttgttggcctgggcggaaccgctgggtgagcgcacctgggccgtcgagtccgccggtgggctcggctacctgttgtcccagcagttggtgggagccggcgagcgggtcttggacgtcccggccacactggcctcgagggtgcgggtcttgggtactggacgttccgacaagaacgatccgaacgatgcgctgtcggtggccatcgccgccctccgctccccgggcctgcgctcggtggagcctgcgaaccatcgggaggttctccgcctcctggccaagcgcaatcacgagctcgggaggatgcgcaacatggttgtctctcggctccacgctgcactggccaacctctcaccgggtggaatctccaaggaactcaacgcttctgacgctgtgcggctgctcggcgacttcgacccggttacacccgtgcaacagacccgctatgacctggccctggagctcctcgacgatgtgaagcgactcgatgtgcaattgaaggagtcccacaaacggatcacgacagcggtgaaggcttcgggaacctccctgaccgagctctatggcgtcggtcccatcctggcctgtgcgctgatcggctacaccggcgatgtccgtcggttcaccacccgagaccagttcgcctcctatgccggcgtggctcccatcgaacattcatccggaggccggatcgtccaccggctgagccggcgtggcaaccgtcagctcaaccacgccatccacatggtggccatctgccagatccgccagaccgactcggaaggtcgggtctacttcgagcggaaggtggccgagggcaagaccaagagggaagccatccgctccctcaagcgtcatgtcagcaacgccgtttaccgccagctcctcatcgacacccagaagtaagggcccgggaggacaagcgggaacgactcgtagcctgcgtgaccggctctgcaccctggcggccggctcttcggcgaagtcactcccggacccaccaaacccttaggcattcgcgcccctcgacggcggtctggatcatcgcgcccgaaaggcccagaaattgcccccttgacacaaagaggatt

SEQ ID NO: 5905 - DNA, 1426 bp, unidentified
  source 1..1426: mol_type = unassigned DNA; note = element_91a1001
  misc_feature 1..2: note = core
  misc_feature 3..186: note = LE
  misc_feature 187..1125: note = CDS
  misc_feature 1126..1426: note = RE
  misc_feature 1192..1423: note = bridgeRNA
taatgaaatggacccagccttcttccaacacgagcctcacccgaggcaagatgggtgatgttgagcgcgccacgcccactcatagtcaggaagaagggagggagctatgtacatcacgacattggggatcgatttggcgaagaatgtgtttcagttgcacgggatggggatgcgcgagggcatgcggtgctcagccgacgcgtgaagcgcagtcagttggtggaggcggtggcgagtctgccgccctgtgggatcgggagggaggcctgcgggagtgcgcatcactggggtcgggcgtttgaacagctcgggcataccgtcacgctgatgagccccaagtacgtcaagccctctgtgaagaccaacaagaatgatgctcgagacgcggaagcgatctgcgaagcggtcagtcggcccaccatgcgatttgtctcgatcaagaccgtggaacaagccgatctgcaggcggtgcaccgtacgcgatcgctcttcgtgaaacaccggaccgccgtcatgaatcagattcggggcctgttggccgagcgtgggttggtgattgcgccatccccggagaaggtccggcctgccttggtccggtttctagatgacgcggagtcgggattgaccgcgtttgcccgagagaccttctccgaattgtatgagcaacggcgggatctcgagtcgcgcatcgagcgggtgacgcaccggctggatggcgtgtatcgggcgcatccggtctgccggaaactggccgcggtaccggggattggtccgttgacggccacggcactgctggcgaccgtcggtcggcctcaggcgtttcacaacggccggcatctggcggcgtggttggggctggtgcctcggcaatattccagtgggggcaaggaaaagttaggcgggctttcgaaacgaggcagtcggtatgtgcggacgctcctgattcatggggcgcgagccgtcgtgcagcgtgccgagcggagggttgatccgcaggggcggtggctgtgggcgctcaaacgccgcacaggcaccaatgtcgccgcggtggccttggccaacaaaaacgcccgggtgatctgggccttgttggcccctgatgatgtgtatcgacaacctgcctaggtgcaggcagggggcgaaccggtcttcacgaggagagacgagccgtctcacagaaggattcacaccgaggagtgcagcgcggagcatccgtgatgacaccacagggacacccggcgcgttcaaaccctggacaaattatcggcccggacgaggccgttgtgctaatgaggagaacgcgcgcgtattgcatcaaggcccggacacatcggttgtccatcgagaagccggatatataaacgcagccctgcattgtggttcatcgcgtagtacccgccgttgtaccggaggctgggtccatata

SEQ ID NO: 5906 - DNA, 1376 bp, unidentified
  source 1..1376: mol_type = unassigned DNA; note = element_91a38b7
  misc_feature 1..4: note = core
  misc_feature 5..81: note = LE
  misc_feature 82..1107: note = CDS
  misc_feature 1108..1376: note = RE
  misc_feature 1152..1364: note = bridgeRNA
atgatggggtggacggcccccgaacggcatcgatgtgccaagctggccgtgttgaggacccagctgaggagaccgtccgagatgcaagctatcagatttggcgtcgatttggccaagcaggtgatccagatccacggcgtggattcagagggcaaggtggtggtgcagcgccagctcaagcgcagccaggtcttggccttcttcgccaagcagccgccggcgctgatcgggatggaggcgtgcggctcggcgcacttctgggcgcgcgagctgatgaagctcggccacgaggtccggctgatgccgccgacctatgtgaagccctacgtaaagcgcaacaagaacgacgcgcgcgacgcggaggcctgctgcgaggcggtcgggcggccgaccatgcgtttcgtgccggtcaagacggtggcgcagcagtgcgcgcgggcgatccaccggtcgcgcgacctgctggtgggccagcgcagccagctttccaactgcatccggggcctgctctacgaaatggggctggttgcggccaagggggccggcgggatcaaggcgctgctggagcgcatcgaggccggcgaggcggccatacctcccgcattatcggccgcgctgaagccgctggcggcgcagtggcgcggcctggatgaggccatccacgggctcgacaacgagatcgtgacccaggtccgggcggacaaagccgcgcggcggctgatggcgattccgggcgtcgggccgatcaccgcccacgccgtgatcgccgccgtcggcgacggccgccagttcgcctcggcgcgtgacttcaccgcctgggtcggcctgacccggaagaaccacgacaccggcggccgacaaagtttgagcggccatatcagcaaggccggcgaccggggcctcaggcgcctgctcgtgctcggcgccagcgcctggttgcgccacgtccgggcgcggcccgaaaagggctcggcctggatcaagggcgtgctggcccgacggcccgtgcgggtggccgtcgtcgcccaggccgccaagaccgcccgcattctctgggcggtcctcacctccggccaggactaccgcgccccggccggggctcaatgatcacggtcccggcggcggcctgagccgcagccgggccctcacagcgtaaggagcgaaaggcagcacggcgaaacggtcaggacctgggtcgggacactccgctacgtcatcgcgcctcgagcgcgcgggaatgattggaacccgatccgcgaaccccctgcgggccagcggtcatctcatcggccgcacaaacaggccgaatacatgaccgctccagactcgttcgccagccgccaatcgacctcttgccgagagggggccgtccatac

SEQ ID NO: 5907 - DNA, 1367 bp, unidentified
  source 1..1367: mol_type = unassigned DNA; note = element_91a8532
  misc_feature 1..2: note = core
  misc_feature 3..78: note = LE
  misc_feature 79..1104: note = CDS
  misc_feature 1105..1367: note = RE
  misc_feature 1080..1355: note = bridgeRNA
tgatggggtggacgccccccaacggcatcgatgtgccaaagtggtggtgttgagtcaccgcttgagagggaggcgtccgtgcaggaagttaccaccatcggcttggatatcgcaaagcagatctttcacgcgcacggtgcagatgcgtcgggcgcgatggtgttcagccgccggatcacgcgtgcaaagctgatgcagtttttcgcctcacagccacggtgcgtcgtggcgatggaggcgtgtgccggagcgcatcactggggccgcgagctccagcgcctgggccacgatgtgcggctcatcccgccagcgtacgtgaagccgttcgtgaagcggcagaagaacgatgccgcggatgcgcacgcgatctgcgaggcggcgcagcggccgacgatgcgcttcgtgccggtgaagagcgaggcgcagcaagcgagcgccgcggtgttccgtgcgcgggatctcctcgtgcgccagcgcacgcagctccttaacgcggttcgaggtcttctagccgagcacggctgggtcgcgcccaaggggctgttccacgcgagtgcgatgttcgcgaaaatcgaggatccatcgtgcgcgcttccggcaagcgcgcgcgacgtgttcctggtgatgattgcgagcgttagggcgctcgatgagcgcatccatctactcgatcgcgagatcgcgaagcgtgcccgggaggatgagaccgcgagacgtctgatgaccatccctggcgtcggcccgatcacggcgactgcgctgattgcgcttgcgcccgcaccggagagcttccgcaagggccgcgacttcgccgcctgggtcgggctcacgccgctgcaacggtcgaccggcggcaaggcgaagcttggtgcgatcacgagaatgggcgaacgaacgctgaggcggctgctcgtcgtcggtgcgagcgcggtcgtcctgcaggcaagcaggcgcggagcacctcgcggatcctggctcgagcagatgatggcgagaaaaccgcgcatgctggtgactgtcgcgctcgccaataagacggcgcgcatcgtctgggcggtgctcgcgaggggagaaggttaccgagctccggccgtcgcagcatgaagctgcggcgggcgtgaggatgtcagggcgtaagtgatcgaaggagggtatggcaccacagtcggcgagacgggaccggaagaaccagcgctttccaccgtgctactcaagcacgcaactgggtgatttggatccggtccgcgaactcccatacgggctcgcggcactcatcatcgccgcatcagaagccggacagatggcagcatccgaccaggtgtcaaaccaaccgaaaaatcgcttgcgctccggggggcgtccacaga

SEQ ID NO: 5908 - DNA, 1491 bp, unidentified
  source 1..1491: mol_type = unassigned DNA; note = element_91aaed3
  misc_feature 1..4: note = core
  misc_feature 5..256: note = LE
  misc_feature 257..1474: note = CDS
  misc_feature 1475..1491: note = RE
  misc_feature 12..241: note = bridgeRNA
ccccgttactttgttcatgcccgctgggaagtggttctggtgggtggcctgctgggctcggcatgatcgtgtgccccctgtcgttcgtatgatctggggggtgttgtcaccgggctcggtgtggcggctggttatcgctgatagggacagggcccggcttcgcgccgagtgccgttcgtaacgtggatgtcgagacctgccgcccgtgagcaggccgatgtggtagcagaggaactgaggagcggagagtctcgggatgggaatgaacatcaccggatacgacggggtcgacgtgttcatcggagttgacgtcggcaagggcgaacaccacgcggtcgcggtggaccgggcaggtaagcgcctgttcgacaaggctctgccgaacgaggaaacgaaactacgcgagctgatccgcggtctcaaggaccgtgggacggtgctgttcgtggtcgatcagccggctacgatcggggcgctgcccctcgcggtcgcgcaagcggaaaacgtcttgatcggttacctgccggggctggcgatgcggcgcatcgcggacctacacgcgggcgaggcgaagaccgaccggcgtgacgcggcgatcatcgccgaggccgcccggacgcttccgcacgcgctgagatcgctcgcgctcgcggacgagcaggtcgcggaactgtcgatgctctgcggcttcgatgacgacctcgcgcagcagatcaacgcgaccggcaaccgcatccgcggcctgctcacccaaatccacccgacactggaacgggtgatcgggaagcatctggaccacccagcgatcgtggatctgttgcagcgctacccctcgcccgcggctctggcagcggcaggcgagaagcgcctcggcgaccggctcagcaagctcgcgccccgcatcggacgccgcctcgcggccggaatcgtccaagcgctctcggagcagacggtggtcgtggtcggcacgaacgcggccgctctcgtgctgccgcggctggcgaagcaactcgcggacctgcgccaacaacgcgacgatatcgcggtcgaagtcgaacgcttggtggaggcccaccctcttcaccccgtcctgacgagcatgcccggggtcggcgtcaggaccacagcccgactcctcaccgaagtcgccggcaaaagcttcgccaccgccgcacacctcgcctcctacgccggcctcgcgcccgtcacacggcgatccgggtcctcgatccgcggcgagcacgcctcccgacgagggaacaagctcctcaaacgagccctgttcctctccgcattcgcggccctccgcgaccccgtctcccgcgcctactacgaccgcaaaatcgcacaaggaaaacgccacaacgaggccctgatcgccctcgcacgacgacgctgcgacgtcctccacgccatgatccgcgacggcagcctctaccacccccgaaccccactgccagccaccgccgcttgacaaaccacatagggaca

SEQ ID NO: 5909 - DNA, 1453 bp, unidentified
  source 1..1453: mol_type = unassigned DNA; note = element_91afd50
  misc_feature 1: note = core
  misc_feature 2..128: note = LE
  misc_feature 129..1154: note = CDS
  misc_feature 1155..1453: note = RE
  misc_feature 1203..1451: note = bridgeRNA
atggtatggacgcctcccacctctgccacgcctgactcccgcgccacttgatcgaggggcctcgcatgcatcggcatcaagtgccagagtggaggttctcgcaaccactcgatgacggaggccccaccatgaatgctacaacctacgcggtcgatcttgccaagaatgtgttccaggttcattgggttgagcccgccagcggggagatccaccgtaagcagctcagccgagccaagctcacggagttcttcgcgcagcgtcaaccggccaggatcgcgatggaggcttgtgggagcgcccatcattgggcccgcactctgacggcaatgggccatgagcccgagttgctgcccgccaaacaggtgcgtgcgtttgtgcgcggcaacaaggatgatgccgccgatgcgcgggcgatctgggtcgcggcctcgcacgacgacatccggcgcgttccgatcaagagctgtgagcagcaatccatcctgtcgctgcaccggatcaggtcgcactggatcaacacgcagacatcgaccatcaacatgctccgaggcctggtgtatgagttcggggtggtgctgccgcaagggcgccatgcgggcctgcgtgcgctggccgagcggcgcgcccaaattaacgagagcctgccagagctgatggtgcggctggtcgatgatttgctgcgaacgctcaaggagatcgggcacaacatcgaggtcgccgaaggcgagattgccgccgtacaaaagagctcgcagacggccaaggcactgcgccagatcccgggcattggcgtactgggggcaaccgccctggcggccgtgctgggcgatggcaaggggtggcgcaacgggcgggagttcgccgccagcctggggctgatcccgggtcatcaggggaccggcggcaaagtgcgcatgggcggcatcaccaagcgcggcgacccgtatctgcgcacgctgctcatcagcggagcgcacgcagtggccatatcgaagagtcgcaccgaatggttcgcgaagatcctggagcgccgaccggcgaacgtcgccgcggttgcatgggctaacaaggccgcaagaatggcctgggcactggtccggcacgggcgagcctatgacgcgagctggaagtcgagcgcgcccgccgcggcctgactacggcttctgaagggaaatacccaacaaacaacggcagacgccgaaaacgagtgcgcgagagaagttgacgaagtgatggcaagcggccagaccgtgggtcggcaaatcagatgcgctgcttgggcgagctacatgcgaagccctgcgacgagataggagccgacctcgcgaatgaccatcaaggccagcggcggatttgcatccgcactgcacaaacaggccggatataagaccgcagttgaaccgccaggccagaacttcaagacttcacttgccacacgggaggcgtccatata

SEQ ID NO: 5910 - DNA, 1229 bp, unidentified
  source 1..1229: mol_type = unassigned DNA; note = element_91b5e6d
  misc_feature 1..3: note = core
  misc_feature 4..211: note = LE
  misc_feature 212..1141: note = CDS
  misc_feature 1142..1229: note = RE
  misc_feature 12..195: note = bridgeRNA
gcttgtgtctttgatcaaggtaaagtctggggtgagaggggtggatggcaagctgacaaatcgcggtgcctagagcacgtgtgggagccaagctgccatccactcttcccgctttggctcaaagctcgaacagttgactgagtccgacctcgaacaacaagcgtgagccaggccaaagcgcctctcaccctttatcctagaggttttactcatgtccgcctatgccggtattgatgtttccaaggccacgctgcaggttgcgctgtttcccaaagcggatgagctgtgtgtacctaatactgaagaaggtctcgccagcattgccgagtacctcagcgcccatcaggttgagcgcgttcttgttgaagccaccggtggttacgagaaactgtcggtaaagcttctggctaatgcagggttcaagatccagcgtattaaccctgttcgctcacgtcagttcgctctggccatgggcaagcgtgccaagaccgatccaatcgacgcgcaaatgctggccatgttcgcctccagcctggaagcgaagggcttcgcaaagcctgacgaggagcgcgaagtcctgcttgagctggtgaacttgcgcaacaacctgcttcaacaacgtgacgacaaccggcgccgtatcaaacaggccatattgcccagcgtggtggacatttaccttgcgttggaagccagcctcaaagtgcagatcaaagcggtagatcagcttgtcgatgcacaagcgcgcaaggtcgactcagaactgctgcagcggctgcatgccgtaaagggcgtaggcccagtgacaatcgccagcctgttctgctacctgccagagctgggtgacctgagtcgtggacaaatcgcagcgttagccggtgtggcaccgtataacaacgacagcggtagcaaggtcggcaagcggcagatctacggtgggcggacgaaactgcgccgtgcgacctacatgtgtgcgctggtgatggtgcgctataacgccgatttcaaggagcggtatgcgaggctgcgtgccaaaggcaagtgcgcgaaagtggccctggtggcctgcatgcgggtgttgctgatacgcctgaacgccatggtgcgcgacggaacaccatggcgtgatcatgcggtttgaatggggcgggctttgcctgccatcgcggaatctatccgcgatggcattataaaatgcccattcatcgggggatgatgaaagacagttg

SEQ ID NO: 5911 - DNA, 1286 bp, unidentified
  source 1..1286: mol_type = unassigned DNA; note = element_91b8950
  misc_feature 1..2: note = core
  misc_feature 3..239: note = LE
  misc_feature 240..1274: note = CDS
  misc_feature 1275..1286: note = RE
  misc_feature 18..242: note = bridgeRNA
ctgacttgttaaatcgacctcagacgcccggtctgcagccgtagcgtccagggtgccggtcggcacgggctcgcattgccccatgccgccccgcagggctggctcatgattagcgtgccgccgccgtccggcacccgcgcggtgtggctcgacagaggcatgaatgtgtgagaccgcaacttcaagtcagggtgcccaccgcacacttctgccccatcgagcatctggtcaggaagcgcgtgatcaccatcgggatcgacccccacaagtcctctcacaccgctgtcgcgatcgatgcggcaggccacaagatcggccagcggaagttcgtcgtcaacgccggaaccttcggccagctcgtccggtggtgcgagccgtggtccgagcgccgcttcgcggtcgagggcgccggcggccttgggcggacgctcgcccagcagctggccgcggctggcgaagacgtggtcgacgtgccctcgaccctgtccgccagggcccgcctcttggccacaggtggagatcgcaagaccgaccccgccgacgcgctgcacgtcgcccaagtcgcactgttccgcgccgacttacgcaaggtcacttctgagggccagtcgacgatcctgcggctgctgaccgagcggcacgacgacctggtcaacgaacgcacccgcctcaccaaccggcttcatgcactgctgcgtgacctgctgcccggaggggctccgacccggctctcggcggacaaggccgccgccctgatgaagggcatccggcccatcactgcgaccgacaactgccgacgcgacctcgcccgcgatctgctggcagaccttcgccggctcgaccggcaggtcagggacaacgaagcgcagatgcgcgaagccctcgcggcttcccgcacgacactgaccgcgctgccgggcctcgggactgtgctggccgccagagtcctcggccacatcggcgacatcagccgattccccacggaacaccacttcgccagctacacgggaagcgcgccgctggatgcctccagcggccggcatgtccgtcaccgtctcaacaccggcggcaaccgggccttgaactcggcactgcacatcatcgccgtctgccagatccgggacggcggccgcggtcaggagtactacctgcgcaagatcgccgaaggaaagacacccgccgaagcccgtcgggccttgaagcggcgcctgtcgaacgtggtctatcggatcatgaagcgcgatcaacgacaccaactcgcagcagtcgcttgacacacagaggcg

SEQ ID NO: 5912 - DNA, 1502 bp, unidentified
  source 1..1502: mol_type = unassigned DNA; note = element_91d374c
  misc_feature 1..4: note = core
  misc_feature 5..253: note = LE
  misc_feature 254..1492: note = CDS
  misc_feature 1493..1502: note = RE
ctcactgctgcaccctcctcgtgtccgggctgtgtgatgagagggttcggatgcaccgctggtggccaccgggtgatcgccctgctcgctcgaccgtcgaggtccggcatgagttctgcggggcccggtggtcccggccacgccgactggcgacagggctgagcgccaacgagcgccgatcagtgagcgaccggctgccgtgtccgggaaccaccgggtgccttcccactgctgcaacagcggaaaggcaacgatgagtgtcctgcacgaccctccccgcccgcgaccgaccgcgggcatcgactgggccagcgacaaccacgcagtcgccgtcgtcaacagcgacggcgcgcagctcgaccggttcaacgtggcccacaccgcgaccgggctcgggcagctgtgccggcgcctcaagcgcgccggtgtcaccgaagtcgcgatcgagcgcagcgacggcccgatcatcgacgccctgctcgacaccgggttcacggtcttcgtgatcccaccgatccaggtcaaaaacctgcgcagccgctacggctcggccggcaacaaagacgaccggttcgacgcctacgtactggccgacaccgcccgcaccgaccgacggcgactgcgccccctcacccccgacaacccggccacggtgaccctgcgcgcgacctgtcgggcccgcaaggacctggtcggacaccgggtggcgctggccaaccaactgcgcgctcacctgcagatcgctttcccggccgcggtcggcctgttcgccgacatcgactcgaagatcaccctggcgttcctgcgccgcttccccggccaggaccgcgccgactggctctcgcccaaacggctggccgcctggctggccagtgtcggctactgcgggcgcaccgacccgagcgtgctgcacgcccggctgaccagcgcgccccgcggcctgaccggacccgacggcgaggcccgcgttcagatcaccctcgccctcatcgccgcgctcgaggccatccgcacccagatcgcagcgctggaagaccagatcgaagaacaactcgctctgcacccagacgcagacatcttcaccagcctgccccgcagcggacagatccgcgccgctcgactgctcgctgagatcggcgacgcccggggccgcttccccacacccgaaagcctggtctgcctggccggggtcgcgccctcgacccgacaaacgggcaagatcaaaatcgtcagcttccgctgggccgcgaacaaacaactccgcgacgccatctgcgacttcgccggcgactcccgccacgccagcccctgggccgcccagctctacaaccgcgcccgcgcccgcgggcacgaccacccacacgccgtgcgcatcctcgcccgcgcctggctgcacgtgatctggaaatgctggcagaccaacaccccctaccaccccgcccgacacggcgccgcacaagccctcaaccgagatcaacacgcgacggcttgacacagggcta

SEQ ID NO: 5913 - DNA, 1797 bp, unidentified
  source 1..1797: mol_type = unassigned DNA; note = element_91d3783
  misc_feature 1..2: note = core
  misc_feature 3..119: note = LE
  misc_feature 120..1382: note = CDS
  misc_feature 1383..1797: note = RE
  misc_feature 1471..1711: note = bridgeRNA
agcattcctgtagatagttatttttgggctttgataaaaagagagtccctcagtaagatattagtatagacaccactctaactcaaaccttaaggaggaagctcaaatagaagtttaaaatgcaagacaaacaaaatcaactaatagaaagaatttctgataaacatctggttgttggggtggatattgcccaacaattccatgtagctagagctgttaattaccgaggtatcgtagtaggagatcctcttacttttgaaaacagtgaagttggcttttcattctttatggagtggatacaaaggctccaaaaattaaaccaactagattcaattatagtaggtatggaacctacgggacactactggataaacctctcaaagtggctaattaaacagagtgtggaggttgtaacggttaatccccacttagtaaaaaagaataaagaaaaccgtgataacactcaatcaaaaagcggtaaaaaggatgctttagttattgctgatatggtgaaaaatggttattactcttttgtgcgtcacacatcagagtcatttgaaaaactaagggttctaatgtctaatcgagatattgtggttaaacgactagtaatgtcaattaatcaattaaatcgttgggtggatatggtttttcctgaactaaggcaagtatttaaggatatatcgaaaaaaggtgctattgctacacttcgtctatttccttcaccaactgaactgcgttctttaaaacccgaggacgttgttacagggtggaaatctattatgaaaaggcagcctggcctaaagaaagctcaattaataattaatcttgccaaaaagtccatcgggactggacaagctcttgatgctcataagtttcatctggaacaattattagaggaatatgatcttgcagtttgtcaactcgaaagagttgaactagctgttaaggaagtgttaaaacaaataccgtttgccaagaagttgcttacgataaagggtatcagtgaaatatcattagctggaattcttggagaatcaggggatttaagtggcttttctcacggaaactcactacttcgacatgcagtcttacacctatctgaagcaagttcaggtaagtggagagggcaaattatcatatctaaacggggaaggtctagattacgaaggtttcttttcttagctacaatgagtttagtagcgaataaccccgaatttaaagcaattcatgccaacaatgtgaatatgaaaaaaatgaaaaagatgaagtccattttgaaattagtaggtaagcttgcacgtatatttgtcggaattgcacgtcggaatgagacatattgtcctggtaaagttcacattttactcgatcaagctgcttaaaaatattatgaagtagacggatttgttctcgaagagaactttatagaattactattatatacgaatgttggcttatttgcaggatgaaaatatgtacggagtaccaggtttattcaacaaaagggcactgacccattagtttagcacaactggcctccaccccttggataggcgtaacgaaggaatgatagggcatatgacccgttgagacatgggagggaaagccgccaggggccgcgtggagatgtacattatatggtagaatatggagttgaatggaactcctctatttaaacatgtcttcatgaagcctaagcgtcttatttcactccatctttttgcatatacaatcttaagggttatgaaatcctgcgaataagcgagcattcgtgagaaaatcgtattaaactgaggg

SEQ ID NO: 5914 - DNA, 1560 bp, unidentified
  source 1..1560: mol_type = unassigned DNA; note = element_91d659c
  misc_feature 1: note = core
  misc_feature 2..336: note = LE
  misc_feature 337..1320: note = CDS
  misc_feature 1321..1560: note = RE
  misc_feature 50..270: note = bridgeRNA
cagggaggatgtgggtaagtgctccggccctgcttccgaggctttgcggtgatgtgggcgtagggtcgggaccgggtcccggcctgacctccgaatcggccgacgccgctcgggctgtcttgataacgatctgtcggccgggccccagtctttggcacccaccggcgctgccggtctgatctgcctggcctggctagaggccggggttcacaggtccgggcggccagcgggtgcgtgccatccctcaacctgagaaagggatgacagtgaccatcgtagagacaccagcgcaggcacgcgccatcaccggtggcgtggatacccacgcggaggtgcatgtcgcggctgcgcttgacccggtcggcggggctgctcggcgtccaggagttcccggccaccccggctggttatgcccagctgctgagctggcttcacggattcggcaccgtgtgcctggtcggggtcgaagggaccggcagttacggtgccgggctggcccggcatatcaccgcggctggtgtgcgggtggtagaggtggaccgtgccgaccgccaggaccgccgccgtcagggcaagtccgacccgctggatgcggtcagcgccgcccgggccgcgcagtccgggcgagcggccggcgcgcccaagggccgcgatggtgcggtggaggcgatccgggcgctgatggtggtcaagcgcagcgcccgcgccgggcgcacccaggcgatcaaccaggcccgggccctgatcctgaccgggcccgatgacctgcggatccggttctgcgggcacactcccgccgagctggtcgccgaactcgccacgctgcgccctcgccccggcgccccggtcggctaccccacccggatcgccttacgcgagctgggccgccgcgcccagttcctcggctgccagctcgagcgccttaatgagctgatggtcccgctggtgaccgcccgcgcccctcggttgctcgccctgtatggcgtgggcgccgacaccgccgccatgctcctgatcgccgccggggaccaccccgagcggctccgctccgaagctgcctgggcgcacctgtgcgcgaccgcgccgatccccgcctcctcgggcaaggtcacccgccaccggctcaaccccggcggtgaccggcaggccaaccatgccctgtggcggatcgtgatcacccggatgagcgcccacccggccacccgcgcctacgtggcacgccgcaccaaggaaggcctgcccaggaaggagatcatccgctgcctcaagcgttatgccgcccgcgaggtttacccgcacctgcgcgctcccgccggctgacacaagctcccggggacggcctggccctctaatcggctgccgcctgccgctggccttcgaacgattcgccggccgtccccgggctcccatcccggcttgctgagcgtgacctcataagagcttgccctccccacgagcggcccctccctgtcttgtccgcgaccagcagcaccacttcgaaccattcggtcatgacgaatcagaaacgttactccaagcccttgacaaccataggagcat

SEQ ID NO: 5915 - DNA, 1432 bp, unidentified
  source 1..1432: mol_type = unassigned DNA; note = element_91daad1
  misc_feature 1: note = core
  misc_feature 2..58: note = LE
  misc_feature 59..1096: note = CDS
  misc_feature 1097..1432: note = RE
  misc_feature 1208..1426: note = bridgeRNA
taatgggatggtccgccgcttcctccgcggtataagaggcttacagaggaggcatcccatggagattcacaccgttggcatcgatctcgggaagacagtcttcaacctggttgggctgagtgttcagggtgaagtcgtggtgcgcaagaagttttcccgcaagcagcttttgcatttcactgctaacctgcgcgttggcttgattggcatggaagcgtgcggaggagcccacttcctgggccgggctcttcgtgaacaggggcatgacgtacggctgatgccggcacagtatgtgaggccgtacgtgaagaccaacaagaacgactacatcgatgcggaggcgatcgccgaggcagtgagacggccgcgcatgcgctttgtgccgatcaagaccgacgagcagctggacatgcagtctctgcaccgggtacgcgaaggctgggtggggcgtcgcacagcggtgatcaaccagcttcggggattgttgctggagcgcggtattaccgtgcgcaagggacgacgtcatatcgaagatgctttgcctgggatcctggaggatgcagacaacaagttgtccgcggcgttgcgcctgctgctttttcagctttgttcagagatgaggcatttgcaaagccagatcgacgaagccgatgcagtgatcctgaggatggccagcgaggacgaatcctgccaaaggctggatgaagttccgggtataggaccggttattgcaaccgccacgatctcagcgattggaaatggggcagcattcaagaaggggcggggctttgctgcctggctgggtctggtgccaggcgaatactccaccggcggaaagcagaagctgctgggcatcagcaaacgcgggaacagttatctgcgacgactcttcgtccatggagcgcatgcggtcatgcagcaacgagcgaagcaatcgtccgggctacgccagtggctggaacagttgtcagcgcgtgtccatcgcaatgtggcagtggttgctctggccaacaaactggctcgcatcgcctgggcggtgctggccaaaggggaaagatatcgcccgtcgcttttggctgaaggagtttgcgcatgacttaactggcctgcagatgccgcctggcacaaagtgccaggcttggaaatcgctaacgcgattcccacatccgcagaccaacgacgactgatctgagtttggagattcctgccaggtttgctggcgaaacatgagatggcataacggtcgatcccggcgctcccgaaaacctgcactcggaaaatgccttaaaaggcagcgttactaaaaaggacgagggcgcagcgcattccattcaggccaggagatcgctactccaattaaggccgaatacattcgcgcaggccaattctgtcatcctcactcttcgcttgcaaaacggcggcggaccataca

SEQ ID NO: 5916 - DNA, 1233 bp, unidentified
  source 1..1233: mol_type = unassigned DNA; note = element_91f00e5
  misc_feature 1..2: note = core
  misc_feature 3..260: note = LE
  misc_feature 261..1211: note = CDS
  misc_feature 1212..1233: note = RE
  misc_feature 31..214: note = bridgeRNA
cttatatgttgaaagtgttctccagaagtggagaatttattaaggacgcttagtaaagggataaagagatcttgctaccaggccaatgacacccagagtgatccaggttatcagattaagacctttatccccacacactataaactgaacggtatcttaggcaggacaagactcctagcctgtattcataaggttagtatagccatagtgtgaacttactaaacgaaattaaatcctagcataaaataggtatttcgaacatgaaaatatacatcggcatagacatcagcaaagacacctttgacgtagcggtttcaactcaaaagcaaagtgtcacttttaataacaccccagcggggtttaaaaagtttatcaaatggatgagcctttttgattctccacacatcgcgatggaagccaccgggaaatactatttaggcctcgcattgcatctttacgaacaagaataccctgtgtatgtgatcaacccatttaaaatcaaacattatgctcaatccaaactaaagcgtgttaaaaccgacagtgaagatgctaagctcatcgcagatttttgtgaagtacacaaactcaaaccttggcagcctgacagtccgattatcgctaagctacaagagttctcagcacttcaatccttgttaattcaaacaaaaacccgcattaaaaaccaaatgcaaagttcgacagaaattgaagtacagaaaattcaaatagctcagattaaacagttagaaaagcagattgaaaagattcaatcccaaatgaaaggctgcgttcaacaggatgttgaattggctaagcagatggcattattaaagtccattaaaggactgggtgaaaaaacagcgattgaactcatcactcatatcaaagacatttatcgttttgataatgcaaaggccttagcctgttactctggtcttgttccacaaatacagcaatcgggtagtagtttaaatcgctcatcgctttccaaaatgggcaatgcgaatttaaggaagtgtctctacatgcctgcggtaaatagtattgcatacaaccctgtcttaaaagcctttgcagacaacctgagaaaaagaggggttgcaggtaagaagatagttgccgcggtaatgcgcaaattaattcatctggtttatgctattctgaagagtggtaaaccctttgatccagaatataagattggtgcttgactatgaaaatcaaacacggtat

SEQ ID NO: 5917 - DNA, 1632 bp, unidentified
  source 1..1632: mol_type = unassigned DNA; note = element_91f107b
  misc_feature 1..2: note = core
  misc_feature 3..178: note = LE
  misc_feature 179..1453: note = CDS
  misc_feature 1454..1632: note = RE
ggggtcctatataaagaacgagcacgggtatggctcccgttgccagcctacgtggcttcggggggaatgccgcccgtgctcgttgagccatgcgcgctgtctgataaggaccttgccccatggctgatagaggcttggcagcgcgcggcacggtcattgtattcgaaagggggtccgggtgagtgagcaggaggtcagaatcgtggggttcgattgcggggaggacgagcaccaggcggtgttgttggatggcgaggggcaggaggctttccgtgtcgccatgaccaaccggagagaccggattgaggaggggtttgcgctgatattgctgagggtgccgactggggcgaagctggtggtggctgtggagtcgacgcgatcgcacggtcggctggtgacggaggtagcgaagggtcttgggtgcgaggtgtggcaggtcaacacggtagctctcaaccattttcgagccgtcgaggggcagcctcgcaaggatgatgtgcgggatgcctacctttgcgcgcggatggtctacctgcgcatgcagggagctcggatgaaggttgagatctcggacgaggaacgggtcctgagccgtctcactcgagcttactcgcggattatggaggcgcggacgagggcgctacaagcgctgcacgcgatcctgttggagctggcgccggaggttctgcacaggcattgggacgggcccaaggtcaacagcaaggcgatgttgtacctgctggagcgctggcccggtttcaggggcctggagcgtgcgcagctgcggagcatcgagaagatcctgcattcctgtcggtacggtgacagggccgccgatgtggcgaagtggctgcgcgatgtggcccgacggatcggaatgtcgaatgaggagcgtcgcatcgttaccttggagatgcagaatgccgtcgagcagattcggagttgcgacgccgcactcgggcaactcaagcaggagatcagcgagcgggtgcagcggcatccggtcggcgtcaggctgctggagatgccgggaatcggcgtgatcgtggccggtgtgctcatcggggagctgctgcccgtggcgcggaccagtagggaggctcagagtgccacctattccggggtgacgccgcttggcaggaagagcggcaagtcattgaataccagcagcttgacgagaggtgtcaacaagtgggttctgcacgcgctctacacttcggcggtagcggcaaagaagtgcagcgctatcgacagggcgtactacgagaagaagctcctcggctatgccggccacaagaagccccacgtcgcggccttcatcgccctcggccgccaacggcacaaagtgatcttcaagatcctcaccaccggcgcccgctatgacaaggagaccctcatctccagccatctcgaacggatcaaggaccagcagcagcacgaggccgcggcatgacccgcccgcccaccccggctatgactctgacggcctgtggaaagctggcccccacccgccccgcctccaccttcccacaggccttggaaaaccctccgggtttcccacaaactcacagccccgacgacgagatctcttcccacgaaagaaacacctcggaggggttgacttcttataga

SEQ ID NO: 5918 - DNA, 1374 bp, unidentified
  source 1..1374: mol_type = unassigned DNA; note = element_91f5e6c
  misc_feature 1..3: note = core
  misc_feature 4..84: note = LE
  misc_feature 85..1116: note = CDS
  misc_feature 1117..1374: note = RE
  misc_feature 1142..1362: note = bridgeRNA
tgatgcggtggacggctcccacccgccggcatctaggtgccaaagttgtggtttcggtgaaccacggggaaacaggagccgtccatgagcgaagttactacgatcgggatcgatcttgcgaagaccgtcttccaggtgcatggcgttgacaccgatggcgcggtggccttccgtcgtcaattgaggcgccgtcaggtgctggccttcttcaagaaacagtcgccctgccttgttggtatggaggcgtgtgcgaccgcgcattactgggcgcgggaaatcgcggctctgggtcatgaggtcaagctgatgccgccacactatgtgaagccctacgtaaagcggaacaagaatgacgctgccgatgcggaggccatttgcgaggccgtcacgcgcccgacgatgcgctttgtcgcggtgaagagcgccaagcagcaaagtattctgatgctgcaccggacccgcgagctattggttcgccagcgcaccatgctggtcaacgcgatccgggcgcacatggtggagttcggcgtggtggcgcgggtcgggctgccgcaggtcaaggacctgctcgcagtgatcgccgataaggaggatgagcgcatcccacccctggcgcggacttgcttggaaggactggcgcggcagttgctatcattggagcgcgggatcgtcggcgccgagaggcgtatccacgcctggcaccggacgaacgaagagagccggcgtctcgaaaccacgcccggcatcggaccgatcaccgcgagcgcactggtgtcttcgattgctgatccctctatctttaaatcgggtcggtcaatggccgcctggatcggacttgtgccaagacagaactcaatcggtggcaaggcacgcatggggcggatctccaagaagggagatcaatatctacgctggctgctggtcgccggcgccatgacggtcatccgccacgctaagcgacgcggcacgaccgatccatggcttgccggcatcatcgccgccaagccgaccaaggtcgcggccgtggcgctggccaacaagaacgcccgcatcgtctgggcgcttctgagacagggcgcaacatatcaaaagcccgtaaccggttcggttgcttaggcctcatacgggccaaaggagtcaatgagattggcagggtgaacgtgaggtattgcaaaatcggtcgaaccgagggtcgggaaaacccgtttgggtcagggcgcatcaagcgcgtgcttatgattgggacccgatccagcggatcgcattagggccagcggccatgtgggccgcatcaacaggccggacacatggcagcacccgaccactttgcaacaacctcaaaactatccttgccaaaagggagccgtccacaca

SEQ ID NO: 5919 - DNA, 1337 bp, unidentified
  source 1..1337: mol_type = unassigned DNA; note = element_91fba6f
  misc_feature 1: note = core
  misc_feature 2..275: note = LE
  misc_feature 276..1328: note = CDS
  misc_feature 1329..1337: note = RE
  misc_feature 104..260: note = bridgeRNA
ctctaactttgcagtatcaaagagattggtgagtactcgttcaagaaatctcatgaaaaactttgatagaccaggccaagttcttacctttgttgtataaaggaagacaggcctcccggagaggtaaactaatggaacaccggttttagaaaaccatcctctgcgatagccctctccgggcgagctgcaaaggcaaaatagattgtgaggcatagaagcctatttagagcgtgagcctatacagccgtggccggtcttaatataaagacaaaagtatgaaaaaaatctcaatcggcattgattttgccaaagaaaaatttgatgcgacggtaatgaacatggaaacgggaacgtctgtctggcggcaattccccaacacccgtggcggcggacgtgaccttgtccgcatggttaaacgtcaggccaacggtatcccgacggaccaatggctgttctgcggcgaggatacgggcaactacagccgccttatctccgactatctggcagagaaaggctatttcatgtggcttcagaatccgtactgcataaagaagtcggaaggtatcatccgccgcggtaaggacgaccgtgccgactctgcggttatcgccgagtacgcgatccgctatgcggacaaggcgacgagatatgagcggccgcctgaggtgataagccagatcaaggctctgctctcagcacgtgacagtttggtaaagaccaggatggctttagccaacaccgtgtcggagatacccaaggctgacagacagggcgaggccgtgacacttatcaagagttcgacaaagagactgattaaagatgtcgaaacggagatagagcgcatggagcagaagatagacgagctgctccaaaaggatgaggacataagccataacagcgagatattacattcgttcaagggtatcggaagaatcaatgcggcatacttcatcgcattcaccaacaatttcaggaagttcgacctcgatccgaggaagattgcaacatattggggagtggcgccattcgccagacagtcaggaacggcacttaataccaagcctcatgtcagcaaattctgtaacaagaagctcaaggctgcaatttcaaattcggcaaactctgccataatgtggaacaaaccgttcagggaatattacctgagactcatggagagggggaagtgtgagggtatcgcaaaaaacaatgtaaaaaacaaaatcatccagacattaacggccatgataagaaaaggggagaaatacaatcctgactttatgcttacaacaaaagcaagtgttaaatgtgttaattctcttggttcttaatatagattg

SEQ ID NO: 5920 - DNA, 1425 bp, unidentified
  source 1..1425: mol_type = unassigned DNA; note = element_91ffd11
  misc_feature 1: note = core
  misc_feature 2..130: note = LE
  misc_feature 131..1168: note = CDS
  misc_feature 1169..1425: note = RE
  misc_feature 1187..1424: note = bridgeRNA
atgatatgaacgtctcccacccgcgacaggtaagagcaatgaacgaacgtggcgcgcgggccgacggcatcagggtgtccgaagtggaagatcatagaggtcttcacgtcaggcaaaccggaggtctgaaatgaaacttacgccagttggaattgacattgccaaggcagtctttcaggtgcactacgtggatagcgcaacgggcgagatcgtcaacaaaccaatcaagcgtgcaaagttccttgaacacttcgcgaaccgcgagccctgcctcatcggaatggaagcgtgtgggggcgcccaccattgggcaaggcaactgaccaagatggggcataaggtcaggctaataccagcgcagttcgccaaggccttcaacatccgcaacaaaaatgattcggccgatgcccgggcgatctggcttgccgtgcagcaacccggcaagccggtggcgatcaagaccgaagcgcagcaggccgtactggcgctgcaccgtatgcgccagcaactggtcaagttccgcacgatgcagatcaatagcctcgggggactactgaccgaatacggcgaagtgatggccaaggggcgcgctgcgctcgacaaggcgataccggccgtactcgccaaggtcgccgaacgcctacctgccgtgctgatcgacacgttgcgtgagcagtggaacggtctggccaaactcgacgggcagatcgccgagatcgagcggcggctcaggcaatggatgaaggaggacaagtcggtcaacgcgattgccgaaatcccgggcgtgggcgtgttgatcgcgactgctgcggttgcgactgtgggcgacgcaaagacattcaaatcgggccgcgagtttgccgcctgcatcgggatcgtaccgaaacagtcgggctcgggtggaaaggtgaatttgctcagtatatcgaaacgcggcgatacttatctgcgcacgctactgattcacggcgcacgaagcgttttgtaccacgcgaaggatcccagcccatgggtcgaacagatcacgaagcgccgtccagcgaatgtggtaatcgttgcgctcgccaataagatggcgcgaatgatttgggccatcctggcccacgaccggtcatacaagaaggactatgtcagcgtgaagtcggcagcaacggttgcgactacgtaggagattaacttttaaacgacgatatgtcgaaaggttgcgcaggaaatcgcatgtgatgacaagccaggtcggaccgggactcgccaaacctgaatagctggaggagcttcgagctcgttgcagaaatgaggtgtgagtcagcggatttcataggggcccgcagcgtatctggctgcaaaaaggccggatataaacctgcaacccaccctgattgccaaaacacacgaaaacctgcacaaacgggagacgttcatata

SEQ ID NO: 5921 - DNA, 1395 bp, unidentified
  source 1..1395: mol_type = unassigned DNA; note = element_920f6f2
  misc_feature 1..2: note = core
  misc_feature 3..79: note = LE
  misc_feature 80..1120: note = CDS
  misc_feature 1121..1395: note = RE
  misc_feature 1126..1382: note = bridgeRNA
tgttggggtggacggcccccgacggcatcgcaatgtgccagaatgaggtcgttgcaaatctcaatcaaggagaccgtccgtggataagattattcgcattgggatggatacgtcaaagaacgttttccagctccatggcgtgaatgaagccgagcagcctgtgttgcgcaagaaactgcggcgcaatcaggtgctcgccttctttgccgggcttccaccgctgaagattggcatggaggcttgcggctcggcccattactgggcgcgggaattgcgcgcgctgggccatgaagtggtgttgctgccgccgcagtatgtgaagccctatgtcaaacgctccaaatcggatgcagccgatgcgcaggcaatctgcgaggccatgagccggccagatatgcgtttcgttcccaccaagagcgccgctcagcagggatcgcagatgctggcgaagctgcgcgcgcagttcatcggccggcgcacgcagctggccaattcgatccgaggctttgcggcggagttcggccttgtcgcgcccaagggactttcccggctcggcgatctgctggccgacattcgcgctgacgcgacaatcccggacacggccagggacatgttcgagaccctggcgcgcgactatgcgcacatcggcaccgaagtcgccacgctcgatgagaagctgcttgagcttcacagacagagcgaaatgagccggcgactggccgccataccggcgatcggtcctgtcggagcgacgctcctggctatcaaggttaccgatgcacacggcttcaagtcgggacgggactttgccgcctggctcggactgacgccgaagaaccattcaacagcaggcaaaaacaggcttggggtgattacccgtgctggcgatgagatgctgcgaagcgtgctggtggtgggcgccaccgctctcatccaacatatgcggcgcggcagcaaacgggtctggccatggctgtcggcgctgatagcgcgcaaagctcccaagcttgctgcggtggcgctggccaacaagctggcccgtatcgcctggaaactgatgatcagcggcgagcaatatcgccccgtcgacgccacctgtccggcacctgtgcagccgtagagcattcagaattcggcgccgagcccacactcgacgctgaaggccggaacttgcaagcagaggagaagatggtgtgaccggtcgaaccgggaccagcgaggcattccgaggtgctcaccggcagccaatgtcgtgtacgtgtttggaactcgctatccgcgtagcccatcttggccagcgctctcagatccgcgcgcaaaaggccggacatatgagcgcaagagacccgatcaaactatctcaaccatccttgcaagcggggggccgtccacata

SEQ ID NO: 5922 - DNA, 1550 bp, unidentified
  source 1..1550: mol_type = unassigned DNA; note = element_9212000
  misc_feature 1..2: note = core
  misc_feature 3..245: note = LE
  misc_feature 246..1421: note = CDS
  misc_feature 1422..1550: note = RE
  misc_feature 3..225: note = bridgeRNA
ctcgtattatatagtcatagccattctttaccttttctataggttaggctatgcttgttttagatactgtggattagtttttatctcctaccacttgatggttttgtaaaggctctaaccacagtctctttgttcatttgttaatcagttagataccgcatgacggtttatttagaacgaggttacaatcgcaaagagcaaccgtggtctaaaacagtatcgaatatatttcaatggaggtttttatgatttttgttggtattgatgttgcaaaagataaacatgattgctttatcacaaactcagatggtgaaatcctgtttgatgccttcaccatctcaaacacccttgtcggttttgaatctcttatccagaagatccaatccactactgaagatttatctaaagtaaaagtaggactagaagccactggacactatagttacaatcttcttggatatcttcttgataaaggtttgccgacctatattatcaatcccttacattctaatctgtacagaaaaagtctaagccttagacagaccaaaacagataaggttgatgcaagagtgattgcttctatgatgatgtctgatgtgaacttaaagtcctactcagatacatcttatcacaatgaagaattgaagtcattaacacgctatcgcttcaaaactgtcgctgatcgttcaaaactgaaagtctctataaagcgacttgtaaccatccttttccccgaactggaacacttggttcctacacttcatcttgcttcggtttatgcattactctctgaatttccgagtgcatcagctatcgcctcatcgcaccttactcacttaatacatcttctggaaatctcctccagagggcattattcaagggatacagccattctaatccgcgatgcagccagaagttctatcggctctaatatgccagctaaatctcttgaactgaaacatacaatccggcatattcaagaattaagttctgaaatcagcgaaattgaaggtattattgaagcaatgatggatgagatcaattcaccaatcctcagtatccctggcataagttatcgtatgggcgcaatgattattgctgaaattggtgatttctcttgcttttcttctcctgacaaaatccttgcatatgcagggttatcaccatctacttatcaatccggaaagtttgaatcaagctattcccacttggaaaagcgcggttcacgatatctccgctacgcattattcaatgcaacgaagtatgtttgtatatgggatccaacgttttcagcatacttcgccaagaaaagagcagaaggtaaacactataatgttgccatctctcacgctgcaaagaagttggttagaataatctaccacctcgaaaaaactggtcagctctatattaaaactgcttagtcctcagagttcatgtattctttagagcaccagaaaggatgctctgttcgtcatgcagttttcaatgttcatgtatcaaaatatttttctgtactccaatgatttcctacttgacttttaatagttagt

SEQ ID NO: 5923 - DNA, 1766 bp, unidentified
  source 1..1766: mol_type = unassigned DNA; note = element_9212304
  misc_feature 1: note = core
  misc_feature 2..326: note = LE
  misc_feature 327..1613: note = CDS
  misc_feature 1614..1766: note = RE
agatttcattcgccactgcgtggcgctgccgtgaggacgataactgggtctcctcctgctggtgacggggtggggggtggctgggggttctggcggcggccggcgcggaaggtgcacagttgtggtgacgcgccgccggccgtcagcgttttcgcttggactctttgaggccgtggcccagattgctgccgggccctgtgctgggtaacccccgttgctgctgcgtgcgcgtgtgtcagtctcctgtactgacctggggccctggccggcggtgcgcctgttcccatccggtgggggggttgccgctgcaggaggtggccgcgcagatgaaggtgctgtatgagcgcgtcgcgggaatcgacgtgcacaaggacatgatcaaggtcgcgatccggtccccgggcgaaaagccgtggacccgcaagaccgaggtgctgcagttccgcacgttttacggtgtgctgcgggagacggcccgtgagctgcgccggcggggtgtcacccacgtggtgatggaggccagcggggtctataccgggccggtgtattacgcgctggccgagcaggacttcaccacggtggcggtgatcaacccggcgcatgccagggcgctgaggggccacaagaccggcgcgaaagactgcgcccggctggcggagctgttcgagtgcgggctgctgcacgggtcgtacatcccggccccggagctgaaggaggtgcgggacctgacgcggtaccggatcaagacggtccaggcccgcacctccgagatccagcggctggctaaggcgctggaatcggccgggatcaagctcggctcggttgccagcgacattaccggaaagtcagccacggcgatgatcggggcgctgatcgacggggagcgccgcgggcaggtgctggcggacctggcgatcggccggatgcgcaccgcggggaagctggccgacctgtccatggcgctgaccggccggttcagcgggcatcacgcgatgctgtgccggctgcaccgggaccggatcgaggtattcgatgccgccgtcgccgggctggaggagcagatcgcggccaagaccgtgccctggcagaaggagctggacctgctcaagaccatccccgggttcggggacgcggtcgcgcaggcctggctgggcgagatcggccccgccccgcaccagtggttcgccagccatgagaagctcgcctcctgggtgagcctgtgcccgggcaacaacatcagcgctggcaagcgcaagcacggccgcaccggcgacgccggcacctacctcaagccgctgctgatccaggccgcctgggccgcgatccgcagccagggccggctgcaggcccgctaccggcggctggcgcgccggttcggcggggacagcagcccggccgctaagaagaaggcgatcaccgcgatcgcgcacaccctgctcaagatcgcctaccaggtcctcaagaccgggacgccctaccaggagccgggcgccgacttctacacccggcgggaatcatccgccgcacgccaggcctacctggaacgccagctccaaaagctgcacccgggggccaccatcaccatcaccatcagcccaccggaagccgcctgaccggcaccgcccggccacagatcccgacccccggagccgccgccagacccggcaccccggccattccgccggacagccaaacgccatccccccttgccgccgcacggccaaggttcgctgccgcgcgcccaacggagacccagttatcgtgtc

SEQ ID NO: 5924 - DNA, 1586 bp, unidentified
  source 1..1586: mol_type = unassigned DNA; note = element_92136ed
  misc_feature 1: note = core
  misc_feature 2..89: note = LE
  misc_feature 90..1130: note = CDS
  misc_feature 1131..1586: note = RE
  misc_feature 1346..1584: note = bridgeRNA
taatggaatggtccgcctcactatccaaacggcttcaaaagagccaagatgttacatttaaccaaacatcaaagaaagtgaggcaaaccatgaaagattgtactgtaaagggtgacattaaagtgcttggagttgacttgtcaaaaagtagtattcagctgcatggtattaatgaatccggcaagcctgcgctgaagaaaaaatttagccgcaacaaagttactgaatttattgccaaactaccaccttgtttaattggacttgaagcatgtggaggcgcccattattgggtgcgcacatttgccaagtttgggcatgaagtacgcatgattgcgccacagtttgtaaagccttacgtaaaatccaataagaatgatgcggtagatgcagaagcaatttgtgaggcagttcagcgccctagcatgcgttttgtaccgaataaaagtatagaacaacaagatatccagagtatgcaccgaattcgtagtctgttggtatccagacgaacggcgcaagcgaatcagattcgtgggctgttaatggaatatggtgtcgtcatacccaaagggattgcttgtatcagaaaggcaataccagagatacttgaagatgcggaaaacaacttaacttcaatatttagggagttactcagcgaactctatgaagaaatggtgcatcttgatgaacgagttgccacgctggaaaagaaactgcaatcaatcagtttacagaataaagactgtcaacggctactcactatcccgggcgtgggattgctgactgccacagccatggttgcggccgttagcgacatcaaagcattcaagaacggtcgtgagctagcggcctggttgggactcgtgccaaagcaacattctactggcggcaagccaaccttgatgggcattagcaagcgaggagataattatttgagaacattgctaattcatggtggaagaacggttgttcgggttgccgacaaatacaaagataagcgtaaccgctggatcagcgaactcgatcaacggcggggcaaaaatatctcagctgttgcggtagccaacaaaaatgcgcgtattgcatgggcgttattgagtaaaaaagtaaactatgatgcggcggttgggtgagcatgagcatgatgattatcactagtctgaaaaagagcaccctcgccgggcagcaggagccggaagtttccagcccctgccttaaagagttggtctggtttggttaaatcaaggactactcgacacaagtgtctgcgttcctccttgacttacccaagccagatgtttagaaataaagtagaacagcagctgcagaaataaaagtgttgttaatcgttagcaaagaattgcgtagataagattcaagtgatggcaaaaaaggtaacacctgcattcctatgaacctgacagggtcaagggcccattgaggccgaagatttgatgaggcggggatgttgcggattccatcagggccagaggtattatttaaacctcatcccaaggccggatatatggatgcattattctttttgtcaaacagcgaattttttcttgcaatacggggcggaccatata

SEQ ID NO: 5925 - DNA, 1485 bp, unidentified
  source 1..1485: mol_type = unassigned DNA; note = element_9215b80
  misc_feature 1..2: note = core
  misc_feature 3..244: note = LE
  misc_feature 245..1465: note = CDS
  misc_feature 1466..1485: note = RE
  misc_feature 14..240: note = bridgeRNA
ctaatgaggctccggggtctgtcttgggtcagactcgggttcgggagccgccggtaggtgagcactcgggcaaccaggacaccgtggagtcctattgatagatcgtgcccctgccggtggtcgggagagttgaccgctgatgggatgtcgtgcccgcccgtggcgtgagcacttgatcattaggtcgctggtggcgctcccgctggctgcttgcaggatcgcgttgtcgaggagggaggactgggtgctgttggttggtgacgactgggccgaggaccaccatgatgtcgagctgcaagacgaggcgggacggcggctgggcaaggccaggcttcaggagggcatcgccgggattgtccggctgcacgagctgctcgccgagcacctggaccccgatgccgagcccgaccaggtcgtgatcgggatcgagaccgaccggggtccatgggtccagacgctgctcgccgccggctaccgggtgtatgggatcaacccgctgcaggtggcccgctaccgccagcgacacagcgtctcgggggccaagagcgacgccgctgacgcgcacaccctggccgacatggtgcgcaccgaccgacatcagctccggccgatcgccggagacagcgacctggccgaggcgatcaaggtggtggctcgggcgcacaagacgctgatctgggagcggacccgccacacgctgcggctgcggcacgccctgcgggagttcttccccgccgccctggtcgcgttcgtggatctgaccagcaccgacgcgctggaactgctcggcaaggcccccgatccggcgtcggcggcccggctcacgatcacccagatcaccaccgcgctcaagcgtgcccgccgccaccatgtcgccgacaaggccgcggcgattcgctcggcgttgggtgccgagcacctcggtcagccagcagtggtcgtggctgcctatgcggccaccgtccgcgcccaggtggccatcctggccaccctcaacgccgagatcacgaccatggaggagcaggccgaggcgcattttggccggcacccggaggttgagatctaccgcagccagcccggcctgggcgagatcctcggcgcccgggtgcttgccgagttcggcgacgaccccactcgctacgccgacgccagatcccgcaagaactacgccggcacgagcccgatcacccgccaatccggcaaaaagcagttcgtgctggcccgctatgtccacaacgaccggctcatcgacgcgctgggacgccaggccttcgccgcgctgctcgcctcaccgggcgcccgtggctactacgacgagctccgcggccgtggcgtcggccaccacgccgccctgcgtcagctcgccaaccggctcgtcggcatcctccacggctgcctcaagacgggcaccacctaccacgaggcaaccgcctggtcgcaccgccaactgaaggccgcggcttgacatcaagacgcatgggatgt

SEQ ID NO: 5926 - DNA, 1615 bp, unidentified
  source 1..1615: mol_type = unassigned DNA; note = element_921e079
  misc_feature 1..2: note = core
  misc_feature 3..276: note = LE
  misc_feature 277..1494: note = CDS
  misc_feature 1495..1615: note = RE
  misc_feature 14..296: note = bridgeRNA
ctactacaatatatttatggttaataccccttacagccagtaaggaattatccatctcgttgcttaagctgttagaatgagtaaggcaataggtctggcttctcctttccaggacttagcgtccgtaaaacagtcagccaaccagccctcattcgcagcattcgttttgcgcaggttgaacccataggcgttcgtgtgatacccagtagattgaacaggcaatgagtaaatctggcaaaagaccattgctaatacagttttaaaggagtatctgttatgaacgctgttggtattgatgtttccaaaggtaagagcactgtcacaatccgcagacccggcgatattgttatcatgtctccccgcgacattccacatacacagtccgcgattaatgcactgatcgaactgatcagcggacttgacggggaaacgaaagtctgtatggagcacaccggaaggtactatgaaccggtcgccacatggctttccgatgccggtatctttgtcagtgctgttaatccaatgctcatcaaagactttggggatgattcccttcgcacacccaagaccgacaaagctgattcccaaaaaatcgcacgctatactcttgaccgatgggcgaaactgaagcagtatggaagcatggataaaacacgcaaccaacttaaaaccatgaaccgccagttcggtttctacatggctcagaagactgccatgaaaaacaacctcattgccctgctcgaccagacctatccgggtgtcaatggcttctttgacagccctgcacgcagcgatggcagccagaaatgggtggatttcgtccatacctactggcatgtagactgtgtccgctctaaatcactggatgcctttacagagcattaccaaaactggtgcaggcgcaaacgctataacttcagcgccgataaagcagcgaaaatttatcagctttcctccgacctgatcgccgtattcccgaagaacgacagcacgaaactgctgattcggcaggctgtagcaatgctgaataccgcttctgaaactgtggaatccctccgcctgaaaatggacgaaaccgcttccctgttgccagaatatcccatcgtcatggcaatgaacggtgtcggacctacccttggtccacagctaatggccgagatcggcgatgtgacacgcttcacgcaccgcggggcactgactgcttttgcaggcgttgaccccggaaaggacgattccgggcagcgtgtccgcaaaagtatgcctaccaccaaaaaaggttctccctatttgcgcaagaccctcttccagatcatggacggtcttatcaagcgttcccccgtgggtgatcccgtttatgctttcatggacaagaaacgggcgcagggcaagccttattacgtttacatgactgccggagcgaataagttcctccgcatttattacgggcgggtaaaggaatatctttccacgcttacagaaagcgaagaaacctaaaataatgctgttatcttttatcagaccagcgttctacggtggtctttttgtagcgcttatttttcaacctgtataaacttttcaaagtacatcaatttctgcttgactttttatttgcaga

SEQ ID NO: 5927 - DNA, 1428 bp, unidentified
  source 1..1428: mol_type = unassigned DNA; note = element_921f4ea
  misc_feature 1: note = core
  misc_feature 2..230: note = LE
  misc_feature 231..1100: note = CDS
  misc_feature 1101..1428: note = RE
  misc_feature 1197..1422: note = bridgeRNA
gaatgaaatgaactccccccacttaacaccagccccataccggcgtaaattaaagtggacaccatccaccagaggagcaaatttcatgaatcttacaacactcggtattgatttggcgaaaacttcattcagtcttgttggcatggattggcaaggtgatcttacgcaaaactttgaagcgggatgccttgatggcgtttgttgcgcaatgtccggtgtgctagatcggcatggaggcttgtggtggtgcacattactgggcgagagaatttcgaaagctggggcatgacgtgggcgtgatggcagcaaaattcatcgcaccgtttcgtaaaggtggcaagaatgacaacaacgatgcggaagcgatttgtgaagccgtcaatcgtaaaggcatctggtttgttccggttaaaacagcggatcaacaagcctcactctgcgtacatcgtattcgacaaggtgtgattgccgagcgaacagcgctaatcaatcaactgcgtggattgttaatggaatttgggtttgtgattcccaaaggtcgctatcctgcccaaaaagaaattccattaattttggaagatgcagacaatggattgccgatgttggctcgacaaatgattcaaaatatatggcaaaaaatcaaacaagcaaatgaagaaatattattttacgatcgcgagttatccaaacaagtcagacaaaatccgaatgccaaacggttaatgacaattcctggcgtgggtgaacaagtcgcaacctgtgtcacctccagtgttcccgatccatcactctttaaaaatgcgcgacagtttgccgcctggataggattagtgccaagacaacacacaacaggtggtcatgttcgattaggacgaattaccaaacaaggcgacagctatttacgaacctgtttggtgcacggagcaagatcagtgattgcgaatttaaaaaacaaacaagacaaggtgagttgttggattcgacaattagttgagcgtcgcggatatttacgtgcaatcgtagcggttgctgcacgcaatgcaaggatgatctggacgttattagtcaaacaggaagagtacaaagtgatacctgtatgaaatttaaatgaaacatcaatttagaaagcaaaatcaaaagcggttaatcagtaaaaaatgcaaagagtttgtgctgatgatcaacaacaaatcatcagcgaccaccgtgtcctgcgaaggcagttgatgacaatcaggtcagaccgaggaagccacagcctgttgagctcggagattgaaaaaatcgtctaacgaatgaggccgtttccacgcgaatgttcatcttggttcagcaacacaataagttgccagaaaccgaatgtagaggtgcagttcgaatctgaaagtcaaaaacggtttttgcttgacgaacgggggagttcatgta

SEQ ID NO: 5928 - DNA, 1362 bp, unidentified
  source 1..1362: mol_type = unassigned DNA; note = element_92206d2
  misc_feature 1..3: note = core
  misc_feature 4..87: note = LE
  misc_feature 88..1110: note = CDS
  misc_feature 1111..1362: note = RE
  misc_feature 1100..1348: note = bridgeRNA
tgatgaggtggacggcccccacccaacggcatcgagtcgtgccatgatggtgctgtcatagaccatcagtaagagggagccgcccacatggagattaccacgataggcctcgatattgcgaagaacgttttccagcttcatggcgtcgatggcgatggccgcgccgtgctgcgccgaaaggtaaaacgcgatcaattacttgcgctgctcggagatctggagccgtgtctgatcgggatcgaggcctgcgcgacggcgcatcattgggctcgccaacttcaggcgctcggtcacgaggtgcggctgatgccgccagcctatgtgaaggcttacgtgaagcggaacaagaacgacgcggcagatgccgaagcgatctgcgaggccgtaacgcgaccgacgatgcggttcgtgccgattaaatcagccgatgcccaaagcgtcctgatgttgcaccgcgcccgtcatctgctggttcggcagcggacagcgcaagtaagcgcgatgcgggcgcacctggcggaatatggggtcatcgctcccaagggtcgcgcacatgtccgcgacctggtcgagacgctgactgacggcacagcgccgataccggaacttgctcgacagacactgttgctgatcgccggcatgatcgagggcctaagccgacagatccgcgcgattgagatcgagctgctggcatggcatcgcgccaatgccatatgccgtcggctggagactataccgggcattggtttcattaccgccacagcacttgcagctaccgttggcgacgcaaaagtcttccgctcaggccgccaattcgccgcatggctcgggcttgtgcccaaacagcattcctcgggcggtaaagagcggatgggcggaatatccaagatgggtgaccgctatctacgccacctccttgtcgtcggcgccaccgccgtcattcgctacacgcgccgcaagacaacgacagtcagcgcctgggcagctcagctgctcgaacgcaagccggcaaggctagtaagcgtcgccgttgctaacaaaacagcgcggattgcttgggctgtcatgacgagagaagagaattaccgcgcggctccggccaccgcctgaagcatgcgcagaacaagtttgggcaggagagaacgaaacgaatgatgccaacccggtcatgccggggatcggaagaacctgactgattcaacgcgctcacagcgcggcaccttgatgaggttccgatccaccgacaccatcatggccagcggcctttcgcgccgcgcggacaggccggacacatgaatgaacctgaccaggcaaacatcatccgttgaaaatcactcttgtccaacggggggcgtccacaca

SEQ ID NO: 5929 - DNA, 1481 bp, unidentified
  source 1..1481: mol_type = unassigned DNA; note = element_92240ab
  misc_feature 1..4: note = core
  misc_feature 5..238: note = LE
  misc_feature 239..1465: note = CDS
  misc_feature 1466..1481: note = RE
gtcactagggcatcatcctttctgcgagtgcccgatgggcgttcgtaggagggactcggcgggggccgaggtgacggccaggtgtggtcgctcgtagagggcctgcatgacaccgccgccctcggtcctcccggggtcgcagaccagcttcaggaagacgcgccgcagagcgccagttagcgaccgtccggccgtcgatcccctcgccgggtcgtcgctgccaacccgaggagccctggtgtcggatcagatccctgaaaccatctatgtaggtttggaccgggccgccgccatccacgcggtgtgcgtggtgtctgcggttggtaaagtactggcgcagttcactattgaacacagcgcccacggcattgcatcgctgatcagtcggctcgccaagtacggcgatcccgccgataatcatgtcgggatcgaacgcccgaacggccgcttggtcgacctgctgctcgacgccggccatccagtaatcccagtgtcgcccaacgcgatcaagacctggcgggaaggcgaggttgtttcgggtgccaagtccgacgccggtgatgcactcgtgatcgccgagtacctgcgactgcgccaccaccgactccacccggtcacgccccactcggcccagaccaaagcgctgcgcaccgtggtccgtacccgcgacgacatcgtcgagatgcgggtagctgccaccaaccaactcagctccttgctcgaggcccactggcccagagcaacgaaaatcttcgccgatgtggaatcgcctatcagtctgacgttcttgcgccggtacccgaccgcagccgcggccgctcacctcggtgaaagacgcttggccgcattcttgaccaagcacggctactccggtcgccgccccgccaccgagcttgttacccggctgcgccgtgcccctgctggcgccactgacccgacactgaccgcagccatccacgatgctgtgctcgccctggtcaccgtgctcgacgcgctcaacacagccaccaaacaactcgaccggtccgtcgcccacctcgaggagcacccggacgccgaggtcttcacgtcgctgccaaggtcgggtcagatcaacgccgcccaggtactcgccgagtggggcgactctcgggcagcctacgactcgcccgacgcggtcgccgccctggccggcgtcaccccggtcaccaaagagtccggaaaacaacacgccgtgcacttccgctgggcgtgcaaccaacgcttccgcagagccaccaccacattcgctgacaacagtcgacatttcagcccctgggccgcacacatctacaaccaagcccgcgcccgcggccacgaccatccccatgccgtccgcatcctcgcccgcgcctggatccgcgtgatctaccgctgctggcacaaccaccagccctatgaccccaacctccacggcggaacccaaagactgaccaacgcagcctgagcttgactcaggaagt

SEQ ID NO: 5930 - DNA, 1383 bp, unidentified
  source 1..1383: mol_type = unassigned DNA; note = element_922488b
  misc_feature 1: note = core
  misc_feature 2..89: note = LE
  misc_feature 90..1118: note = CDS
  misc_feature 1119..1383: note = RE
  misc_feature 1147..1338: note = bridgeRNA
gaatgaaagggacttcccctcgatttggttactgtaaccatattccgtgacatcatggggagtaaccaaaatattacaggggaataaccatggccgttgtaactgttgggatcgacctcgctaaaaatgtttttgccgttcatggcgttaataaaaatggcaatgctgtgctcgttaatcccaaagtatcccgaactgcgttgcctgaacttattgtcagcctgccttcctacaccatcggtatggaggcctgctcaggcgctcattactgggcaaggcttttcagggagtatagtcacgacgttaaactgatggccccgaaattcgtttctccataccgacaggcaggtaaatccggtaaaaataacgctgctgatgcgctggcaatttgcgaagctgtccgacgcccccacatgcgctttgtgccggtaaaagatgaagaacaacagtccatgcaatgcctgcaccgtacccgccaggggtttattaaagaacgtaccgcatcctataaccggcttcgtggcctgatatcagaatttggcctggttacctcgcagagtacagaacaacttcggaaactggccagagaacagcgcgaaaatttgccgggctgggtcagtcagtacattgatgatctgctcagtcatattgacagtattgagctaaaaatcgctgattatgatcgtatcctggtcaaaattgccgcccgggacagtcgcagcaaaaacatcatgaaactcaggggcgtcggccctacgacagcaattacgttgatcgccagtattgtcaatgggcatgattttaaaaatggtcgccagcttgcagcgtggctgggtctgacgccatcgcagtacagcagcggaggcaaagcccggctggggaaaataacgaaagcgggtgacgcttatttgcgcactttactggttcaaggtgctcgctctgtaatggttggcgtagagcataaacaggctcccttcagtcgttgggtatgttcactgatcaatcgtcgtggttactggcgtgcagccgtcgctcttgctgcaaaaaacgaccggctatgctgggcatcattgaattatggtgatgactttaagctgtactcatcaccaaatagctgaaacgcgttatccgaatactgacacctgttctgcctgtaagcattgatgataaaggggtagccccccgtgaggagtatttgtaaaactcactggattttagtatccggttaacgattaataacttcacgtgcgtctttcatcagggtctgaatcaaaaacgattcatcatgaccgtttatagtatcgcagtcttatcctttactattgatgataaccagcagataaaaaatcaaaccgacattaacttttcggggaagcccttata

SEQ ID NO: 5931 - DNA, 1542 bp, unidentified
  source 1..1542: mol_type = unassigned DNA; note = element_9224b3f
  misc_feature 1..2: note = core
  misc_feature 3..238: note = LE
  misc_feature 239..1432: note = CDS
  misc_feature 1433..1542: note = RE
  misc_feature 6..258: note = bridgeRNA
ttcgtactatataagagtagggaaatacccctattcttatttttttgttatgatgaggttgattggctgacgtaatttctaattgggacaccacgcccgcagcaaaacttgtcagccagctctcattatcatgcattcgattcagcaagttgggacatagctcccgggtcactcacgaacatgaatagatatttgagacgttggacccaatcataataatctactaaggaggaataccatgattgctgttggtattgatgtatccaaatcaaagagtactgttgctatcctaaattctgatggtgaaatacttgctaaaccctatgatattcatcatgtagaaagtgatatagataacctcatcacttatctacgctctctccatgatgatgtaaaaattgtcatggaagctactggccattatcaccttcctgtcctaaaaaagctccataatgcagatttgtttatatgtgtcatgaatccatatctaatgaaaaaatatggagataatgaaatccgccgtggcaagacagataaaaaggatgctatgcgaatggccttctatgctctcgaaaaatcatattctctcaccagatactcttcgttagagcaaaaatatcttgatctgaaatttttatccaggcaatacaaccaacgtgtgtcaacaaaggttaagaaccgtatttatctaggaaacctccttgatgaaactatgccaggcatagaaaacatacttatgtcaaaaacgattaatccagaaaataacatgctctataaattcattgaaaaataccatgatttcgataccattaaatctatggggcaaaagaggtttctcaatagttatgccaaactggctgaaaaaatcggttgccggaactaccaaagaaaagcacttcagatctatgagcttgccagtgacagcattactactcgtggctctgatccttacactatattatctatagaacaatgcctgactctattaaagcaatcagaagtcgccgcaaaagccaccatggtacaaatgcagtctattgctcagactctacctgaataccccaccgtccatgctatgaacggtgttggagacaacctggcccctcgtcttattgctgagattggcgatgtccgtcgtttcaccagcggtaaagcattaaacgcttttgctgggaatgatgcacctccgtttcaatctggtcaatacgacagtacaaaccggaatatatcaaaacgcggtgctccctctcttaggaaagcctgttatgaagtaatgcaatgccttaaaatgcacaaaccagatgatccggtttacctcttcatgataaaaaaagaggaggagagtaagccattaaacgtagccaaaatggcagctgttaataaatttttgagaatttactatgcaagagtaatggaaatatataaatcttaaaacttttctgttttttctggttaaagcataaggcttattaaatttgctcttttttaccccaacatatattttatttttcttaaaataatgcttgacttttattagcaagg

SEQ ID NO: 5932 - DNA, 1538 bp, unidentified
  source 1..1538: mol_type = unassigned DNA; note = element_9228002
  misc_feature 1..2: note = core
  misc_feature 3..246: note = LE
  misc_feature 247..1422: note = CDS
  misc_feature 1423..1538: note = RE
  misc_feature 3..223: note = bridgeRNA
cttgtattatagagtagtagttattagagcccctctccaagggcaatgtgatacactgtaagggatgctgtggattggtattttcctcctaccacaagatggttcaagaaaggctccaaccacagccctttgcagtattgttaatcagttagataccgccagacggtttatttagaacaaggttacaagagcaaagtgttctgtggacaaagcagcatcgaatatataccgtcggaggtttttactatgatttgtgttggaattgatgtcgctaaggacaagcacgactgcttcatcatcaactcggaaggtgaagtcctagaggatgtttttaccattcccaacaatatggagggtttccactgcctgatacaaaagattcaggcttgctccacaactcaagacaaaataaaagtaggacttgaggcaaccggacactacagctacaacattctcgggtttcttcttgacaacggtcttcccacctatgtcctaaatcccttgcacaccaacttgtatcggaaaagtctcagcctcagaaagacaaagaccgaccgtgtcgatgctcgaacgattgcagctatgctcatgtctgatgtgggcctcaagccctacacagacacagtttatcacaacgaggaactaaagtcactcacaagataccgttttgacaaggttcgtgagcgggccaaactcaagcaatctatttccagattggtgtgtatcctgttcccagagttggagaagctggtaacaacgctccatatgacctctgtttatgcgctgctcgacgagtttcccggagcaaagcagattgctcaggcgcatctgacacatttgaaatccgttctccatgacgcttcaaaaggccgttacagccgggatactgccttatctatccgggaggccgcaaaagtctccatcggttccgtgatgccggcaaagtctttggaactccgacatacgattcgcctcatccgtgaattggatgctgagattgaagaaatcgagtccgccatccaacgcattatggacgagcttgattcgcctattaccacgattccgggcatcagcactagaatgggggctatgattctggccgaagtaggagacttctcacggtttgattctccggacaaaatcctggcttacgccggtctttcaccctctacataccaatccggacagcttaccaactgctatgcccatatggagaagcgcggttccaggtatctgcggtttgccatctttaacgccaccaaatacgtttgccattgggatacaaccttttctgcctatcttgcaaaaaaacgctcagaaggcaagcactacaatgttgctatttcccacactgccaagaaactggtacggctcatctatgccttggagaaatccggaaaaccttatcgtccggcagcctgattttctcacgatagcttgagtggcgtcttagcagacgtctgctttgctataccttttttgaagcatctgttttttgcattcctcctcatttacgggcttgacttttaatagttagt

SEQ ID NO: 5933 - DNA, 1613 bp, unidentified
  source 1..1613: mol_type = unassigned DNA; note = element_9229c7a
  misc_feature 1..2: note = core
  misc_feature 3..278: note = LE
  misc_feature 279..1493: note = CDS
  misc_feature 1494..1613: note = RE
  misc_feature 12..301: note = bridgeRNA
ctattacaatatatttacgggttaaggcacggcaaccagccgtgtctttttccgtattgttgcctaagctgttagaatgatggggtcatggccagacgtggtgctccaaggactattgcgtccgtttgaaagtccgtcagccagcctctcattcgcagcgttcgatttatgcaggtagagccgccacatcggtgcgtccgtgtcatcagatagattgaatcggcaatgataaaagagctggtcgccaaatgaccaatctacgatgaggagtgttctctatgaacaatgtagctggcgttgatgtttccaaggggaaaagtatggtatccgtccttcgtccctttggagaggtagtcgcaaaaccgtttgctgtgcgtcacactggcagcgaactcaaggagctggcagactacttgaaaagtctggacggcgagacgcgggtggttatggagcataccggacgatattatgaaccggtggctcaatttctttgcgatgaggggatctttgtcagcgcggtaaatccgaagctcatcaaagattatggcaacaattctctgcggaaggtcaaaacagatgcagcggattcgcgcaaaattgcccgctacggtcttgacaactgggtggaactgcggcaacatactcctatggatacgattcgttaccaactgaaaacgctgaaccggcagcagggactgtactccaaaaccaagacgatgatgaagaacaacctcattgcacttttggaccagacctatcccggcgtcaacgccctatttgatagccctgcccgtgaggacggaagccagaaatgggtggactttgccgcgtccttttggcacgtggactccgtgcggagcctgggcctttccgcttttaccgaacgttaccgcaagtggtgcaaacggcatggctacaatttcagcgaaagcaaagctgccgaagtccatgctggggcgcaagatctgattgctatgcttccaaaggatgctttgacgaagctgttagtgcaacaggcgattgactccctgaatgcgatttcaaagtctgtggaacagctcaagtccgaaatgcgtatgcttgccgcacaactcccggaataccctgtcgttatggcaatgcacggcgtaggggattcactcggcccacaactcatggcggagattggggatgtaacacgctttgtccacagaggttccattacatcttttgctggagttgatccaggcgcaaatcagtctggcaccttcgaagccaagagtgtacgcacatccaagagtggcccgccggaactgcgcaaggcgctctttctcgtcatggactgtctgctgaaaaccatgccgcaggatgaccccgtgtaccaattcatggacaagaagcgtgcggagggcaaaccctatctggtctacatgactgccggtgccaacaaatttcttcgcatctactacggacgtgtaaaggaatatctggcgtctttggaaactgtggactaatccattttgcgttctcctttaggccagcgcatttgcggtggtccttttgagttgcaattttcaacccctctccggtgcctgcaatttctcttgatttcctattgactttttatttgcaga

SEQ ID NO: 5934 - DNA, 1369 bp, unidentified
  source 1..1369: mol_type = unassigned DNA; note = element_9237566
  misc_feature 1: note = core
  misc_feature 2..69: note = LE
  misc_feature 70..978: note = CDS
  misc_feature 979..1369: note = RE
  misc_feature 1131..1366: note = bridgeRNA
tactgagatggacccggtgccccctccgggggacactaacgcactcactcagacgtgcggaggttcatcatggaaatcgacgttctcggcatcgatctcgcgaagcagatcttccagctccacggcgctgatcgtcgcggccgtgtcgtgcatcgatcgaaggtctcgcggagctccttcttcgaatccgtgcgcacattgaatcccaaagtggtcgtcatggaagcatgcagcaccgcccaccactgggcgaggtgtttccagtcgatcggtatcgaagtccggctgatcagtccgcaatatgtcgcaccgttcgtcaagacgaacaagaacgatcgcaacgatgcggaggcgattgtcgaggctgccagccgacccacgatgcgcttcgtcacgatcaaatcggttgagcaacaggacatcctggcggcacaccgcatgcgcgccattctgctacgtcaccgtaccgcgctgatcaaccagatacgtggcctgctcggcgagcgcgggctggccatttcgcgctcaccggaagccttcaagcgcgcgatgccggaattgctacgcacgagcgcagatgaactgacctcgttttgccagacgctcctcaccgaactgctgcagcacctgcgcgccatagaggagcgtgttcatctcattgaggcatctatccagtcgttcatgaagacgtcggcgctctgcaggaagatcgccgagatccctggtatcggtccgattaccgccacggctgttgttgcagcggtcggcgacgccaggcagtttcgcaacgccgggcatctgtccgcctggctgggtctcgtgcctcgacagtattcgatggcggcaaaccccgcctgcaaggcatcagccgacgcggcgacacatacttgcggaccttgctcactcacggcgctcgagctgttttgcgctatgcaccgacaaaaagtgatccgcaaagtatctggcttcaagagttgatggggcgacgcgggcataactgcgcggtggtcgcattggccaaccggaatgcgcggatcattcaggcactgctcagcagcgatgggacctatgtgccgcgaagcgccgcagcataacggcctaaaaccgcttgcaaggaggcgacacccacccaggtttgcgaagcttctcaaagcgatgacgaaataggttgaaccagcatcctgaagcctgtttttcgtgccggctgccacttatggcgagccgcgattttgctaaggacggggtgcgcggatctcatcgaggctgcgggcgtgcttcggcaactgcccatctggcaagccggatacatgcatgcagaccgtttcgacatcacgaacaagaagcttgcaaaaagcgtcgggtccataca

SEQ ID NO: 5935 - DNA, 1369 bp, unidentified
  source 1..1369: mol_type = unassigned DNA; note = element_923a98b
  misc_feature 1..2: note = core
  misc_feature 3..69: note = LE
  misc_feature 70..1113: note = CDS
  misc_feature 1114..1369: note = RE
  misc_feature 1116..1358: note = bridgeRNA
ttatgggatggcccgctcctccttcggcgtcggcgctaagctgacgtggtctggggagaggagagagcgatggcgatcaccgtgttgggtatcgatctcggtaagaatagctgcagcgtcgcgggtttcgacgagacgggccgtgtcgtccttcggcggagactcacgcgagacggcgttgtccggctgggcgccaaactgccggcttgcacgatggcgatggaggcgtgctgcggcgctcaccaccttggccacgtcctgcgggagcagggccacgaggtccgactcatgtcgccggagtacgtccagccctacgtcaaagcgcagaagaacgacgagcgggatgcggaagcgatcgcagaggctgcgacccggccgacaatgcgcttcgtcgagttgaagagcgaggcgcagctggacgcgcagatccttcatcgtgcccggacgcgcctcgttggacagcggacggcattaatcaaccagctgcgcgccgtgctcctggaacggggtattgtagtcgcaaagggccgtcagcagcttgagaggtttctaacggagatgctcgatcccgcgatcgagccaccctcgaccttaagtccgcgcactcgtctcctcatcgaagacatgcgcctggaatggggcgagctggatcgccgtattgctgcgctgacgaccgagttcgtagccagggcccgcgaggaccaggccgcacggcgcctcgtcagcattccagggttcggggcgctgaacgcgaccgcattggttgccgcaatcggcacgggcgagacattccgatccggtcgtgatctcgcggcttggctgggcttggtaccgcggcaagcgacgaccggcggcaaaccaaggctcctcggcatcacgaagcggggcaacacttacctgcgcacgctcctgatccacggggcgcgggcggctctgccgtcgctctcggcaggccagaccctgatcggcgagtggctgcgtggcctcgtcggccgtgctcacaagaacaaggtcgtcgtggcgctcgccggcaagttggccaggatcgcatgggcggtactccgctccggcgagggctacgcggccagggtcagccagcctgtggcggcctaaacgagatcgatcgccagggcggcccggcccggcgatcgacgatgtctgcgggcggtggaagcgagatggcctgacggttgaaccggcaccctgtgatcctggcacaaaatatggcgctcgacgccgtgtcttttatgaggaccagggtgtgcggaactccatcttggccggggcacgcccccgagaccggatacgttggcgcagaccggtcagatcacctcgcacatgccgcttgcagatggggcgggccatacgt

SEQ ID NO: 5936 - DNA, 1437 bp, unidentified
  source 1..1437: mol_type = unassigned DNA; note = element_924441f
  misc_feature 1..2: note = core
  misc_feature 3..119: note = LE
  misc_feature 120..1154: note = CDS
  misc_feature 1155..1437: note = RE
  misc_feature 1190..1390: note = bridgeRNA
agatggggtaatcggccggcagcttgtggatagctgaagattttgggtgctgcgcttcaggctgatggtgaaacgaggtccgtagtcacggcctcaagcatcagaaggagaagcgcagcatggaccattttgctggactggacgtttcggtcaatgagacaagtgtctgcattgtggatgacacgggcaggatcgtgcgggaagtgaaggtggcgagtgaacctgacgctctgctgccggtgctgacgaaccccgcctaccgtttcaagcgaattggactggaagctggaccgctgtcgcaatggctattcagcgctctcgccgaagcagagttaccggtggtctgtgttgaaacgcggcatatgcaggcagtgctgaaggcgcagatcaacaagacggaccgcaatgatgcccgcggcattgcgcagatgatgcgggtagggctttatcgcccggtccatgtgaagacgttacgcagtcagaaattgcggatgctgctgacccaccgcaaacttctgcagtcgaaggcgatcgcaatcgagaacgatctgcgcgccacgttgcgcaacttcggcctcaaggtcggcatggtcgggaaggtgcggtttgaggaacgcatcaaagagctggtcgagaaccgtcccgacctggcggcgctggtcgaaccgctgctcgttgtccgccgggttcttcgggagcagatcgtcatcctgcatcgccgattgctggccatcgtgcgggacgatgaggtgtgtcggcgcctgatgacgacccctggtgttggccccgtggtggcgctgacctatcgagccacggtcgacgtgcccgctcggttccgcaaatccaaagcagtcggggcggtgtttgggctgacgtgctccaagtatcagtcgggcgagatcgatcggagcggcagaatatcgcgctgcggagacgagatgatgcgggtcatgctctatgaagcagctcagagcacgctgcgttcgaagaaatggtcgtggctcaaggcctgggcgatgcagatcgccaagcgccgtgggatgaagaaggcaatcgtggcgctggcacgtcggctggctgtgatcctacaccgcatatgggttgacggcactgagttccgctggacccgggaacaggccacggcagcagcttgaaaaccgtgcaggatcaaatccgataggaggacactcgagctccaccggctggtggaatgatgtccctcgcgggacgatggatgaggtgagttcgcatgtccgcttggacctaccgttagtttgacggcaaggtcgcattcgagattgttccaccttgtcttcgaatcccatgatggaagggccttggtgccgattccgaagagaagcacgagcccgcgagcgacattgacactgaggtggtgggtagtctgaaagcgcttgacacctgatggccgattagaga

SEQ ID NO: 5937 - DNA, 1469 bp, unidentified
  source 1..1469: mol_type = unassigned DNA; note = element_9249e75
  misc_feature 1: note = core
  misc_feature 2..242: note = LE
  misc_feature 243..1454: note = CDS
  misc_feature 1455..1469: note = RE
  misc_feature 44..212: note = bridgeRNA
ccgttacctttttcgtagcccgttcctgatgcaggatatgggtgtgttggccggtcggttccggcatggtttttgcccccagtcatccatgatccggggggtgttgccaccggaaccgacatggcggccggtggatcgctaatagaggcacgacaacgggtccttcgtaacgtggatgcgacttcctgtccgctcctgaccagccaacacgtcagtctcagcgaatagacgggggggcaaccatgattctggagcaagagagcatcgacgttttccttgggttggacgtcggcaagaccggccaccacgccgtggccctgaaccgggccgggaagaagctctacgacaaggccctgccgcaggacgaaaccaaaatccgggacgtcctcaccaaactcgccggccacgggaaagtcctggtcgtcgtggaccagcccgcgaccatcggcgcgctgcctgtcgcggtcgcgcaggcagccggagcagccgtgggttatctaccgggcctggcgatgcgccggatcgcggacctgcacccgggtcaggcgaagaccgatgcccgcgacgcggccatcattgccgaagccgcgcggtccatgccccatacgctgcggtcggtggaactggacgatgaaaccctggccgaactcggggtgctctgcgggttcgatgatgatctcgccggacagatcaccgccacctccaaccggatccgcgggcttctcacccaaatccatcccgccctggaaagggcgctggggccgtatctggaccatccggcggtcgcggatctgcttacccgttatccgacccctgcggcgttgaagaccgccggccgcggacacgtcagagcacggttgaagaagcacgcgcctcgggctgctgaacggctcaccgaggcaatattcaccgcactcggtgagcagacggtggtggtcgtgggcaccggcgcggccgggatcgtgctgcccaaactcgctgagcagctcttggcgctgcgccggcagcgcgacgagatcgcggaccaggtcgaagctctcgtggaggcccaccctctttacgaggtcctgacctcgatgcccggcatcggcgtcaggacctgcgcgcggatcctcaccgaagtcaccggcaagcactttgcctccgctgcccatctggcttcctacgccggaattgccccggtcacccgtcgctcgggaacttcgatccggggtgaacatccgagccggagaggtaacaagaaactcaagcgagccttgttcctttcggccttcgctgccctgcatcatccaccgtccagggcgtattacgaccgcaaacgcgcggaaggtaaacgccacaatcaagcgattattgctctggcccggcgtcgctccgatgttctcttcgcgatgcttcgcgacggaaccctttatgaagacccggcgcctaagaatctgccctcagccgcttgaccaaaaccatagagg

SEQ ID NO: 5938 - DNA, 1564 bp, unidentified
  source 1..1564: mol_type = unassigned DNA; note = element_925108b
  misc_feature 1..2: note = core
  misc_feature 3..248: note = LE
  misc_feature 249..1418: note = CDS
  misc_feature 1419..1564: note = RE
  misc_feature 6..219: note = bridgeRNA
ctcgtattatatagacatacccattctttacctattctaggttatagggtatgctgttgaagatgctgtggattggtttttttctcctaccgctcagacggttttgaataggctccaaccacagcctctttgctacaatgttaatcagttagataccgcatgacggtttatttagaacgaggttacatcggcagggagccctgtggatctaccaacaacatcaataactttgaaggaggttcacctgtatgatctatgttggtattgatgtcgcaaaggataagcacgattgctgtatccttggccctgatgccgaaaaactctatccagtgttcactatctcaaacaacagggatggctttgacgaactctatgagaagatccaggacgcagaaactgataatgaccaaataaaagtagggcttgaggctaccggccattactcactcaaccttctgggttcgctcattgataaaggtctgaccacctgtgttatcaatccattgcatactaatctttacagaaaaggtctaagccttagaaagacgaaaacggataaagtcgatgccagttcgattgctatgatgctcataaccgataagacactcaagccctactcggatacatcataccacaacgaggaattaaagtcattaacccgttatcgtttcgacaaagttcaggagcgtgcaagactgaaagtctctattgcgcgccttgtaaacatcctgttcccggaattggagaagcttgttccagatatccacatggcttccgtgtacgccctgctttcagaattccccggcgcttcccacatcgcaggctgccatctgactcgtcttaagaatctgcttgaaacagcctctaaagggcgctatggacgcgacaaagctatcgaaatccgaaatgccgcacatacctctattggatccgttatgcccgtaaaatcgttggagctgaagcacacgattcacctgatcaatgtgttaaccgaagagattgaagaagtcgaagctgtcataaaaaagatcatggatgacaatgcctcccctatcatgacgatccccggaatcagttatcgcatgggtgcaatgatccttgccgaggtaggcgatttttcccgtttcgagaatgcggatcagatacttgcctttgcgggtctgtcgccatccacttatcaatccggacaactgaaatcgagctatgcgcatatggagaaacgcggctcccgctatctccgctatgccctgttcaatgccactaagtttgtctgtaaatgggatgaaacctttggcgcttaccttgccaagaagattcgggaaggcaaacactataatgttgctgtctctcatgcagccaagaaactgatccggacaatctacagaatggaattaaccggcgaggcatacagaaaataaacccaaccaactccatcacctgttctgcgagcacctgcccagatgctctgtttgtcatgcgattttcaaggtgctgatttatcaaaaatgtatttctacacttttctcaaaaacttcatttcaggtattgacttttaatagttagt

SEQ ID NO: 5939 - DNA, 1168 bp, unidentified
  source 1..1168: mol_type = unassigned DNA; note = element_9251ad1
  misc_feature 1..2: note = core
  misc_feature 3..214: note = LE
  misc_feature 215..1159: note = CDS
  misc_feature 1160..1168: note = RE
  misc_feature 3..190: note = bridgeRNA
cttgtatgtcttaaggtgggcctgtcggggtggagggacttaactcgcttctgcaagccagacggtaggagaattcccccactctcgcgttcatcacaagcgccgataaggaatccatcggcttgagtagcccctcaagaccgaccatatctacaagcctgcgccaaacgcgagtccccgacaggtcgttttatcttgtccgcgggagcgtctcatgacaatacaaacacccatcgttggcatcgatgtcgccaaagaaagcctgagcctgtatcgcctcgacactcagcaagccagtacgttagccaacgctcgaagcacgattctggcctggttgaaaacattgcccgcagactgttccctggctattgaggccaccagcacttaccacgtcctgctggcggatctggcctaccagcgcgggcatcggatctatgtcatcgatggttaccgcctgagcaactaccgcaaggggatcggtggtcgtgtcaagaacgatcagagcgatgcccgcttgctggcccgttaccttgcccatgaacaacgccagttgcgcccctggaaacccacctgcaaggcctaccggcgcctgcaagtgctgctacggcgtcgagccacgctgatccgcagcaccacggccttgcgcctgagttttgctcaggaccggcagatggcccgggagcttaaaccggtactggaacgcatgaaacgtctggaggtacgactcaatgaagagctgaacaaggcgttgcaagaggcgggtttggcggagcaggccaagcgttgccaagccattgaagggatcggcccactgactgctgccgcactcaatctggcctttctgcggggttcgttccgcagcagcgatgcctttatcgccttcctgggcctggatgtacgggtcaaggagtcggggcgttacaacggtcgacgcaagctgagcaagcaaggcgactcggaaacccgacgcttgctttacaacgccgccatggcggcaagcaggaccaaggcttggcaatcccgctatcagcaatacctgcagcgcggcctgaagcgaacagaagcgctgatcatccttgcgcgtaaattagcccgtattgccttcgctctgatgaagacccaacagccgtatcgacctacggtcgatacggtggggtagacatagaat

SEQ ID NO: 5940 - DNA, 1543 bp, unidentified
  source 1..1543: mol_type = unassigned DNA; note = element_925a90a
  misc_feature 1..3: note = core
  misc_feature 4..206: note = LE
  misc_feature 207..1424: note = CDS
  misc_feature 1425..1543: note = RE
  misc_feature 8..223: note = bridgeRNA
tttcgtattattaggtcagccagaaacttctggttggcctaattttgtagttgttttaagatggcggtagccgggagaacgagggtcttttaggggaatataccccggagcaaaaactgttctcccactgcctccaatgaccatgtttgagctggtaggggcaatggaccccgcatcacaagcgaagctatgggtttggaaccatcgtgggagtgccggcgaatactgaaagagtggaggaaattatggaaccggttattggactggatgtttcgaagggaagtagtgtatttcaagcctttacagggcggaatgaagcgtggggggaaaccgaagtcatggttcatgaagcgaaagggtttggacggttgaaagcatgcgtagagcaactgcaggaacagaccagccaagagcccgtggttattctggaggcgacgggacattaccaccggggactagtgaactttttggtacagcagggaatccggcattgtatcgtaaatcccttgcagtccaaaagagcgagaggaaccaagctccggaaagtcaagacggatgcggcggatgcctggcatctggccgagatgtattaccggggtgaaatcctgcctcaccggactccggaagacgtttataccgagcttcagcatgtaaccagacagcatgaatttgtgacgggtttatatgtacaggcgaagctcaatactcgggccctgctggatcaggtgttccctgcgttcgagggaatattttataatctatactcggaaacggcactgcgagtgctggagtgttgtttgcggggtcaggaagaccgggtgtacgagacgatggagaagacggcaggacagtcacatgccaagtggtgggtggaagaaaaggctcagcgtgtggaggaggccttgagtgaatggcaccaggtcaaagtgagttcatctcaagtctacattctagaggggatgctttccctacttcattccttgcaagagcagttaaagcgcttagagaagcagatgcaggagctttcgatgggaatgccggaaacagaactgctgagaacgattcccgggattggagaaaaactggcagctacgcttgtagcggaattgggagacattcggcagtttgaaagcccgaaacagttggtggcttatgcagggctggaccctggggtatttaattcagggaaattcaccgcttccagcaaccgaattaccaagcgaggctccaaacgtctgagaagggccttgtatttagctgtacaatgtagtctcaggcgaggcgactgctctaaactcagaccttattacgacaagaaaaagaaagaaggcaagccctacaaggtcgcggtgattgcttgcgccaacaagctgcttcatcacatatacgcgatcctaagaaaaggccagccttaccaggtataatcccatattaatccagcaactctccacgccaatggaggttttttttgctgtgctcaaaaataactataccagcaatttttaaattctccaagactggatgcttgacaaacattagctgg

SEQ ID NO: 5941 - DNA, 1253 bp, unidentified
  source 1..1253: mol_type = unassigned DNA; note = element_925eece
  misc_feature 1..2: note = core
  misc_feature 3..231: note = LE
  misc_feature 232..1230: note = CDS
  misc_feature 1231..1253: note = RE
  misc_feature 53..212: note = bridgeRNA
taccttagatttgcactttatactaaagataaagcaaaaataataactttgaataaaggaaggatacaggaagtgaaccaattgcgactaaggatatttataagtcccgtatacataaaaggacttcctgtttgtttgaacccagacccagatagtaggttaacaataaattgttaaggtaattaggttaagttcagactcttcttttttaaatcataaaaaggaaaaagtatggaagatttttatttcatcggtgttgatgtttcgaaaaagaaattggatttttgtgtaatgtttgaaggaaaagttgtatgtgaagaaaaaacagctaatcatcaaagtgcaataatgtcattaatatatcacttacaggaagattatgagatagctggtagcaggatgcttatctgtgcggaacataccggacaatacacatttcctcttgcttgtgcttgtaaggcaatggaatgcagactttggcttgagaatcctacagagattaaatattcatcaggtgtacaaagagggaaaaatgacaaagtggatgccaaacgtatagctatttatgctcgccgctttcaagacaaggtacattattatgaacgcccaacagaagatattgaacggttaaaacaacttgaatcagagcggactctatatgtatctgatttagcaaaatataaggcacaattaaaggatcaaaaggattatatgcccaaaactttgtttgaacgtaaaatgaaacgcttacaagctttgatggatgatttgatagaagcaatcaatgctattactgatgaaatggaagaagttatcagcgcatgtcctgttttatcccgccagatggaactgcttatgtctgtagatggtgtaggtcgtgtagtggcaaccaacatgataattgttacagaagcatttactcgttttgacgattcaagaaaattcaactgttatgcaggagtagcacctttctcatattcttccggaagttctcagcattcgaaatcaaaagtatcacatcgtgccgataagacaattaaacgtctattacatttggcagcagtagcaattactcataaaactggtggtgaattgaaaatgtattatgaaaggaaagttgctgaaggtaaaaatagaatgtctgtaatcaatgcactgagagcaaaaattgtttcaaggatgtttgccgttatcaaaagaaatgaaatttatagacctttttttaaataaattatttgtaaaaatcatagtag

SEQ ID NO: 5942 - DNA, 1346 bp, unidentified
  source 1..1346: mol_type = unassigned DNA; note = element_9263cc3
  misc_feature 1..2: note = core
  misc_feature 3..83: note = LE
  misc_feature 84..1085: note = CDS
  misc_feature 1086..1346: note = RE
  misc_feature 1112..1333: note = bridgeRNA
tgatgaagtggatggctcccgcttccggcatcgcaatgtgccatgttgggtgctgttgtcacggccaacaaagggagccatccatgaacgaggttatcacgatcgggatcgatctggcgaagtccgttttccagctgcacggtgttgacgccgagggtcgtccctcgttgcgccgtcaactcagacgcagccagatgctcgagttctttcagcgccagccggcgtgtctgatcggcatggaagcctgcgccagcgcgcattactgggcccgggaattgatcaagctcgggcatgaggttcggctgatgcagcccagctatgtgaaacggggcaagaccgatgcggccgacgcggaagcgatttgcgaggcagtatcccgcccctcgatgcggtttgtccccgtgaagagcgaggacacgcaggcccggctcatgacccataaggcgcgggagtttctggtgcgccagcagacccaggtcgtgaacgccatgcgtgcgcatctgggcgagttcgggatcgtcgtcccgaaggggtttcacaacgtcgagcgtctgatcgcagcatgtgacagggccgatctgccggcgccagcgcgcaaggccctgaacctgctcgccgatcaactggtccacacgcagaagaagatcgagggcctcaccgccgacatccgtgcagatgcccgtggcaatgaagatgcgcaacgtctgcaaacgatccccgggatcggcccgatcaccgccagtgcgctggtctcggcgctgcccgacatcgccgacttcaagtcgggacgggatatctctgcctggttgggcctgactccgcgaccgcattccaccggtggcaaggaaaggctggggcgcatctccaagatgggaaacaggtatctgcgccgactgctctatcttggcgccatcgcgcaggtcagcgcccggcgccgtggcgagcccggcgaagactggctgtggaagatcattcagcgcaagaaaccgaaacaggccgcgatcgccctggccaaccgcattgcgcgcacggcctacgcgctgatgaagaaaaagacggaattccgggcggccaccaccgcctgaacacgatcaggggccacacgcccctccagaaaggcaagtgcatcgtgagatgatggcaaatgacggacacatcgccgaggacaccctgttcggaccggagcgccagagagcgcgtgccattgattgggaccgaagcgaccgcggactttcatcagggcgcgcagccaccatgctgcaatcgagacgccgtatacatggccgcagccgaaatcatgccagcttcaaccgacacgcccttgccccgcgggagccatccataca

SEQ ID NO: 5943 - DNA, 1356 bp, unidentified
  source 1..1356: mol_type = unassigned DNA; note = element_9264461
  misc_feature 1: note = core
  misc_feature 2..65: note = LE
  misc_feature 66..1115: note = CDS
  misc_feature 1116..1356: note = RE
  misc_feature 1128..1350: note = bridgeRNA
taatgggatggtccgccccgaccggcatttggcagaatggcggcgcagctgagaggaggagcaagatgctcaggaacaagcctcgtgacgctgcggtttacggcgttgacatcggcaagaccaccttccacgtcgttggcctggacgagacagggcgacccattcagaaggccaagttccgccgcgacacgctgctgcaattctttgagcgcgccgctcctgccatcgtcggcatggaggcctgcggcggctcccagtggctcgcccggaagatcacggcgctcggacatagggtgcgcattgtcccaacgcagttcgtgaagccgtatgtgaagcccaacaagaatgacctcatcgatgccgctgctatcgccgaggcggtgacccggccgacgatgcgcttcgtcgagatcaagacacccgaacaggtcgacctgcaggcgctgcatcggatccgcgagcgccttgtgaccgcgcgcacccgcctgatctgtcagatgcgtgtcttctgtctcgagcacggcgtcgccatgcggcagggcgccggggcgttcaagctcgacctggcgagggtgatcgcagacgaggagaacgacctcacgccgacgatgcggcgactgctgtccgagctgtgggaggaactgcgcgcgctcgaagggcgcatcgctgacgtctcccgcgaaatcgaggccacggcaaccactcacgatgttgcacggcctcttgccaccatccccggcattggccccctcggtgccacggccatcatcgccgccgtcggcgagggacggcaatccaggaaggcgcgcgatctcgctgcctggatcgggtccgtgccgaggcagcactcgaccggcggaaagactaccctcctcggcatcagcaagcggggtaatccctatattcgccggctgctgatccacggtgcccgctcgtgcctgatgcatctcgaccgaagccgcgaccggcttggagcctggctggatcagttgcggacaaggatgcatcccaacaaggtcgtggtcgcgctagcggcgaagatggcacgcgtcgcctgggtgatcctgaacaagcccggggcactgtacgaacggcgcgatcccgccttcgtctaggcgcccctggccgcagcttgcgaggctcgagggagtgatgacgaagcagacgatcggcgcgcagtaagccctttcagggaaaacgggccccatgcccttgccagtatctgggaacggcgcgcgcggatctccatcatggcttggccgcaacagcggctcactcgcgagaggccggatacattgacgcaactgctgtcgtgatcaccaactcgtcccttgctggggaggggcggaccataca

SEQ ID NO: 5944 - DNA, 1588 bp, unidentified
  source 1..1588: mol_type = unassigned DNA; note = element_9266ab1
  misc_feature 1..2: note = core
  misc_feature 3..283: note = LE
  misc_feature 284..1468: note = CDS
  misc_feature 1469..1588: note = RE
  misc_feature 10..261: note = bridgeRNA
gtataatatatttaggttatttcattaggaaaacctataacctattctttagttttctctctaattgagagataattgttttattagattgagaggattatcgctttctccttgagtcttagaactcgtactcgaaagactgatacctctttctaataagcagttcgcgaatgagttggatgttgaataccatttggtatttcttcgtatttatcacgaggtagtgacgcttactagataaggggattcccaatctaaaatactcttttaaaggtgtgatattatgttttacttaggtattgatattggtaaaaataatcatgttgcttccatgatggatgatgcaggtaagattgcattcaaggcattttcttttcctaatacttctgagggtggcgaagccttattttctaagcttaccagccattctgataatcctgctaatttcgaaattggtatggaagcaactgggcactattggttagccgtttattcttttttatacgataaaggtttccttattcatgtcatcaatccaattcaaacagatggatggcgtaaaggtactgaaatccgtaaaagaaagaatgacactattgactctattttaatcgcagacttaatacgctacggctcttttgttgaaacagtgctttctgatgaaaccattttttccttaagaaccttaacgagattccgtggatacttagtatcatccatttccgatttaaagcgaaaaattatttgtgtccttgatcaggtatttcctgaatatcaatctattttttcaaacatatttggtaagacctcaaaagagattcttttacagttctcttcacccagcgattttgaatctatttctgctgatactctggcacaacttcttgcagaactaagtcgcaagaaaataggtgacgcaaaagctgaaaagttaaaatcaactgcctccaattcctttggtattaccttctgcaaggatagtttctccttccagctaaaagctctaattgagcagatgtctttcattgaacagcaggtaaaagataccgaaactgaaatcaaaaaacttatggtttctttagaatcacctattacaacaattccaggaattggtcctgttactggtgccacaatactaggtgaaataggtgatattaataaatttgattcaccaaaaaagctcgttgcctatgctggtattgatgcttctgtttctcaatcaggagaatatgaaaacatacataatgttatgagtaaaagaggttcgccttacttgcgtaaagctttgttccaggctgcgttagtagctgcattcaatgatcctgttttaaatgccttctaccagaaaaaacgagtcgaaggcaaacatcatttaacctgtattggtgcagtttccagaaaactatgccatatcacttatgctgttctaaaaaacaataaaccttatgagattaaagaaacctcataatttttttgcaattataaccatttcaaacttgtagcagtgcaagtctttttgtcatacagtttttaaaatcataaacttaatataacttctttttaaaaagtacttgacttattatagttg

SEQ ID NO: 5945 - DNA, 1651 bp, unidentified
  source 1..1651: mol_type = unassigned DNA; note = element_92723c4
  misc_feature 1..2: note = core
  misc_feature 3..264: note = LE
  misc_feature 265..1650: note = CDS
  misc_feature 1651: note = RE
  misc_feature 90..243: note = bridgeRNA
agtaaagccaagcctttgttttgattgaaatcagaatggaacacagaacgtttccaccgccttcggcggcagaaacgtttttagttacctttgctgtaggcataagaagcaagccggttttttcttgggcttttaattccacaaaagagtatggctccttgtcctgcgaattaaagattggtcgtcggaggccgtatagaagaatgctcattgacaggacatggcttatgcctttatccatcaacaacagtaacaattattatcatggcaaagaaagcaaaaaaagtcaagacggccaaaggtgcggaacttcgaatagtcaatcccgatgcggcggggatagacatcgcggacggtatcatgcaagtttgcgtccctgccgaccgctccaaggacaacaaccgcgcgttcggagcgtatacatccgacctgcacgccatctcggcatggctcagagagtgcggcataaagacagtcgcaatggaatccaccggggtttactggataccgctgttctgccgtcttcaggaggacgggatggatgtcgtattgaccaacgcaagggacgtgaagaacataacggagaggaaaaccgacgagtcggatgccgaatggctgatgttgctgcaccagtacgggttgctcaaggcaagtttccaaccgcacaacgacgccaaacggatgaggacactcacccgtcatcttgacaccctctcccgtgaggcttcaagcatagtcctgcgtatgcagaaagccatgcagcagatgaacataaaacttacgcttgtcctatctgacattacgggaaaatccggcatacgtatcatcgaggccattcttgcaggtgaacgtgaccccaagaaacttgcggacttggccgacatccagtgcaagactccgaaagaggaaatagccaaagcgcttgagggcaactgggaagaagacctcctgtttgtcctcaggcaaaactatgacactttcaagcatttttgcgcccaacttgaccgatgcgacacggaactggagaaacttatggaaaactatcgcacggaggttgccggaacagggcgtccgtcatacagtccgacgaaaaaacgtcgtgactatcacaagcgtaaacggaatgtaggcttcgatgtggaaagaaaggcatatgacatgtggggagtgaatgtctttgagatacccggaataagccacctgaccgcacttggactgatgagtgagttgggacacgactttacccggaagttcccatcttccaaacagttttgctgttggtgcaacatcgcaccgaataccaaaatatcaggagggaaaagaatatcaagccacgtgccacaccgtcggaacaatgtcggattgatttttagaagtatcgcttcttcgctcgccaatgcgaagaaccagttgggaaacttctaccgcaggatacgttcacgggccggaggtaaagccgcagtcattgccaccgcccacaaggtcgctgagatattctttgccatggttgcaaaccagacaacttataatccggaaaaagtaggtatagacgagaaagtattactcgaaaaacggattgcgagatacaagcgtgaattagaacggattacaggaatgcatattgaaataggcaatgcatgtgttccataga

SEQ ID NO: 5946 - DNA, 1369 bp, unidentified
  source 1..1369: mol_type = unassigned DNA; note = element_9274a76
  misc_feature 1..3: note = core
  misc_feature 4..91: note = LE
  misc_feature 92..1108: note = CDS
  misc_feature 1109..1369: note = RE
  misc_feature 1143..1356: note = bridgeRNA
tgatggggtggacggcccccgacctcgacggcatcgcgctgtgccaaggtggtgctgtcaatcggaccacccgcggagaggagccgtccccatgcaggttagcaccgtcggtctggacatcgcgaagaacgtcttccaggttcatggcgtcgatgatcacggccgaaccgttctgcggcgcaaggtcagccgcggtcagctattgaaactgttcactggcctcgagccctgcttgatcggcatggaggcgtgcgccacggcgcatcactgggcccgcgaactcggcgcgctcggccacgaggtccggctgatgccgccggcctatgtgaaagcctacgtcaagcgcaacaagaacgatgcagccgatgccgaggcgatctgcgaggcggtgacgcggccgacgatgcgcttcgtgccggtcaagtcggccgaggcgcagagtgtgctgatgctgcaccgcgcccgccacctgttggtgcggcaacgcaccgcgcaggcgagcgcgatgcgagcgcatcttgccgagtacggcattgtggcggcgagaggcatctcgcgattgcgcgacttgctgccggcgctcgatgccggagcccgcatcatccccgagctcgcccggcaaacgctgctgctggttgctcagctgatcgaggctctgaccattcagatccgcaagatcgataccgagctgctgcgttggcaccggatcaaccctgttagccaacgcctcgaaaccattcccggcatcggcttcatcacggcgatggcggcctcggtgcgtgacgcacgggctttccgatccgggcggcagttcgccgcctggctcggcctcgtgccgcgccagaactccagtggcggaaaggatcggctgggcggcatctccaaaatgggcgaccgctatctgcggcacctgctggtgatcggtgcgaccgccgtggtccgctacacccgacgcaagacgaccacgataagcctatgggcaaaccgcctcctggagcgcaagccggcccggttggtcaccgtcgcagttgccaacaaaatggcgcggatcgtgtgggctgttatggcccgacaggagaattaccgcacagttccggtcgctgcctgagggctacccggaaagccgacactcacaaccggtttgggcaggagagaacgacgagcgtgatgccgatcggtcaagccggggaacgggacaacctgtgtgattcaacgcgcatcgagcgcgacagcttgatgaggacccgttccaccgaccccatcatggccagcggcctggtgccgcgcatacaggccggacacatgaatgtacctgacccgatcgtcactaccccgccaatgctcttgctcaacgggggccgtccacaca

SEQ ID NO: 5947 - DNA, 1825 bp, unidentified
  source 1..1825: mol_type = unassigned DNA; note = element_928d7ae
  misc_feature 1..3: note = core
  misc_feature 4..447: note = LE
  misc_feature 448..1419: note = CDS
  misc_feature 1420..1825: note = RE
  misc_feature 142..424: note = bridgeRNA
ctcgtataatagattttagggtagtttcaagagcccccaatgaacctctgccacgctcagttgagaaaggcagcattgaaatcggaatgagcgtagcgaatggagatttcaatgctgcggcggagttccgccgggtttaatcaaacaatcaacagacattcacatacccatgataaaatagctgtgatcagcaggaacaagttctgtttcacctcagttgagccgcatggctgcttccgtagtgagtctgttccccagagctgtgagttagctgattacacgtaggctgtttatccgggatgtgttccatccgtttttacaggcagtacggattatcgcatcggagcgccccggaatgtattctgataagcgaggttgatgatgccacagtatcatgggtagctgaatgcctgttgatcgcaaatcccattgaagggaggtggaaatgtgaatcaagacaaactttatgttggcattgatgtcagcagcaaaaataacgtctgctatctcatgtattccgacggcagtaaacatagttcgttttctgtgccgaacaataggaatggtgcaaaaataattgttgacagagtaacctctgtgcttctcttgcaggatattccacaggttgtgatcggtatggaagcgacttccgtttacggcgacaatctcatgcgttttcttcgtgaaagcggcagtcttggacgatttgaaagaagcctgcatatgctcaatcctaagcaggtcaagaagttccgtgatgcctattccgatcttccgaaaaacgatcatgttgattcctacgtcattgctgaccaccttcgcttcggcagaatcaataaggaggtctacatggacgattacaagtatcaggcgctcaaaatgtataccagagcgcgtcaccagctcgtacaggaactgacacgggaaaagcagcgttttctgaacactgttttcataagtttttctggactgacacaggagaagatcttctccaacaaattcggcgcaacgtcaatggctctaatcgaggagttttcttcgctcgatgaattggcatatatgagtaccgatgagcttgtggattatattcgtaaaaaaggcaaaaaccattttgagaatccagaagaaattgcagaagcagttcagcgtgctgcgaaaaattcttaccgtccgccgcaggtcattgcagatgccgccaagcagatgctcgccatatctatgaacaccatccgtttgcttcagaaacagatcaaggagtatgacaaagcgattgaaaagatgctggaagcattcccacagacactgacctcggtcaaaggcattggcaatatttatgccgccggaatcattgctgagatcggtgatattaaccgtttccccagtcaggcaagccttgcgaaatatgccggtcttgtctgaactcagcatcagtccagtgactttgaagctgaggataagcgcatgatccaaggcggtaaccatcatctgaaatactatttgtgcgaagctgcaaacgctctgagaagatgcgacccggagttcaagcgcttctatgctctcaaatacaaagaggctaacaagcacaatcacaaacgcgcactcgctctcactgccagaaagttggtcaggttagtctatacactgctgaagactaaccgcctgtatatcccgccggaggagtattgatccggcacctccagcccgtcgaaaaattttttcggcgcaggctttagtaggagataccctttttgtctcttcttaggcagaatgtatggttttcttccttgtttttctactttttgcctattgacattttaccgtagga

SEQ ID NO: 5948 - DNA, 1540 bp, unidentified
  source 1..1540: mol_type = unassigned DNA; note = element_9296598
  misc_feature 1..2: note = core
  misc_feature 3..247: note = LE
  misc_feature 248..1423: note = CDS
  misc_feature 1424..1540: note = RE
  misc_feature 3..224: note = bridgeRNA
ctcgtataataaatgtagtagtttttagagttcctctccaagaactatgatataattgtttagatgctgtggattggtttttatcacctaccacttgatggttttcgagaggctccaaccacagtctctttgcagtttgttaatcagttagataccgccagacggtttatttggaacgaggttacaagagcaacgagtccctgtggatctaaacagcgtcatattactttttacaggaggtatccttatgatttttattggtattgatgcagcaaaggacaagcacgattgttttgttgttagttctgaaggggaggtgttgtacgatgtattcactatctctaacaccctcaatggttttaacgacctgctctctaaaattaagtctgtttcatcagattttaataaaacaaaagtaggtcttgaagccacaggacattacagttacaatttgcttggatttttacttgacaatggtttgcccacctatgtcttaaatcccttgcacaccaatctctaccgtaaaagtctgtctttaagaaagaccaaaacagacaaggtagatgctcgcacaattgcttctatgttaatgtcttgcgtagacctcaagccctacacaagagcattataccataacgaagaactaaagtcactaacaagatacagatttgataaagtttcagagcgagcaaaactgaaatcttctatttcaagacttgttacaattcttttccctgaactcgaaaagttagttccggtacttcattgcgtatctgtatatgcacttctttcagaatttccatctgcaaagcatgttgcaaatgcaaatcttacaagactaactaatcttttgtactcagcttcaaaaggtcactacaacagagatactgctattcgctttcgtgaagctgcaagaaaatctattggctctgttatgcctgctaaatctcttgaattaaaacacacaatcaagttaatatgtgaacttaatgatgaaattaacgagattgaagcagagataaaacagattgtagatagtttaggaactaccatattaactattcctggcattggttactcaactgctgcttcaattcttgctgaaatcggtgatttcacaaactttgaaacacctgacaagatacttgcttttgcaggaatgtcgccatctacataccaatcagggcaactcacaaattgttatgcacatatggaaaaacgtggttctaaatatttgagattcgctctatacaatgcaactaaatacgtttgtaagtgggatagcaattttgctatctacctcgctaaaaagcgtttagaaggtaagcattacaacgttgctatatcccatgccacaaagaaactggtaagactgctttttgctttagaaaagtctcatttgccctatatacctgttgcgtaatttgtttctatatgttttttacggctcccttttggaggtctgtttgctatacctatttttatcctgtaaaaaattttcgattatttttattttatctattgacttttaatagttagt

SEQ ID NO: 5949 - DNA, 1525 bp, unidentified
  source 1..1525: mol_type = unassigned DNA; note = element_92a2785
  misc_feature 1..2: note = core
  misc_feature 3..298: note = LE
  misc_feature 299..1504: note = CDS
  misc_feature 1505..1525: note = RE
ctaatgggtcctgtcgggcttggttgtgccaggcttggctccggtagcggccagcgggtcagcactcccgacctccgagcgtcgagctctacggtcagaccgtgcgcccgctggtcgtgagggactgagactgctgatgggatgacgtgcccccgcgtgcgacgtgtggtgggtgagcacttgaccattagagcgcagtggtctcctctcgctgccgttgttgctgatggagtgcgcgggaggccggatgacggtgttcgtgggtgatgactgagccgaggatcaccacgacgtcgagttgctcgacgacaccgggaggcgtctgggccgggcccggctgggcgacggcatggccgggatgacccggctgcacgagatgatcgccgagcacctcgacgacgccgacgtcgacccggagaccgggatgttcgcggccggggctgtggtggtcgggatcgagaccgaccgcggtccgtgggtcgcggcgctggtcgcagccgggtatgaggtgttcgcgatcaacccgctgtcggcggcccgctatcgggaacggcactccacctcgggagcaaagtccgacccgggcgacgcccacgtgctggccgagatcgtgcgcctcgaccgggcccatcaccgcccggtggccggggactccgcgcaggtcgagggcctgaagatgatcgcccgcacgcaccagagtctggtttgggaccgcacccgacatgctcagcggctgcggcaggcgttgcgggagtacttccccgccgccctggacgtgatcacggcgggccgcctggagctcaccgaccccgacgccctcgagctgatcgagcgagccggggacccggaccgggcggcccggctgtcacggtcgaagatcgctgcgatcttgaagagggcccgacggcgtgatgtcgaggcccgcgccgagctgatccagaccgcgctgcgggccccggcgctgcgccagccggcggcgttggagtcggcctacgcagtcgtcgcgggcactcagatccggctgctggccgggatcatcgcccagctcccgccgctggaggcggtgctgggcgagggttttggccggcacccggacgctgagatctacaccagccaacccggcctcggtgcgatcctcggggcccgggtgctcgccgagttcggagacgacccgcaccgctaccgcgacgcgaaagcccgcaagaactacgccggaacctcaccgatcacccgcgcctccggacggcgcaccgtcgtgctggcccgctacgcccgcaacaaacgcctcggcgacgccgtccaccaatgggccttctacgcgctcacgaactcaccaggcgcccgcgcctactacgaccagctccgagcccgcaaagtcggtcaccacgccgccctacgccagctcgggaaccggctcgtcgggatcctgcacggctgcctcaagacccgaaccacctacgacgagaccaccgcctgggcccaccgcttcaccgccgccgcttgacaccgctacgccatgggatgt

SEQ ID NO: 5950 - DNA, 1651 bp, unidentified
  source 1..1651: mol_type = unassigned DNA; note = element_92a92c0
  misc_feature 1..2: note = core
  misc_feature 3..243: note = LE
  misc_feature 244..1398: note = CDS
  misc_feature 1399..1651: note = RE
  misc_feature 3..224: note = bridgeRNA
ctcgtattataaaagagtagtatttatagaccgctctccagcggtatgctacactgtatgggatgctgtggattggtgaacacctcctaccgcaaagacggtttgacgaaggctccaaccacagcttctttgttgaaatgttaatcagttagataccgccagacggtttatttagaacgaggttacaagagcaaagaagtctgtggtcctaagcagcattgaataatataacggaggtataaaatggtctgtgtcggaattgatgttgccaaagataagcatgactgttgcattctcgattcggaaggaacgacccttgtcgattgctttaccattcccaacaacatggatggtttcaaaagtctgctacaaacaatccaagactgttctcaaaaatcagacaaaataaaagtagggcttgaggctaccggacattatagctacaacatccttgggtttcttcttgacaatgatctgcccgtctatgtcatgaatcccttgcataccaacctgtatcgaaagagcctcagtcttcgcaaaactaaaaccgatcgtgtggatgcaaaaacgattgcaactatgctgttgtccgatgtagacctcaagtcctacacagatacagcatatcacaacgaagaactaaagtcactcacgagataccgatttgataaagttcaggaacgcgctaaactaaagcagtcggtgtccagattggttacaatcctgtttccggaattggaacagcttgtttcgtctatccacggcacttcaatctacgcactcagtgagtatcccggtgcaaagcagatttcagaagctcatctgaccagattagctaatattctcgtgaaaacatccagaggccattaccgaaaagataaagctactcatatccgagatgcagccagaacatccattggttctgttatgcctgctaagtctttggaattaaagcacaccattaagctcattcaagaacttacctccgaaatcaatgaaattgaagatgccattcggaaaatcatggatgaattgaaaccgccgatcctttcgattcccggaatgggatttcattctgctgcgatgattcttgcagaggtaggggatttttcgaattttaaccctcctgacaaagttttggcttatgctggatgttctccctccacataccagtcaggaaaactcacaaactgctatgcacacatggaaaagcgtggctctcgttatcttcgatacgctctttacactgcaaccaaatacgtctgttactggaatcccgtttttttactgaataccttaccaaaaagcaagctgaaggcaagcactacaatgttgccctatctcatgccacaaaaagaaactcgtacgactgatttacgctttgcagaagtccggtaaagcatatcttgccgtcacttgattttctccagagcctgagttaaacctaagaacaacttagctggcgcagcgaacccttgacaaaccgaagcattcaaatgctattctgtttttgcgagggttggctgggcttgctttgctgttctctccgtcaccctcgctactccaaggcaagcatttgaatgatgtttgtcatgggcagcggatggttggcggattttttcattttagggcttgacttttaatagttagt

SEQ ID NO: 5951 - DNA, 1112 bp, unidentified
  source 1..1112: mol_type = unassigned DNA; note = element_92a9cfd
  misc_feature 1..2: note = core
  misc_feature 3..176: note = LE
  misc_feature 177..1103: note = CDS
  misc_feature 1104..1112: note = RE
  misc_feature 1..175: note = bridgeRNA
cctgtgtgttgattccggtgtatggttgaagtgggaaggagaccgagtggatcttggtcgtcctttcggacaggccgtggaatggcccggtcccttcccaccggtgaaccatcaacctgaacagttgcacggggctgtctcaaaccagaccccgcaccacaggaagaggcgtggatatgatagcccagaactatgtcggctgcgacatctccaagcagtggctggacttttttgatgagacaagcggccgtcttcgacgcatcgacaaccaggccgacacgatcgcggcctatgtggcgggccttgatcccagccgcgacttcgtcgtcatggaggcgacaggcgtccatgaccggctgctgcgccatgcgctggccaaggccggcgtgccattctcgcggcacaacccggcgcacacccaccactattcgaagtcgaccagacggcgcgccaagaccgatcctctcgatgccaggatgctgagcgactacggccgccgctatcagcctgacgccgagccggcgccacgcgaagaaggtgaacagcttcagtcgcttaccggtcaccgcgatcaactggtcgagatgcgggcaacgctgaagacgcaactcagcgaggctttcgaggcgatcgtcatcaccagcctcaaagacctgatcggcagcctcgatgctcgcatcaaggcgctcgagggccagatcgccgacatcattcgtcaagccgaggacaccgcccgcgattacacgctcatggtctccgtgcccggtgtctccaaggtcggcgcattctcgctgctggcgctcctgcccgagctcggcaagcgctctcccaaggcgatcgccgcgctcgtcggccttgccccgttcgacaacaagagcggcaagctcagccgcaggagccagatccagggcgggcgatcacgcgtgcgccgcgccctctacatggcagccctcactgccattcgaacctgtgagcgcttcaagaccttctacaccgcacttgccacccgatcagggtccaagaaactcgccatcatcgctgtcgccaggaagctcctggtcgtcctcaacgctatcgttcgcgacaaaaccgcattcgcgtgaacacagttg

SEQ ID NO: 5952 - DNA, 1382 bp, unidentified
  source 1..1382: mol_type = unassigned DNA; note = element_92aa09a
  misc_feature 1: note = core
  misc_feature 2..87: note = LE
  misc_feature 88..1119: note = CDS
  misc_feature 1120..1382: note = RE
  misc_feature 1146..1374: note = bridgeRNA
caatgggatggactccccctccccgaaagggcaccgaagtgtcaaactggagtttccacacaaccagttagagaaagggagttcatcatgagaattgtacgagttggcgtagatttggcaaaggatgtttttcagcttcacggtgttgatcgagacgacaaaactgtttggcaacgtaagctgaatcgtaatgaatggatcaaggtgctattggaaaaagtcgagccaggatgcgtgattggaatggaagcttgtggtggagcgcatcattgggcgcggctgcttcaatccaagggatttgttgttagattaatagcaccgcagtttgttaaaccttatgtaaaaagtaacaagaatgatatgaatgacgcagaggcgatttgcgaagccatgagccgacctcatatgcgttttgtcaatatcaagaacaccgaacaacaagacattcaggccacacatcgtattcgtgcagagttgatggatcaacgtaaagctaaatccaaccaaatacgcggcttggtttcagaatatggtttggttgcgcctagagaaatatgtcacttacgttcggcaatcccttattggttggaagagctggataatggcttaagtgatcgcttccgtcgattattacatggtgtatggcatgacttgttaattctggatcaacgcatcaaagcgcttgatcaagaaattgaagtacttgcagctaatgatcctgtggcaaaacgcctacagcagttgagaggcgttggtccaatgattgcaaccgcattattggcgacagtaggtgatgcttcccagtttaacaatggacgtcagatggctgcgtctttaggattaacaccaaaacaaatgagctcaggtggaaagagcaaactgcttggtattagtaaacggggcgattcctacgtacgatgtttgctggtacatggcgcacgttcaatgatccaaatggctaagcataaagaagatcatttgagtcaatgggtgatgcgtattgcgaataaccgtcatccgaatatagccgcggtggcgatggcgaacaaaaccgtcaggattgcatgggcgatgatacgtaaaggcttagattaccaaccagagttagcctcagcttaacaaggtaaagtttgacagaaagtgatcaatattaggattgcaaaacaaaccgcgtgatggccaacaggtcgaaccggcacaggaaagacccgagaatgtctgtggcatcatagcccgtcaaagcaatggggagcctgtgcgcgaatagcccatcagggtcgtgcatttcaaatgaaatgcggtattaagagaccggatatacgtgagcagtcgcaccaacaagccaaaatcggattgtttgcaaaagaggaggagtccatata

SEQ ID NO: 5953 - DNA, 1160 bp, unidentified
  source 1..1160: mol_type = unassigned DNA; note = element_92b6859
  misc_feature 1..2: note = core
  misc_feature 3..188: note = LE
  misc_feature 189..1148: note = CDS
  misc_feature 1149..1160: note = RE
  misc_feature 15..198: note = bridgeRNA
cttctgtatctcggctctgctattctgatcccgtcaccggccttggccaaggccggtgacgggatggtgtatggcgtctgagccctgtggcatcgaccacgtttcctagcgagccaacaccatctctcctcatcgtctcgaacagttgagtgcggccggtcaggaccgcggagcagaaggaagagagcatgagtagaatacctcattcagcaatcattggaattgatgtctcgcgcgattggctcgacgttcattgcctgccagacggtcgcaggctccggctgccgaacaccgccaaaggccacgtgcaactggcgagcatggccagcgccgagcatgctctggtttgtttcgagtccaccggcggtcaggagtggcgactttgggcggctctggataccgctggggtccccacccggcagttgcccccggcacaaatcaaggcatttgctgccagccgcggcactcgggccaagaccgatcggatcgatgctgaattgatcgcccgcttcatggcatttcgtcccgatgccgggcggtgcctcccggctgagaaattgcgtcttctcagagccatgacctccaagcgcggtcagttggttgaaacgcgaaagcgctttctggctcagatcaaggcgcatgaaaaactgggcacggcagatgcatttgcggatatagatagcgctctcaaagtactgctggaccgccagattgcagaggtggagcaaaggattgaagcaattgtcgcgcacgacgacgtcattgccgaaaccgcggccattctgcgctcgatcccaggcatcggccctgttgccagctcgacgctgatcgctgcgatgcccgaactcggccagatcaccggcgagcaggccgccgccctcacaggactcgcacctattgctcacgacagcggcacactacgcgggcggcggtccatcagtggcggacgccgagcgctgcggcacgtcatgttccaggccgcgctagtcgcaacccatcacaaccccgtcctgagaaaattcgcagagcgcctacgcgccactggtaagccgcacaaggtcatcatcacggcggtcgcccgcaaactcgtcaccattgccaatgcgctctgcaaaagccggcattcttgggctcaggaaccagtctgacagatacagttg

SEQ ID NO: 5954 - DNA, 1356 bp, unidentified
  source 1..1356: mol_type = unassigned DNA; note = element_92b7595
  misc_feature 1: note = core
  misc_feature 2..81: note = LE
  misc_feature 82..1104: note = CDS
  misc_feature 1105..1356: note = RE
  misc_feature 1112..1351: note = bridgeRNA
taatgagatggtcagcccggccgagaaacccggcgagtctagacttaccgggtttctctcttttgcaaaggaggatctctcatggctaccgtggcacttctgggtatcgacatcggcaaacacacattccatctgcacggccaggatcgaaaagggcatcaggtgctgcgcaagaagttttctcgcagccaactgctgcaacacctggctcagctaccggcctgcactgtggcgatggaatcctgtggtggctcccattggttggctcgaaaaatcacggccctgggccatcgcgtgaagttgatcgcgccgcagcatgtgaagccctttgtcaccggcaacaagaacgactacatcgatgctgaggcaatctgcgagactgcgtctcgtccgaaaacccgctatgtggcaatgaagaccgtcgagcagcagatcctttcgacccagcatcggatgcgcacttcactggtgagccatcgcacagcgacgatcaaccagatccatggctttctgctggagttcggcatctgcttgcccgtgggatatgccgctctagagcgtgttccggccttgctcgacaacccggagcacgacctgccgcttcgcttcaagatactcattcagcgcttgctggaagacatccagcacctgaaggacgaaatcaagaccatcgacgccgagatcaagaaacaattgaacgccgatgatgccggcaatcgcctgctgagcatccccggcatcggccccatcactgctagcgcactggtggccgacgtcggtgacgcttcgaatttccgatctgcgcgcgactttgccgcctcactaggtctggtgcctcggcaacattcaacgggcggcaagaccgtactgctcaatatcagcaagcgcggcgacaagcacctacgacgactgttggtgcagggcgctcgcgccatcctgatacgtatcgataagcgcgaagatctcctcggggtctgggccagagaattgctgacccgcaaacaccccaataaggtggcctgtgccttggccaacaagctggcaaggatcgtctgggcagttctggcccggggcggtacttacaacccgcatcccagcgtttgagcaataggaatgaccatctgcttttgcgatgtcagtgactgatgacagtaaacggcacacatcccgactgaaaacctgaagaccaagatagctttcgaggctgatgcccttttcaaggacagtcgggagcgacttctcatcaagggccgagcgcgctaatgaaccgcgttcaacaggagcccggatacattagcgcaagcatgctttaccgttctcgaaactgaggttgcgaaaggtgggctgaccatacat

SEQ ID NO: 5955 - DNA, 1351 bp, unidentified
  source 1..1351: mol_type = unassigned DNA; note = element_92c4738
  misc_feature 1: note = core
  misc_feature 2..69: note = LE
  misc_feature 70..1095: note = CDS
  misc_feature 1096..1351: note = RE
  misc_feature 1118..1348: note = bridgeRNA
taatgggatggtcctccccacctgacagtgggttacgctgtatcggctcgttcaaccggaggcaatgccatgcaagacgtaacagtcattggaatcgatctcggcaaacgttcgtttcacctacacggccaggacaagtctggtaaggctgtattccgcaagaaggtatcgcgacagcagctgatcgaatttctaagtaactttcacgcttgcacggtagttatggaagcctgcgccggcgcccacttcatggcacgcaaacttgcaaccttcgggcaccagatcaagctcatctcaccgcagttcgttcgcccattcgtaaaatcaaacaagaacgattttgttgacgccgaggcaatctgcgaagctgcctcacggccggccatgcgatttgttactccgaggacggaatcgcagcagacgctgtccgcactacaccgggtacgcgattcactgattcgcgatcgcgtatgcacaacgaaccagttacatgccttcctgcttgagttcggcatcagcctgccgattggcaacgcggtcgtcaggcgactcccggccctgctcgctgaacactcattgccaccgcgtctggttaccattctcgaacgcttacatacccactacaagtatcttgcgcaacagatcgcggagctcgacagggaaattgcacagcaactcgccgacgacgacctcggccggcgtctgttgacgatccctggggtcggcccgatcaccgctagcgtccttacagcagagatgggcgatggcaaacaatacgcccgcagccgtgatttcgcggcctcgataggtctggttccgcgtcaatacagtacaggaggccgagcgaaccttctgggcattagtaaaagaggcgacaagaatctccgccggctgctggttcaatgcgcgagagtgttcatgcagagaattgacaagaattcaggcccattggtcacgtggacgcggcaaatgctcgcgcgacgacactccaatgttgtggcctgcgcattggccaacaaattcgcgcgaatcgcatgggcgatcgcagcgcgcaagacgagttttaacgctggggctgcagccatgcccgcatagcgagtttcacacagcaccaaacaagttacccaactggttttgcgaccgctgacacctgatgacgtgaacggcacagtggcccgacgaggaacccgaaacaagaatgggctcatatgaagccgccatcgttctgaggttcgtcgggcgcgactctcatcgtggcgcggggagtgatccccttcaagacgccgaatagattcacgcaagccaaccacaaaatcggaatcagcgttgcaaaaacggggaggaccataga

SEQ ID NO: 5956 - DNA, 1641 bp, unidentified
  source 1..1641: mol_type = unassigned DNA; note = element_92c539c
  misc_feature 1..4: note = core
  misc_feature 5..252: note = LE
  misc_feature 253..1518: note = CDS
  misc_feature 1519..1641: note = RE
  misc_feature 13..302: note = bridgeRNA
ctcctacaataaagttacggtcataggcacggcagccagccgtgtctatttccatctcaaagccgaagctgttagaatgggagagtaaatggtctgacgcgctatcaccttgggctaacacgcccgtaagggagtctgtcagccgcctctctcattcgcagcattcgatttaagcaggttgtcccaccgtctttcggtgcgttcgtgtaatcgaccaggagattgaacaggcaatgagtaaaagcggtcgccatgaattttatcaatcaggaggtatttcaaatgaacgctgttggtatcgatgtgtccaaaggcaagagcacggtggctattctccggcccatgggtaaagttgtgcagacacctgtcgatgtccctcacgatactgtcagcctggaacggctggcatatcaaattctgtcccttggtgaaaacacaagggttgtcatggaagcaacaggccgataccatgaacctgttgccatggagctgcatgaccggggaatttttgtttctgttgtgaatcctttggcgattcacggttattgcagtggaggaactgtccgcaaagtcaagaacgaccagaaggattctctcaaaattgcgaaattcgcacttgaccattgggtggatttgcgagaatatacacctatggacgctgtaagacaacaattgaaaatctttagccgccagtataatctctacatgaagtccagagtagcactgcaaagcaacctgatttctttgacagacaaagtgtttcccggtgtaaatgaaatctttacaagccctgagcggtctgatggacacctcaaatgggttgatttcgtcactaccttctggcactgcgaatgtatcagtctggtcagcgaaaatgctttcacagagcgatacaagaagtggtgcaaacgtatggggtacaaattctccgctgccaaggtttccgacatctacatcgatagtctgggacacatcgtcactttgcctaagaacaacaacaccaagctgctgatccaaacggctgccaaggagctgaccgcaatgaatgagctgctggctgttgtgaaggccgagatgatccgtctggcaaaagaactgccggaatacgagaccgttcatgccatgttcggagtcggtgagcttttagccgctcagcttatggctgagattggcgatatccggaactatcctcgcagaagctctcttgtaggctttgcaggagtcgatccggaagtcaaccagtctggcaaaatgaactccgaaagtaacccttccacgaagcgtggctcgcctcacctgcggaaaacgctgttccagctcatgacggtctatctgcgcctcagccccgctgacgaggccgtgtaccagtttctggacaagaaacgctccgagggtaaaccctactatgtctacatgacagctggtgccaacaagttcctgcggatctactacgccagggtcaaagagtgcatggcaaaactcgaaactcccgctgagattgccgaagaaaacggctgattaaacgcggctattctcaggccgatgaacgctccagctcaccggcagggttgctatgccctttttattccgccgctcactgtgaaattttcttcatttgggtcttgactttttgtttgcaga

SEQ ID NO: 5957 - DNA, 1474 bp, unidentified
  source 1..1474: mol_type = unassigned DNA; note = element_92cb11f
  misc_feature 1: note = core
  misc_feature 2..222: note = LE
  misc_feature 223..1458: note = CDS
  misc_feature 1459..1474: note = RE
  misc_feature 1..210: note = bridgeRNA
ccgttaccttcttgatcaagcccggtgagggcttgcaggccaccggccacggcatgacttgttgcccctgtccttgatgatctggggggtgttgtcaccgtggtcggaaggcgccaacgaccgctgatagagacctgacccgcttgcgtggtctgctcgtaacgtggctgccggcgcgggtgctcgaggtcggcctgccacgacgacgaggggagccggcgggtgtccgaacccggcgagatccaggcggtcccgtttgcggtgttctgcggactcgatgtgggcaagtccgagcaccacgcctgtgcgctcgacgctgcaggcaaacgggtgcacgacaaggcgctgcccaacgacgagaccgccctgcgagccgtgttcaccacgctggccggacacggccgagtgctggtggtggtcgatcaaccggcatcgatcggcgcgctggctgtcgcagtcgcccgcagcatggccatcgacgtggcctacctgcccggactggcgatgcgccgcatcgccgacctgcacccgggccagggcaagaccgatgcccgcgacgcccatgtcatcgccgaggcagcacgcagcatgccgcacacgctgcgccgggtcggcaccgacgacgagaccctcgccgaactgaccgtgctcgccggctacgacgacgacctcgccggccagtccacgcggttgaccaaccggctgcgcgacgcgctgctgcacatccacccagcacttgagcgcctgctcggaccccgtctcgaccgcggcggggtccaagacttgctcgccgcagcgcccaccccgcaggccctgcgcgaactcggtgaagacggcatcgccgaactcatgagcccgcgctccccgcgcctggcccgcaccctgcccgcccagatcctggccgcgctcgacacccagacactggtcgttgcgggcacggccgcgttcgcccgcgtgatcgccggcgtcaccgcccaactgcgtgacgttcacaccgaacgcaacgatcttgctgtcgagctcgaggctcgcctggaggcccaccctcttgggctggtcctgacctcgatgcccggactcggggtcaggaccgccatcaagatcctcaccatcgtcggcgacggatccgcgttccccaccgccggacacctggccgcctacgccggcctcgcacccgtgacgcgtcgctccgggacgtcgatcaagggcgagacccgctcccaacgcggcaaccacgccctcaaatccgcgctgttcctctcggcgttcgccagcctcgccgaccccgtcagccgcgcctactacgaccgcaaacgagcccagggcaagcgccacaacgctgccctgatctgcctggcccgccgccgcaccgacgtcctgttcgccatgctccgtgaccgcacgccctatagtccgccgaccgtcactgagccagatccggcgctcgctgcggcttgacaaccacatagagaca

SEQ ID NO: 5958 - DNA, 1360 bp, unidentified
  source 1..1360: mol_type = unassigned DNA; note = element_92ccb3a
  misc_feature 1..2: note = core
  misc_feature 3..82: note = LE
  misc_feature 83..1147: note = CDS
  misc_feature 1148..1360: note = RE
  misc_feature 1128..1347: note = bridgeRNA
tgatgtggtggacggcctccgctcccggcatcgcaatgtgccaaagtgtggctgtcgaacgtcacatgagggagagccgtccatggagaaggttagcacaatcggtctggatgtcgccaagcacgtctttcaggtgcacggcgtggacgcggagggcgcggtggttgtgcgccggaagttgcgtcgcgacgatgtcgtcgcattctttgcgtctttgccggcatgcctgatcggcattgaagcctgcgcaacgagccatcactgggcgcgcgttctcatggggctgggtcataaggtccggctgatgccagcctcctatgtgaagtcatatgtcaaacgacagaagaatgacgcgacggacgcggaggcgatctgcgaggcggtgacccggccgtcaatgcgcttcgttccggtgaagagcgaggaacagcaaagtgtactgatgttgcatcgagttcgtgagcttctggttcgacagcggaccatgctggtgaacgcgctgcgcggccatctggccgagttcgggattgtgacgcgccagggcattgccggcgtcgggatgctgatcgggctcgccgaagacgagaataacgagcttgtccccccgcttgcccgagatgcgcttgttcccttggtcgaacagctacgggcggcacacgagaaggtccgtgagctcgatcatcagattcaagactggcaccgctcgaatgaactgagccggcgactggaaacgatccccggcatcggtccaatcaccgccagcgcgatcgttgcaaccgtgacagacgcctccctgttcaaatccggccggcaactcgcggcttggcttggcctcgtgccgcgacagaactcgtccggaggaaaggataggctcggccggatcagcaagcagggcgatccctatatccgtcgactgcttgtagttggcgcacatgccgttcttaggttcagccgcaagggcaaagcagcgcctacccgctgggccgccgagcttctgacgaagaagccctataatgtcgtcgccgttgctcttgcgaacaagatggcgcggatcgtttgggcgctgatgactacgggcagcgcttcgcaacttcgccggcagcgtgacgtagtcgcagaggagacgcagagattggtgaggtgctgatggtttgatggtggacggtcgaaccgggatcggacaaacccgctcagtgggtgccgctcaaaaagcgcgttgacctgtctgggatccgatccgcggacttcatcagggccagcggcatgaacaggccgcactcaaaggccgaatacatgcctgcacccgaccgacctgtcatcaatgtcagaaagcccttgccacgcggaggccgtccataca

SEQ ID NO: 5959 - DNA, 1145 bp, unidentified
  source 1..1145: mol_type = unassigned DNA; note = element_92d133c
  misc_feature 1..2: note = core
  misc_feature 3..155: note = LE
  misc_feature 156..1130: note = CDS
  misc_feature 1131..1145: note = RE
  misc_feature 12..178: note = bridgeRNA
cttgtatcttggaattgtggtacatgagacacccgggatgtgacagatcgatacgcctccggtccaccgagaccgtggccgagcctggtcgtcatatcctttgatccacaagcccgaacagttgccagggctcccgagcccgcatcaggacaaggatgggcttcaccaaggaggaggcgatgcagacaccgtcggtatgggtgggcattgatatttcgaaagcgcagctggacatggccgtagagcctgggggcgactcgctcacggtgccctatgatggtccggggctcgccacgctgatcacgcggctcagcgggcttgcgccgagccggattgtcgtcgaagccaccggcggtttggaacgggcgctgctgcgggtgttggtagaggctgcgttgcccgtggtggtggtgaatccgcgccaagtccgggattttgccaaggccacgggccagttggcgaagaccgatgcgctggatgcgcaggtgttggcccgctttgccgccgtgatccaaccaccagagcgaacactccctgatcggcagacgcaagagttagcggccctgttagcccggcgccggcaagtgttggcgatgcagcgagccgaacagaaccgcctggaccgagccgcagtgccggtgcggaagcggattcaggcccacctgcgcgggttaagcaccgaactggtccggcttgagggggacctcgatgacatgattgaacagagcccggcctggcgtacacgcgaagaattgttgcagagcgtaccgggcatcggaccggtgatgagtcgtacagtattagccgagttgcccgagctggggctgctgaatcgcaaacaagtggcggccttggtgggggtggcgcccttcaatcgggacagcgggcgactgcgtggccaacggactatctggggcggccgggcaccggttcgcaccgcgttgtacatggccaccttggtggcgacgcgctggaatccggtcatccggcagttctaccaacgactgcgggctgccggcaaagcacccaaggtcgcactggtcgccgcgatgcgcaagctgctgaccattctcaatgcgatggtgcatcatggaactcaatggcacccgaccgtcgcacaaggggcgtgacattcgagacagttg

SEQ ID NO: 5960 - DNA, 1373 bp, unidentified
  source 1..1373: mol_type = unassigned DNA; note = element_92d475c
  misc_feature 1..2: note = core
  misc_feature 3..210: note = LE
  misc_feature 211..1182: note = CDS
  misc_feature 1183..1373: note = RE
  misc_feature 40..216: note = bridgeRNA
cttgtatcagcgcgccggcttataatggggcgttccgtgaggaatggcccagcccgggtggccgcccgagctgggtcgccgttcgatcggatcgatgcccaccgaagccttgagggctgtcagacgtagcaagatcgcgatcggcacttcatcgggacccggatggttgaacgaacttcaggttcgcgtaacaagggagggtcgacgaagatggccaagcgtatcacgatgtgtgccgggatcgataccggcaaacgtaagctcgatgttgcacttgatggtggttcggagcggtttcaggccgacaacacgccggatggccataaagtgttggtggaatggctgcggcagcacaagatcaagcgggttgggatcgaggcgagtggcggctatgagcaagctgtcgtcgccgaactgcggcggcagcggtttgtggtcgtcgtgtttcagccggcccaggtgcgcgcttatggcgtgttccagctgcagcgagccaagaatgacaagatcgatgccgcgctgattgcagcctgtaccgccgcggtcaagaagatccacgcagctccggatccccggttgcagccctttgccgagcatctgacgatgatcgaccagatcacggaggacattgctcggttgaagaaccggatcgagagctgccgcaatatgcggctccagaagctgtggaaggaagatatcgcccgcctggccaagcgcgagagggtcgaactgaaggcactggccgccgcaatccgtgagcatcgcgatcttgccaagcggctcgccttgatcaacagcatcgacggtattgggctgaagaccgccatggtcattctggtgcggatgcctgagatcggtcagatcacgcgcgaacaagcggccgcgctggctggcattgccccttacgacgacgacagcggcgatcgctccggcgctcgtcagatcgccggcgggcgtgaccgactgcgacgtgcgctctttgctgccgcgtttcccgcctcattccgctggaatccgcagctgatcgcgttctacggaaggctgacccgagccggcaaggagcacaaacgcgccttgatcgcgtgtgccagaaagctgctgatcttcgccaatacagtcgtcgctcgcggcacgccctggcagaaaaaattgcctgaagtcgccggcataccagccacttgatcgcgtttctttgttcggccgaagcaccgtttcttcgtcccgacctgccctcacaaagacgccgcgcgccgcggccgtcaaggctggccgtcgcgccggcctcacccctgccccactgccgccaggccacgccttgacggccgcaagcacggcgtcatgctcaccggcaagcgggcgccgtttaatggttg

SEQ ID NO: 5961 - DNA, 1217 bp, unidentified
  source 1..1217: mol_type = unassigned DNA; note = element_92d58d0
  misc_feature 1: note = core
  misc_feature 2..214: note = LE
  misc_feature 215..1186: note = CDS
  misc_feature 1187..1217: note = RE
  misc_feature 34..203: note = bridgeRNA
tcttaagtttacaattaattaaatttaagcataaatcagaaaagacaaaagagaggaataaggttaatatacacgcagagactttagatctcgtcaacattgaaaatcccctctcttttctacacagatttcgtacagttctgtgaggcttttagacctcgattttaagtcgttgaaactcgcgtagtatgtcctttcaaaaaaacattttcttatgaataaagatattaaatattttggaattgacatcagccaaaaggtttttgatgttacagattctgatggtaattattatcagtttaaaaacaatgaacttggctttaaaaagttctcaaaactcttagattttaatagctattgcgttatggaagctacaggttattatcactatcagttagcttattatttgctagaaactggattcaaagtatcagtagaaaatccattatcagtaaaacgttatatccaaatgcgcctttctaagttaaagacagataagagtgattcaaaacttatttgtgaatatgcgatgcatgtagaattgaagctttggaaaggtaactcaaaagaggtacaagaatgtcttcaaatcaccagagccctttgggtatatacaaaacaaagaactatgctaaagaataagttacatggagaatctgttttgggagagccaagtaaaattgttgtgaggtccttaaaacggagtttaaaacaactttataagacgatgcaagctttagaagagaggctattatttttggtaaaggatacccataaagatttatttacccgtataacaacgataccaggaattggaagaaaaacggctatcatgttgatcgttttaaccggaggttttgaacgcttttcaagtgcaagtgaattgtgtagttatgcgggtctaactccaatgattagacaaagtggaagtagtgtaaaggggagaccaagaattagtaaaatgggcaatcaaaaacttcggaatttattatttatgtgcagttttacagcttgcaaatacaacaaagcatgcagagatctttatgagcgaatagtggccaaaggaaagagtaaaaaattagcattaatcgcagtgtgtaataagctactaaaacaagcttttgctatcgcaaaatctgggttaatatttgatgcaacatataaaagtacgctagtgaaaaattaatgggattttacttgttttttagcacagtact

SEQ ID NO: 5962 - DNA, 1457 bp, unidentified
  source 1..1457: mol_type = unassigned DNA; note = element_92d5a20
  misc_feature 1..2: note = core
  misc_feature 3..170: note = LE
  misc_feature 171..1199: note = CDS
  misc_feature 1200..1457: note = RE
  misc_feature 1213..1452: note = bridgeRNA
agatggggtaacgggccgcagcctaccctccaagccagccgcgctagctacggcgcagtttgattgcgcgcgtcgcgcggctggcttggagggtaggcggtcgtccctcacatgatggtgtgacggagtcgagggattaaccacgctccaagcatcgcggagagacgaccatggactattatgcaggaatcgacgtgtcattggaatgctcgagtgtctgtgtcgtggacggaaccggcaagatcattcgcgaaggcaaggtcgcgagcgaaccggaggcgcttattgcctggttcggttcgctggggcttggactgaccaggatcgggctggaagcagggccattgtcacaatggctttatgcggcaatgaagcaggccgggcttgcggttgagcttctggagacgcggcacgtgcgcgatgcgttcaaggcgatgccagtgaagtcggaccgcaatgacgcacgggggatcgcgcaactgatgcggctgggctggttccggccggtgcattgcaagtcgatggacgcgcaggaagtaagggcggtgctgacggcgcggaagctggtccagaccaagcttctggatgtcgagaacagcctgcgcgggatattgcgcggcttcgggttgaaggttggcaagacgacggcccggagctttgccggacgcattcaggaactggtgaagggtcatccgcagctggaagcggtcagcgaggcgctgctctcggtacgtatcgttctgctgcgcgagttcaacgcttttgagaagcgcgtgcgcgcgatgtcgcgcttgaatgccagagccaggctgttgatgtcgacgccggcggtgggcccgatcgtggcgctcacctatgcttcggcgatcgacgatccggcgcggttcaaatcatccaagcaggcggggtcgcatttcgggctgacgccgaagaagtatcagtctggcgagaccgactattcggggcggatcagcaagatcggcgacgcctcggtgcgcgaggcgctctatcaggcggctcacgtcatgctgacaaagccagtcaaaggctgctcgcagctcaagagctgggcgatgcggatcgccaggcgagccggcatgagcaaggcgaaagtcgcgctggcgcgcaagctcgcagtgattctgcaccggatgctcgccaacgcaacgccattcaattccgctgcggcagcagcttaactgggagaaacaggttttcgggcgggtcacgacaccagccttcccgaagcgaagtcccttcgccgggacgatggatcaggccagaccgtcatccgggatgtcgacacatcgctgatgtgatcacgcttccgtagattggccgacctatcctccacgaactccatcaggcgacggccttgcgccgatcccgtacagaagcacgtccccggcgagcggataacgcaaaaaagggattgacttatcgaggcccgttacaga

SEQ ID NO: 5963 - DNA, 1207 bp, unidentified
  source 1..1207: mol_type = unassigned DNA; note = element_92e4647
  misc_feature 1..2: note = core
  misc_feature 3..170: note = LE
  misc_feature 171..1172: note = CDS
  misc_feature 1173..1207: note = RE
  misc_feature 12..202: note = bridgeRNA
cttgtatctttctcgataagatggttagctaccattttatcagggcgtgtgatgaaccagtctccaaccttagactaagagtctgcgatgtagataaaaggtctcacacgccaaattatctcaatatactgaatggtatccaagtcctttcaataatgaaatgagactgcatgtacaaggtgagtgaagagattatgatagtaataggaattgatgtaagcaaagataaattggatgttgcctggctaagaagcctagaacccttgaaggttaagtctaaaattatcaaaaacaccccagagggctataccgctttaattaactgggttgaatataatacgcagcagtcgatcaatgagcttcactttgtcatggaagcgaccggtgtttatcatgaagcattagcctatcatctatttgaagcccgtgcgaatgtgagtgttattaatccggcgaagattagtgattacggaaaaagccttgggtcacgcaccaaaacagataaaaaagatagcgtggtcattgtccgctacggtgtaacgcagtctcccccgttatggcagccagaagccactgagattcggcagctaaaagcgctgatcgcacgttatgacgccatagagaaggacatccaacgtgaaaagaatcgcctggaaaaagcatcagtatcacaagtatctaacgaagtcatcgattccatcactacggttttaactgagcttaaaaaagagcaagctcgactcaagaaattgatcgatgatcatattgagcaacatccccaattaaagcaagacagaaaattcttggaaagtattcctggtgtcgggcccgtcatttcaagctatatgattgcgatgattcgcagtcgagattttaacgccgctcgccagtgttctgcttatgttggattaaaccccattcacagagagtcagggactagtgtaaggggtcgctcgcatttatcgaaggcgggaagtgctaagattagggcaaagctttatatggctgctgttgtcgcgacaaaatacaacccagatatcaaagcccaatatgaacggttattaaatcggggcaaatcaaaaatgttagcaatcggagcggctatgcgtaaactcgtacaaatttgttttggtgtattaaaacaccaatctccctatcaaccacaaatctaataattaggcttgtgattgtgtgaggaagatggtat

SEQ ID NO: 5964 - DNA, 1462 bp, unidentified
  source 1..1462: mol_type = unassigned DNA; note = element_92e4f9c
  misc_feature 1: note = core
  misc_feature 2..89: note = LE
  misc_feature 90..1190: note = CDS
  misc_feature 1191..1462: note = RE
  misc_feature 1191..1412: note = bridgeRNA
agacaaaatggcgccccttctgggcttgaaaaacgtgggttagatgcgagcatttaccacaaaacaaaaaaaccaacagaaggaacgcaatgaaaagaaaagtatatgtaggaatggatgtccacaaagaaacgatccaaatcgcgtatttaacgagcaattcaaaggaaatattgaaagaacaacagataaaacacaatgaagttcaaatcaaaaagttcatcaaaaaactcaaaacagaatggaatgaaatacattgttgttacgaagcgggagtaaccggttatccactttacagatatttaaagtcattgggagtgaactgtatccttgtagcgcccggaaagatcccaagacaaaataccgataagatcaaaacggataaaagagacgcgatcaaattagcgagattaatgcgaagtggagaattggaatcgattcatgttcccagtgaagaggacgaagcagtaagagattatttgagatcccgtgacagtcttcgtttggatttaggaaggaatcgtcaaaggttgatgaaattcttattaagaaaagacataaagtattccacaacgaagtattggacggtgagtcattacaaatggttgaacaatcttcactttaacaacgaaatccttcaagagacgtttaacgattattatagtcgagtgagagttcaagaagagaatctaaaagcgatggataaaaagatacaagagatagcggaaagtgaaccgtatcgagagaaagtgggaatcttaagatgctttcgaggagtggactatttaacggcaatgttcttactttgtgaggtaaacgacttcaagcgattcaaaacggccggttcgttcatgagttttcttggacttgttcctggagaatattccagcggttccaaaagaaaacaaacagggattactaaaactggaagtccgagacttagaaggattttgacggaagcggcttggcaacatcgcttccctggaacaggaagtaaaatcataaccgcacgtagatcgggacaacctgcattagtcgttgctttagcggaaaaagcttctctcaggttacacaagaaatttcgcaatctacagaggaaaaactcctcaagtgatgataacggcagtttcaagagagttatccggatttctttgggcggcaatgaatcttgtagcctaaagttagagtaatgttcatccaataattgaattcgttagagaagatgtacgataaaggaggaatacttgttggcgagagtgttgaagcaaatttgaatttcaaatttgaccttcgtttttagactaagaacagctcccgatgtatagattatcctgcggtatccaacccgcgaatatcaatctgatcaatcgtcgcgaatgcttttctctaacgagttaaattattgggtgatttaaaaaatatgcgaaaaaagatttactgctccggatggggctgccatatc

SEQ ID NO: 5965 - DNA, 1348 bp, unidentified
  source 1..1348: mol_type = unassigned DNA; note = element_92efcd1
  misc_feature 1..2: note = core
  misc_feature 3..69: note = LE
  misc_feature 70..1113: note = CDS
  misc_feature 1114..1348: note = RE
  misc_feature 1124..1339: note = bridgeRNA
taatgggatggtccgccgcagaatctcaggttgtacgggggtatagagtgcggaggaaggagacctctcatggaactacacgcgatcgggatagatctgggcaagacgctgtttcacttagtgggcgtcgacggctgcgggaacgtggttgtgcgcaagcggtgttctcgcacgcagttgctgagatacacagcgaacctgcgagtccagcgaatcggcatggaagcctgtagcggttcgcatttccttggacgggctctgcgggaacaaggccacgacgctcgattgatgccggctcagtatgtgaagccttatgtgaagacgaacaagagcgattacatcgatgcggaagctatcgccgaagccgtgcagcggccgacgatgcggtttgtgccgattaagaccgcggagcagttggatctgcaagcggtgcaccgcgtacgagagcgctgggtcatgcggagaaccgcggtgatcaaccagattcgcggtctcctgctcgaacgtggcgttaccttatccaaagggcggagtcatcttgagcaggcgcttccgcagattctcgaggatgccaacttgcaactgtccgactcgttccgcgtactgctagctcagctcaagctggaactcgaacaactgacggcacgcatcgaacagatggactccgtgatccagcacacggtgaaagagaacgaggcttgccagcggctcacgaccatcccaggagtcggcccggtgactgcgaccgctctggtcgcggcgatcggcaacgggagcggatttcggagagggcgagacctggcggcgtgggtggggatggttccccgagagtactccacaggcggcaaacagaagttgctgggcatcagcaaacgggggaataactatttaagaaggctgtttgtccaaggagcacgcaccgtgatgcagcatcgagacaaacagtctcccggactgagcaactggttagctcaactgctggcccgcactcaccagaatgtcgccattgtggcgctggcgaacaagctggtccgaatggcatgggcggtcttatgcaaaaacgaggtgtatcgaagtcccgttctggcaacttcgattttgaatcaagcatgacgtagaactttcctgccaggcctgctggcgcatactgagatggcacaacggtcgacccggcgctttctaatcctgatatcggtagaggtccctcaagaccgtctagctaatagggaagagagcgggcggattccatcatggcccggagtcactgactccaccaaaggccgaatacattggcgcagaccgaactgtcatccccgttttcgcttgcaattccgcggcggaccataca

SEQ ID NO: 5966 - DNA, 1356 bp, unidentified
  source 1..1356: mol_type = unassigned DNA; note = element_92f1a42
  misc_feature 1..2: note = core
  misc_feature 3..1127: note = CDS
  misc_feature 1128..1356: note = RE
  misc_feature 1144..1344: note = bridgeRNA
agatgtatggactcctccccttaacgggagatttacggtataaagagaaaagcattcactcaaatcaacttttaccaggagtccacacaatggaacaatgtaacgtaattgctatcgatttagcaaaagatatttttcaagtttgtattatgaccacaaatggagaaatcattttcaataaggcgatgagtatagccaaactaaaagaatggctccctaaacaaaaactttcccttgtcgctatggaaagttgtgctggtgctcattattgggcaagattcgctcagtctgtaggccataacgttatggttataccacccaaacaagtaaaaccgtttagaacaggtcaaaaaacagatgccaatgatgccatcgctattgctgttgcaagtcgagcagccaatataaaacccgctagaattttatcaatcgaacaacaaggtcttcagtctattgaaaaaatgcgaagtatgattgataagcataaattacaactatcgaatcaaatacgcggtttgttgctcgagtttggcattgttatcaataaaggtagtaaaagctttaaagaacggatacctgaaattctagaagatggggacaatgatttatcttttccaatgagaaaggttttacttcaaatgcggacactttattctcgtcttgaagaagattttgatgtgataaataatgaactactacaattaacagcacaagacactgactgccaaaggttaatgaagcttgaaggtgttgggcctatcactgctgttaggctaaaaatacagctaggcaatggtgggcacttcaacagtggcaggcaagtcgctgcttgtatcggtcttactcccaaacagcacagcagtggtggaaaggtaaagttaggctcggtaggaaaaagctcatgcgataaaccgttacgcagttgtattttcttaggcgcaagagctgtggtgtcaaagctaaaaaataggccagccaaaacagaaaaagaacgttggttaaaagccctaatagaacgaagaggtgttaattgtgcatcgatggcactagcgaataaaacagcacgaacagcttatgcgttattgaaaaacaatactgattacaacccggtattaattgccgcttagtaaagtaaaaaagagtttaatattgtcaataaagatcttttaaatggttagaccaaccttcaacagcctgtaatatgctctgaacatatttataatgtcgtgcaggagattaggcatgaaggtgcgaatacatcaaagtgaccgggatagcttcccaataagagtccgtatataagcacgcatctaatattttaaaaattgttattgcacaatatgaggagtccatata

SEQ ID NO: 5967 - DNA, 1379 bp, unidentified
  source 1..1379: mol_type = unassigned DNA; note = element_92f1b90
  misc_feature 1..3: note = core
  misc_feature 4..89: note = LE
  misc_feature 90..1112: note = CDS
  misc_feature 1113..1379: note = RE
  misc_feature 1111..1366: note = bridgeRNA
tgatggggtggacggcccctgtgtccggcgtcgaagcgccatagggtggtcgttgttgaagcaaccgccacgagcaggagccgcccaccatgaagattagcacgatcgggattgatctcgccaagtccgtattccaggtccatggcgtcgatgcagcgggtcaggtcgttgtccgcaggaagctacgacgcgccgaggtattgaagtttttcgaggcgctgccgccctgccgggtgggcatggaggcttgcgccacgtcgcacttctgggcgcgagagatcagcgccttgggccacgacgtccgactgatgccccccagttacgtgaaggcttatctccgccggcagaagaacgatgccgccgacgccgaggcgatctgcgaagccgtgacgcggcccagcatgcgattcgtaccggtgaagagcgccgaacagcaaagtgtcttggtgctgcatcgaacgcgcgatctgctggtgcgccagcgcaccatgttgatcaacgccatccgaggccattgcggcgagtttgggataatcgctccgcagggcgcgcgtcgatcggctgaactcaccgagcagctcagcaatgcgccagcacccgtctttccagacctcgcgcgctccgccttgctgatgctggccgaccagctcgatgcgctggccgtgcagattcatgctctcgatcggcaattgatgatctggcatcgccagaatgaagcgagccagcgcctggcgacaatccccggcgtcgggatcatcacggcgaccgccctcgccgcgtcggtcccggagcctggtctgttccgctctggccgcgagttcgccgcgttccttgggctcgtcccacgacagaactcctccggcggcaaggaccgcctgggccgcatctcgaagatgggtgacggctatctgaggaagctgttggtggttggagcgacatcggtgatccgccgcgcggcggtcaatgcatcagccaccggtgtctgggtgcgctccttgatgacgcgcaagccgagccggttggtcactgtcgccatggccaacaagaccgcgaggatagcatgggccgtcctcacccgcggcgaggtctatcgcgcaccggtgatcgtctgatcgagtctgtagcgggcgacctccgctgcttcggactgtgagggtgcagatgcgctgatgaggatcgaaaagcggaccgcagaacaggacaacccggggtgctgtcggagcatcaagctcgatagactgagtgggacctggtcagcggactccatcagggccagcggctcgtctcaagccgcgcaaacaggccggacagatgaccgcacccgacagatcttcagctcggctcaactttccccttgcagctcaggggccgtccacaga

SEQ ID NO: 5968 - DNA, 1419 bp, unidentified
  source 1..1419: mol_type = unassigned DNA; note = element_92f26ce
  misc_feature 1: note = core
  misc_feature 2..227: note = LE
  misc_feature 228..1406: note = CDS
  misc_feature 1407..1419: note = RE
  misc_feature 13..242: note = bridgeRNA
ctacttgtttcatggacgcacggcttgggcctggccaggcttgggtcgaggtgtccggcggagtgctctcacatcggctgcccgcggctggttggcgtggctctctcatggcgtgcgcatcgccgggcaccgtgacgaggtgaggctcaagaggggtctgcccagctcgaagtagcgctgccctcctcgtcgacgtctgacgtccatcgaagaggaggaaaaaggtcatggcgcatgtggtgatcgggatggacccgcacaagaggtcggcaacgatcgaggtcctcgacgatcgggagaagctcctcgcgacgggccggttcggcaccgaccgcgacggctacaagcaactgctagcggtcgggcggggatggccgaaccggctgtgggccgtcgaggggtgcgaaggggtcgggcggcacatcgcccagcgcctggtcgccgacggcgaaccggtcgtagacgtgccggcgaagctgtcggcgcaggcccgggtgttctccaccggacagggccgcaagaccgacgccaccgacgcgcactcggtcgcgctggtcgcgttgcgcacacctggcctacggtcggtccaggtcgatggcgcgacggtggcgttgcggctgctggtggaccggcgtgacgagttgggtgcggcccgcaccttcacggtgaaccggctgcaccggctgctggtcgagctgatcccaggcggggccaagacattcctgtccgccacccaggccaaggcgctgctggccacggtccgtccgcgtgacctggtgggcaagacccgccgcaagctggccgccgagctgatcggcgaactggtcagcatcgacaagcggatcaaggtcgcgaacaccgagctccgcgagctcgtggaagccaccggcagcaccctgctcgagctccatggcgtcggcccctccggcgcggcccgcctcctcggtgacatcggcgacgtggccaggttccccacccgcgggcacttcgcgtcctggaacgggaccgcccccatcgacgcctcctccggcgagcagaaccgccaccggctctcccgagccggcaaccggcggatcaaccgggtgctgcacatcatggcgatcgtgcagctgcgcaacgacaccgaaggccgcgcctactaccggcgcaagctcgccgccggcaagaccccgatggaggccatccgcgccgtgaagaggcggctctccgacctcgtctaccaccagctcgtggccgaccagaaacgccaaagccggacagcagcggggacgggtccgggaggacaagtgggggcggctactggctccagcgcggccgactccaaccccaacgtcgacgcttcggagaagtcacttcccggacccgccacgacgaagcctaagaccgacctcgtcgccgtgtcttgacacagaggggagc

SEQ ID NO: 5969 - DNA, 1359 bp, unidentified
  source 1..1359: mol_type = unassigned DNA; note = element_92f3d81
  misc_feature 1: note = core
  misc_feature 2..77: note = LE
  misc_feature 78..1103: note = CDS
  misc_feature 1104..1359: note = RE
  misc_feature 1143..1354: note = bridgeRNA
caatggtatggactccccacctcaactgactgtgtcagctaaagttacaggtacaaaccaaaataggagcccataccatgaatcaatctagcacaatctcaattgatttagccaaatccgttttccaagttgcggtgtttaatcgccatgggaaacgaatgtctaatcaagcaatgtctcaaaagaagatgttgatgctcattaaccaacacccaaattctaccatctgtatagaggcttgctctgcttctcattattgggggcgtacttttcaggatagaggccataccgtcaaaattatcccccctcaaaaagtcaggccgtatcgcaatgggaataagaatgatgctaacgatgccattgcaatttatgaagcttccttacgatcagatattcatgttgtaccggtaaaaacaccagagcagcaagatgtcgcgatgctacttagcttaagacaaagttatataaagcagcgcacggcagtaagtttacggatccttggttatgctgcggaacacggtattacttttccacaagggatcaataaactgcgagaaatgatccctctcgctattgaagatgcagagaacgaattaacctccgtagctagattcgttcttcgagaattgtatgctcaactacttagcattgatgaacctatagaaagagttgagtccgaacttattgagttcgcaaggcaaataccagcttgccaattacttatcactctgcgaggtgtacgttggattattgcgagtgctattttcgcccgtatgggtgatgcttcagcctatagaaatggtcgaggagcgagtgcaagtttagggttagtcccaacacatagaggtagtggtggtaagaacaaaaaccacggaataagtaagtccggagataaaacccttcggtctcttatagttcatggagcaagagcagtcgtagctaatatacgagataaaaaagatcgattaagttgctggctccgaaacttattagaaagaaaaccatttaaccaagttgtcgtcgcccttgcgaacaaaacgatcaggatggcatgtgccatgttaaaaagtaatcaatcttataatgaagcgttaatcgcttaacgatcagctttataaggttaagaaaaacttcgatacccacatgtaagcaagtaagtcatgaatatagcgctaacagagcaaacaagggaaactctgtgagggacgaaggcgatagtacgccactcgctcgataagaccccttgttcagtggattaagccatagaggttcggggtagctccccataaagaaaccggatatacgtgcacttgtaaaccgctaacttaagcttcttgcattactaggggagtccatata

SEQ ID NO: 5970 - DNA, 1544 bp, unidentified
  source 1..1544: mol_type = unassigned DNA; note = element_92fde71
  misc_feature 1..2: note = core
  misc_feature 3..247: note = LE
  misc_feature 248..1426: note = CDS
  misc_feature 1427..1544: note = RE
  misc_feature 3..225: note = bridgeRNA
ctcgtattatagagtagtagtttttagtgaccctctccaaggtcatgtgctacactgtttaggatgctgtggattggttttgtatcacctaccgcacagacggttcaagtgaggctccaaccacagccctttgcagtattgttaatcagttagataccgccagacggtttatttggaacgaggttacaagagcaaagtgtcctgtggtcctaaacagcatcaaagattatacgccggaggtatcatcatgatttgtgtgggaattgacgtagcaaaggacaagcatgactgctttatcctcaactcagaaggcgaagtgcttgcggacgtattcaccattccgaatagtcgagatggatttgagactctgcttgagcggatccgttcttgttcctcagagaccgacaaaataaaagtagggcttgaggcaaccggacattacagctacaacattctcgggtttcttcttgactgcggcctgccaacctatgtcataaaccccttgcacaccaacctctaccggaaaagccttagcctcagaaagacgaagacagaccgtgtcgatgcacgaaccattgcagctatgctcatgtctgatgtggacctcaagtcctacacggatacagcataccacaacgaggagctaaagtcactaacaagatacaggtttgacaaagttcgtgaacgagctaaactcaagcagtccgtgtctcgtctggtcaccattctcttcccagagttggagaaactggttccttccctccatatggtgtctgtttactcactgctcagcgagtttccgggcgcacaccaaattgccagatctcatctcacacacctgaaaaatgttctctgcgatgcctctaaaggccactacggccgggataaggcagtggagattcgtgacgcagcaaggcgttctgttggctctcgtatgcctgccaaatctctggagctgaagcacacgatccatctcatccgcattcttgatactgagattgaggagattgagtctgagattaccgctattatggacgagctccaatctcctattaccaccatcccgggtatcggctaccgtatgggtgctatgattttggccgagattggcgatttttcccgctttgcttcaccggataagattcttgcctacgctgggctctctccgtcaacttaccaatccgggcagctctcaatgaacggagcttattcgcacatggagaaaagaggatcaaagtatcttcgctacgccctcttcaatgccaccaagtacgtctgtcactggaatccatctttcgctgcctatctgtctaagaagcgggccgagggcaagcactacaacgtagctatctctcacgccgccaagaagctcattaggctaatctgggcaatggagaagtctggccaatcgtaccgagctgcctgacctcaaccttccatactgtcatttagagcgccgcaagacgctcttttcggcgtgggaaaaccgcttccggcagaatgtcaatttttctcatttaggggcttgacttttaatagttagt

SEQ ID NO: 5971 - DNA, 1396 bp, unidentified
  source 1..1396: mol_type = unassigned DNA; note = element_930d5b1
  misc_feature 1: note = core
  misc_feature 2..89: note = LE
  misc_feature 90..1118: note = CDS
  misc_feature 1119..1396: note = RE
  misc_feature 1165..1391: note = bridgeRNA
caatgggatggactcctcctcacccaaacggcatcgatgtgccagactggaagtgtcatttcaccagtcgatgaggaggaggagtcagcatgaagcttattcgcgttggggtcgatttggcaaagaatgtattccaggtgcacggcgtggaccgcaacgaaaagccggtgtggcggcgccggctgacacggagcaattggctgcgggtggtgctcgagacggtggagccaggctgccagattggcatggaagcgtgcagtggggcgcaccactgggcgcgcaagctgcaggagcgaggttacacggtcaagttgattgccccgcagttcgtgaagccgtatttgcagagcaacaagaacgacgccaacgatgccgaggcgatctgcgaggcgatgagccggcccaagatgcgctttgttgcggtcaagacggttgagcagcaagacattcaggccgttcaccgcattcgaagcggcctgatcgagcagcgcacggccaaaggcaatcagatccgagggctggtgagcgagtacgggctggtagccccgcgcgagctcacgcagcttcgccgggcgataccgctgtggctggaggatgcgcacaacggcttgagtgcgcgcttccggcggctactcaatgcgctgtggggcgaccttcagatcctcgatgagcgggtggccgagctcgatcgcgagattgcgctcattgcgcaaagcgacccagcagcacggctacagcagctttgcggggtcgggcccattgtcgccagcgcgctggtagccgcggtaggcgatggggcacagtttgccaacggccggcagatggcagcggcgctggggctcacacctaaacaacacagttccgggggcaaggacaggcagcttgggatcagcaagcgaggcgatgcctacttgaggatggtgctgatacacggggcacgatcggcaatccggacggccaaggccaagagcgatcggttaagcctatgggtgagggccttgctcgagcgccgccaccccaatgtggtggcagccgcgttggccaataagactgcgcgtatcgcctgggcgatgctcaggcgcggcagcgaataccgaccggagtcgatcgcgcactgatgtctagatgctttattgctgcacgaataggaggagcctctcaattcacgattgcacagcaagccgaacgatggcaaacaggtcgaaccggcgccggtagaacccgcgaatgaccagatgcgagaagcacgaacaaccgattgggaactggtgcgcgaatagcccatcatggccgagcatcgcaagaccgatgctgtaacaacaggccggatatacgtgagcagtcgtacctcatgcccaaagaacggaatgcttgcaaacgaggaggagtccatata

SEQ ID NO: 5972 - DNA, 1595 bp, unidentified
  source 1..1595: mol_type = unassigned DNA; note = element_93308a7
  misc_feature 1..4: note = core
  misc_feature 5..373: note = LE
  misc_feature 374..1585: note = CDS
  misc_feature 1586..1595: note = RE
ctcactggactaccctccgttcaaagcgtggcttacgcaccgtgctgcgcagggttgtccacggcggcgggcgtcgcttgcgacgaacgcacgccgcggtgggcaacccgtgttcagcggtgcggagttgcttgttgacgcgctcggctgggcagagagatgtttcgttgcgacttccgtgcccttgggttgactgcttcggcggctggcctctcgaaggctcgcatgagacctgcagcccccaaggtgccggaagacccagacgggctacaggatgtagcgccaaggttgatcgccaggagcgcctatcagtgagcgacccgcgtgggcttccgacacggcaagtcataccgcaacttgcaggagtttgtccatgaccaagtactttgccgggctggattgggccagccgaacccatgccgtgtgcgtcgtcgacgagcgcggcaccgtgcgatgcgaattcgaagtcagccacgacgcagccggactggccgagctgtgccggcgcctgaaggccgcgcgcgtcacagccgtggcgatcgagcggccctcggggctggtggtcgatgcgctgctggaggctggcttgcaggtggtgccgatccatcccaatgtcgtgaaggccactcggccgcgctaccgcagccacggcggcaagagcgacgccactgacgcctacctgctggcggacttgctgcgcaccgacggccatcgcttcaagccgctcgcgccccaaagcgacgagatccgcaccctgcgcgccctggtgcgcgggcgcgatgacctggtcgccacccgcgtgcagctggccaaccaactgcgcgagttgcttcagtcgttctggccgggcgccgccgaggtgttcgccgatgtggattcgccgatcgcgctggccttcatccagcgctatcccacacccgagtcggccagccggctgggccccaagcgcatggctgccttctgtgcccagcacgcttacagcggccgccgcgcgcccgaggaattgctccagcggctgcaccaggctgctgctgtcgcattgggcgagctcgagatcgaagccaagggcgagctggcatgcagcctcgcgcgcgtgctcgagcgcctcgtcgaacagatccgcctgctgaccagccgtatcgagcacgccgtcgcctccagcgaagatggccagatcatcatgagcttcccgcgcgccggacgcatctgcgcagcccagatcctggccgagatcggcagcgtgcgcgagcgcttcgacaatgtcgaacgtctcaccgccgaagccggcgtgactccgattacctacgagtccggcaaaagcaaggcagtggcgtttcgatgggcctgcaaccatcgcctgcgcgccgccatcacctgcctggccgacaactcgcgccacgccagcgcctgggccgcgcaggtctatcaaaaggcccgcgctcgcggctgtgatcatccgcacgccatccgcatcctcgcgcgcgcctggctgcgcgtgatctggcgcgcttggcagaaccaccagccctacgacgtgcagcgacacaccgccgccatgctccacctcgccgcaactgggggttgacacaggatgt

SEQ ID NO: 5973 - DNA, 1381 bp, unidentified
  source 1..1381: mol_type = unassigned DNA; note = element_93338d0
  misc_feature 1..2: note = core
  misc_feature 3..83: note = LE
  misc_feature 84..1115: note = CDS
  misc_feature 1116..1381: note = RE
  misc_feature 1095..1368: note = bridgeRNA
cgatagggtggacgcctccatccgacggcatcgcaatgtgccatggtggtgttgttgaaccgccaatgggaaggaggcgtccaatgaaggaagttagcatcatcgggatcgacctgtcgaagaacagctaccagtttcacggggcgcatgcggacggttctgtggcgttccgggtcaagcggtctcggggtcgggttattccgtttctgtcgtctcagtctgcctgcacggttgcgatggaggcgtgcgggggcgcgcattactggggccgcgagatcggcaagctgggccatgaggtgcggctgattccgccgatttatgtgaagccttatgtgaagcgccagaagaacgacgcggcggatgcggaggcgatctgcgaggcggcgtcgcgcccgacgatgcgcttcgttgcggtgaaaagcgaggagagccaggcgcgggcgatgcagttgggggtgcgcatgctgctggtgcgccagcgcacgcagacgatcaacgcgctgcggggtcatcttgcggagttcggcctcgtggctcccaaggggccggcgcatgtggcgcgtctggcctgggcgcttgagggcgaggagggggcggcgctgccggcgctggtacgtgagatgggggcgctgttggtagagcggatcgccgagttggaccggaaggttgcggagttcgaccgggtgctgcgggccgccgcgcgcgaagacgaggaggccgcccgcgcgatgactgtgccgggggtggggccgatcaccgcgctggcgctccaggccctggccccgccgctcgaaaccttccgcaaggggcgcgacttcgccgcttggctcggcctcacgccccgccagcgcacaaccgccggcaagccccggctcggcaagatctcgaagatgggccagaaggacttgcgccgcctgctggtggtcggcgcgatgtcggtgatccagaacgccatccgccggggcaagactgacgatccctggctggcgcgcctgctggtgaaaaagcccaggaagcgcaagctcgtcgccgtggcgctcgccaatcgcatggcgcgcgtcctctgggcgctggccatgaagaaggaaacctaccgggctcccgccgtcgcctgagaaggtggcgcggcgagccgtcggaggatgcaggcaggccgaggcaaggagtaagggcaaacggtcaatgagacgggatcgggaaaaccaggctgatccggcgcgccgcgagcgcatggccccgatatggacccggtccgcgtatctccatactggcccgcggcgactcaacagccgcacaagggaaaccggacacacgactgcgcctgaccgcatgcgccatacccagccaaaaaaacgcttgcatccagggaggcgtccacaca

SEQ ID NO: 5974 - DNA, 1363 bp, unidentified
  source 1..1363: mol_type = unassigned DNA; note = element_9337666
  misc_feature 1..2: note = core
  misc_feature 3..76: note = LE
  misc_feature 77..1102: note = CDS
  misc_feature 1103..1363: note = RE
  misc_feature 1129..1351: note = bridgeRNA
tgatgctgtggacggctcccaccgagcggtgaggtagcatggctgctcgaagcagccatcgatacaggagcagcctatgagcacggtgaccaccattggtctggatatcgccaagtccgtcttccaggtgcacggcatcagcgccaccggcgcggtgctgatccggcgtcaggtcaggcgcgggcaggtgctcaagttcttcgcttctctaccaccctgtttgatcggcatcgaggcctgtgccagtgctcatcactggtcgcgagagctccagagcctcggccatcaggtgaagctcatgccgccggcttacgtcaaaccatacgtgaagcgacagaagaacgacatggccgatgccgaggcgatctgcgaggcggtgacccggcccaccatgcgctttgtcgagaccaagacacccgagcagcagagcatgctcatgctgcaccgggtgcggctgatgcaggtgcggcagagaattatgctgaccaacgccatccgagcccacctggcggagttcggcctggtggcaaagatcggccgcgagggtgttgatgagctgctgctgttggtccgtgatggggatgagcgggtgccggagctggcccgcacctgtatcctggcgttggccgagcaactggtgctggtcaagcgccagatcctggagatggaccggcgcatcaccgcctgccatcgggccagcgaggtcagccgccggctggccgagatcccaggcattggcccgctgctcgcctcagccctggtggcccatgtgcccaacccgaaggctttctcttcaggtcgtaatctggcggcctggatcggactggtgcccaagcagaactccagcggcggcaaggagcggctcggcggggtgaccaagcagggcaaccgctacctgcgctcgatgctgacggtgggcgcgcttgccgtgatccgctttgcccagcggcacgggacgaagcggccgtggatcgtgcaactgctggcgcggcgggccacgaaggtggcggcggtcgccctggccaacaagatggcccgaatggtgtgggcgatcatggccaagggcgagcactatcgcgagcctgttgtacaagcggcataatcatcgccggaaggctccggcgatcaggaggttgggaagggcgaaaggacgttaatgcaagatccggtcgagccgggaagcgggacaccccattcgtgccagagcatcttggaatgcgagcttttggtcgggaccccttcgcggagggcattatggccagcggtcatgagcaccgcagtaacaggtcgaacacatggccgcaccgaccagccttgcacaaacgttcaacaaaacccttgccaacagggagccgtccacaca

SEQ ID NO: 5975 - DNA, 1442 bp, unidentified
  source 1..1442: mol_type = unassigned DNA; note = element_9351056
  misc_feature 1..2: note = core
  misc_feature 3..230: note = LE
  misc_feature 231..1427: note = CDS
  misc_feature 1428..1442: note = RE
  misc_feature 10..223: note = bridgeRNA
gctctaccttcttgaccgggttgatcgggccgttcgtaggtttgggtcgcccaggggtgctgggtgtggctatcagccggctgccgtctcgtggcttccctcgcttcgccgcccggcaccccacgacgactcggccgccgattaggaagtgcgagcaagtcgctgagtagagcaatgccggcgaggtcgtccgtggtgtcaacagcacggacacgcacgtcaggagcgcgatgagccggatatgggcggggatcgacagcggcaagggccaccaccacggcctggccctggacgccgagggcaagaccctgctgtcgcggcgggtggccaacgacgagcccgagctgctgcaactggtcggcgatgtcctcgccctggccgacggccgtgaggtgacctgggcgatcgacatgaccggcggggagccggccctgctgctgagtctgctgatcgcccacgggcaggacgtcctctacctgcccggccgcctggtgaatcgggccgccgacggctaccgcggcgagggcaagaccgacgcccgcgacgcctacgtgatcgccgaccaggccaggatgcgccgcgacctgcaaccgatccggcccggcgacgaggccgcgatcgagctcaggctgctgaccggccggcgcgccgacctggtcgaggaccgcacccgcacggtcaaccgcctgcgcggcaccctgctgagcatgttcccggccctggagcgggctctggacgtgaccaacgtcggcccgctcaagctgctgaccggctaccggaccccggccgcgatccgccgcgccgcggtcacgaggctgtccaaatggctggccaatcgcaaggtccggaacgcgagagctctcgccgagacggcagttgaggctgctgagcggcagtacacctccattcccggggagaagaccatcgccaggctggtccataccctggccgagggggtgatgaccctcaacgagcacatcgccgagatcgacaagctcatcgagggccggtttcgcgagcacgaactcgccgagatagtcgagagcgtcccgggcatcggcaccgtcctcggcgccgagttcctggccggcgtcggcggcagcctggacggcttcgcgtcccctgacgccctggcagccttcgccggcgttgcccccgcgccacgggactcgggcaaggtcagcggcgacctccatcgtccgagcgtctaccaccgcaggctccagcgcgtcttctacacctccgcgttggtcagcatccgttgcgacccgaactcacggacgttctacgaccgcaagcgcgcggaaggcaagcggcacgtccaagccgtgatggccctggcccgccgacgcgtcaacgtcctgtgggccctgatccgtgaccggcggtgctaccaggtcgcaccgccagtcaccgaagccgcgtgacaacgacattaggaa

SEQ ID NO: 5976 - DNA, 1531 bp, unidentified
  source 1..1531: mol_type = unassigned DNA; note = element_9353d98
  misc_feature 1..3: note = core
  misc_feature 4..266: note = LE
  misc_feature 267..1430: note = CDS
  misc_feature 1431..1531: note = RE
  misc_feature 4..251: note = bridgeRNA
tcttgtatgatggtttatgtcctgagggacataatctcatactctcctttccgcccttataatgaaattgacctgtgaaagtatttatatattctacagcttagtttcagactaagactgttccaaggagactatactccactgtctgtttcattgttgataggttggatgttccaatacgacgagtattgagttcttatgtcacgcaaggatacagagacagatcatctgtggagacctcaggtctagaaaggtggtctgttttcatgaccgtttacgttggtgtcgatatcgccaaagaacttcattacgctgccatcatgaatgatgatggtgtcgtatccaacccgttttctttcgagaataatgacaagggcttccagtcattcctctcacatctcgctcctttcgagaaggagtctgtcctggtgggctatgagtccactgcccattaccaggagaatctggcctattttctgaagcgggagggctatcgaactgcagaactgaaccctctgcagacctctgctctcagaaaggccaatatacggaacactaagactgatcgtgttgacgccaaactgatctgcctcacactggcgcagcacaatgccgctctcagtggaagagatgtttctcgcttggacgatctttacagcttatgcaggatgcggatggatcttattaccaaacgtactcaatgtaagatccagtttgttgccatcatggatcgtatctttcccgagctcgcaactttctttaaagggaatctgcacatccataccgtttatcgtctgatagagaagtatcctctcccttctcagataaagaaaacccgaattgatgtgctcacaagtctcttccagaaagcttccaaaggccactatggcagagacaaggccactgcgctgaagaaacttgcgtctgtatccgttggtattccttctgatactttcgcattccaggcacaacagctgatccatcaaatcgagttttattcagatcagattgccgcagtggatcagaaaatcgattctgacccggtcgttaccagttcgctgctgatgacgatcccagggataagttcctatgcctgtgcgtgcattctgtctgtcataaagaatattaacgattttcatggaccttgtaaaatacttgcctatgccgggctggatcctgttatccgtcagtccggaaaattcaatgcccgaagcacacggatgtccaagcgtggaaacagcctgctccgctactccctaatctggacagccggaaatgttgtcctgaacaacgcaacatttgcggcatattacgccaagaagatatcggaaggcaagagccattaccaggcccttggacattgtgccaagaagctggtgaagtcgatcttccacgttttgaaatacaacgaagcttttaatcttgcctgatcagtaattcaatatcacatcctctccatggagttctttttgtcatgccttggtcatcaatcatgtttttgattgatttcaccttgacacttcatggttgg

SEQ ID NO: 5977 - DNA, 1520 bp, unidentified
  source 1..1520: mol_type = unassigned DNA; note = element_93552fd
  misc_feature 1..4: note = core
  misc_feature 5..259: note = LE
  misc_feature 260..1510: note = CDS
  misc_feature 1511..1520: note = RE
ctcactggtgcaccatccttgtgtcggtggtctcagatggactgccgatgcacccgaggtgccgccgggtcactgccctgctcgcttgacacgatcgatgtccggcatgagttctgcaggacccggcggtcgcccgggccgcgccgaccgtcgacagggctgagcgccaccgagcgccgaacagtgagcgaaccggctgccgcgtcccggcaccgcacgagggtgcctccccactgggtctagcagcgaggaggctgacatgaagtctgccagaaacaccctgcccgatgaaccacccaacgccctgacctgcggcatcgactgggcccgcgacgatcacgccgtgtccgtcgtcgatgcccgcggccgcgaggtccaccgctgcaccgtcgaacacagcgccgccgggctgcgcgaactgctcacagtcctcgcccacaccggcgtctgcgaggtcgcgatcgaacgccccgacggaccggtgatcgacaccctgctcggcgccgggatcaccgtcgtggtgatcagccccaaccaggtcaagaacctgcgcggccgctacggatcggccggcaacaaggacgaccgcttcgacgccttcgtcctcgccgacaccctgcgcaccgaccgcacccgactggcgccgctgacccccgaccacccggccaccgtcgcgctgcgccgactctgccgggcccgcaaggacctcgtcgcccaccgcgtcgccctcgccaaccaactgcgggcgcacctgcgcaacgtcttccccggcgcggtcgacctgttcgccgacctcgactccccgatcagcctgatgttcctgacccgcttcgactgtcaggaccgcgccgactggctcacccccaagcgcctggccacgtggctgtccggcgtcagctacagcggccgcaccgaccccgcggtcctgcacgcccgcctcaccgccgcaccccgcggcgccgtcggtgacgacggatccgcgcacgcccacatcacccgcgccttcctcgccgccctgcgcaccctcggcgaacagatcaagttgcccaccgaacagatcggcgagcaactcgccgggcacgccgacgcccacatcttcaccagcctgccccgctccggcaccgtccgcgccgcccggctgctcgccgagatcggcgactgccgggcacgattccccacccccgagtcgctggcctgcctcgccggcgtcgccccctccacacgccagtccggcaaggccagaagcgtcggactccgttgggccgcagacaaacaactccgcgatgcagtcaccgacttcgcgggcgactcccgccactcgaacccctgggccgccgacctctacaaccgggccgtcgcccgcggacacgaccacccccatgccgtccgcatcctcgcccgcgcctggctgttcgtcatctggcactgctggcaggacaacctcgcctacgaaccggacaaacacggcgccctccaacgactgctcgtccaccaacaaccggcggcttgacacagggcaa

SEQ ID NO: 5978 - DNA, 1451 bp, unidentified
  source 1..1451: mol_type = unassigned DNA; note = element_935cabf
  misc_feature 1..3: note = core
  misc_feature 4..119: note = LE
  misc_feature 120..1157: note = CDS
  misc_feature 1158..1451: note = RE
  misc_feature 1200..1402: note = bridgeRNA
agatggggtattcggcttcgcgccatcttcatcgactgtcggaggtgctgcgcttcaggctgatggtacaccgtggtctgggtaggacccgccacaagcatcagggggagaagcgcagcatgaagcattatgccggcctcgacgtctcggtcaaagagacttcgttgtgcattctggacgagacgggcagggtctgtcgcgaactgaaggtgaccagccatccagacgacctggtgcaggtgctccgggatccggcctggcggctcgagcgagtcgggctcgaagccggcccactgtcacaatggctctatagcgggctggccatggccgggctgccggtcatctgcatcgagacgcgccacaccaaggccttcctgaaggcgccagtgaacaagaccgaccgcaacgatgctcgcggcattgctcagatgatgcgcgtcaacctgttccgacctgtgcatgtgaagacgctcaccagccagaaccgacgcgccctgctgacggcccgcacgttgttgcaggagaaagccattgccatcgagaacgacatccgcggtctgctgcgcaactttgggcttaaggttgggatcattggcaaagtcaaattcgaggaccggatccgcgagctcgtggccgacctgccggagctggctgacatcatggcttgcctcctcgaggcccgtcagagcctgcgggagcgcttggctactcttttccgcaaagtgttggcaatggtccgggaggatgacgtctgccggcgcctgatgaccattcccggtgtcggccccgtggtgtcgttggcctttagcgccacgatcgacattccggcgcggttcaagaattccaaggcggttggccccgctctggggctgacgccggttctcaaccagtccggcgagagcagtcgcatcgggcgggtctcactgtgcggcgatgccatgatgcgagcgcttctctatgaggcggctcaggtgctgctgacccgggtgcagaaatggtcgtggctgaaggcctgggccatgaccgtggcccgacggcgcggcctgcaaaaggccatcgtggctctggcgcgtcgcttggccgtgatcatgcaccgcctctggagcgatggcaccgagttccgctggacaaaggagagtgccgtggcgaccgcctgatcggcccgttggaacagcctgtcacacgaacagaaagctagacgagtttccgccagccgatggagagacgccccttgcgggacgatggatgaggtgagttcgctagggttcttgtgtcggtcgcgcctggcgcgatcagaacgcgcgacagattggactgcctcgttcttctgatcccatcatgggagagcccgagagctgatcccgaagagaagcaaggacccgcgagtgacgtcaaacatcggcaacgtggaaggcctgaaaagcgcttgacctcaaatcgccgaatagaga

SEQ ID NO: 5979 - DNA, 1188 bp, unidentified
  source 1..1188: mol_type = unassigned DNA; note = element_93660ec
  misc_feature 1..2: note = core
  misc_feature 3..234: note = LE
  misc_feature 235..1173: note = CDS
  misc_feature 1174..1188: note = RE
  misc_feature 22..193: note = bridgeRNA
cttgtataatcatatccgtgtgtctgtatgaaaaaggttcatacgaaaaggacgggacaggccgcccgcccctgggtcgatacagaccgtgttgtagcaagggtcgtcccgttctggctctgcgaaagctcgaacagttgcctgggtaagtaaagcccgcatcctctgcaaggttgagctcggttggagccgatccaaagcataaaggaggtttaatcgttgaaagctccgttgatgtttgtcggtatcgatgtgtgcaaagctgaactcgaagtcgcgattcgtcccaccacacagagttggtcggtggccaacgatcaagtcggtatcacggctttgatcaagcgttttaagaagcttcggccagagctgatcgtgctggaatccactgggggtctggaacgtcagctcatcaccgctctgatcggcgccaagatccctgtggtcatggtgaaccctcgtcaagtcagagacttcgccaaatccagcgggcaattggccaaaaccgatcgcattgacgccgcgatcctggctcactacgccgaagtgttccgtcctcaaccgcgcccgttccccgacgagctcactttggaactccgagcactcaccgctcgccgacgacaggtcatcgatatgatcgtcgctgagaaaaaccgcttggccacggcttgccgtgccattcaaaaacggatcaccgctcatatcgcctatctcgaacgggagctgggcgaggcggatcgagacctcgatcggttcattgaaaacaatcccctgtggaaagaaaaccaacaaattctctgctcgaccccgagcattggacccgtgagcagccgtacgctcatcgcggaactccctgaactcggcactctgggccgaaaacaaatctcggccctggttggcttggctcccttcccgcgtgacagcgggactctgagaggccgtcgaaccatctggggaggccgggcttcggtccgcactgctttgttcatggccaccttgtccgccacccgtttcaatcccgtcatcgcggccttctacaaacggcttaaggccaaaggcaaactccccaaagtttgcctcgtcgcttgcatgcacaagctactcatcattcttaacgcaatgctgaaaaacaaagtaccttggtctgaaaatttctctctccagacctcttgactcgaaatacagttg

SEQ ID NO: 5980 - DNA, 1399 bp, unidentified
  source 1..1399: mol_type = unassigned DNA; note = element_9368bb6
  misc_feature 1..2: note = core
  misc_feature 3..71: note = LE
  misc_feature 72..1124: note = CDS
  misc_feature 1125..1399: note = RE
  misc_feature 1153..1387: note = bridgeRNA
tgatggtgtggacggctccctgtggtcctgagaggatgctgagcagttgaatgtcagtgaaggaaaccaccatgcatcagttggtccgtatcggcatggatacctcgaaaaaagtgtttcagctccacggcgtggatgccgaagagcgggttgcgctaagccggaaactgagccgacatcagatgatccggtttttcgagaaactgccgccgacagtgattggcattgaagcctgtggggcctcccatcactgggccagaacccttggcgcgctcggccacgaagtgaggctgatggcgccacagcttgtcaaaccttacgtcaggcgcagcaagaatgatgcggcagatgccgaggccctctgtgaggcgatgagccgtccaaccatgcgttttgtgccagtcaagacggttgagcagcaggcagccctcatgcttgtcggcatgcgggagcggctcgttggcagacgtacgcagctggccaactccatccggggatatgctgccgaattcggattgactgctccccttggtctctcccgcgttgagccgttcctcaggcagattgcgtccgaggatatccttccctccctggcgcgcgagatgtttgcacagatggcagaagagtatggtgccctgatggagcatatcagggagcttgatgaaaaacttgccacatggcatcgaagtcaggatgtgagccgcaggctggccggaattcctggcataggtcctctgggagcggctcttctgctcatgaaggctccggatccgcatctgttccgttcaggccgggacttcgcggcctggataggtctcacccctcgggatcattcgtccggcggcaaagtcagacacggcgggattacccgggccggagacagccgcctgagaagcaccctggttgtcggagcaacaaccgtgcttcggcatgtgcggcagaacaaacagagccgcctcgccacgccgtggctcgtcagtcttctgggcagaaagaagccgaagctcgctgctgtagccctggccaacagaatagcgcgcattgcatggaagctgatgaccagtggcgagacataccgcaagccggtggcagtagatgcaatgacagcggccaccgcttcctgacgaaattggccaacacgacgcacgggaaaaagaacgtgatcgtgtgagccgataccgcagtcctgcaaagaggagatgggggatcgttcgatctgaatggaagacactccgcaagagcccgtggttttcaaaaaccgcagaactgaatggaacttccatcgcagaaaccatcttggccagcagtctgaacactgcaacaacaggccggacatatgggtgcaaacgacacggtcacaccactattttcccccttgcaagacagagccgtccacata

SEQ ID NO: 5981 - DNA, 1311 bp, unidentified
  source 1..1311: mol_type = unassigned DNA; note = element_9376af6
  misc_feature 1..3: note = core
  misc_feature 4..217: note = LE
  misc_feature 218..1183: note = CDS
  misc_feature 1184..1311: note = RE
  misc_feature 36..200: note = bridgeRNA
cattgtatattatttaatcgttatacttttgcataaagtttcaacatcagagtgtggaataaggccgatgtttcattagtcataaagaccgtgaagtatgtttcgcccccacactcttacatcagaaaccggatagttcaatgggcttttgagaccccgcattcgcaatgatggttcacgatgtacagatgttgttgttcaataaatcattaagactatgacctacgttggaatcgatgtcagcaaggcgactttcgtggttgcttattcttctgccaagaacagcaagaccaaaacgttcaagaacactaccaaaggcgttcatgagttcattcaaagcctgtcagccagtgagcatcattgcgtgctggaagcaaccgggaattacagttccctgctcgtctatcttctttcgcaagcaggaatcactgtcagtctggagaatccgctcaagataaagaacttcgcccgtgtgatgctttccgtcaccaagacggatgaaacggatgcacgtttgattgccctgtatggagagaagatgcagccggccccttacaaactccgcagtgatgccatgctcaccttgaagcagaaacggacagtcatacgccagctcaaaaagcaacttatagccacccgtaacctgaaaggctctatggaagtacttcctttcttcgaccccaagtgcaagaaagccattgaaaagactatcgctttccttgaaaagcaagtcaagaacttggaggaggaactggcggttctggcacaaagcgagtacaagaagcagatggatctgcttacttcaatcaaaggaataggtatcacgcttgcggccaccttgataatggcaacgggaggtttcacctactttgataacgccaagcagcttacccgatacttggggctgtcgcctacttaccaacaatccggtacgtcagtcaatgtcaaaggtcacatcaaccgtaacggtgattcgtccttgcgaagccagctttatattgctgccatggcatccctgcgatgcaatgccgaatgcaaggaatgttttaatcggttacggtctaacggcaagccggggaaagtggcagtcgttgcggtcgccaacaaactcgtaaggcaagcctttgctgtcgtcaagcaagggaaaccctatgtcgatggattcaagtccgaaaagccataacagctcctgcggagggaacgccatgcggcaaggggctgaacacacagacccgacgagctttccatgcacgataacttgcatgattatgctaattatcgttaaccgtattcagtttttatattatagtt

SEQ ID NO: 5982 - DNA, 1428 bp, unidentified
  source 1..1428: mol_type = unassigned DNA; note = element_9383313
  misc_feature 1: note = core
  misc_feature 2..78: note = LE
  misc_feature 79..1143: note = CDS
  misc_feature 1144..1428: note = RE
  misc_feature 1192..1419: note = bridgeRNA
taatgggatggtccgaccgtgttcctgccccactggcgaacaaagctggaaaggggctgcattcgaaggagcacgcccatgtcctgtttggcatccagtcaaatcgccgttatcggcatcgatatcggcaagaactcattccatatcgtcggcctcgacaagcggggcgcgattgtcctgcggcagaaatggtcgcgcggtcaggttgaggctcggcttgcaaacatgccgccctgcctgatcggcatggaggcctgcgtcggcgcgcatcacctcagccgcaagctgaacagccttggccatgacgcccggttgatgcccgcgaaatgtgttcggccctattcgaagggccagaagaacgactttcgtgatgccgaggcgatcgccgaggctgtgcagcggccgacgatgaagttcgtggcgacgaagaccgccgagcagctcgatttgccggcgctgcaccgggtccgcgagcgattggtcagccagcgcaccgccgtcatcaatcaaatccgcgcctttctgttggggcgcggcgtcgccgtgcgacaggggcagcgccttctgcgggccgcgctgccaagcattctcgctgctccctcggagcccctgtcgcctcgcatggctcggaccatcgaagaactggcgggcgactggcggcgcttggacgagcgcatcgacgacctttcctcgcaggtcgagatgctggcgcgccaggacgccggctgcgaacggctgatgagcgtgcccggcgtcggaccgatcatctccagcgccatggtggcggcgatcggcgctggagaggtcttcaccaaaggccgcgactttgccgcctggctcggcctcgtcccgaatcaaatctcgacgggagaccgaacgatcctgggcaagatatcgaagcgtggcaatcgctacctgcgcgccctgttcgtgcaggcggcgtgggtcgtgttgataaggccgaagagctgggaacgccacgggctgaagccctggatcgaggcggccaagaaagggcttcatcacaacgtgcttgcgatcgcggtcgccaacaaactcgcccgcatcgcgtggagcgttctggcgcgcggtcgaaacttcgaggcgaggacgatcgccgccatcaatgctcagccggcatgatcagccagcctcaaatgaggagcaaagaaaatgagcttctaaacccttccccgccgaggtctgcgagaagatgaaacgagatggaggatcggtcttcccggcgcatgcgaacactggtgacccgaatggcccaatgaggcctgaccgctaatgagacggcatgcgcgctgatatccatgatggccaggagcacaaaacgctccaatcggaggccggatacattgatgcaagaccgccaaccgccagatcgaagaaacttcttgcgacacacagccggaccataca

SEQ ID NO: 5983 - DNA, 1470 bp, unidentified
  source 1..1470: mol_type = unassigned DNA; note = element_9394f9f
  misc_feature 1..2: note = core
  misc_feature 3..222: note = LE
  misc_feature 223..1185: note = CDS
  misc_feature 1186..1470: note = RE
  misc_feature 9..181: note = bridgeRNA
cttgtatcttagaaatagtagtagaccgtcccaaccttggtcatcatagaccgcttcgtagcatgggtcactacaacaatctcgttgacagaactcgaacagtcgccggggtcaaatctttaaatactgatatttaaagtatacagtccgtatcgggcaaggatgagttaaatcaaggggatgaattcaaaaaaaagtacagaaattagttgagagttgacaatggaaaatatttctcaatgggtaggcattgatgtgagtaaagccgctcttgatgtttacatccgtcctttgggtaaagcattgaaagttgctaacacagaagtagaaatatctcatctagtagaacaactcaaatcctatgatttaaatctgattgtgttagaagcaacaggaggtttagaaacagaacttatcattcaattgcaagcagcacttttaccagtagcattaattaatcctcgcatgggaagagattttgccaaagctacaggaaggctggctaaaactgatgctattgatgcacaaattctggcacaatttggggaagcaatgaaaccccaggttttaccaattcaatccgaagaggcgcgtcaattaggagagttgattagtcgcagaagacaattagttgaaatccaaactgcggagaaaaatcgtcgctcacgctctcgtggcaaagcattggcagatattgaagcacatattgaatatcttgaaggtcgtctaaaacaacttaaccaagaaattgagcaattaactcaaaaaaatcaacaatggattaataaggtcaatttcctcaaaactactcctggtattggtcaagttatttctacaaccctagtttctgacttaccagaactcggtcaattaactgccaaacaaatctcgcgtctagttggtgttgcacctattaatcatgatagtgggcaacacaaaggtaagcgtatgattaacggtggtcgtgcccatgttcgtgccactctttatatgggtgctgttgttgcaatgcgtcataatccagttatcaaagctttttatgaacggcttgttgagcgtggtaaatcaaaaaaacttgctctgaccgcttgtgttcataaaatgttagtcattttaaatgcaatggttcgagataatttgccttggtgcatttctgataacaagaaaacaattgttaattcttagcactgcaaccttttttatacaatactagctgacacgagtaggcgatcgcatgacttgggtcaatttttcatgctctttttttgcctcaacgggaaatccagcaactgaggaagattcggtgcatcgcaggagtgtctggtgcgggctgtgactatctagactacatagccacaagccttgtagcccgtaccagacaccgccgaatctagcgcagcgatcctcagttgcgtcaatgtttccaccaccacttttttgttaacgatcgcttgacattcaagacagtcg

SEQ ID NO: 5984 - DNA, 1602 bp, unidentified
  source 1..1602: mol_type = unassigned DNA; note = element_939af4a
  misc_feature 1..3: note = core
  misc_feature 4..118: note = LE
  misc_feature 119..1204: note = CDS
  misc_feature 1205..1602: note = RE
agttcctatgtttaaaatcggaagtgacggataacagaagatagccctaaaaaagctataccattatagttaactttgtaagtgaaaaaaacaatattaactcataacgatatagcttatgaaacgtgtacaaagtaacacattagattttagtggacaaaatatttacgtaggaattgatgtccacctgaagagttggtcggtagcaatcttatcgaaacattcagtactgagaagattcagacaagatccggagccggaagcgttgcataaatatttggtaagcaattatccgggtgccaattacttctcagtttatgaagccggtttctgtggcttctggatacacgagaagttgacggatttaggtatcaacaatatagtggtcaatcctgcggatgttccgacgatgagcaaggagaaattacgtaagaccgatgcggtggattgcaacaagctcgcccgtgagttacgttcaggttcgttagaagggatatatgttccgggaactgacatcctggaaatgcgctctttgataaggctgagaaacctgatagtaaaagacagcacacgtgccaagaaccgtatcaaatcattgcttcgtttccatggagtggaaataccggaagaatttacccggagttcaatcgggtgctggtcgaagcgttttctgaattggctgcactgccttgaactctcaacggagtatggaaagaaaacactggagcttcaccttgagcagttcatccgcttgaggaagatgctgctgcaggaaacacgtgccatccgtgaaatatcccggaaagcaccattcgacaaaccgatacgcctgctgacatccgttccgggtataggtgttacaaccgccgctaccctgatggtcgagattgacgatattgtccgtttcagcaatgcggaccatttagcctctttcattggattggttcccatgtgtcattccagtggtgataatgataatgtgggtgacattacaccccgtcggcatttcatgctccggtgtctgttggtggaagccgcatgggttgccatccggaaagacccggccatgacaatggcttatacggaataccggaaacggatgaatccgcaaaaggctattgtgaaaattgccagacggttagtgaacagagtctattttgtacttaaacatgaaaaggaatatgtgccatgtgttatcaaatgatatagaatcctataaggtaaaacaactttcttttgagagaaatactacatatcttttgcggctttgaagtccgctcaaaaaagtctgtaactctcattacatggtttgactgataaaggaacttgcggctcacttcgttgatgtccgctgtggaaagtttgttttaccataggattttggctcaggttttcttagccatatcagacagtatcagtaatacaaaaagagaggcgtgtaaccgcctccacaagtagcattactgcgtgccgtcaggatgcttatcgctggtaggttgctcctcagcagagcctacttcctcttaacatcctgatacaaagatataatacaaaagttaattattaatgaattatccaactttgtttggattttaaatggaa

SEQ ID NO: 5985 - DNA, 1457 bp, unidentified
  source 1..1457: mol_type = unassigned DNA; note = element_939c947
  misc_feature 1..2: note = core
  misc_feature 3..246: note = LE
  misc_feature 247..1437: note = CDS
  misc_feature 1438..1457: note = RE
  misc_feature 7..235: note = bridgeRNA
ctaatgagagttagttggcgggtccgctgtccggcagacttgttagctggtggccgccggcgggtgagcactttacctgacagggcgctggagccctgagcccaagaacgtgccccgccggtgtccgggagagttgatcgctgctgggatgtcgtgcccgccgactggcgtgagcactgttcattagtctgctgatggttctcccgctggctgctgaccggattcgggaggtgaggcggaggcgagatgcggctgctggtcggggatgactgggcgcaggatcatcacgacatcgaggtgatggacgaggcggggagggtgctggcccgcaggcgggttccggagggcgtggccgggatcgggcagctgcatgagctgatcagccggttcctgccggaacagggcacggacgcagaggttcaggtcgggatcgagaccgaccgcggcccgtgggtggcggcgctggttgccgcgggctacacggtgtttccggtgaacccgctgcaggcgtcccggtaccgcagccggcatagcgtctcgggagccaagagcgacagcggggacgcgcacgtactggccgatgtcgtacgcaccgatgcgcatcagctgcgcccggcggccggggacagccagcaggccgaagcggtcaaggtgctggcccgcacgcacacgacgctgatctggcagcgggccgcgatggcgcagcggctgcgggcccagctgctggagtacttcccggccgcggtgaccgcgttcggggacctggacgccccggacgcgctggagctgctgggcaaggcaccggacccggcccgtgccgcgaaactgacccgcgcccagatctcggcggtcctcaagcgggccggccgctacaagatcgcggagcggaccggcgcgatcctggccacgctgcgcagcccgcagctggcccaggcccccgcgctgaccgcggtgatcgccacgctcaacgatcaggtcgccgtattgcaggggcaggtggaggcacattttggccagcacccggacgctgagatctacctgtcccagcccggcctgggcgcgatcaccggcgccagggtgctcggcgaattcggcgacgacccgtaccgctatgcctgcgccaaggcccgcaggaactacgccggcaccagcccgatcacccgcgcatccggcaagaagaagatcgtcgcggcccggttcgtgcgcaacgaccggctcatcgacgccctgatgatccaggccttcgccgcgctcagggtctcgcccggcgcccgcacgttctacgacgatctgcgcacccgcgggatcgaacacaacgacgccctgcgccggctcgccagcatcctgcacggatgcctgaaggcacgcacctgctacgacgagaccaccgcctggggccaccgcgaaaacaccggccaatctcccgtcgccgcttgacatccaaaatcctgggatgt

SEQ ID NO: 5986 - DNA, 1191 bp, unidentified
  source 1..1191: mol_type = unassigned DNA; note = element_93a9313
  misc_feature 1..2: note = core
  misc_feature 3..213: note = LE
  misc_feature 214..1188: note = CDS
  misc_feature 1189..1191: note = RE
  misc_feature 38..195: note = bridgeRNA
tcctttagatttgtaaatagttaaatttatagaattaaagaagagaaaagtgtttaagtaaactaaccctgtcttagagtaaaactcatatttcgattaagacttaaacactttcttatcacaatctcagatagaaattcgggctaatgacccattatcaaggagttgagttaatgataagatctcttcttattaatatgcaaaaacaaatttatgaaaaatgtaattattggcattgatgtgagcaagcttactctcgatattagtgtacttattgattctacctttcagttttttacgatagaaaacacggtaaaagcattaaaaaagttttttaaagaatttaaagaacaccaagtgatgatagctatggagaatactggccgttataattatcacctttatgaagttttacccctttttgaatttaaggtttatgttattaatccacttcatataaagagaagtataggcctggtaagagataagaatgacaaaatagacagtaaaagaatcgctttattcttagaaaaacaccatattgatctacgtatctggagtccttgcagtaaaacactacaaaaaatcaaactcttaaatactgagagaagactccgtgttaaaataagagcagctttactcacccagttagcagaccagtcgcttctaaaaggaatgcaggataaagaccttttaaaactcaataaggacttcattgccttattagacaaacagatttcattcattgaagataaaatcctctatcttattgaaaatgacgaagtcttgaaagatcaatatcatcgaattcaaacgataccaggtgtaggcaaagttttggctgctaacatgcttattaaaaccaacggctttaccgagatacaatctgccagagaaatgtcctgctatgctggtgtagcgccatttgagtatcaatctggtacttcattgaagtacaaatcaaaagtatcccccctggcagataaggaattaaaaaaaattcttcatctcgctgcaatgagcgctattcggtttaaaaatgatttggctgtctactatctaagaaaagtgtcagaaggtaaaaataaaatgtctgttttaaatgcggtacgaaacaaaattatacaccgaatttattcgttaattaaaaacaaaactttttatcaaaatcaattggaaatgtcatagaaa

SEQ ID NO: 5987 - DNA, 1744 bp, unidentified
  source 1..1744: mol_type = unassigned DNA; note = element_93adf37
  misc_feature 1..2: note = core
  misc_feature 3..338: note = LE
  misc_feature 339..1478: note = CDS
  misc_feature 1479..1744: note = RE
  misc_feature 73..281: note = bridgeRNA
ctcttacctttgcatcggattatagataatgttctaaatgtccgatgttaaacatcgtataaatttagttcatgcggcaacaattttgtagtttcgctagagattgtggccgtggagggcgagagcattgtgtcgctaggtaagccgtctgactatatcgttagcaagaccttcgtccgccctccttttaaagtctttagagtctgaacatagaatcgtagcacgtcgctggacgatgcagtgtccgacaagagtgaagtcgaggaaggctttggctatagtctgaaccttagttattaaccctttaagaagttatcacgatgaagccaaattcacagatgacacttgacaagtatttccgccagtgcgtgggcatcgacatctccaaggacaagttcacggcttgcctgtacatgtatgacatggccagtgatgcaggctgctgcactgagagtatcgactttccaaacaacaggacgggattcaaccagatggtgaaatggagccgcaaggagtctcagaaagggttccctcttgtctacctgatggagccgacaggcagttactatgagcctttggcctaccatcttcacaagatcgggcagacgctctacgtggtgctgcccaacaaggcccgcaagttttgcgagtatgagggaatcaagaccaagacggatgccatggatgctcgctgcctggcactgatgggctgcaagaaccgcaaactgcgtccttgggagccaccactacccatctaccgtgaactgcggcagttgacccgcctgagggctgacttggtcaagatgcagacacagatgctgaaccacatggaatccatcgaccacatggaagacgtggcaccggaagtgcgcaagagctacgagaagttgcttgacaccattgagaagcagctggagaagaatgaaaaggacatagcggcaaagcttgcccaggacaaggagcttgagacaaaggtaaaacgcatcgccaccgccaagggtatccgcgtcggaaccgtcacttgcatcgtcgctgagacgcagggattccacctcatcagcaaccgcaagcagctcaccagtttcgccggtcttgacgtaaaggccagacaatcgggcaaggacgatcccagacaccacattaccaagaaagggaacgcccacatcagggctgctctctacatgcctgcactcagcgcagcgcactgtaacaggcagatggctcaggcatacggacgaatctgcgccaagcatcctgatgtgaagatgattggcgtgacggccatcatgcgcaagatgctgctgctcgtctattctctctggaagagcggagaagagtatgatgagacaagggacaatacacatacaccaaggaaaaaggaaccacaacctacaaactcaccagaagactgcttgaaaccaaacgctgcccccccagattggaacgcggctgacaaggaaggaaatccgcctttttaacagaagtggctgcgccatgcgacacagccacacgagatagtacaaaactggtggacggcaccagcgacttcccttagttggctgtaaagatacaacaaatacaacaataccggaaagaaaaaaggaaatttaaccatagaaaatatactgcggcgatacctggtcacaaatcaggtactaaatctcatgtgctaatccgttttctttttcccttttgttaaaatgtcctatttttcctatgcaaaatttggaaattagcacagaat

SEQ ID NO: 5988 - DNA, 1622 bp, unidentified
  source 1..1622: mol_type = unassigned DNA; note = element_93b7ab6
  misc_feature 1..2: note = core
  misc_feature 3..253: note = LE
  misc_feature 254..1480: note = CDS
  misc_feature 1481..1622: note = RE
  misc_feature 59..274: note = bridgeRNA
ctggtataatataattgactcatctaacagtcgttacattatacctttatccttcctatcaaccttttaatccgtggttgactacggtttggtttattggtattatataaataagtaatgtggatttgcattttttaaacctgtggctttgactactttttggaggttcttaccacaccttgtttcttagtaatgattagttagatgagtctttgaattcgtatctcgtaccaggttttacggagcaagcactgtggataacacattacaatttttacgaaaggaatgtattaccatgattttagtcggaattgacatcggtaaaaacaaacacactttttctatagttgataaaggaaccggtgaaatactttcaaatcccgctatctttgataacaatctggcaggatttttgtatctcatcaaaaaactaagaggctatgttaagtcggaacttcttataggaatgaaagataccgggcattaccatttagctctgcttaaatatcttcttgataacagatatacggtttcgctcatcaatcccacaacaactgaccttacaagaaaaattcaaggcggtatcgccaaaaatgatactcttgattccattaccatttgcgatgtaatttcatccaatcggcgtaaaaaaccatatcgcattactaaagtaaatcgatttgaactttatgagcagaagcaattaacccgtcatcatcacgatctgaaagaagaattgaacatttacaaaaaccgtcttcagaaatgcattgatattgtatttcctgaattcaattcattgttcaattctaaatacggaattgtttacatgagagttttaaaaactttctcttctgccaacgctattgcaaatgctgatattcgcagtattcgcaaatgctttgaattcaaaggacgtggaggtcgaatttcgctttctgccgaacagcttaaaatgtccgcaaaaatttctgtcggtataccatctgtcgccgaagaaattcaaatacgtcacctcgtatgccaaatcgaattgctggaggaacaactttctgaaatagataaaaggatagaagagttctccatcaaaaacaactctactatcctttcaataccgggcatttcgcatttttccggcacttctattatagcagaattaggagacatttgcaacttccaaaaatcatctcagataattaaatttgcaggtgttgctccttaccattatgaatccggtcagtttaccgcacagcatacgtctattacaaagaaaggctcacggtatttgcgaaaaactctgtatcagattattttacctgtaatcaacaacaacgaggttttccgtacttattacaacaaaaaattagctgagggcaaaggtcacagatgtgctcatggacactgtatcagaaaactccttagagtcatctatcatcttttaaccacagggcagcaattcaaccctgaatttttggcataagcaagacctaatctattttttaaaaattggctttttttgaaggcttgtttgccatgccacaaaatccacaattctttatatttcaatgttcatactaaactatatttatttttcaaaaactacttgacttttatatagttag

SEQ ID NO: 5989 - DNA, 1234 bp, unidentified
  source 1..1234: mol_type = unassigned DNA; note = element_93bb9d8
  misc_feature 1..2: note = core
  misc_feature 3..220: note = LE
  misc_feature 221..1210: note = CDS
  misc_feature 1211..1234: note = RE
  misc_feature 51..213: note = bridgeRNA
atggtaagtttgtataaagaaagacagatttataaattagttaaaaaataactaaatagaaaagcagcaggataaagacagacgttgcacagatacttcgatatcgtccccgattttattcccctgctgcttgttttcttccaaatccggatagaacattgttggtaaaaacttttaccatggtggatcggaagaaaacttcttaaaaaaagaaattcttatggcaaaattatcaaaaaaagtaattgatgtagacgttggagcaaagtttttaacggttagttttaatgatcaaaataatcgggatcaggtttgtaatattgaaaacaatcagcgctcgatttcatcttttttaaagaaaatgtctgtggatgattattgttttgtgattgaagcaacaggtaattatagtagcagaatacttcatctttctttggagaaaggctttgaaagcagtctgattaattgtatgtccgtcaaacatttttccagaatgaagaatatcattagcaagacggataatgaagatgccaaattaatcagactttatggagagatgttctgcccagagaattatgttcccaaaaatattgagattgaatatcttgatcaggagattaaacttttgaatgatttggaagaagagaagcgcagatatacagtaaagttaaagggacttcgttttaatccgcatcttaatcccgacactgaaaaacattatgaaagaaggctgaaacaattggaaaaagagattaaagaagttgagcttcgtcttccaaaacttcaggatgaggaatttagggaaataaaagatttactacaaagcgtatctggaattggtgagaaaacttcacttcaactgatgacagccacctcgggttttaagaattttaattctgccaaatcattagtaaagtattttggattggctcccaggatttatcagtcgggaaagaagtcttattctccgggcaagtgcagaacttccaaaacacatatcagaagtctcttatatgtttgttcttggaccgcaatgaagcacaatatacattgtaaagatctttacttgcgcttattggcaaaaggaaagcctaaaaaattagcattaatagctgtttgtaacaagttgttgaggatttgttttggtgtagtgaagaacaaaattgcatatcaacaaaattatcaaaaaagctttaaaattttaacctaaataatttgcagattaacatagaac

SEQ ID NO: 5990 - DNA, 1183 bp, unidentified
  source 1..1183: mol_type = unassigned DNA; note = element_93bc1d7
  misc_feature 1..3: note = core
  misc_feature 4..207: note = LE
  misc_feature 208..1170: note = CDS
  misc_feature 1171..1183: note = RE
  misc_feature 20..213: note = bridgeRNA
cttgcataagcgatgttgtatgaagtggtcgtcccgtaagggacgccaacggccgggtggccacccggccgttggcgccgatcgtcggatcgccagccacccgaacccgtggggttaaggagaagcaagatcgcgatcggctcttcatcgtggcccggatggttgctggaacaacctggttcgtatgcaaggcagggaacgacgaagatgaatgagactagcacaagaaccgccggaatcgacaccagcaagaagtcgcttgatgtcgcaacctatccgacgagcgacaggttgcgcgtagccaatgccagagacggacatcaagagttggttgcttggctgagcgcgcgtaagatcaaacgcatcggcatcgaagcctccgggggttacgaacgagccgtcgtggaatatttgcgcgagcagggcttcgaggtcgctctcctgcagccgcgtcaagtgcatgcctttgccatctacaagctgcgtcgtgccaagaacgatcgtatcgacgccgccctcatcgccgagtgcgctgccaatctcggcgacctgcatgaaccgccagacaccaggctggccgcgttcgctgagcatctgctcttcatcgagcaactggagtacgatatcgctcacctcaagacgcggcgcgagcacttcaccaccaagcggattctcaaccaactcaagcgtgacgttcagcgtctgcagcggcgccgcgaggccgaactgctgctcctgcaggtcgtcgtgtgcaaacacgatgatctcgctcggcggctcgagctgatcgccagcgttgatggcatcggcatacgcaccgcgctcaccctcgtcatcctcttgcccgaactcggcaaggtcagtcgtgagcaaatctctgccttggttggcgtcgctccttacgacgacgactcgggcgaacgtaccggcgagcgccatatcgccggcggtcgcagtcgtgtccgccgagcgctcttcaatgctgcattgcccgcttcccagcgctggaacaccgccctggtcgctctctacggccgccttacgaacaacggcaaggcccacaggaaagccatcatcgcctgtgtcagaaagctcctcatcttcgccaacgccgtcgtcgaacgcggcactccgtggagcgaagctccacccgcaaaccacgccgcctaagctaatggttgcg

SEQ ID NO: 5991 - DNA, 1330 bp, unidentified
  source 1..1330: mol_type = unassigned DNA; note = element_93bfacf
  misc_feature 1..2: note = core
  misc_feature 3..188: note = LE
  misc_feature 189..1289: note = CDS
  misc_feature 1290..1330: note = RE
  misc_feature 36..198: note = bridgeRNA
cttgtatgattaaatttaaagtaaatattggacaaagagatcaagtaagctttaacgattcaatgggaggccgtcgtaccctgaggaccggttactaaccagagcctgtaatgtagattggcccccgccctattcacccataccgtggagtatctgaggcttagagcctgcatacacaaggaaggtaggtgcatgtgcagggtcgggaaccagtgaatagtctactttctttaatcccactcttacaatcaaatatgccgaacattcaatttaaagatatcgaccctgaatccaaaccagtgcttttcgcaggcattgatgtcggcgctgaggaactcattctggttatccgcaagaacggcaagccattcgatccgcagaagttcgccaacaccccagctgatcgtactcgattggtgaagaagctggttaagctgcctggtattatcgtctgtctggaagctacaggtgtttatcacttcgacttaagcttagccctccatgatgccggcgtgttgcttatggtagtgaatccaaaagcctcccataattttgccaaggtcttgatgaaaaacagtaaaaccgatgcggtcgatgccaataccttagccgaatacgccgcgagaatggatttcgtcccgtggactcgtccgtccaatgaaatgatcgctttacgcagttttgcccgccgcattgacgcactaacccgtcagaaagcggctgctaaaaaccatctacatgcgctaaccgccacatcggaaacaccgaaagcggtacttaaggatgtcaaactggctatcgcccaattggagaagcggattgacagcttaacagctggagcactgatcttgattggcaaacatcccaatcttgagcgaattctggccttactgatcggcatcaagggcattggcaataccagtgccattgcgctcatgggcgaactgctgttgctgccaccagacctctcccatcgagaatgggtaaaatttgctggacttgacccacgggccttcgactccggcaaaagcgtccacaaaaaaacgcgcatatcaaaagccggtaaccggcatattcgttcagccctttatatgcctgccctgagtgccaaacagcatgacaagcacgtcaaggcttattttcaacatctaatggataatggcaaaacgccattacaaggcgtttgtgctgtcatgcgtaaactgctccacgctatccacggcatgttgaaaaagaacgaacctttcgataacactcgtttttatgctattccagaatctaccggatagtaaaaaatcagcaaaatttaacttgaaattaaacagagtat

SEQ ID NO: 5992 - DNA, 1422 bp, unidentified
  source 1..1422: mol_type = unassigned DNA; note = element_93c2bbd
  misc_feature 1..2: note = core
  misc_feature 3..204: note = LE
  misc_feature 205..1407: note = CDS
  misc_feature 1408..1422: note = RE
  misc_feature 1..188: note = bridgeRNA
tccttaagaatggttggcggtccgggaggaccgggtgtggctgatgggtgtctgccgttgatggctccaggagaatggccgcccggtcctccgggacgctccgaccactgattgagaactgcggtcatcgctggttaaggacctgtcggcggggtgttcttcgggccatggaagtgctggtcacggaggaacggagcgacggacttgagcgcgtcccatgcgcggatatgggtcggcatcgacgccggcaaggggcaccactgggcggttgccgtagacgccgacggcgagacgctgttctcgacgaaggtgatcaacggcgaggcccagatcctcgccctcgtcgagacagcccgcgaacgtgctgctgaggtgcggtgggcggtggacatctccggccgtgcctccaccctgctgctggccctgttggtcgctcacggccagcaggtggtctacgtgcccggccgcacggtcaaccgcatgtccggcgcctacaagggcgagggcaaggccgacgcgaaggacgcccgcgtcatcgccgatcaggcccgcatgcgccgggacttcgccccgctggacacaccgccggagctggtctccgtcctccaggtgctgacccaccaccgggccgacctgatcgccgaccgcgtccggctgatcaaccgcctccgcgatctgctggtcggcatctgcccggcactggagcgggccttcgactactccgcggccaagggcccggtcgtcatgctgaccgagtaccagaccccggccgccctgcgccggatcggcgtcaaacggctgagtatctggcttgaacgacgcaaggtccgtggcgccggcacagtcgcggccaaggccgtggaggccgcccaggcccagcagatcgcgcttccgggcgagaagcgggccgccaagctggtctgcgacctcgcccatcagctcctggccctggacgagcggatcaaggacaacgaccgggagatccgcgagaccttccgcaccgacgaacgcgcggagatcatcgagtccatgcccggcatgggccccgtcctgggagccgagttcgtggccatcgtcggcgacctgtccggctaccgcgacgccggccgcctcgcctcccacgccggcctcgccccggtgccccgggactccggccgccgcaccggcaacatgcaccgacccaaacgctacaaccggcgcctgcgctggctgttctacatgtccgcgcagaccgcgatgatgcggccaggaccttcccgggactactacctcaagaagcgcggcgaggggctgctgcacactcaagccctgctggctctcgcccgtcgtcgggtcgacgtgctttgggcgatgctgcgtgacaagaggctcttcacctccactccgccggtcacgcaggcggcttgacacgatcattgagat

SEQ ID NO: 5993 - DNA, 1350 bp, unidentified
  source 1..1350: mol_type = unassigned DNA; note = element_93d1cd0
  misc_feature 1..3: note = core
  misc_feature 4..87: note = LE
  misc_feature 88..1107: note = CDS
  misc_feature 1108..1350: note = RE
  misc_feature 1123..1337: note = bridgeRNA
ggatggggtggatggctcctgcatcatcctgcgatgcaatgcgccatagtgcacttgtgatgaactgcttgtgagaggatccacccaatggaagtcacaacaatcggccttgatttggccaagaacgtttttcaagtccacggcatcaatgaacatggtgaggttgcattcaaccgcgctctaaggagggcgcaagtcttggctttttttgaacgcctcgatccatgtttgatcggtattgaggcgtgtggaacgagccaccactgggcgcgtgaactgataaaactgggtcataacgtcaagctaatcccgccagcttacgtgaagccatatgtcaaacgtggcaagtcagatgccgttgatgcggcagctatttgtgaggcagtcacccgaccaacaatgcggtttgttgaggtgaaaacaccagaacaacaagcgatacttgctgttcatcgtacgcgcgacttgatcgtcagacaacgtacgcagaccatcaatatgctgcgtgcacaactggctgagtttggtatcatcttgcctcaaggcgtttaccacccgctccgatttgcaaaggattgcgcgaatggggaacagcctgatctgccaaacgatgcccgagaagtcgtcgctgatttgtgcgaccaacttctgttcctgcattcgaagatcttgcgtcattcgcggcatatgacgcagattgccaagtgcgagaaacgggtcgcactgttgcgaacgatacccggcgttgggccaattactgcgtcagcaattgttgcgaccgtcggcagtggcgagcagttcaacaatggcagagagtttgccgcctggttgggactgacaccgctcaacaaatcaagtggcgggaaggaacgcctgggccacatctcgaagatgggagatcaatacatacgccgtttattggtcttgggcatgacgtcccgtataaggtccatcaggtcagagccggaaaagtttgatccatggttcgcagacatcctgtcgcgcaagccaagcagagtggcggcaattgccatggccaataaaactgcccgcatgatctgggccgtgcttatccggaatgaaccatacaaagtgagaaccgtttaagttcaacgagctaaaaggagtttgcaagaccaatgaagtgatggaactttgtcagcccaaaaaccaagacgccccgtgctttgtcctgaacgcttgctgttcgatgtgcggaatgggacttggttggtggaaaccatcagggccagcggccatgtgtgtcgcgctaacaggccgaacacaagactgcttctgacaaaacaccaggcacaaaattgtacttgcaaaaagggagccatccacaca

SEQ ID NO: 5994 - DNA, 1457 bp, unidentified
  source 1..1457: mol_type = unassigned DNA; note = element_93dbfc3
  misc_feature 1: note = core
  misc_feature 2..117: note = LE
  misc_feature 118..1134: note = CDS
  misc_feature 1135..1457: note = RE
  misc_feature 1166..1428: note = bridgeRNA
gaatgaaagggacttccccgtcccgaactagccgcggtgagttgcggcaaacggtcttgaaggaccaagatgggaagtgcaacgtttccatcaactgttcattcggaaggggaagtcatgaccattattgccattgggatcgatctggccaagaacgtttttgctgtgcatggtgtggacgagacgggcaaggctgtgctggtgaggccgagcgtcaagcgggacgcgttggtggagttggtggccaagctgccgccgtgtgtgatcgggatggaagcgtgctcgggcgcgcaccattgggcgcggcagtttcaggcccacgggcacacggtacggatcattgcggcgaagttcgtggcgccgtataggctgagtggtcgcaaaggcaagaacgatgcggcggacgcgcaagcgatctgcgaggcggtgcagcggccgcacatgaggttcgtgccgatcaagagcgagcacgcccaagggcagctgagcattcaccgtgtgcgccagggattcatcgagacgcgcacggcgacgatcaaccgaatccgagggttgctcagcgagtttggggtggtgttgccgcaaaaggcggaggtggtgcgccgcgaagcggggctgcgcctggaggcgctgcccggctgggccaacacggcgatcggcgacagcctcagcgagttgcatcacctggatgagcgcatcgcagagtacgaccgtcacatcgaggcgatggccaaggcagacgaccgaggcgtcaagctgatggccatgcccggcatcggcgccaagaccgccagcgccttgctggccagcgtgggcaatgggcacgacttcaaatgtggtcgccagttggcggcgtggttgggcctggtgccagggcaatacagctccggaggcaaacagagattggggcgcatcaccaaggctggagacagctacctgcgcaccttgctgatcttgggagcccgagcggtggtggccgcaggcaagaacaagacagacagactgagtcgctggtcgcaaaacgtggccgagcggcgtgggtattggaaagcggtggtggcggtggcggcgaagaacgcgcgcatggcctgggcgatgctcagcaaaggcgaagcgttcaagccgctgacgtgaggccgcagaccgccgcaagttgaagccaaaccacttcatggtgtgaagccgcgttgatgagccaaggttggacctgcgcggggagtgctcgattaactttggaaggcgccattggcgaccttgactaacgaatggagcccccgcgcgcgtctttcatcagggccagcagcaccaagctgcatcaaaggccgtttgtagtctcgccgtccttatcctggctgcgatcaacgcccgcaaaaacctgaagggtgaatctcaaagatcaattgccgaaggcaattgattggggacgcttttgcttgacagatggggaagcccttgta

SEQ ID NO: 5995 - DNA, 1508 bp, unidentified
  source 1..1508: mol_type = unassigned DNA; note = element_93e637a
  misc_feature 1..2: note = core
  misc_feature 3..246: note = LE
  misc_feature 247..1488: note = CDS
  misc_feature 1489..1508: note = RE
  misc_feature 15..244: note = bridgeRNA
ctaatgagagttagcgagtcggccatccggcagactcgggtctggtagccgccggcaggtgagcactgttttctcctgggccttgagctctgatgagagatcgtgcccctgccggctggccgggagagttgatcgctgatgggatgtcgtgcccgccctggtgtggcgtgagcactgagtcattaggtcgctgatagttctcccgcaggctgctgaccctgaccgctgaccaggacgggagagaccttgcggcttttcgtgggggatgactgggccgaggcccatcacgacgtcgagctgatggacgtgacgggccggcggctggcgaaggcccggctgcctgagggcgtggccgggatcgcgcgtttgcacgcaatgatcggcgagcagctgggcgagaacgctgacgaggaggacgccgggcaggtcgcggtcgggatcgagactgaccggggcccgtgggtgcaggcgctgatcgctgccgggtacgcggtctacgggatcaacccgctgcaggcgtcccggtaccgggagcgccatggcgtgtcgggagctaagagcgacgccgccgatgctcatgtcctggcggacatggtgcgcaccgactctcaccagctgcggccggtggccggggataccgcgcaggccgcggcggtcaaggtggtgacccgcacgcacaagacgctgatctgggaacggacccggtgcacccagcggctgcggcacgcgctgcgggactacttccccgccgcgctggaagcgttcgaggacctggacgcggccgacaccctggagctcctggcccgcgccccggacccggcatcggcggcgcggctgacgaccgcgcaggtcagcgccgccctcaagcgcgcccgccgccgccacgtcgcggagaaggccggggagatccaggcggtgctgcgcgccgctcacctgggccagcccgccatcgtgaccgccgcttacgccgcgtcggcccgcgctctggtcgcggtcctggtcacgctgaatgagcaggtcaaggccctgcaagggcaggtcgaggcctattttggccagcacccggacgctgagatcatcctgtcccagcccggcctgggaccgatcctcggcgcccgggtgctcgcagagtccggcgatgaccctgcccggtacgcctcggcgaaagcccgcaagaactacgccgggaccagccccatcacccgggcctctggcaagaagagagccgtgcaggcccggtacgtgcacaacgaccggctcatcgacgccctcatgacccaggccttcgccgccctccaggcctccccgggagcacgcgcctactacgaccgccagcgcgcccgcggctccgagcacaacgccgccctgcgtcagctcgccaaccgcctcgtcggcatccagcacggctgtctcaagacccgcacgctctacgacgagacgaccgcctggccgcaacacgcaacgaccaccgagaagactgccgcttgacatctaacctcctgggatgt

SEQ ID NO: 5996 - DNA, 1280 bp, unidentified
  source 1..1280: mol_type = unassigned DNA; note = element_93eca69
  misc_feature 1: note = core
  misc_feature 2..189: note = LE
  misc_feature 190..1158: note = CDS
  misc_feature 1159..1280: note = RE
  misc_feature 30..199: note = bridgeRNA
ttgtatgtcgggaaagcagcattctgagaggcgacgggggttcggtcatgaccgtctccccgtcgcgaccggaagcccgcaggcgcttcggatctcaaaccgcgaatgagcttggcgctccagtcgcttcttccatacccgaacagttgcctgggcgcgagcccgcatcagcaaggaagggatacgaagatggcaatgctctctttcggtggtatcgacgtgtcgaaagatcgtttggacatcacggtgttgcccgacgagcaatgttcttcggtgagcaatgacgccgcaggctgggccgaactgatcgagcagctgcgcggctcctcgataacggcgatcggcgtcgaggcaagtggtggttacgaacgtggtgtcgtccgggccttgcttgcggccggcatgtccgtgcgccagatcaatccgttcaagctgcggcagttcgccaaggccagcgggattctggccaagaacgatcggcttgatgcgcggatgatcgcatcgttcgtcgctatcatgccgacgcggccggcgcagcagcaggcgccgatgatcgaactgctcgccgcgatgcttactgtccggcgccaactcagtgaccacaaagtcgccgccgagaatgtctccagactgctggaaggtgcgatgctgcagcgcctttctcgccgccgcatcgctgggcttaccgccgacatcgacctgcttgatcagcgcctggtcgagatcgttacagccgatcctgctctcgcccatcgtttccgcctgctcacctccatgccaggggtaggcgccgtgttggcttgcacgctgatcgcgctcttgcccgagctcggccagatgagccgcaagcaggttgccgctctcgtcgggcttgcaccctatgatttcgatagcggcaagctcaaaggccgccgttgcatctggggcggtcgggcgcgtgtgcgccatgtgctctatatggcggcgatgagcgccagcaattggaatcctaggctcaaggcgttccatgaccgcctcgaggccgccggaaagaagccgaaggtcacgatcgtggcggtgatgcgtaagatgatcaccacgctcaacgcgatggttcgcgacgacgtcgtttgggccgaccgtcttagctgtcggcacagtgtgccgacggcacgctagccgctgcgctgatcgattgggccgagtcaaggccgtagccgcgcgtagcgcggaggcgcgaagcgccagccttgacgcggccaaagcgatcagcgatctccctgcgacaagatgacagttgc

SEQ ID NO: 5997 - DNA, 1222 bp, unidentified
  source 1..1222: mol_type = unassigned DNA; note = element_93f3acd
  misc_feature 1..2: note = core
  misc_feature 3..220: note = LE
  misc_feature 221..1207: note = CDS
  misc_feature 1208..1222: note = RE
  misc_feature 12..192: note = bridgeRNA
cttgtatctttacttccgccatggttagctaccctggtactgagacagaaagagcttgtgcgtacccttaaggatcaaccttgcctcgtagatcaagccttctgtctcacttctgatgccagcgaagacactgaacggtagccaagggcgttgaccctgtatgcacaaggcaagtgggctcagttggttgattttattcttcatcttcagagtgaaatttatgttttttatcggtattgatgtctcaaaagccaaactcgattgcagtctgttagtggatgtcgccagcggtaaacgccgcgccaaaaccgtggcgaattccaaaaccggtgtcagcgatctgctgacgtggtgcgccaaacaacacgccgccaatcacgaactccatgccatcctggaaggcacgggggtttatcacgaacaagcggccctggcattggtcgatgccggcgtcaccgtatcgattgtgaatccggcccaggtcaaagactttggccgtagcctcggtgtccgcaccaaaaacgacggcgtcgacagctttgtgctggcgcgttacggcgccttgctgaagcccagagcatggactccaccttcactggaagctcgtacgttgcaagccttgttagcacgacgtgaagccattgcccaggacttgcaacgcgagcgcaatcgccaggaaaaggccgaggccaccgagacgccattctcaatccaagaatccctgctggactccattgtgtttctggaaaaacaactcgccaaactccagcaagacattgacgaccacatcgacaagcatccgacgctaaaggcggatcgagaactcttgctcactattcccgccgtggggccgcaagtcggcaatcatctgttggcggtgatgcataaccatcgcttccaatcggccgaacaactggcggcttatctcgggctggtgccggtagaacgccaatccggaacctcgattcttggccggccgcgactctccaaggccggtcctgcccgcattcgtgcggtgctctacatggcggctatcgtcggtactcgacataacctccatatcaaagcgctgtaccaacggctgcaacagcgcggaaaaagcaaaatgtccgccctcggcgcttccatgcgtaagctggtgcacttgtgctttggcgtcttgaaaacgcgtcagccttatcaacctgattatgtgcctcagcgttgacttttaagacggtat

SEQ ID NO: 5998 - DNA, 1379 bp, unidentified
  source 1..1379: mol_type = unassigned DNA; note = element_93f7b98
  misc_feature 1..2: note = core
  misc_feature 3..86: note = LE
  misc_feature 87..1118: note = CDS
  misc_feature 1119..1379: note = RE
  misc_feature 1149..1367: note = bridgeRNA
tgatgctgtggacggctcctccaccggcacgtgagtgccacggatgtgggggctgttgaggctcccacgattcagaggagctaaccatgcagacgatcacaacaatcggtctcgacatagccaaatcagttttccaggttcacggcgttgacgctggtggccaggtggtcatccgccgccaattaaagcgccgccacgtcctggcattgttcgagaagctaccgccgtgcctagttggcatcgaggcttgtgcctcctcacatcattggtcgcgcgaacttcagacgcttggccataccgtgcgattgatgccaccagcctacgtaagaccttacgtcaagcgtcagaagaatgatgcagctgacgcagaggcaatttgcgaagcggtcaccagagccaacatgcggtttgtgccaaccaagacgcctgagcagcagagctgcctgatgcttcaccgcacacgccatctgttcatccgccagcagaccgcggtgatcaattcgatccgcgcgcacctcgccgagttcggcattatcgcgccagtcgggcgcaaaggggttacggaactgctgcatgttgtggcggacccgaacgacaagcgggtgccagaggttgctcgcgcgtgccttaccgcgctcggtgctcaactgctcagcctcaaggagcagattttggagttcgaccggttgatcatggcctggcaccgatctaaccaaacgagcaagcgccttcattacattcccggggtcggtccgatgctggcgaccgctctggtcgcaagtgttgttgaccccaggaccttccgatcagggcgtaacttctcggcctggattgggctcgtaccgaagcaacactcgagtggtggtaaggacaggctcggcagcatcagcaaacagggtgatcgttatctgcgcagcctgttcgtcgccggggcactcgccgtcattcgctacgccaagatccacggaacggggcataggccctggctcacgacgttgttggcacggcgtccgaccaaggtcgccgctatcgcacttgccaacaagattgcgcgaatggcctgggccatgatggccaagggcgagcgctacaagcaacccgtcgcgctggcggcgtaaacgagatcgcgccggtcaatcggcgtgaggtgaaggttgggagggcgaacagcacgtaatgcagagccggtcgatccggcgatcaggacaacccacttgtgccagcgcattgtcgaatgcggggttttgaccgggacctgatccgcggagggcattatggccagcggtcatgtgaaccgcacctacaggccgaacacatggctgcaccgaccaagcctgcgacgtgaagatttctcttgccaatccggagccgtccacaca

SEQ ID NO: 5999 - DNA, 1632 bp, unidentified
  source 1..1632: mol_type = unassigned DNA; note = element_93fa640
  misc_feature 1..4: note = core
  misc_feature 5..291: note = LE
  misc_feature 292..1506: note = CDS
  misc_feature 1507..1632: note = RE
attagtacgatttaattataccctataacttctcatttgagttataggataacactgttttgtgtaagataagagtgtggctttttgacggaaatttcatttgggaatcatattgatctctcgcgatataatcggtcagttcatactcttgtcttacgcattcgcttatgcatgttgggatatggtagtatgccttacgctcgtgtcatgcgactaatctggatgaaaacagctgttatgaacgtaaaagcacacataatcaaatacaacgcaaaggaggaatgaaaatgtatgtatagcgttggtattgatgcctcaaaaggcaaatcaactgtatgcatcctcaaggaaactggagaatgcattcttactccaagagacttcaaccatactaaagatgaccttgaagcccttgaccagactattcaaaaactgaccggcaagaatgatgtcaggattgtgatggaagcgactggcatctatcattggcctctcttactgtttcttaagaggaaaggttacttcgtttcagtcattaaccccttaagaatgaaactgttcgccaaaagctataacttcagaggaatcaagactgataaatatgactcaaccatcatagccgcttatggctgcgaaaaatggttttctcttcaacaatgggatttcaacgatgataccagagatgaactgaaaagactcgccaggtcctatgtcagctatcagaagcccaaaatttctgtaaaacagtctctggatcttgaattggagaagtgcatgcctggaatcaaaaatctcttttcagatgatcagaaattatacagtttcattctgtttttccagcattttgataagataaccgccttgtctcagaaaaagttcctgaacaaatttgacagatgggccaaaaagaaaggataccgattccacagttcaactcctaccaagatatacgaacttgcctcatcaggtatccctaccgtccctttcgatgattcctgtgttctcattattgaaaatctggttaacacgctgatcaccattgataaagggctcaatgacattttaacacgtatgcatcagttagcgtcatctttacctgaatatgatgttgttttaaacatgtctggtgtcggttatacattagccccgctgatcattgccgagattggagatgtcagactgtatcgtagtaagaagtctcttgtctgtgctgccggcattgatgtgccgccatatgaatcgggtcagtttaaagcttctcacagggtcattaccaagaagggcaacagtaatatcagacgtcatctttacctggttatgaattccttatatgttaccaagcctaaaaaagattccgctgtttatgaattcatgatcaggaagaaagctgaaggcaaacttcataaacaggtcatcgttgccggtatgcgtaagttccttcacatttactatgcaagagttaaagaaagataccaggatattggtctttggcagaccctttcctgataatctaacctgctaggttcaataatcagtttccatcttttcagtggattatgaaatccgctttttcatcatgcgctgattaatcatcttattattctcaaaaaacacttgacagaacttagcatg

SEQ ID NO: 6000 - DNA, 1478 bp, unidentified
  source 1..1478: mol_type = unassigned DNA; note = element_9401b6e
  misc_feature 1..2: note = core
  misc_feature 3..248: note = LE
  misc_feature 249..1460: note = CDS
  misc_feature 1461..1478: note = RE
  misc_feature 44..213: note = bridgeRNA
ccgttacctttttcgtagcccagtcttgttgcaggatgtgggtgtgctggccggtcggtcccggcatggttcttccccccagttgtccatgatccggggggggtgttgtcactggggccggcttggcggtagctgatcgctgatagaggcacgacaaggggtctttcgtaacgtggatgccgacgtctaccgccacggaccagccagcacagaccgtgacggttggacgaaggagctggctatggctgttgatcgtggatcaacacgacatcgaggtattcatcgggctggacgtcgggaaatccgatcaccacgccgtcgccctgaaccggtcagggaaaaagcttttcgataaggctctgccaaatgacgaggcacgattacgggagatcctcgccaagctttccgagcacgggaagaccctgctcgtagtggatcagccagccaccatcggcgccctgcccgtcgcggtggctcgcgccaccggggcagaggtcggttacctgccgggcctggcgatgcgccgaatcgcggatctgcacccgggccaggccaaaaccgatgcccgagacgcgatgatcatcgccgaggccgcacggaccatgccgcacacgctgcgctctatcgccccggacgatgagacgctggccgagctcggtgtgttctgcggcttcgacgacgacctcgccgcccagatcaccgccacgtccaaccggatccgcggcctgctcacccaaatccacccggccctggaacgggcacttgggccgcacctggatcacccggccgtcgctgatctcctgacccggtatccaacaccagcggcgttgaagacagctgggcgcggtcatgtccgggcccggctgaagaagcacgcaccacgggccgccgaacgcctcaccgaggccatcttcacagcgctcgaggaacaaaccgtcgtggtcaccggcaccaatgccgcggggatcgtggtgccgaaactagccgaacagctcctgtccctgcggcaccaacgcgacgctatcgccgcccaggtcgaagccctggtggaggcccaccctcttcaccgggtcctgacctcgatgcccggcgtcggcgtcaggacctgcgcacgcatcctcaccgaagtgacaggcaaacacttcaccagcgccgcgcacctggcgtcctatgcaggcatcgcccctgtcacgcggcactctggaacgtcgatcaggggtgaacacacaagccggcgcgggaacaagaaactcaaacgcgccctgttcctctccgccttcgctgccctgcaccacccgccctcgcgcgcctactatgaccgcaaacgtgccgaaggaaaacgccacaaccaagccctcatcgccctcgcacgccgacgctctgacgtactcttcgccatgctccgcgacggaaccctctaccaggaccccgaaccacggaacctgccatcagcagcttgacgaaaaccatagaggcac

SEQ ID NO: 6001 - DNA, 1523 bp, unidentified
  source 1..1523: mol_type = unassigned DNA; note = element_9403f28
  misc_feature 1..3: note = core
  misc_feature 4..246: note = LE
  misc_feature 247..1275: note = CDS
  misc_feature 1276..1523: note = RE
  misc_feature 3..220: note = bridgeRNA
cttatattatatttagcgcagttagctactgccaaagcccaagtggtatacttggaataagccactatggattagttcatttcctccaatcgcttgacgatttccgaaaggctctaaccacagtcttttgtttcaattggtaatgagtttgataacgcatagacgtttgatctcgtctaaggtaacaaggcaaaaaattcgtggataaccaagtagacttgaaatactatatctggaggtactcccatgctttatgtaggcattgatatcgctaaaaataaacacgatgttacagccttgaatgttccaggaaaaactgttcttaaaccactcactttttcaaataataaagctggttttgaactcttagatctgtctcttcgacaactcaaccaagactgtctcatcgctcttgaaaataccggacattatgcctttaatctactgaacttcctgcatgaacaaggatataaagtttacacctgcaatcctttgctcatcaaggaatttgccaaatcattatcacttcgcaagactaaaacggataagaaagacgctcatggcatcgctcttaaacttctttctgaccccaatcgtgaacaatttcaacacgataatcggcaagtagaactaaaaatactggctagacatattcatcgtctcaagaaaaacagtctgattggaaagtacaatacactcgttgtcttgatatcatctttcctgagttggataaaatcgttggaaagcattcagaatatacctaccaatctcttgacacgctaccctaatcctcagaaaaggattgaggcaagatttgataagctgatagaaattaagcgattgaccgcttctaaaattcaggatatcctctcaatcgcacctcgttctatcggaacaacatctcctgctcgtgaattcgaaatcatcgaaatcatcaaacattacaagaggctcattgacaaggcggaaacatgtgtcaatgacttgatggctgagttcaactcggtcatcacgacggttactgggattgggggtcgtttaggggcggtcattttagccgagattcgaaatattcatgcctttgataatcctgctcaattacaagctttcgctggactggattcttctatttatcagtcaggtcagattgatttagctggaagaatgatcaaacggggttcccctcatctgcggtgggcactcatacaagctgccaaagcatgcgctcgcttttcacctgcttttaaggcctatcttaagactaagttagaataaggaaaacattacaatgtagccatcatccaccttgcaaaaaaacttatccgaaccctgttttatatcctaaaaaagagctgccatttgacgaacaaaaagtgatgtaatttctgaaattaacacaggattacctttgaaaaaatggactttttcaagggctttttgccgtgctctaaaatcatcgccaaatcatcaaattgaaataagaaatagtttagataaaactattgacttttcttatagtttgt

SEQ ID NO: 6002 - DNA, 1192 bp, unidentified
  source 1..1192: mol_type = unassigned DNA; note = element_9407b00
  misc_feature 1..2: note = core
  misc_feature 3..220: note = LE
  misc_feature 221..1171: note = CDS
  misc_feature 1172..1192: note = RE
  misc_feature 67..220: note = bridgeRNA
cttatatctttcaaatagttcaaacttcagtgatcaagacttggttgacggtcttgattgctgaaccggttgactcaccgccgcgcagcctgtgtctcctgcgagcacgagctggaatgacagcccagggcgctcggtggtggtctctttgttctgctgcatcccgaatggttgaccgaacacatttcgtattcataaggctgggagccggagaactgttatgagtgaacctgtttatgtaggtatcgatatggccaaaagcagcttcgaggttgctgtgactggcgagagtcaaacgcttggtctttccaacgatgaggccggccacaccgagttgtgtcaactgctgatcccgctggcacccagactggtgctgctggaggccaccggcggctacgagcaggacctggcactggcgttggctgctgcaggcctgcgggtatcggtggtcaatccacgccaggcacgggacttcgccaggtgcacgggcaagctggccaagaccgatcgcatcgatgcgctggccttgcgcgcgttcgctgccatgctcgacacccaaggccatgagccgtgcgcccttgccgatgagcagcaacgcgagctcacggccatggtcgtgcgccgcaggcaactggtggccatgctggtggccgagcgccagcgcctggccgtggctcatcccaaggctaggcccagcatcctgcagatcatggatgccattgccgcgcagttgcacgatgtggacggtgaactcaaggtccacattcgggcccatcatgccgatctggctaagctgcttacctccgtcaaaggcgtcggacccacgacggccagcaccttgctggcccagttgccagagctgggcaagctcaatcgaaagcagatcaccgcattggtgggcctggctcccatgaatcgcgactccggcaccttgcgcggacaacgccatatctttggcggtcgcgccgatgtgcgcagggcgctgtacgtggctgccctcgtgggcatgcgattcaatccgatgctcaaagccttctacgcccgattgttggccgcaggcaaaccaaagaaggtcgccctggtggcctgcgtgcacaagctgctggtcatcctgaatgcgatcgcacgcacccgttcgccttgggacaacgctattgcagtgacgaattgaaggcttcattcaagatggttg

SEQ ID NO: 6003 - DNA, 1349 bp, unidentified
  source 1..1349: mol_type = unassigned DNA; note = element_940ccaf
  misc_feature 1..2: note = core
  misc_feature 3..224: note = LE
  misc_feature 225..1094: note = CDS
  misc_feature 1095..1349: note = RE
  misc_feature 1072..1336: note = bridgeRNA
cgattgtgtggacacctcctaccggcatcgcactatgccaagacagtattgtctttaacggagtgttttgttatgaacggtcgctttatcatcggaattgatctcgcaaagagtgtattccagttgcacggaatggcgcctgatggatcagtcgccgttcgaaaaagctatcacgcgcagaactgttgcctttcatagccgagcatccaacgtgccttgttgcaatggaggcctgcgccggagcccatcactggggtcgcgaaattggaaagctgggccacgacgtgcgccttattgcccctcagtacgtcatgccttttgtaaagcgtcagaaaaatgatgccgccgacgctgaagccatcgctgaggcggcttctcgacccaccatgcgatttgttggcgtgaaaacccagcgccagcagagccaggccatggcattcaaaactcgcgacctgttgatggctcagagaacgcaaactataaatgcccttcgtggacactttgcggaatacggaattgtcgtcctaacaggcccgcaaaacattcgccaacttgccgcagtcttacacgaaccggagccagatttgacggaggcagttgtcgagctcggtcgagaactactgaagcaccttcagatgcttagtgaacgcattcaaacactggatgaggtcgtgagaaaggccggacagtcggatgaaacggcacgacggcttatgaaggttccggggatagggccgataactgctgcagcgatggttgctctttctccagatacatcaaccttctccaagggccgggactttgcggcctggcttggacacgcgccgaaacagaactctacagggggtaaaacacgtcttggaaagacgtcaaagaagggccaacgtgatcctaggcgacccttgattatcggcgcgatggcagttgttcgacacactgccaaacaggtcagtgaaaaagagtcgtggcttggaccaatgctcgcgcgcaagccaaagatgctagtggcagtggcgttggcaaacaaaattgctcgtgtctacatagcgttgctggctcgcggcggggtgtatgaatctccagctaccgtctgactgcggcggctggagtgttggcatgcgggtgatctaagcggaggtttacgggcgaaagttgagagtggcgggatcgaaaaccagttaaaaaccacgtgcccgagcacgcctgtccgatgtggaccgaacctccgcacgaactataatggccagcatctaggtgatgcacttcaacaggccggacacacgacggaactcaaccgcatgctcatgaccgaagaaaaaatcacttgcatcccgagaggtgtccacaca

SEQ ID NO: 6004 - DNA, 1524 bp, unidentified
  source 1..1524: mol_type = unassigned DNA; note = element_940d71b
  misc_feature 1..4: note = core
  misc_feature 5..257: note = LE
  misc_feature 258..1514: note = CDS
  misc_feature 1515..1524: note = RE
ctcactggtgcaccatcgctttcgtcggcagtcttgaggctgctgatgcacccgaggtgccgccggattaccgccctgctcgctcgccccgtgaggtccactctgagttttgcgggatccggcggttgcccgggacgtgccgaccgtcgacagggctgtgcgccgctgagcgccgatcagtgaactgactggctgccacgtcccggaacctggaaacaagggtgcctccccactgggctagcagcgaggaggctgtcatggagtatgccccccaggcgtccctgcccgcgaccccacagggcggacggaccgccggtgtcgactgggccagcgccgaccacgtcgcctgtgtcgtcgacgcgactggtgccgtggtgaccaggttcaccgtccagcacaccggtgccgggctgcaggacctggtccgccgcctgcgtcaggccggcgcatgcgaggtggccatcgaacgcggtgacgggcctgtcgtcgaggccctgctcgcagccgggctgaccgtcgtggtgatcagccccaaccaggtcaagaacctgcgctcacgctacaggtcggctggccgcaaagacgaccggttcgacgcctacgtgctcgccgacaccctgcggaccgaccgcgcccggctccgtccgctgatccccgacaccgctcccacggtcacgttgcgggccaccgtacgcgcccgccgcgacctggtcgtccaccgggtggcgctgtgcaaccagttacgcgcccacctcaaaaccgccttccccggcgttgtggggctgttcgccgatctcgacagcccgatcagcctggccttcctgtcccggttcgactgccaggaccgcgccgactggctgagcgagcgccgcctggccgcgtggttgaaaggcgtgggctactgcggccgcaaaacccctgccgcgttactggcccacctcaaggccgccccacgcggcgccaccggccacgacggcgccgcccgcgcgcacatcacccgcgccctgctggatgtgctgacctcgctgaccgggcagatcaagactcttgaggcgcagatcgccgaacagctcgccctgcatgccgacgcgcacatcttcacctccctgccccgctcgggagtcgtccgcgccgcccggctgctggccgagatcggcgactgccgcgcccgcttccccgacccctcctcactggcgtgcctggccggggtggcaccggccacgcgccagtccggcaagcacaaggccgtcggcttccgctgggcggtcaacaaacaactccgtgacgccgtctgcgacttcgccgccgactcccgccacgccaacccctgggccgccaagctctacgccgacgccatcgcccgtggcaaggaccacccgcacgccacccgcatcctcgctcgcgcctggctatacgtgatctggcactgctggcagaacaccgccgcctacgaccctgccaagcacagagccctccaagccctgctccaacaagatcaaaaggcggcggcttgacacagggcta

SEQ ID NO: 6005 - DNA, 1402 bp, unidentified
  source 1..1402: mol_type = unassigned DNA; note = element_94200bd
  misc_feature 1..2: note = core
  misc_feature 3..131: note = LE
  misc_feature 132..1157: note = CDS
  misc_feature 1158..1402: note = RE
  misc_feature 1169..1364: note = bridgeRNA
acatggggtaatcgcgggagcgagtcgccctgatgcagtcacgctatggaagctggtggctgttccccgatttgatggaagtacgggctcacgaccgaacgccgggcccaagcatctgacggagaacagccatggacgagtatatcggcctcgacgtgtcgatgaaagagacggcggtttccattcggcggaatggcaagcgcatctggcgcggcaagtgcacgtccgatcccgccagtattggcgccttgctgcgcaagcatgcgccgtctaccaaacgcgtgatcttcgaaaccgggcctctgtctgtgtggttctatcacgcgctctgcgcacagggtcttccggccatttgcatcgatgcccgccatgccaaggccgcgctcgacatggcggcaaacaagacggacgccaatgacgcggacggcttagcgcatctggcggaggtcggcttctatcgtgaggtccgcgtcaaaggcttcgacagcatgttgacccggacgctggtcgcagcgcgaaccaggttggtccggatcttgaccgagctttccaatcagatccggggattgatgaaaaccttcggcctggtcgtccccgcgggcaaaggaagccggttcgaagagcatgtccgtgagttgctggtcgatcaggtgggcctcgctgccatcgtcctgcctgtcctggaggcctggagcagtatccgcctgcgtgcatctgagctcggacgtcaactgatcgcccgggcacgccacagcgaggcatgccggcttctgatgtcgatccccagcgtcgggacgatgacagcgaccgccttcacaactgcgattgaggagccgagcaacttcaggaaatcccgctctgtgggcgcctggctcggtctcacgacccgacgttaccagtcaggtcaggtcgactatgatggccatatctccaggcgcggcgatcgccacgtgcgcagcctgctctatgaagcggcaacggtgatcctcacccgcagctcagccgaaagcgggctacggacttgggggctcgctctcaaggcacgggttggcttcaagcgtgctgctgtcgccgtcgcccgcaagttggcggtaacgatgcacgccatgctgaagtctggcgagcgattcgaccccaccgccggagtgatcgcctgatctgacgagcggatcgcgttcgcgcggcgagcacacaggtctgtccttgccgggacgtgggcagagccattccgcctgatggggtgcacccgctgcctcagcgaagtgcggcatccacattggaaggctcctcccgcgaagctccagcatgcggcggctcctgccgaccgcgaagacgaccctgcacccggcatacggtcacgatcaccgcagaaaaagcttgcgttccgccccgcgattaaacg

SEQ ID NO: 6006 - DNA, 1404 bp, unidentified
  source 1..1404: mol_type = unassigned DNA; note = element_94362e3
  misc_feature 1..2: note = core
  misc_feature 3..119: note = LE
  misc_feature 120..1127: note = CDS
  misc_feature 1128..1404: note = RE
  misc_feature 1165..1402: note = bridgeRNA
tagatggtatggacgcctccccccggtaacgggtcggtgaaagcccaataacagagagcatttgcagctggctgtacagtggtacgtcgaacccgacagctcgcgcaggaggtttccaaatgaagacgcccgtcatcggtatggatatcgccaaacatgtcttccagttgcatgcggtcaatgttgccaccgggaagatcgagcgggtgaaactcaagcgaggcgacgtatcgaacttctttgcaaagcgggaacgctcgctcgtggtgattgaagcctgcggcagtgctcatcactgggcccggcagttacggcaattcggtcacgacgtcaggctcatctgcgcacattcggtacgccccttcgtcttgcgtaacaaatcggatgccgccgatgcgcgtgcgatctggaccgctgcgcagcaacccgaagcgcggtttgtcgcaatcaagagtgaagcccagcagtcagttctggctctgcaccggatacgtgcccaattgatgaaggttcgcatcatgcagaccaatgcattgcgcagcatcctgtatgaattcggtgaaattctgtccggaggctaccagtcgttcgcgaaggaaatcgcgccagccctgaccagaacatccgaacgcctgccaagtatgttagtcgatagtttgcgcgagcagtgggctcgcatacaggcggtcaacgaagatattgccgtgctggagcgtcgcctctcgcatgcgctccgggacagcccggaatgccagcgcatcgccgagattccgggtgtcggtctgctgactgcaaccgcgacagtttcgatgatcggcgatcccgcgaccttccactccggccgtgaatttgccgcctggctgggtcttgtgccacggcagactggaactggcgggcgcatacgacaactgggcctgagcaaaagaggtaacacctatttgcgtacgctgctgatgcacggcgcaagagccgtgatcgcgcgttgcacccacacaccctggctcgacgatttgctggctcgacgacccttcaatgttgccgtcgctgcagtggcgaacaagctggcgcgaactatctgggccctgctgtcgcggcaaacgcggtatgaggcgccagtccacgcgtagcgacggctctgttgccgcacatcgagatgttgcagatccacctcaccaaggagcgcaagcaacgaagtgcatgatggagtacaggtcggaccgggacgaggtaagtctgaaaaagtgcttgaaccttgagttcgtgtgttagatgagaccctcgtcagcgaattccatattggccagcaggctgaactgcctgcatcaacaggccggacataagcgtgctgccttgacctgcagaccagaaatgcaaaaccagcttgcaatccgggaggcgtccaca

SEQ ID NO: 6007 - DNA, 1230 bp, unidentified
  source 1..1230: mol_type = unassigned DNA; note = element_943e0ad
  misc_feature 1..2: note = core
  misc_feature 3..209: note = LE
  misc_feature 210..1133: note = CDS
  misc_feature 1134..1230: note = RE
  misc_feature 12..191: note = bridgeRNA
cttatctgttcggattctggcagtttaggtgtcgagagccggcgtgggccaccgtgagagcctggatcgttaccgatcgtcttgtagctgggtgcccacgccggtctctcccctgtatcgcccgaacagttgccagagttgacgctcgtagacgtaaggctgggcaggcgggggagctctcgacccttcaagcctaacggagtttgcctatgaacggcatcgggattgatgtgtgcaaggccatgttggatgtggccgtccattgcggccctttcgcgcggtttcacaacacaccggcgggccatcgcaagctgctgtcctggctggcgaggcaggaggctggccaggttgccctggaggcctccggcggttacgaacagcgggtactggatgccttattcgatgccggtcaccgggtcgtgcgggccaacgcgcagcgctgccatgccttcgccactgccatcggcctgccggcaaagacagaccgtctggacgccatcaacctggcctgcatggcggcaacgctggagctgcgtgcctatcaaccaatggagtcttggcggcgcaagctgcgcgagttcgtgcgcgcgcgccagcagctggtggacctggcaacaagcgcgcaaaaccagttggaacaggtgaccgacacgagcttgtgccgtgtgctgcaggccaatatcgcgcagatgaaaaagacctgcgtgatattggaaaagcacattgccgaacaagtcggccagcaaccgcagttggaggcgctgcgcgcgttcaaaggcgtcggagcgatcctgcaagcggtgatcgctagctacctgccggagctgggtaggctcgatggcaaggccattgccaagctggtcggcctggcccccatcgctcacgacagcggaaagatgcgcggtctccgacaaattcgcggcgggcggatcgaggtgcgcaacgtgctgtacatggcctgcctgtcggccatccagcacgagccacggatccgggagttctaccggtcgctgcgggtacgcggcaagcccggcaaggtcgccgtcgtggcggcgatgcgcaagatgctcgtcatcctcaacgcccgcgccagagacgctctcgctggagagtctcaagccatcccggcctgagtgtccatgcgctggatggggcgatggctgctgccagcagccggcaccaccgtgcccggcttacggagtggccaaagcccctccaacaacacagttg

SEQ ID NO: 6008 - DNA, 1589 bp, unidentified
  source 1..1589: mol_type = unassigned DNA; note = element_943e7a8
  misc_feature 1..5: note = core
  misc_feature 6..265: note = LE
  misc_feature 266..1468: note = CDS
  misc_feature 1469..1589: note = RE
  misc_feature 38..285: note = bridgeRNA
tttttagtaccatataagtgtaattgttagagcatatcatttgtgcttaaacatttacacttatttttttataataagggagtaattggtctggcgcggcgctttttggattaagcacatccgtcataaaaaccgtcaaccaccccttattataaacattcgtttaagcaggttgaaactcataaggagctttcgtgtaacaaactaaaatgaatcttaataagtgtggatggagacaattacaagttcattttggaggttacagatgataagtgtaggaattgatgtgtcaaaagaaaaaagtacggtatgtatcatgaaaccatatggtgaaatcataagcaagccgtttgaaatccagcatgtagaacaggaattgaatggactgtcagcaatgctgctgcggctggatgatgaagtgcgggtagttatggaggctactggtatttatcacctgcctgtattgagctatttacagggaaaaaagatttttgttgcagtcatcaatccgtttgaaatgaaagaatatcggtgtcgtggactaaggagggtgaaaacagataaacaggatgccattacgatttctaactatggaattgatcattggtatcgtttaaagaattatgaagcagatacaggcatctatgaagagttgaaactcttaggaagacagtatcggcattatatgaggatgcgggtagaaagcgtattggaactaacgcatctattggattataccatgccaggaataaagactttattaaaaggttggaatgagacaaatgggaaagataagctgtctgattttgcagaggaatactggcattatgataacatcacgaaaaagtcagagaaacagtttatcaacagttacttaaaatgggcagagaaaaagggataccatcagaaccaggataaagccgcaaagatttatgcactggccaaagaaggcatccccactctttcctccggcacaccatccgtcaaaatactggtacaggaggcagtaagggtgttacgagaagtcgataacactctgatgaggattttaacacagatgcaggaattagccaagaccctgccagaatatcctgttgtacgggcgatgggcggagtaggaaacgtcctggcacccaagctgatagcagagataggagacgtaaggcgattccataatggaaaggctctgatagcatataccggaatagatgcccctccataccagtctggtcaattcacaggcacagaaagaaaaatctcaaaacgaggctcttccagtttgagaaagatagggtatgaagtaatgcgctgtttaaaaacacataaagcgccagaggatgatgctgtgtatcaatttatcttaaagaaagaacgagagggtaaatcgaaatgtgccgcaaagatagccggattgaataaatttttacgtatttactatgcaagggtaatggaggtatatcagcgatagaaaatccaaatacaggagggaaaacaaagactggatataggccggtctatttgtcgtgggaaaaatgaaatacaaaaatatttgaaaacctgctgaaaaagtattgacttttgttagcagg

SEQ ID NO: 6009 - DNA, 1219 bp, unidentified
  source 1..1219: mol_type = unassigned DNA; note = element_94448a5
  misc_feature 1..2: note = core
  misc_feature 3..247: note = LE
  misc_feature 248..1204: note = CDS
  misc_feature 1205..1219: note = RE
  misc_feature 35..239: note = bridgeRNA
cttgtatggtttggtctccatcaaccaaacttcaagaaagggcgaggagccgggatggagggacatcgacaggcatcggccgttgctttagacccaacggatcgacttactgagtcattaccccatccctgcgccgagcgtcgataaggaacctggcgacgtcacctgcacgatgcagtctcgatcgccaattcttgcaagctcacgccgacagcaggcgtccaccccggcactcgtattttgagcgatgaagacccaacaagctactgaatttgttggcgtagatgtagcaagcgcccatctggatgtcgccgtgcatgggcacaccaacgtgcgccgatatgccaatacgcgcgaaggcatctgccaactgctgcgcgcactgcgccctggctgcgtgctggcactggagtcgactggccgctatcacacggcgctggcacaggccgctcatgcagcgggcctgcgtgtttatgttctcaatcccctggatgcgcgtcgctacgcgcagtcggtgggtcagcgcggcaagaccgaccggatcgatgcgcttgtgctggcccgctatatctgccgcgaacatgagcaactgcgccagtggcagccgcccacggccagtcaagcccagttgcgcgagctcattgcccaccgtgcaaccttggtgcgtcagcgcagtgctctggcgcaggcgggcagccacaataagatgctcgcgagtctggacgcgccggtgctcaaggcattgcaggaagccattgaacacatcgacgcgcaactggcagtgatcatccaggctgacccaccgagccgccaggcgttcgagcacatcacctcggtgcccggcctgggcctggtctgcgggtcgttgctggtgatgctctttgggcgcatgcacgagcgcagtgccgatgcggtgatcgcatttacaggactggatccgcgcccgaacgactccggcaagaagacgggccaaaggcgcttgtccaagaggggctggccggagatccggcgcctgctgtacgcagctgccatgtcagccgcgcgcacaaagacgtggaacggcttttatcttgcccagcgcgctaaaggactgagcacgaccgcagcgctgattgtgcttgcccgaaaactcctgcgcgtagccttctcgttgttcaagcaacaaagcgacttcgatagctcgctgatggccgtcaagggttgacacaaacgatagaac

SEQ ID NO: 6010 - DNA, 1505 bp, unidentified
  source 1..1505: mol_type = unassigned DNA; note = element_9448d44
  misc_feature 1..4: note = core
  misc_feature 5..238: note = LE
  misc_feature 239..1489: note = CDS
  misc_feature 1490..1505: note = RE
  misc_feature 18..206: note = bridgeRNA
gtcactagggcaccatccttattgcgggtgccgatatggtgctcgttgctgggactcggcgggagccggggtgacggtctgttgcggtcgccggaaaacggcctgcatgacaccaccgcccccggcttctccggggacacggactggcaacagggagacgcgccgcagagcgccggttagtgaccgcccggtagctgtcctcctcgccgggtcgtcgctgccatcctgaggagccgagttgtcgtttgcgctgcctgaagcgctgtttttcaccggaatcgactgggccgcggaaacccatgccgtatgcgtgatgaacgctgccggcaagatcgcggccgagttcacgatcgagcattccgcggacgggatcgccacgctgacccgccgcctggccaagtatggagaccctggcgaggtgccggtcgcgattgagcggccggatggccgcctggtggacctgctgctggaagccgggcacccggtggtgccggtcaagccgaacgcgatcaagacctggcgcgacggcgaggtgctctcgggtgccaagtccgacgccggagacgccgcggtgatcgccgagtacctgcggctgcgcgcccacaagctgaaagccgccgccccctactccgaccagaccaaggcactgcgcaccgtcgtgcgcacccgcggcgacctggtcgagatgcgggtcgcggccaccaaccagctctccgcgctgctggacgcgcactggcccggcgcaaaagccatcttcgctgacgtcgagtcgccgatcagcctggagttcctcacccgctaccccaccccggccgccgccgcgcacctgggtgaaaagcggatggccgcgttctgcgtcaagcacggctactgcggccggcgcaccgccgttgagctccttacccggctgcgctccgcgccggccggcgccaccggcgaggctctcaccgaggcgctgcgcgatgccgtgctcgccgcggtcagcgtgctcaccgccctcaacgcctcggtgaaggccctcgaccgctctgccgccgcccacctcggggagcacccggacagcgtgatcttcacgtcgctgccaaggtctggtcaggtcaacgccgcccaggtgctcgccgagtggggcgatgcacgccaagcctacgagcaccccgactccgtcgccgctctcgccggggtcacccctgtcaccagggaatcgggaaagcaccgggccgtgcacttccgctgggccagcggcaagcggttccgtgtcgcgatcaccacctttgccggcaacagccgccacgccagcccctgggccgcggagatctacaaccacgcccgcgccagcggcaaagaccacccccacgccgtgcgcatcctcgcccgcgcatggatccgcgtcatatggcgctgctggctcgacggcgtcccctacgaccccgccttgcacggagccgcagccacgctcaccaagcagacagccgagcaaatcgcggcctgaggttgacacagggagt

SEQ ID NO: 6011 - DNA, 1383 bp, unidentified
  source 1..1383: mol_type = unassigned DNA; note = element_9449d5b
  misc_feature 1..2: note = core
  misc_feature 3..84: note = LE
  misc_feature 85..1116: note = CDS
  misc_feature 1117..1383: note = RE
  misc_feature 1148..1371: note = bridgeRNA
tgatgctgtggacggctcctccaccggcacgtgagtgccatgaatgtgtgggctgttaaggccccacaattggaggagccaagcatgcaagcgattacgacaatcggtctcgacatcgccaagtcggtgttccaggtccacggcgttgatgctgatggccaagtggtcattcgccgtcagttgaagcgccgttacgtcctggccttcttccagaagctgccaccgtgcctggttgggatcgaggcctgcgcctcgtcgcatcattggtcgcgtgagctccagtcgctcggccacaccgtgcgcctaatgccgccggcctacgtaaagccctacgtcaaacggcagaagaacgatgccgctgacgcggaggcgatctgcgaggcagtcacgcggccgacgatgcggttcgtcgcgaccaagacgcccgagcagcagagctgcctgatgcttcatcgcacgcgccatttgttcatccgtcagcaaaccgcggtgatcaatgtaatccgagcccatcttgccgagttcgggattgtggcaccggtcggacgcaagggggttgaggaactgctcgatgtcgtcactgattcaagtgacaaacgggtgcccgtggttgcacgggtgtgcctcgcagcactcggggcacaattgcgcaggctcaaggagcagattcttgagttcgaccgtatgattatggcctggcatcgctctaatgagacgagcatgcggctcgatgcgatccccggcgtcggtccgatgctggctactgctctggttgccagcatcgccgacccaaagaccttccgatcaggacgcaacttctcggcctggatcgggctggtgccgaaacagcactcaagcggcggcaaggacaggctcggcagtatcagcaagcagggtgaccgctatctgcgcagcttgttcatggcaggtgcgctggccgtcatccgctatgccaagatccatggcgcccagcatcgaccctggctcacggcattgttggcgcggcggccgacgaaggtcgccgccatcgcgctcgccaataagattgcgcggatggtctgggccatgatggccaggggcgagcaatacaaagaacccgtcgcactcgcggcgtaaacgagatcgcgccggataccccggcgtgatgtgaaggttggaaagggcgaacagcacgtaatgcagagccggtcgatccggcgatcaggacaacccacttgtgccagcgcatggtcgaatgcgtgctattgaccgggacctgatccgcggagggcattatggccagcggcctcgtgtgccgcgctaacaggccgaacacatggctgcaccgaccaaggctgctgcaaacgtgaagaaagcccttgccaactcggagccgtccacaca

SEQ ID NO: 6012 - DNA, 1154 bp, unidentified
  source 1..1154: mol_type = unassigned DNA; note = element_9449eda
  misc_feature 1..2: note = core
  misc_feature 3..206: note = LE
  misc_feature 207..1142: note = CDS
  misc_feature 1143..1154: note = RE
  misc_feature 12..212: note = bridgeRNA
cttgtcttatgactttgcctgtctccatgcgaagatggagcctctgccagccaagccatttatggcgggcagaggcggtgtgtggatcgggacacgcttggtcgtagtggaccgttctaaagtgcgatcgcacaccgtcttctcatgaggcctgaagggatacccgggattaccgttccggatgacaagcataggacatgacgaagatgacagacgatagcattggcattgatatttccaaagacaaactcgattgccaccgattgagcgacggggttttcgagcagtttgccaacaccaagtccggtttccggaagctacgttgctggattgggccagaccaacccgcccgcgtggtttatgagccaacgggcccttatcacggtgcgttcgaggcagcgttggccgaccatttgccactggtcaaagtgaaccccaaacacgcccgtcgttttgcggaaagtaaggggcagctggccaaaacagaccgggctgatgcacgtgttctggcgcaaatgggtgcggcacacgcgttagagccagacgcgccagttgccaaggaccgccctattctcagagagttgcaagctgctcgctgggcactgatcaaagacaaggtgcgcctccaaaaccagttggatcggcagcagcagaggttgacgcagaagctcaccaagcgacgcttgcgccaagttgttgatgacatcgctgaattggatcaagcgatccgggcgcaactggaaacctgtccaaatcgcaaacgcgcgcttcgcgtgatccagagtatcaaaggcatcggtgcggttgccgccactacgatcttgatcgaaatgcccgaaataggaagcctacgaaagaaggcggttgcgtcgctcgccgggatcgccccgatcacacgacaatccggccgatggcgcgggcagtccttcatccagggcggtcgaaaaccattgcgtgatgcgctctatctgcccgccatcgttgcgacccagtacaaaccggatctcaaagcgcaataccagcgcatgaaaactgccggcaaaccctcgaaagtcgccatcacagcgatcatgcgaaagctcctcatcctcgccaacactctcgtcaaagaagacagagaatgggtcgaaatcagagcttgatcaaaagggata

SEQ ID NO: 6013 - DNA, 1352 bp, unidentified
  source 1..1352: mol_type = unassigned DNA; note = element_944dee7
  misc_feature 1..3: note = core
  misc_feature 4..85: note = LE
  misc_feature 86..1105: note = CDS
  misc_feature 1106..1352: note = RE
  misc_feature 1122..1339: note = bridgeRNA
ggatggggtggatggcgtctgcaccaagcgtcgcattttgcggcacactgcagaagtcatcttctgtcaggaaaggagccccatcatggaagttacgacaataggattggatcttgggaaggacgttttccaagttcacggtgtcacagctgacggcacggttgccttcaatcgttcgatccggcggcgacaattgctcaagttcttcgaagcgttgccgcgttgtctggttggtattgaagcctgcggatctgcgcatcattgggcacgtgagctgactgcgatcggtcatgatgtacggttgatgcctgccacctacgttaagccgtatgttaaacgcggcaagacagacgccgttgatgctgaggcgatttgcgaggccgtcacacgaccaacgatgcggtttgtcgctgtgaagtcgaaagagcagcaggccctactgaccatccaccgggtgcgccagcttgtcgttcgccagaagacccagatgttgaatgtgatccgtggtcttctgcgtgagtttggtcatgtaatcgggaacggaccagtcgccgcaatgcgcttcatcaagacgttccagacggataactgcctggacatgcctgacgtggcaaagagcatgctcaagacgctctgcgaacaggttaatgcgctcgatgaccgggtcacgttttacgataaactgatcgagtatcattctcggatcgatgaacgcgccaaacgcattaggaccgttcctggcgtcggccccatcactgcttcggccattgtcgcaaccatcggcgacggccaacagttcaagaatggacgcgagtttgctgcttggctgggacttacgccgctgaacaagtcgagcggtggtaaagagcgcctgggccgcataagcaagaagggagaccgataccttcgacgattactcgtgatcggcatgacctctcaagttcagcgtgcccgtggctatccagaacgtgtgcacccttggatcatgcagcttcttgaacgcaaacccgttcgcctcgcaacgattgctatggcgaacaaggcggccaggatcatttgggcgatcctcaccaaagatacctactaccgccaatcggcggcatagaaggagccgagaaaacacgaattgcaagacgaatgccatgatggcacgtgcggtcatccgaaaacctgaaatcccgtgctttgtcctgaactctcaggttcgcgtcgccgattgggaacaggtttgcggaacccatcaaggccagcggcaaatatccacgccgcgatcaaaggccggacacaggactgtactgaccaaccgagcaatcaacgcatttttctcttgcaaagcagacgccatccacaca

SEQ ID NO: 6014 - DNA, 1329 bp, unidentified
  source 1..1329: mol_type = unassigned DNA; note = element_94501ee
  misc_feature 1: note = core
  misc_feature 2..258: note = LE
  misc_feature 259..1323: note = CDS
  misc_feature 1324..1329: note = RE
  misc_feature 31..254: note = bridgeRNA
ctgtgagactgctgaagccggtcccgagcggccgtggtgggctggcggcgagacggcgggcgtgacccaaaatctgactggcctcgtgccttcgaaagggacttgtccgtccgctggcctcgctgccggcccggccgggagcagctggcctgatcaggagcttgaccgccagtagcagctggcgtgtcccgtcacagtcatgccgattctcccgaaccggaccggaactggcgtccgtcccggtcgaaggagaacgcgttgcccatcctcgcagagctcgtcgaagtcgtcatcggcgtcgacacccacaagcacacccacaccgctgccgtcgtcgccgcgaacaccggcgccgtcctcgcacaagcgacggtcacagccgaccccgacgggtatggcgagctggtcggactcgcagcccggcatgccggggcacgggcgtgggcgatggaaggatctggaggatacggcgccgggttggcggcgcacctggctgagcagcaggaactcgtgatcgaactcgaccgtccggcccgaccggcccggcgggcaggggcgaagtccgatccgatcgacgccgtccgcgccgctcgtgatgcgctggctcgcacccatcttgcgcagccgcgcaccggcccggaacgagcggcgttgcaggtcctgttgaccactcggcaggccgccgtccaggcagccaccgacgggcagcgccagctgcacgccctggtcgtaaccgcccccgaacaagtccgggcccggttccgcggcctatccacccggaagatgttgggcgccgcgttggggctgcggcccgcgcactacgcctcccaggtgcaggtgttcactgcgatgaccgcgctcaaggcgatcgcccgacgagtccgtgtcctcgaggatgaggccgccgagcacgagaaggcgatccgagcgatcgtgatctcctggcggccggatctgctgaccctcaccggggtcgggcccatcgtcgccgcgaccgtgctcgcggcctggtcgcacgccgggcgctgccgcgacgaggccgcgttcgccatgctcgccggcaccgccccgatccccgcgtcgtcgggcaagaccgtgcgtcaccggctcaaccgttccggggaccgccagctcaaccgcgctatctacaccgtcgtcatcacgcgactgcggcgcgaccaggcaacccacgcctacgccgagcgtcgacgggcccagggcaagaccgaccgcgagatccgccgctgcctcggtcgctacgtcacccgccagctcttccgacagctcgaaaccggaccgccgatcacacttgacgcgacataggagcgt

SEQ ID NO: 6015 - DNA, 1388 bp, unidentified
  source 1..1388: mol_type = unassigned DNA; note = element_9458dd0
  misc_feature 1..2: note = core
  misc_feature 3..87: note = LE
  misc_feature 88..1116: note = CDS
  misc_feature 1117..1388: note = RE
  misc_feature 1090..1375: note = bridgeRNA
tgatggagtggatgccccctcctgacggcatcgcaatgtgccacggtggcgatgtttgtcgcatcccacggaacggagagggcatccatgaaagaagttagcatcatcggtctcgacctttcaaagcggtcgtttcaggcgcacggcgctctagcggatggaagcgtagcctttcgaaagaagctcacgcgtgagaaagtcctcggctttcttgccgagcagccgcgctgcatcgtcgccatggaggcctgcgggagcgcacatcactggggtcgggctatccgcgacgccgggcatgaagttcgcttgatcccgcctgcgtacgtcaagccttttgtcaaacgccagaagaacgacgcggcggacgcggaagcgattgcggaagcggcgagccgaccgaccatgcgcttcgttgctgtcaagacggaggaacaacaggcgcgcgccatgctgtttcggacacgggatctcctggtccgtcaacgcacgcagctgatcaatgcgctgcgcggtcaattatccgaacatggcgtcgtggcgccgcaagggccagcgaacgtggcgattctcgctcaggcgatcgacgatatgacgccttcactccccctgctcgtggtcgaattggcgcgcgtatacctcgatcagatagacgggctttcggagaaggtcgcggggctcgagaaggcgatagcgtgcgaagccaagcggggcgccatgacccgtcgcctgcagacaatgccgggcgttgggccaattacagccatggcgatcgagaccttcgcgccgccaatggaggtattccgccgcgggcgcgatttcgcagcctggctcgggttggtccccgtgcaacactcgaccggaggcaagcaggttctcgggaaaacttcgaaaatggggcagcgcgatattcgccggctgttaatcaccggcgcaatggtcatcgtgcgctgggcttgccggaagggggcgcaggaaggaacctggctgcatcgcatgctcggacgcaaaccgcgcatgcttgtggcgatcgccctcgccaacaaaatggcccgttcaatttgggccatgctgacaaagggggaagattatcgaggtcctgtggctgctaccctctgatccacgatcaggttgagcggccaagggaacgtcgggcgtgtgaggaggtcgaggaacgtaagggcaaatgatcggtcagatccgggccaggaaatgcaataaaatgccatcgagctcaaaagctcgcggcgttgattttgcgcctggtccgcgcatctccataccggccagcggtcgtgacaggccgcgcctgaaggcctgatacatgatcgcacccgatcacgcgaccaaacgattcgaaaccatcttgcgcgagcgggggcatccataca

SEQ ID NO: 6016 - DNA, 1149 bp, unidentified
  source 1..1149: mol_type = unassigned DNA; note = element_9470f98
  misc_feature 1..3: note = core
  misc_feature 4..163: note = LE
  misc_feature 164..1138: note = CDS
  misc_feature 1139..1149: note = RE
  misc_feature 13..189: note = bridgeRNA
gcttgtgtcttagggccggcgtaggcttaagggtgagagcggagtgcggcaagcccgccatcggcggtgctgcgagcacgtgtaggagctggggctgccgcactccctccaccaatagcccgaacagttgcccgagtcgtacctcgtattcacaagccggggcatggtggaggtgctctcacttccgatcgtactctggagtgaagccatgagcatccatgtaggtatcgacaccggtaaatccatgctggacgtgggtttttaccccgacaagcgctgcgagcgcttcgccaatacggccgaaggccatcgcgccttgctgctcgcgctggcgcccctggacgtcccgcacatcgccatcgaagccaccggcggctacgagcggggcattgtcgatgccctggctcaggccggttattgcgtcacacgcctggcctcgcatcgcgccacggctttcgcccgggccatgggaagcttcgcaaaaagcgacgcgctcgacgcccaggtgttggcgcgcatggcggcgcacatcacgccacagccgtacgaagtgcccgcggcggaacgcgccgaactggctgaactggtgcgttgccgactgcagatggtcagtcagcgtgacgacaacaagcgacgcctgctgcagacgcggctggccacagctcagcgggcgctgcgcggcatgatcgaagcggccagcatgcaaatccgcgagctcgatcggtgtatcgccacggccacgaaagcggccgatcccgcctcgcggttacgcgaagtgccgggcatcggaccagtcgcagaggccacgctgatcgcgtacttaccggagctgggccggctgacgcggcagcagatcgccgcgctggtcggcgtggcgccttacatcgatcaaagtggttgtcgcaatggtgcccggcgcgtccgcgccggtcgatggatcgtccggcgtgcgatgtatatggcgacctgggccgccatccggaccaaaggaagcgccctcggcgagcgctatcgcgccctacgggcgcgcgggaaagtcgccaaagtagcgctcgttgcctgcatgcggtgcctgatcacggccatcaacgcgatggtccgtgatcaaacgggctggcgtcagccggcagctgcctgaaaaagacagtt

SEQ ID NO: 6017 - DNA, 1429 bp, unidentified
  source 1..1429: mol_type = unassigned DNA; note = element_947264b
  misc_feature 1: note = core
  misc_feature 2..89: note = LE
  misc_feature 90..1130: note = CDS
  misc_feature 1131..1429: note = RE
  misc_feature 1193..1424: note = bridgeRNA
taatggaatggacgcccactaccctaaacggcatcaatgtgccaaagtagtggtgtttaaaaccactgaacaagagaggagcgtccgacatgaagattacaacaattggtattgatttggcaaaagaagtgtttcagattcacggtgtggatgagcacggcaagattgtgctgcgcaagcagctgcgccgaagtgagatggcgaagtttttcgtcaatttagagccctgcctgattggcatggaagcatgtggcagttcacaccattgggcgagaaagcttagtgaatttgggcacaccgtcaagctcatgccaccgcaattcgtcaaaccatacgtcaagaccaacaaacatgacatggcagatgcggaagcgatctgcgaagcagtaagccgaccgaatatgcgttttgtggcaatcaagaatgttgaacaacaagctatcttgtcagtgcatcgtgctagacaaggtctggtcaaggccagaaccgcacaagcaaatcagatacgtggcttgctctctgagttcggtattgttatcccgcaaggtatccattcgattgccaaacgggtacctgacatactggaagatgccgaaaacggttttccaggaacaatgcgtcatttactgaagcggttgaatgaccatcttaaagaactgagtcgacaggtggaagaactggagttgcagattaagctgtggcacaaggagaacgaagccagtaaaaaattggaggcaattcccggtattggcccgatcacggcgagcgccattgtggcaacagtagggaatgccacagagttcaagaacggcagacaactttcggcatggttcggattggtgcccaagcaacgttccagcggtggtaagcagacattgcttggcatcagcaaacgtggcgacacttacctgcgtaccttactaatccacggggcacgagcggtcatccgctttgccgaaaacaaagctgaaccagaaagctggttgcgcaaactgataacgcggcgcaacaagaatatcgctgctgttgcgctagcgaataaaaacgctcgcatcatctgggcgttgctcgccaaaggtacaacattccaccccgatcacgcatcggcagcatgcgcagccgctgcatgatcgtggcggatggattaaaaacgtattggtaatatcacatcgaaaacgagtttaaggagaaaaattaccaccgattgcacaggcaatcatgacatgatggcaagactggtcagaccgtgagtggctaaacctgaactagaccaagtgtatagaacacgtcaagatgataaggcgccactcagcttattccatcagggacaaaggtaatttaccttacataaagtccggatgtatggctgcaatctttaccttcttaaaatcatcgattgaaagcttggcataccgtgggcgtccatgta

SEQ ID NO: 6018 - DNA, 1667 bp, unidentified
  source 1..1667: mol_type = unassigned DNA; note = element_947a56c
  misc_feature 1: note = core
  misc_feature 2..294: note = LE
  misc_feature 295..1563: note = CDS
  misc_feature 1564..1667: note = RE
tatccattcctttcgcttcgctcaaggcacaaaacgccatgaaaaaggttggctgccctgagtttcttttttataattgttgtcatagggatatccggtacactacaaatcacggggaggtgagtgggttgtccgtattatcggatgaccgaattattatatgtgtaggatgctttttcaagcacaaataagtgtggctcgaccacgtaaccttatctttgttaaaacaactctcgttttaatcctaagcatccagtcaatgccgtttactccctataatctttgcagaaccccatggttcagaaaggagtccctatggctttaaaaattgtgtaccagacctgctgcggcattgatgtccacaagacttttgtcgttgcctgcatcgcttccacaaaaaaacagggtgtcaccacctacaagcaccatcgtttctcaaccttcacacaggggttgaaggaattgttacagtggctgcttgacaatcactgcagggatgtctgtatggaatccaccggtaaatactggattcctgtttacaatgttttagaaaacgattgtacgattgtccttgcacatcccaaatatgttaaggctatccgtggtaagaaaactgacaagaaagatgcgaaatggatcgctgacctgttcaagcatgaccttgttgccggaagctttatgccccctgctgatatcagacagctccgtgacctgatgcgctaccgtttcaaactgacctgcttcatgtccagtgaaaagaaccgcctccaaaactgtctcacggtttccaacattcagctggcttccgttgtttcggacacgtttgggaaaagttcccaaagaattctggataagattcttgaagatcccgaaaatacttcctttgatatcgaacctttaattcatggctccctgaagaaaaaacttcccgaactggagctcgccattgatgggtttatcacacccgaacaggctggtaaattaaaggtcatcaaaaggcattttgaaaaccttgaatcccggaaagcagagttagaagaactgattcttgcgctcgccagtccctatcagcaagaactcgacctaatcctaaccgctccatcctttaagaacatcttttccgcaattggtatcatttcagaaatcggcgtcagcatggaggcttttccttcggcgaaacacttatgctcatgggctggattaaccccaaccaacaatgaaagtgcagggaagaaaaaatctgtccgggtatccaaagccggatgctatatcaaaccacttctagttcaatgcgccaactccgtggttaaaagtgaaaagcatcctgaaatccgcaaccgctatctccgcttagggaaacgccgcggtcataagaaagcaatcattgcaatagcaagaatgcttctaacagcattatacaacatgctgaaaaataaggaaccctataatgctgaactttatcgaaaaagtgatattcttcctgtaaaccgtgaaatcacggtggagcaggcaatcttaatggcacagtttcagggatataaaatcaagtcagctactgaatagaccttaactttgccacatattcaatttttaaacagccaccgcaagatggcttgtttgtactgcaattaagggaatggataccctctactattctttttcaacct

SEQ ID NO: 6019 - DNA, 1482 bp, unidentified
  source 1..1482: mol_type = unassigned DNA; note = element_9482010
  misc_feature 1..2: note = core
  misc_feature 3..303: note = LE
  misc_feature 304..1455: note = CDS
  misc_feature 1456..1482: note = RE
ctcctacggcgattttcacgaacaacactcctaaacaagaagacaagctttacaagagtaaaacttttataaagagaacaagaaaataacacaagccgaaagtgggcatggggataaaaccccgttggataggctggctatacgtcccccgcgatctaacatgtgggacaatatcccgagtaggagtgtgcaaaaatttaaggggacgttctcatacttactctacactatctcctaacaaaattaacaatataacgcgtattattatagaaaaattcaagaattagaaaaagagtattacacatggaaaggaagataaagcctaaagtatttgcaatagatgtgggggaatcaagacttgttgcaaccaagatggagataaacaacaacacagtaaaagaagctgatacgagagaattcaaatacaacgaggaaggactcaaagaacttataaaattcctagaaggatacgaagaaggaataatggaagcaacaggagtatacttctaccacgtatacaacgtactgagagacaagggactaaaagtaaacgtgataaaccctgtccaaacagttgaagtcctaggcaagaagacagacaagaacgactccataagactcgcaatagcctacgctgcaggcacagtaaaaggatcgtacataccaacgggagaaatgcaagaactaagagaaatgacaagacacagagaaggactagtagagagaaagacacaagtaaagaacgagataaggaaagttctagaaacagcaggatacaagctacctcccttcgaaaagaagacaaaggaaatagtgagaaaactagccactgatgagaagctaactgacgaagagatcaaggagtactccaaattattgggaagaaaattaactagaatagaagcgttcatcctaaaacaactcctggacctactgaacattatagaagaacaaatcaaggaagtggagaacgagataatgaagttcctacccgaggaagcagtagagttgactaagatacccggaataggcccaatctctgcagccacaatttacgctgagcttggagacgtgagcaggtttgagtcttcgaaacaagctgcttcttatgctggagtttctccaaggactaagcagagcgggaagaccgaatttcacaacggtctcatcaaggggaataagcacttatcccgcgttctattccttgttgcaaggtccgctaagaacacgacccaatttaatggcttctatcaagccttgttgaagaggacaagcaattccaaaaaggctacattagccttggccaacaagatatgtaggatagtttatcacgtactcaaggatggggaatacaagggtgagactaagaagactaggtataggggaggaggtggtgaaggccctcaagttgaccccaatcaagtagttccttcggctcttcaagctatcgcctagccatgttagaggcaaagcatgtggagc

SEQ ID NO: 6020 - DNA, 1486 bp, unidentified
  source 1..1486: mol_type = unassigned DNA; note = element_94846f0
  misc_feature 1..2: note = core
  misc_feature 3..254: note = LE
  misc_feature 255..1466: note = CDS
  misc_feature 1467..1486: note = RE
  misc_feature 7..242: note = bridgeRNA
ctaatgggggtccaccacttcttcttgttcatctgggagggtgtggtggttgagctggctggccggtgagtactgtgagctcctggaacctgattcctgaacatagatcgtgccccggccggttggtgaggccgcttgtagcgctcatggggtggcgtgccatagagcactgatccattaggtcgccgccaagcgttctctgcagctcggaaagagatagacccgcgcaaggaaggggcgaaggaaggttctttgtgggtaacgactgggctgaggcgcatcacgatgtgtgcttgttggacgaggatggaaccaaacttgctgtccggcggctaccggaaggccttgggggtgtggcccgcttgcatgagatgatcgccgaacacgcatcggatgcggccgaggtggtggtagggatcgaaaccgaccgtggtctgtgggtcggcgcgctcatcgcagccggctatcaggtgtatgcgatcaaccctatggctgtgtcccgctaccgggaccgtcacagccagggcggagcgaaatccgaccggggagacgccaaggtgttagccgacctagtacgcaccgaccgtcacaaccatcgccgggtggccggtgacagccccgaagcagacgggatcaaagtcctggctaggacacatcagaacctgatctgggctcgggtgcgtcacaccaaccagctgcgacacgctctgcgcgagtactacccggcagcgctggaaacattctccgacctggcccatcgcgacaccctggcggtcctagaacgggcaccaaccccccgcctgggggcccgcctgacgctgccccagatccgggctgtgctcaaagccggcggacggcgacgcaatcttgatgtggtggcccgccgaatccagaaggggctccgttcccgccagctcgccgcaccccagcgggtcgctgaagcacacggggccacagcaggggcgctggtgagcgtcgtcggagaactgaaccgccagatcgcagacctcgaagcaaccctcgaaacctgttttgaggagcacccggacgccgctatctacctgtcacagccaggacttggcaaagtcctcggcgcccgggcgctcggtgagttcggggacgaccccgaacgctacaccagcgtcaagtctcgcaggaactacgccggaacgtcgcccatcacgatcgcgtcgggccgcaaacacgccgtggttgcccgccacatccgcaaccggcgactctacgacgccctggacaaatgggcgttctgttccctaacccgaagcccaggcgccaaagagttctacacccaacggcgagcagccggcgacctccaccaccaggcgctgcgagccctcgccaaccgactagtcggcatcctccacggctgcctcaaacaccgaaccccatacaacgaacacaccgcctgggcacaccgaaccaccatcaaccaggccgcagcttgacatttgcgcccatggggtgt

SEQ ID NO: 6021 - DNA, 1495 bp, unidentified
  source 1..1495: mol_type = unassigned DNA; note = element_948afc1
  misc_feature 1..5: note = core
  misc_feature 6..248: note = LE
  misc_feature 249..1373: note = CDS
  misc_feature 1374..1495: note = RE
  misc_feature 21..268: note = bridgeRNA
tttttagtaccataaaagtgtagttggagagtaattaactccgactgcacttatttttataatgaggggagtaattggtctgacgtggctctttttggatcttcacatccgtcatcaaaaaccgttaaccaaccccttattataagcattcgattaagcaggtagggatccgctcccgcgtaaccaactaaactggatggtaataagtgcggctggaacaattactatttcagattcaggaggttggaatgataagcgtaggagttgatatatcaaaggggaaaagcacagtctgcatccttaagccctatggtgagatacgggttgtaatggaggcaaccggtgtctatcatctgccgattctgacatttctccaggagaagggatatttcgtcagtgttataaatccttattccatgaagaagtatgcaaaggacaacagcctgagaagagcaaagacagaccgtctcgattccataatgatcgctaattatgggatcgatagatggttcaaactgcagaaatatgaaggcgatgaaaatacttacgctgaactcaagcttttagggcgcagataccggtattacatggaacttcatgtaaagtccttgcaggagctcacacatatcctcgactatgtaatgccgggaatcaaagctatgtttaacagctgggatgaagccagtaacaaggataaactgagcgatttcgtagaaaggtactggcattatgacctgatcacgtcaatgagtcgcgaagaatttatagaagactatcttgcgtgggcgaaagaaaagaaataccaccagagcagtgcaaaggctgaagcagtctatgaaatggcatctgatggcattcccacgttgtcttccgataccccatcgaccaaaatgctggtacaggaagcaattgctgtgttgagagctgttgacaattctctatttcgtatcatatcacgaatgcaggaacttgcgaaaacacttcctgagtattctacagtacgttccatgggcggtgtaggcgatgtccttgctccgaagcttatagcggaaatcggagatgtacgaaggctgcataacgcaaaagcgttaatagcctgggctggaatagatccgccaccgtatgagtccggccagtttgttggatcacagcgaaggattacaaaaaggggatcatcgaccctcagaaaagtcggatatgaagttatgcgcgttctgaaatcacatagggagcctgaagacaacattgtttataactacatactcaagaaagaagctgaagggaaaagcaagaaagcagcaaaaatcgccggtctcaataaatttctgcgaatttattatgccagagtgatggctgtttatcagcaacaataaggatgccacgaaaagaattattttgaggctggattgtctccagcctttttggcatgtttggaaataaacaactgtatgatcacaaaaacctgttcataaagctcttgacttttgttagcagg

SEQ ID NO: 6022 - DNA, 1568 bp, unidentified
  source 1..1568: mol_type = unassigned DNA; note = element_94aae73
  misc_feature 1: note = core
  misc_feature 2..244: note = LE
  misc_feature 245..1423: note = CDS
  misc_feature 1424..1568: note = RE
  misc_feature 2..220: note = bridgeRNA
ctattagtattgtcatagccattctttaccttttctacaggttcgactatgctgttttaagatactgtggattggttcatcacctcctgccacctgatggttcatacgaggctccaaccacagtctctttgctcatttgttaatcagttagttaccgcatgacggtttatcaagaagcaggttacaatcgcagggagctctgtggatcttaaaacagtatcaatacattttaaggaggtcctatatgatttttgtaggaattgatgttgctaaagataagcatgattgctttatcactaactctgatggcgaagtcctttataaagtatttaccatcacaaataacttagaaggtttccatgacctttatcaaaaaatctcatctgttatggtagatgcatcaaaagtaaaagcaggactggaagccactggacactatagttacaatcttctcggatatctcattgataaaggtttgaccgcctacgttatcaatccgttacatacgaatctgtacagaaaaagtctaagccttagacagaccaaaacggataaagtcgatgcccgcacgattgcttccatgctgatgtctgatgtgaacttaaagtcctactcagaaacatcatatcataatcaggaattaaaatcactcactcgttatcgtttcgataaagtaaaagaacgggcaaaactgaaagtttccattgcccggcttataaacattctttttccagaactcgaaaagctggttcctacgcttcacatggcatcggtctattctttactgtccgagtttccgggcgcttctcatgttgcatctgcccaccttacaagactgacaaatctgctttctgaagcatccaaaggtcattatgataaagatactgctatccatttccgagaggctgccaaacattctatcggctctgttatgcccgcaaaatctctggaactgaaacacaccatcaaactcattcaggaattaaccactgagattgatgaaatcgaaactgctgtcaagcggatcatggatgaagaaatccgttctcctattcttactattcccggcatcagctaccggatgggcgcaatgatcatcgccgaaatcggcgattttcaccgttttgattcagccgataagatactggcttatgctggaatgtctccttccacttatcaatccggacagctggataacggttactctcacatggagaaacgtggctccagatatcttcgatatgcgctttacaatgcgacaaaatatgtttgccactgggatgaattcttcggtgcatatcttgaaaagaagcgttctgaagggaaacattacaatgttgctttatcccatgcagcaaaaaaacctgttagaactatttttgcaatggaaaaatcaggtcaagcatacaaagcaaccccttaacctgatctacaaatatcctctttttagagcacctgcaaagatgctcttattgtcatgcagttttcaaggtactgactgcaatgaaaagtcattgccactttttctaattttgtttttatacttgactttctttaatagttagtct

SEQ ID NO: 6023 - DNA, 1617 bp, unidentified
  source 1..1617: mol_type = unassigned DNA; note = element_94ab83d
  misc_feature 1..2: note = core
  misc_feature 3..281: note = LE
  misc_feature 282..1484: note = CDS
  misc_feature 1485..1617: note = RE
  misc_feature 14..301: note = bridgeRNA
ttgctacaatgccaacaggcgggaggagcacgccagccaggcgtgcttttctcgtactcacgcctaagctacaatggaagggaaattggcctgacgagacttttaatggactaaccatgtccggctgctaaacagtcagccatccttccactgtagcgttcggttgaggcaggttgaaccactggaaaaccaggatgttcgtgtgaccaagcaatttgaatcggcagtgagaaaacgatggtcgccaatttgaaaataattgagcggagggaaacagggtaatgaatgcagtgggaatcgacgtttccaagagaaaaagcacggtagccattatgcgcccctttggcgaagtgattgcggaaccatttgaggtatcccatacggatacagagttaaggaaactggcttgctttttagagaagttgcccggagaaacacggatcgtcatggagtacaccgggagctactggcagcctatcgccaaagtgttgcacgatgccggcttttttgtctctgccgtgaacgcactactaatctataaatatggcaacaattccatccgaaagggcaagacagacaaactggacgctgtgaaaattgcgaattactgccttgaccgttggacagatctggaacgttactctcctactgatcagatccggcagacactcaaaacatgccgccgccagtacgaccagtacataagattgaaggtcaatctcaaaaacaatctgattgcgttgttggatgggacatttcctggcatcaataccttgctcaaaagcgcccccagagatacggatgggcacgaaaagtgggtggattttgccggaaagttttggcaccgccagtgcgtttgtgggaactccgagaaagcgttcgcaaaccagtatcgaaaatggtgtgccaaagccggttacagattcaacgcagaaaaggctgtggccatctattcccaccctggctcgcaggtggatacgcttccaatgtcctctgcaatccagagcctcatcacccatgcggtagctcagctcaacatgatcatagaaacaatttctgcgattcaacatgagatgctcacgctggcttcacagtttccagagtacccaattgtgatgcggatgttcggtgtcggccctgtcctcggccctcaacttatggcagaaatcggcgatgtgcgccgcttccactgcaagcaatctttagtggcctttgctggcgtggacgcacccccctgccagtccggtacttttgaatcgaagaataggcatatttccaaacgcggatcccccagactgcgcaaaacgcttttccaagtcatgtccaccatcatccaacatgcacccgctgatgatcctgtataccaatttcttgaccgtaaaaggcgggagggcaagcattactatgtttacatgactgctgcagcaaacaagtttctaagaatctactatggcactgttatggcctatttcgagaagccgtagtttcatctaaccgacgatttccatttcatctccacggccgccaagatacgacggcctgttttgctatgccaatttttgagaaactatctttttttatttttgtgtttttaggccttgacaactcttggcaggt

SEQ ID NO: 6024 - DNA, 1468 bp, unidentified
  source 1..1468: mol_type = unassigned DNA; note = element_94b40a6
  misc_feature 1: note = core
  misc_feature 2..256: note = LE
  misc_feature 257..1453: note = CDS
  misc_feature 1454..1468: note = RE
  misc_feature 44..229: note = bridgeRNA
ccgttaccttcttcccagccccgtgggtcgtgttggatcgggggtgctggcctgtcggtctcggcatgattgccgcccccagtcgtccatgatccggggggtgttgtcaccgggaccggtaggtggctggtgatcgctgataggggcacggccaaggatcctcgggggtctgcagcgccgtccgtaacgtggatgccgacgctggtcaccgtgggacagtccagcttgccttgttgccggcgagggaggtccaccgatgatccgtgagcatgcccaggtcgacgtgttcgtcgggctcgacgtcggcaagagtgatcatcatgcggtggcgctggaccgcggcgggaaggtcctgttcgaccgggcgctacccaacgacgaggcccgtcttcggagcatccttgcggacctgagcgagcacgggcgcgtgctggtggtcgtggaccaaccggccacgatcggggccctgccggtcgcggtcgcccgagagtgcggggtcgtggtgggttacctgccggggctgtcgatgcaccggatcgcggacctgcaccccggtcaggccaagaccgacgcccgggacgcggcgatcatcgccgaggccgcccggtcgatgccccacacgttgcgctcgatcgcgctcgacgacgagcagatcgcggagctgtcgatgttgtgcggcttcgacgatgacctgcgcgcccagatcaccgcgacgtcgaaccgggctcgcgggctgctcacccagatccaccccgcgctcgagcgggtcctgggcccgcacctggaccaccccgcggtgctcgacctgatcgaaacctggcccacccctgctgacttcgccgccgcaggcacccggcggatcaccgcgcggctccgcaggggagccccgcgcctggccgaccgcctggccgcgcagatcaccgccgcactgggtgaacagacggtcgtggtcaccggcacgaaagccgccgccgtcgtgctgcccaagctcgccgcgcagctgaccacgctgcgcacccaacgcagcgaggtcgccgccaaggtcgaggaactggtcgacgaccaccctcttcacctggtcctgatgtcgatgcccggagtcggcatcaggaccgccgcccgcctcctgaccgagatcgtcggcaagcagttcacctctgccgcgcacctggcctcctacgccgggctggctcccgtcacgcgccgctcggggacctcgatccgcggcgagcacccatcgcggtccgggaacaaggtcctcaaacgtgccctgttcctgtccgcgttcgcggccctgcgcgaccccgtctcccgggcctactacgaccgaaaacgagccgaaggcaaacgccacaaccaggccctcatcgccctcgcccgacgccgccgcgacgtcctcttcgccatgctccgagacggcaccctctacgacccgcccacccggaccgcttgacgaacgacatagggg

SEQ ID NO: 6025 - DNA, 1399 bp, unidentified
  source 1..1399: mol_type = unassigned DNA; note = element_94b5cde
  misc_feature 1: note = core
  misc_feature 2..91: note = LE
  misc_feature 92..1123: note = CDS
  misc_feature 1124..1399: note = RE
  misc_feature 1173..1394: note = bridgeRNA
caatgggatggactcctcctcacctatcggcatcaatgtgccaaactggttattgcgccaccagttaacggtgtcaacggaggagtccactatgaagattagtcgagtaggtgttgatttggcaaaaaatgtttttcagctgcacggagtcgatcgccacggcgaaaccgtattgaagcgccgtgtgtcacgcgacaaatggataagcgtgttggttaagtctgccgagcctggctgcgaggtgggtatggaggcctgtggcggcgcccattactgggcccgccagctcatggcgaagggttttaaggtgaagattattccaccccagtttgtaactccctacgtcaagagcaacaagaatgatgcaaaagacgcagaagcgatttgcgaagccatgagtcggcccactgtgcgctttgtagaggcgaagacggtggagcaacaggacattcaggcgacacatcggattcgcagtgaactgatgtgccaccgtactgcgaaggccaatcaaatacgtggcttagtgacagagtatggcctggtagcgccgttgcacatggcttccttgcgagcagccatcccccgctggcttgaggatgctgagaacggattaactgatcggttccgcgccctgttacacggattatgggacgacctgctgacactggaccagcgtattgaagccctcaacagggaagtcgattgcattgcaaagaatgatccagtcgcccaacgccttcaacaactacgcggtgtgggacccctggtcgcgacggcattgatagcgagggtaggaaacggtgaccaattcagcacgggacgtcagatggccgcatccatgggcctcaccccgaggcagcatagttcggggggcaaggatcgattgctgggcatcagcaagcgtggtgacgcatatttgcgtggcaccctgatccatggggctcgcgctgtggtttcccaggccaagcataaggaggatcgcttgagtcggtgggtgacgggattagcagagcgccgtcatcccaatgttgctgcagtagccctggccaacaagaccgtgcgtatggcctgggcaatgatgaatcatgatgcagactatgatccggaatttgcggtgagctgatgaaggcaagccacaagtatgagaagcaagtagaaagaggaaccttaaccacgattgcgaagtaagctgaatgatggcgatctggtcgaaccggcgttagtaaaacccgtcaatgtccgtgtgcactaagcacgagaaagcaattgggtactgacgcgcgaatagcccattatggcccggcatcaacgtatgccaactttagaggccggatatacgtatgcagtcgagccaactgtcatcaagcaggttacttgcaaacgaggaggagtccatata

SEQ ID NO: 6026 - DNA, 1486 bp, unidentified
  source 1..1486: mol_type = unassigned DNA; note = element_94b89d1
  misc_feature 1..2: note = core
  misc_feature 3..242: note = LE
  misc_feature 243..1466: note = CDS
  misc_feature 1467..1486: note = RE
  misc_feature 14..239: note = bridgeRNA
ctaatcagtggtgggagtgggttatccggcacactcctggtggtagccggccggtgggtgagcacttttcgcgcttggacgtcgagtcctggtgaaagaccgtgcctctgctggtgggtcgggagagctggatcgctgctgggatgtcgtgccccgcgtgttcgtggtgggaagcactgcttgattaggtcgctgatggttctcccgctggctgcgcagggtgatcgagcacgggaggatcgttgcggctgttcgtaggagatgactgggccgaggaccgtcacgatgtcgaggtgatggacgtctccgggcgtcggctggccaaggcccggctgcccgagggggtggctgggatggcccggttccacacgatgatcggcgggttggtcggtgaggaccccgaggatgtggaggtgctggtcgggatcgagaccgaccgggggccgtgggtagccgcgttggttgcctctggccacacggtgctggcggtgaatccgttgcaagcagccaggttccgtgaccggctgggcgtgtcaggcgccaagagcgacgccgccgacgcgcatgtgctggctgacatggtccgcacccacgcccaccagctgcggccggtggccggcgacagcgctcaggccgaggcgatcaaggtggtggcccgcacccacaaaacgctgatctgggaacagacccgccatacccagcggttgcggcacgcgctgcgtgactacttccccgccgcgctggccgcgttcgaggatctggacgcggccgacaccctggaactgctcgccaaggcacccaccccggcgaaggcggcccggctgaccaccgcgcagatcaccgcggcgctcaaacgtgcccgccgccgcaacgtcacggagaagaccgagcttgtccaggccgcgctgcgcgccgaccacctcggtcagcccgaggtcgtgaccagcgcctacgccgcctcggtgcaggcgctcatcgcggtcctgaccgtgctcaacacccagatcaaggccatgcaggggcaggtcgaggcccattttggccggcacccggccgctgagatcgtcacctcccagcccgggctgggaccgatcctcggcgcccgggtgctcgcggagttcggcgacgaccccgaccgctacgccaccgccaaatcccgcaagaactacgcgggaacctcgccgatcacccgcgcctcgggcaagaagaaggtcgccctggcccgattcgtccacaacgaccggctcatcgacgccctgatggctcaggcgcaaagcgcgttactgcgctcgccaggcgctcgcgcctactacgaccggcagaaagcccgcggcgccggtcacaacgccgccctgcgccaactcgccaaccgcctcgtcggcatcctccacggctgcctcaaaaccggcacccactacaacgaaaccaccgcctggtcacaccacaccaacaacattgcggcttgacacaccagcacctgggatgt

SEQ ID NO: 6027 - DNA, 1228 bp, unidentified
  source 1..1228: mol_type = unassigned DNA; note = element_94bdec7
  misc_feature 1..3: note = core
  misc_feature 4..242: note = LE
  misc_feature 243..1220: note = CDS
  misc_feature 1221..1228: note = RE
  misc_feature 53..220: note = bridgeRNA
catcctatgtttgtgaggtgattgtttatatcaggaataagaataattttataggaagaagaataaagggtaaagagaaaagattaagtcgtgtcattggctgtaggaagccgctcaccatgctaatccctttaccctttgcttacgagcttgaacagttcattaggccgttgagcctgaatgtaggattgataagccaataagcagtattcttctacaaatattactcttaaaacaaagttatgcaaactcagacaaattacacaggtattgacatttccaaatctttctttgatgtagcttttcttcaggcaggtcgttacacttattacaagttcagtaatgaccgagatggctttaaggctttattaaaagtagtaccatcaggcacttgggtagtgatggaagcatccggtccttattatcttcagctggcctgtttccttcacgatcagcggatagcagtaagtgttatcaacccattggttatccgccgttttagccagatgcggatgtcgcgggcaaagacagataagaaggatgcaaagatgatagccgagtatggtaaaacggagcaacctccgttatggcaaaaacccgagcagcatgttattactttgcaacaaatggaagcgttattagccaggttgcaaacggagtatacttctttaagcaatcaattaggcagtttcgacagcagtggaatgctgacgggccaattaagaaaacaagtcgtagcggaacttaagcacaaacagactttggtcaaaaagctgacaaatcaaatggagcagatcgcaaaacatcattactcaaatatgctggctgatctggaaagtatacctggtcttggtaagaaaacggcaatgatattaacggtactcagcggggggttcagccggtttgatgactatcgtaagctaagttcttatataggtatctgcccacgaatatttgaatccggcacaagtgtaaaaggcaaagccaggatctgtaagatggggatgtcccggattagggcgacattgtatgtctgctcgtggagcgcatcaaggtgtaacaaagcctgcagggagctttatgagcggttgctggcaaagggtaaagcaaagaaacttgcattgatcgctgtggccaacaaactattaaaacaagcttttgctatcgctagacaacaaacaaaataccaggaaaattattcaaatatcacttgcttttaaacacagtt

SEQ ID NO: 6028 - DNA, 1166 bp, unidentified
  source 1..1166: mol_type = unassigned DNA; note = element_94be3e9
  misc_feature 1..2: note = core
  misc_feature 3..176: note = LE
  misc_feature 177..1145: note = CDS
  misc_feature 1146..1166: note = RE
  misc_feature 33..197: note = bridgeRNA
cttgtatcttgaagactgattaaaattaatacgattagatttggcaaaacgtatgcagcccgatgccttccagggttcaagcccgtatatcagcgactggcgcatacgctgagccactcatctgaaacccgaacagttgtccgtattccataacgtatttgcaaggaggggtaaaaatgagtcagccaaatccactttgtgtgggcatcgatgtttccaaagccacactggacatcgctgccagcagtgatgttgctcagtttacagtcagcaatgactctgatggctttaacgcgattattaccggactgagacggcactccgttgctctggttctgatggaggccactggtgggctggaagttgcggtggcctgttcgcttcaggccgaaggttttgaggttgccgtggtcaatcccaggcaggcccgtgacttcgcccgtgcaatgggatatcttgcgaagaccgaccgaattgatgccagagtcctcacgcagatggctgaggttattaatcgtcaccctgagcggaaacgctttatcagggcactgccggatgctgaacgtcaggcccttgctgcgatggtggttcgcagacgccagttgattgcgatgttggtggctgagcgtaaccgactgcatccattccatccgcagaacaagaaaagcattaataccatcattaaagcgctggaagatgagcttgtcaggctcgagaaagaaatggacagtcacatccgtaaccactttaaagagattgctgagcgcctgagcagtatcaaaggtgtaggcaccatgaccgtttccgcgatgttggcggagattccggaactgggaacgctctcccggcgcgaaatcagtgcgcttataggtgttgctcctgtcaaccgggactcagggactatgcgtggccggcgaaccatttttggcggcagggctggcgtaagatcagcactgtacatggctgcgcttgtggcaacccgctttaatccggtgataaaaacgttttatgtgtgcctgcttgcagccggaaaggccaaaaaagtggcgctggtagcctgtatgcgtaagctgcttaccatcctgaacgcaatgctcagaaagaacgaagaatgggatgagtcgtaccaccacgttgctccataatttttaccttcaagacagttg

SEQ ID NO: 6029 - DNA, 1381 bp, unidentified
  source 1..1381: mol_type = unassigned DNA; note = element_94c41f8
  misc_feature 1..3: note = core
  misc_feature 4..86: note = LE
  misc_feature 87..1121: note = CDS
  misc_feature 1122..1381: note = RE
  misc_feature 1152..1368: note = bridgeRNA
tgatgctgtggacggcgcccactctgcggcatcgaagtgccatagggtggttgcgttagagcaaaccacgttgaggggagccgtccatgggcgatgttagcacgattggtctcgatattgcgaagtcagtattccaggtacatggcgtcgatgttgtgggtgcggttgtgatccgcaagcgggtcagccgtgccaaggtgttggaatacttcggtgagttgctgccctgcctggtcgggattgaagcgtgtccgtccgcgcatcactggggccgcgagttgcaggcgctcggtcacacggtcagactgataccgcccagctacgtgaaggcctacctcaaacgcagcaagaacgatgcaaatgatgcagccgcgatctgcgaggcggttacgcggccatcgatgcggttcgttccgatcaagacgaaggaacagcagaccgccttgatgctccaccgaaccaggcaactgctggtgcgccagcgcacgatgttgagcaatgccctgcgcgggcacttggccgaactcggcatcgtgtcggccaagggccgcaatggaacggcagagttgctcaggatcatcgcggatggtgccgatagccggatttccgcggccgtccgcagcatcctcgatgtgctggcgcggcagcatagcgcgatcggaactgagatcgcttccatcgacaagagcatcatggccttacaccgcgcctgtgaggcgagccgccggctggcggagatcccaggcatcggcccggtcggcgctaccgcattggtagccgagataggcgactggaatactttctcgtcggggcgcagtcttgcggcttggatcgggctggtgccgaagcagcacaccaccggcggcaaagacaggctcggaagcatcaccaagcagggaaatcgatatttgcgatggctgcttgtggtcggggcaatggccgtcatccgctacgcgcgcaagcacggaacgcagaagcggccgtggctcgcacgattaatggaacgtcggccaaccaaggtggcggccgtcgcgctcgccaacaagattgcgcggatggcttgggccatcatggtccggggcgagagatacaaggagccgaaactgttgctggcggcgtgaggcagccagcagatagatcggcaaaaccaacaccaattggcgagggcatgacgacgtaatgcagatacggttgttccggggatcgggagaacccgcttgggtcaacgcacctaaaagtgcgccactttgtttgggacccgatccgcgcagagcattagggccagcggccatacctgccgcacaaacaggccggacacgtgaccgcacccgaccaatgctgcaaaacgtcagaaagttcttgccaaggcgccgtccacacg

SEQ ID NO: 6030 - DNA, 1480 bp, unidentified
  source 1..1480: mol_type = unassigned DNA; note = element_94c8922
  misc_feature 1..2: note = core
  misc_feature 3..235: note = LE
  misc_feature 236..1459: note = CDS
  misc_feature 1460..1480: note = RE
  misc_feature 7..227: note = bridgeRNA
ctaatgggtgtgtagcgggttctcgtgtgtgcgaggatttgttgctggttggcgggccaggtgagcactttgttccccccggggtatgtgacccttgaggtaagaccgtgcccctggcctgttggcgggttgcttcactgatggggtggcgtgacgttgatcacttttccattagggcgttgttggcttctcgctctcggccggttgggaattgttgtgttgaaggaggttggtgatgatttttgttggtgatgactggtcggagggtcatcatgatttgtggctgtccgatgttgaggggaccaggttggggtcggtgcggctggtggagggtgttgatggtcttggccggttccatgagctggtcgctgggtttgttgatgacccttctgaggtggtggttgggatcgaaacggaccggggtttgtgggtggtggcgttggttgcggctggttaccgggtgttcgtggtcaaccctaagtcgatgtctcggtatcgggaccggtatcggctgagtggagccaagtcggatgtgtcggatgcgatggttctttctgatgtggtccgcactgaccggcatcatcaccgtgaggtggctggggacaccaatcaggccgaagcgatcaaggtgttagcccgaacccatcagaatctggtgtgggaacggaccagcacatcgcaccggttgcggtcgacgctacgtgagttctatccccaagccctcgccgtgttctccgagctggcccaccgtgacgctcttggcgtgttagcgaaagcgcccaccccggttcagggtgctgcgttgagcgtttctcagatcaaggccgtgttgaaaaaggctggccggcaacgctacctcgatgtcaccgcagaaaagatccgggacgggttgagaaccagcgggcttgccgcgccgcctccggtcaccgcagcgatgggagcggtatgtgagacgttggtgacgttgatcaccacgttaaacaccgagatcgaacggctcgagtcgttgttggctgaccattttgaacagcatccggacgcccacatctacctgtccttaccgggagcagcagtggtattaggcgcccggatgctcggcgagttcggggacgacccgaaccgtttcaccgacgctaagtctcgcaggaactatgccgcaacatcgccgatcacggtcgcttccgggaaaagccgatatgtcaaagcccgatatgtgaaaaaccaccgtctcaacgacgccgtgatccgctgggcgttctgttcgatcaacgtcgacgccgacagccgggcgttctacgaccaacaacgagccaaaaaccacggccattacacagccctccgagccctagccaaccggctggtcgggatcctcgacggctgcctcagaaccaacaccgaatacaaccccgacaccgcctggggccaccgccgaaacgaagagaccagccgagccgcttgacaacttagaaccatggggtgt

SEQ ID NO: 6031 - DNA, 1424 bp, unidentified
  source 1..1424: mol_type = unassigned DNA; note = element_94cb178
  misc_feature 1: note = core
  misc_feature 2..128: note = LE
  misc_feature 129..1148: note = CDS
  misc_feature 1149..1424: note = RE
  misc_feature 1188..1424: note = bridgeRNA
atggaatgaacgcccccacctaccggatgcgagaagctgaaggaagtggaccctcacgggccgacggcatcaatgtgcccaaataggaagatcattgagatcttcacaagctaaccggagggtccgaaatgaagtatacgacggtcgggctagacatcgcgaagaacgtcttccagcttcactgggtggatgctgagacaggtgagatcgtgaacaagcaactgaaacgcaccgtattcctggagcatttcgcaaatcgagaaccttgtcttatcggcatggaggcctgcggcggtgcccagcattgggcgcggcgattgatccagatgggccatcaggtaaagctgatgccagcgaaattcgtcaaggcattcgtgatcggaaacaagaatgatccggccgatgcgcgtgcgatctggatggccacgcagatgcctagcaaggctgtcgctgtgaagacagagggtcagcaggccgtactggcgttacaccggttgcggcagcagaagatcaagttccgaacgatgcagatgaattgtctacgcggactgctgaccgaatatggcgaggtgatggccaagagtcgcgccgcgctggataaagcaattcccggggttctcgcgaagctggctgagcgtctgccggcgatgctgaccgactcgttgcgcgaactctggaatgaccttgaacggcttgataaacagatcgccgacattgaaagacgtctgcaaatgtggatgaaagaggacaaggcatgcaacgcaatcgccgcaatccccggcgttggcctcgtgacagccacagcgacggtcgccaccatgggtgacgcgaaatcgttcaagtccgggcgagagtttgccgcctggctcggtctcgtacccaagcagactggcaccggcgggaagatacagctattaggcattagccggcgcggagacacgtatgtgcgaacgctcctgatccacggcgcgcgcagcgtgctcttccacgcgaatcacgccggagcgtgggccgagaacttgcagaagcgacgaccatcgaacgtggtaaccgtagcacttgccaacaagatggctcgaacgatctgggcagttctcgcgcatgacaggccgtacgagcgggatcacgttagtgcacggtcagcttgaatcatgagtgatgctgagtagatacgcgaaggttacaggatgacgtcgaaaggttgcgttggcaatcgagggtgatgacaagacaggtcggaccgggattcgttaaacctgaaagataatttgagcatgtagctcgtgcgacaaatgaggagcgagtcagcggatttcatcggggcccgcagcgcatgaggctgcaaaaaggccgcatataaagctgcaacctatcctgtcgaatcggagcacaagaaaagctagcgcatcgggggcgttcatata

SEQ ID NO: 6032 - DNA, 1369 bp, unidentified
  source 1..1369: mol_type = unassigned DNA; note = element_94ce6d6
  misc_feature 1..2: note = core
  misc_feature 3..211: note = LE
  misc_feature 212..1177: note = CDS
  misc_feature 1178..1369: note = RE
  misc_feature 41..217: note = bridgeRNA
cttgtattagcgcggtggtttatattggcatcgttccgtgaggaatggcccagcccgggtggccacccaggctgggccgccgatcggtcggatcaatgcccaccgaagccttgagggctgtctttcgtagcaagatcgcggtcggcacttcatcgggacccgaatggttgaaggaactttaggttcgcatcacaagggagggtcgacgaagatggccaagcgtaccacaatctgcgccgggatcgataccggcaaacggaagctcgacgtggcgctcgatggcaactccttgcagttgcaagtcgagaacacggcagaaggtcacaaggtgctgctggagtggctgcggcgtcacaaggtcaaacgcatcgggatcgaagcgagcggtggctatgaacagccggtcgtcgccgaactgcgacgcaaacggtttgtcgtggtggtgtttcagccggcacaagtgcgtgcctatgccaagttccacttgcagcgcgccaagaacgacaagatcgatgccgcgctgattgcggcctgcactgctgcggtcaagaagatccatcccgcccccgatccccggctgcagccgtttgccgagcacctgacgatgatcgagcagatcggcgaggatattaaactgtacaagaaccggctcgagacctgccgagatccgcgtatccagaaggtctggagggaagagatcgcccgcctggccaagcgcgagagggccgagctcaaggccttggtggccgcgatccgcgagcatcgcgatctcgcccaccggctcgacctgatctacagtgttggcggcgccgggctgccgaccgcggttgcgatcctggtacgcatgcccgagatcggccagctcagccgcgagcaagttgctgcgctcgccgggctcgcaccctatgatgatgacagcggtgagcaagtcggcgctcgtcacatccacggcgggcgcaagaggctgcgccgggcgctctatgccgccgcgctgccggcatcctttcgctggaatccgcagcttatcgctctttacacgcggctgaaggccgccggaaaggaacacaagcgctgcctcatcgcctgcgccaggaagctgctcatcttcgtcaacaccgtcgtggcccgcggcacgccgtggcaagatgagccgcttccaaccgccgcgaccggatgaattcggtttcttggttcgaccggagcaccgtttcttcgtcccgacctgccgccccgacgacgtcgcgcgcagacgccgtcaaggatggccgtcgctccaatccctccacgccaccctgtcaccaggccacgccttgacggcggcgagcacggcgtcagattcaccggcaatcgggtgccgatttaatggttg

SEQ ID NO: 6033 - DNA, 1172 bp, unidentified
  source 1..1172: mol_type = unassigned DNA; note = element_94cf3c6
  misc_feature 1..2: note = core
  misc_feature 3..221: note = LE
  misc_feature 222..1169: note = CDS
  misc_feature 1170..1172: note = RE
  misc_feature 10..197: note = bridgeRNA
cttgtatgttctaggctaggaacctgtcggggggtggagggacatacgcggcttctgcaagcgacaaagccagactgtaggagaattcccccaccccacactcaccacaagcgccgataaggaatccttcggtcggagcgacaacccgaaccgacaataccggcaagcctgcgcaacgtgagtcccgacaggtcgctcaatcttcaccgtcggagcacaccatgacaagccctcgtcccgttatcggtatcgatgtcgccaaggactccctgagcctctaccgggctgactccggtcaggcctctgagatacccaatgacactcgctcgatcaaaacatggctcaagagcctccccgcgcgtagcgccatcgccattgaagccaccggtatctaccacctggacgtggcgtccctggcgcacgctcgaggtcattcggtctatatcatcaatggctaccgactcagcaattaccgcaaaggaatcggtggacgtaacaaggatgaccgcagtgatgcccgattactcgcgcgctacctggcccacgaaatggcgcaactgcaaccttgggagccgccccacaaggcctacacacgcctgcaaaccctgctgcatcgtcgagccgtcctggttcgtagcgcgggtgcattgcggcaaagcttttcccaggatcctctgctgaaaaatgccctcaagccgttgctcaagcgcatgagcgcacttgaagagcgcctgaaaaagcttatcgaccaagccctgaacgaatcaggcctggccgaacagagcaagcgctgtcaggcggttgaaggtattggtccactgacggcagcagccctgaacatggccttgctcagaggcaccttccgcaatagcgatgcgttcatcgccttcctggggttggacgtgcgcctgaaagaatcgggccgctactgcggccaacgcaaactgaccaagcagggcgacccggagatccgtcgtctcctgcacaacgcggcgatggctgctgcccgtactcagcggtggcaagaaacctatcagggctacctgaaacgtgggctcaaacgaaccgaagccctgaccatcctggcccgtaagctcgcccgcatcgcctttgccctcatgcagaaacaggtcgactacaaccccaaacaaggagctccgttgacatagaat

SEQ ID NO: 6034 - DNA, 1414 bp, unidentified
  source 1..1414: mol_type = unassigned DNA; note = element_94cfd65
  misc_feature 1: note = core
  misc_feature 2..81: note = LE
  misc_feature 82..1101: note = CDS
  misc_feature 1102..1414: note = RE
  misc_feature 1182..1405: note = bridgeRNA
taatgagatggtccgccgcttgattcctcagcctcagtagagggatcgtggtggcagcttctatcaaggaggatcatcgctatgcagatacattcggtaggcatcgacctgggcaagacgacgtttcacctcgtggcgctgggagcgtcgggcaaggtgctggtgaagaagaagttcacgcagcgccagctgctgacgtacaccgcgaacatgcagacatcgctgatcgggctggaagcttgctcaggcgcccacttcctcggccgggcgctacgcaagcaaggccacgacgtccggctgattgccgctcagtttgtgaagcccttcgtgaagtccaacaagaacgacttcgttgatgcggaggcgatcgccgaggctgtcgagcgcaagaacatgcgctttgtcccgatcaagacggacgaccagctggaccttcaggccatccatcgagttcgtgatcggttggtttcacgtcgaacagcggtgattaaccaactgcgggcgtttttgctggaacgaggcatggtgttcgcgcagaagccggcgaagctcaaggccgcgatggcagacatcctggagaacgcagaggccgaccttacaccactgatgcgcaacctgatcgacacgttatggggtgagtggaagaccgtcgagcaacagatcgaagaactgaacgacgaactggagcgcatctctgccagcgatgcaggatgtacccgcatccgcaagattcctgggatcgggcctgtggtggcgacggcgatcgtagctgccatcggtaatggcgccgcctttcgcaagggtcgagactttgcagcatggctaggcatcgttccacgtcagtattcgaccggaggtaaggcgaagctgttcggcatcagtaagcgcggcaacgtctaccttcgcaagatcctgatccatggtgcacgagctgcggtcctgcggatcaagcgcgaccgagcaccgattggaacctggctcgatgcactcgacgccagagctcccaagaacgtcgtcgtggtcgccatggcgaacaagctcgcacgcatcgcgtgggccgtactatcaagcggcaacgagtacagacctgtcgccgcgtagcgctgcggaaaagacgcctgcggcttggaagcgctgacgcgctcccactttaccgcaccacgaccacggactaaagtttttcccaccgaagtctgcacaggagcagcaaggacgaaagaacagtcacaacggcgtgtccgcagcctggtaccgagaatggtctcgaaagagcaaccgaccgacttagaaggacagacacgcgcgcaactcatcgtggccaggagaactgatctccacccaaaggccgaatacatttgcgcagacttgtcttctcgaccaaacttccccttgcagtcgcgcggcggaccataca

SEQ ID NO: 6035 - DNA, 1637 bp, unidentified
  source 1..1637: mol_type = unassigned DNA; note = element_94d6184
  misc_feature 1: note = core
  misc_feature 2..299: note = LE
  misc_feature 300..1478: note = CDS
  misc_feature 1479..1637: note = RE
  misc_feature 54..269: note = bridgeRNA
tggtatattgaaattactcatccaattgagtaattatacataccttcccctttcttcccctgtttataagagtcgggtatcactcttgttaacttttttgtagaattgaattgtgaatgtgtgcttatatttttttcctgtagctagactactttttggaggattctgccacttcttcgtattgaatcatttatcagttggatgagcctttgagttctaatattacaccaggttatgagatacccagaatgtggttatcatttacacacatttaccatttatagaaaggatgtgtttttatgttttacatcggcattgatgttgccaaacttactcactatgcagcagttattgactcaaatggtgaagttattgtcaaaccttttgaattttctaatgatataagaggctttgaagggttcaaaacgaattgtctgaaatttctaaaaccagacaatcatcttatcggtttggaagacaccggtcactatggtgacaatctggtaaaatggcttctggatcaggattatcaagtcgctctaatcaaccctatcacaacaagtaatatgcgaaagatacaactcaagacttctaaaaatgaccgcattgactctgtcctgattgcttctatgcttacttataaaccgataaagtatcgacttataagtaaatccaattttggatttagagaaattaagcatcttacaagaatgcatcacaatcttaaagaacaacttaatatctttaaaaacaggcttcaatccaaaatagatatcttatttccagaatataatgaactcttcaattcaaaatatggtattcattatttagaaattctagaaaatatgccatctgctcactttattgccaatactgatattagaactatcagaaaaataatggacatcaagggcaaaggcattagatgtgcatttactgcccaacaacttaaagataaggctaaaaagtctatcggtgaagataatcctattttagaaatggaagtaaggcaccttatttctcttatcaagttaatgaattctcaaataacggaaattgattctaaaataagagaattcagccaacaactgaactctccaattcttgacatacctggaatctcacacttttcatgtatgtctatcatttctgaaatagggaatataaacagcttctcttctccatcaaagctgattcgcttcgctggagttgatccctatgattatcagtctggtctttacaaggccaatactacttccattaacaaacttggctctcgatacttgagaaaaactctataccagattattattcctgtcataaggttcaatcccgtatttcaacaatattatactaggaaaattcaacaaggtaaatctcatcgttgcgcctgtggacactgtgtcagaaaactcttaagaattatataccatttgttgttttctaatgtcatctttgacaactcaaaaatgatttaagatataataacagataaactttaaaaatcatttttaaaaagttgtttttattatggctttttttatacatattcacttttcaaagacctttttatcaacaaactattaatttttcttatttaattaatctaggttaattaatcttgacttttatatagt

SEQ ID NO: 6036 - DNA, 1407 bp, unidentified
  source 1..1407: mol_type = unassigned DNA; note = element_94e5517
  misc_feature 1: note = core
  misc_feature 2..96: note = LE
  misc_feature 97..1119: note = CDS
  misc_feature 1120..1407: note = RE
  misc_feature 1160..1405: note = bridgeRNA
taatggtatggactcctcccctccccaaccggcatcgcgctgtgccaaagtgggagcactgaaccaccacctgaaacgggaagaggagaagtcaccatgaagattacaacggttggttttgatctggcaaagaacgtattccaggcgcacggcgtagatgagcggggacaggtgaaattgaaaaagaccctcaagcgtgcccaggtattgccctttttcgccaacctgccgccttgccggattggcatggaagcctgcgcgggagcgcactactgggcgcgggaactggcgaagcaggggcatgaggtcaaactgatcgccccgcagttcgtcaagccctacgtcaagggcaacaagaatgacgccaacgacgcggaagcgatctgcgaggcagtggggcgtcccaacatgcggttcgtgccagtcaagaccgtggaacagcaagacctgcaagccttgcaccgggtgcgtagcgggctggtaaaggaacggacagccaccgtcaaccagacacgcgggctcctgggcgaatacggcatcgtcatcggcaaaggcatcacccaggcgcggcggcgcctgccggagatcctcgaagacgccgaaaacaacctgagcgacccggcgcgggagttgtttgccgaactccggcaacagatcgtccacctggacgagcaagtcgcgaaataccagagccagatcgaagccatctgccgggagagcgccgcctgccggaagctcctgaaggtcaatgggataggacctctcagtgccaccgcgatggtggcgtcggtgggcgacggcagcgccttcgagcgggcgcggcaggtcccggcctggctgggattgacgccacggcaggcctccagtggtggcaaggagaggcttttggggatcagcaagcggggcgacagctacctgcgcaccctgctgatccacggggcacgcgccgtagtcaaggcagcccggaacaaagacgatgcccaaagccgctggatcaacgacctggtgcaaaggcgcaaccagaacatcgccgccgtggcggtcgccaacaaaaacgcacggatcgcctgggcgctgttgacgggggatgcggactaccgcgcccccgtggcggcctgacgggcaccgggccggaaaacaatgatttattaacgagcaacccaccccagttgcgaagcacttttcaacgttgatggcagaccggtcagaccggtgttttcagaagtccgctcagcgcacgggccttcgaggccgataggttgatagagacgaaaacacgcggataaccatcagggccagagggaacagaaacacccctcactcacaggccggatatatggcagcaactgcgttacttgaccgacgcatcaatgacgaaaaggcttgcaaacgggaggagtccatata

SEQ ID NO: 6037 - DNA, 1652 bp, unidentified
  source 1..1652: mol_type = unassigned DNA; note = element_94f2358
  misc_feature 1..2: note = core
  misc_feature 3..245: note = LE
  misc_feature 246..1421: note = CDS
  misc_feature 1422..1652: note = RE
  misc_feature 3..226: note = bridgeRNA
ctcgtatcataaaagagtagtatttatagaccgctctccagcggaatgctacaatagttccagggtgctgtggattggtgaaaaatccctaccgtaaagacggtttattggaggctccaaccacagcttctttgttgaaatgttaatcagttagataccgccagacggtttatttagaacgaggttacaagagcaaagaagtctgtggtcctaagcagcattgaataatataacggaggtataaaatggtctgtgtcggaattgatgttgccaaagataagcatgactgttgcattctcgattcggaaggaacgacccttgtcgattgctttaccattcccaacaacatggatggtttcaaaagtctgctacaaacaatccaagactgttctcaaaaatcagacaaaataaaagtagggcttgaggctaccggacattatagctacaacatccgtgggtttcttcttgacaatgatctgcccgtctatgtcatgaatcccttgcataccaacctgtatcgaaagagcctcagtcttcgcaaaactaaaaccgatcgtgtggatgcaaaaacgattgcaactatgctgttgtccgatgtagacctcaagtcctacacagatacagcatatcacaacgaagaactaaagtcactcacgagataccgatttgataaagttcaggaacgcgctaaactaaagcagtcggtgtccagattggttacaatcctgtttccggaattggaacagcttgtttcgtctatccacggcacttcaatctacgcacttctcagtgagtatcccggtgcaaagcagatttcagaagctcatctgaccagattagctaatattctcgtgaaaacatccagaggccattaccgaaaagataaagctactcatatccgagatgcagccagaacatccattggttctgttatgcctgctaagtctttggaattaaagcacaccattaagctcattcaagaacttacctccgaaatcaatgaaattgaagatgccattcggaaaatcatggatgaattgaaaccgccgatcctttcgattcccggaatgggatttcattctgctgcgatgattcttgcagaggtaggggatttttcgaattttaactctcctgacaaagttttggcttatgctggatgttctccctccacataccagtcaggaaaactcacaaactgctatgcacacatggaaaagcgtggctctcgttatcttcgatacgctctttacactgcaaccaaatacgtctgctactggaatcctgtttttactgaataccttaccaaaaagcaagctgaaggcaagcactacaatgttgccctatctcatgccacaaagaaactcgtacgactgatttacgctttgcagaagtccggtaaagcatatcttgccgtcacttgattttctccagagcctgagttaaacctaagaacaacttagctggcgcagcgaacccttgacaaaccgaagcattcaaatgctattctgtttctgcgagggttggccgggcttgctttgctattctctccgtcgccctcgctgctctgattccagtatttgaagactgtttgtcaggggcagcgaatcgttgacggattttttcattttgggtcttgacttttaatagttagt

SEQ ID NO: 6038 - DNA, 1400 bp, unidentified
  source 1..1400: mol_type = unassigned DNA; note = element_951b32f
  misc_feature 1..2: note = core
  misc_feature 3..117: note = LE
  misc_feature 118..1149: note = CDS
  misc_feature 1150..1400: note = RE
  misc_feature 1161..1395: note = bridgeRNA
agatgccgtaatgggccggcgtcttgcgagtagccattttgggtggctgtccctcagaatgatggtgttggaacggggtccgagggatcggccccaagcctcatgagaggaacagccatgaactattatgcagggatcgatgtttcgctgaaagagagcagcgtgtgtgtggtggatgccaagggtaaggtcgtccgagaggtcaaggttgccagcgagccagaggtgcttgttcggttttttggcgggctgggctttcccgtgagttgcattgggcttgaggcggggcccttatcgcaatggctccgcgccgggcttgtcgtcgccagcttcgaggtggtgttgctggagacgcgccatgtgaaggcggcgctgtcggcgatgacggtgaagaccgaccggaaggacgcgcgcgggatcgcgcagctgctgcggatgggctggtatcggccggttcatgcgaagtcgatcgacgcccaggatacccgtgcgctactcgttggccgcaagttgctgcagggcaagctgctcgacgtcgagctcagcatccgcggtatcctgcgcggctacgggctaaaggttggcgaggtcagccgtggccggttcgaggcgcgcatccgggaattggcggcgggccacgtcatgctggagacggtgatcggcgccatgctgaccgcacgagcgacgttgtggagcgagttcacgaagctgcatcgccagatgttgaagatcgcacgcgccgacaggatttgccaccggctgatgagcacgcccggggtcggcgcgctcgtcgccttgacgtatcgctcggccgtcgatgatccgacgcggttcagcaaatccagtacggtcggcgcctatttcgggctgacaccaaagaaatatcagtccggcgagaccgaccgggatggcggtgtcagcaaagtcggtgacgcgatggtgcgaaccgcgctcttcgaggcagcgcacatcatgctgacgcgggcgacgcgtttttccagcctgaagcgctgggcgctcggagtggcgcagcgtcgcggcatgaagcgcgccaaggtcgctctcgcgcgcaaactgggtgttgtgctccaccgcatgtggatggatgcaaccgacttccgctggggggcaaccgcaatggcgacttgaggacagaaacgtgattgcggcgggtcgacaacaataccgcccctactgaggtcccgtcgctgggacgcgggcttggcaaggtcgtgtgtagtgctgtgaatgcttcggcaaaccacgcttcctagattgacctgccggctccggatctgatggcatggtgtggcggtcttcgtgccgaccacggacagaagcatgatcctggcgatgagatatcgttcggagggacttgacgaacgaaggcccattacaga

SEQ ID NO: 6039 - DNA, 1357 bp, unidentified
  source 1..1357: mol_type = unassigned DNA; note = element_951ba8e
  misc_feature 1..3: note = core
  misc_feature 4..82: note = LE
  misc_feature 83..1105: note = CDS
  misc_feature 1106..1357: note = RE
  misc_feature 1101..1342: note = bridgeRNA
atgctgggtggacggcccccgacggcatcattgtgccagactggccggtgatgaacacgggcagcagaggagaccgtccactatgcacgctaccatgatcgggctggatatcgcgaagacagtgtttcaggtttacggcgaagacgccgcgcggcgtccggttttgcgcaagcggctcagccgcgcggcgctgaccgggttgtttgccaagctgccgccgacggtggtcggcatcgaagcctgcggcacagcgcatcactgggcccgcactctgaccgccatggggcacacggtgcggctgatccccgccgcctatgtccgtcccttcgtcaagcgcaacaagaccgatgcgcgcgacgccgaggcgatttgcgaggcgatgcagcggccgtcgatgcgccaggtgccggtgaagacagtcgagcagcaggccggccgtggcctggagacggcgcgcgacctgctggtgcggcagcacacccaactgatgaactcggtgcgcgggttgctcgccgagctcggcatcgtgggcgcccagggccgccgcggtttcgccgtgctgcgcacccggatcgaggccggcgacccggccattcacccggtcctgctgccggccctgcaaaccatcctggagcaatggcatgggaccggccgggcgatcacagagctggaagcgcggctggtcgcgcgggccaaggcagatgccaccatgcgccggctgatgacggttcccggcatcggcccgctgagcgcgcacgccatcgtggcggcgatcggcgacgggcggcagttcagcgccgcgcgggatttcgcggcctgggtcggcctcaccccgcgccagcacgagagcggcaaccgccggcattcgggccggatcagccgacaaggcgatcagggggtgcgccggctgctgacgctgggcgccagcgcggtcatgcgccaagcccgggcgaagccgcaacgggccaccgcctggcagcgtggcatcctggcccgccgaccggtcaaagtcgcggtggtggcacaggccgccaagaccgcccgcatcgcctgggccatgctgcgctcgggccattcctatcgcgccgcaggcgccgccgcctaagccgcgacgccggcgagcccaaccccgcaaggagcccacaggcagcgacggcacaatggtcaggacctggatcggcacactccgacttgtcatcgcgccaagcagcgcgccgcaatgcatggaagccgatccgcgtaacccatcggggccagcggtcaacatccgaccgcatcgacaggccggatacatgaccgctccagatcgtgcgccgacgacgtcaaaagcttcttgcctgaagggggccgtccatac

SEQ ID NO: 6040 - DNA, 1355 bp, unidentified
  source 1..1355: mol_type = unassigned DNA; note = element_9523716
  misc_feature 1..2: note = core
  misc_feature 3..82: note = LE
  misc_feature 83..1105: note = CDS
  misc_feature 1106..1355: note = RE
  misc_feature 1113..1351: note = bridgeRNA
ttaatgagatggtcagcctgaccgagaagccctgcaggtttacgcttgcagggcttttctcgttttcggcggaggatctctcatgaacacgatgacgcttctcgacatcgacattggtaaacacagtttccatctgcacggccaggacgccaaaggtcatcaggttttgcgcaagaaaaccagccgcagccaattgctcggcacattggcccaactgccggcctgcacggtggtgatggagtcgtgtggcggtgcccactggctggctcgacaggttgaggcattgggccacgaggtaaaactgattgccccgcaatacgttaagccgttcgtcaaaggcaacaaaaacgacttcattgatgccgaagcgatttgcgaggcggcgagccgccccgcgatgcgcttctgctcgattaaaaccgcagagcaacaaacgctttcagctttgcatcgtgtccgagattccttgattggccatcgcaccgtcgcgaccaatcagattcatggttttttgctggaattcgggatcagcctgcccattggcgcaacggcgttgaaccgcgtgccagcgctgctggacgatccacaacatccggttccattgcgcctaaagagcgtggtgatgcgtcttcatcgtcaaatccaacagctgaatgatgaaatcaaggacatcgagtccgacctgaaacagcagttgaaagaagacgatgccggaaatcgtttgcagagtattcctggcatcggcccaatcaccgccagtgcggtattggcggatgtgggcgatgcgtcgaactatcgaagtggacgcgattttgccgcttcgctggggctggtgccgaggcagtattcgacgggtgggaagacggtgcttctggggatcagcaagcgtggcgacaagcacatccgccaattgctggtacagggcgcgcgatccgttattcagcatatcgataagcgagaggacgccttggggccttgggttcgagagctactgacgcgtcgccactccaatgtcgtcgcgtgtgcgctagcaaacaaactggcgcgaatcgtgtgggcggtactggccaaaggcggccagtacgacccacatccgaacgcttgaatgcacagcgttaccaccggcttttgcgacgtcactgactgatgacagtaaacggcaaacggcccgactgagaacctggcaataaaatcagctttagaagctgagggttttttcaggacagtcgggagcggctactcatcgagggccgagcgttgttgcagcaacgctcacaacgagcccggatacattagcgcaagccagctttaccgaaaacagcccatgaggttgcaggagaagggctgaccataca

SEQ ID NO: 6041 - DNA, 1377 bp, unidentified
  source 1..1377: mol_type = unassigned DNA; note = element_95242a6
  misc_feature 1..2: note = core
  misc_feature 3..88: note = LE
  misc_feature 89..1117: note = CDS
  misc_feature 1118..1377: note = RE
  misc_feature 1142..1363: note = bridgeRNA
gatgatgtggatggctcccgctcccggcatctgagtgccaaagtgtggaagctgtcaaagcaaccacgagccaagggagccatccgccatggagattagcacgatcggcctggatttggccaagaacgtctttcaggtccacgctgttgatgcgacgggcaatgtcgtcatccgcaaggcgttgcgacgtcggcaggtcctgcacttcttcgccaaactgccgccttgtctgatcggcatggaagcctgcgggacatcgcattattgggcgcgcgagctggtgacgctgggccatgtggtacggctgatgccaccggcctacgtcaaaccgtatgtgaagcgcggcaagaccgacgcagctgacgccgaggcgatctgcgaggcggtgacacggccgacgatgcggttcgtgccggtgaagtcggcagagcagcaggcggcgctggcgctgcaccggacgcgcgatctgctggtcaggcagcgtacgcagttggtcaacatgatccgcggcctgctcgccgagttcggtatcgaaatggcgcgcgggctgcaccgtgcgcttgcgttagccgagcggcttgtcgccggcgaggcgccagaagtgccgcccctggcgcagcgcattgtcgctgggctggcgcatcagatcggtgatcttcagcttcgcctgacagcgcttgagaaggagcttcttgccttgcatcgctcaagcgagctgtcgcaacggctcgcaacaatccctggcatcggcgtcatctcggccaccgcgctggcggcctcggtggtcgaaccggaacgcttccgctcgggccgacagtttgccgcttctttgggcctgacgccgcttgccaactgcagcggcggcaaggagcgattgggcaagatctcgcgcatgggcgatcgctatctgcgtaggctgctggtggtcggtatgacctcgctcgtaaggcgggcgagaagcaaaccggattcggtcgatccgcggatagtggcgatgctcgagcgccgatccgcgcgcgtcgtaacagtcgctgcggccaatcggactgcgcgcgtcgtctgggcaatcatgaccaaagggggcacctatcggtcgccgcgaatagctgtcgcgtaaaccaaaacccaggaagagcgcttcaggagtttgcgagggcgacgcgatgtgatggcgaaccggttagaccgggagccgggacaacccgtgctatgtcgtgggcgtcattgcccgcaaagcagagtgggacccagttcgcggataccatcagggccagcggtcataactccgaccgcatgacaggccggacagaagactgcacccgaccacccgccagaaacgtcaaatcaccccttgcaatgcgggagccatccacagaa

SEQ ID NO: 6042 - DNA, 1540 bp, unidentified
  source 1..1540: mol_type = unassigned DNA; note = element_952582e
  misc_feature 1..2: note = core
  misc_feature 3..239: note = LE
  misc_feature 240..1433: note = CDS
  misc_feature 1434..1540: note = RE
  misc_feature 10..259: note = bridgeRNA
ttcgtactatataagagtagagaatattgtctctattcttatttttttgttatgatgaggttgattggctgacgtaattcttaattgggacaccaagcccgtagctaaacttgtcagccagctctcattatctaacattcgattcagcaagttgggacttagctcccgtgtcactaacgaacatgagttgattatgagatgttggaaccaatcataataatacataaaggaggactatcatgatcgctgttggtgttgatgtttctaaatccaaaagtatggttgctatccttagttcagatggcgaaatacttgccgaaccatttgaggtatatcatgctaatgattcgttagacaacctcatcaataatcttcacgctattaacgatgatattaaaattgttatggaagcaaccggacattatcatctccctattctaaaaaagttcttagatgctaatctttttgtttctgttatgaatccatacttgatgaagaagtatggggataatcagatacgtaaggttaaaaccgatcgtaaagatgcaatgcgtatggctacctatgcgttagaaaaatcatatgctttagttccgtacacttctttagatcagaaataccttgatttaaaattcctatctcgacaatataaccaacgtgtatctactagagttaaaaacagagtatatttaggcaatctgcttgatgagactatgccaggaattgaaaacattttaatgtccaagacaactaagccagaaaacaatatgctatataactttatcatcaagtttcagagctttgataccataaagaatatgggcgagaagaaattcctcaatagttacactagattagctgacaaaaatggttgtcgtaattacaaaatgaaagctcttaaaatctatgaacttgctactaatagtgtaacaacccgtggtacagatacttttacaactatagctatgcaacaatgccttaatgtcttaattcaagctgaaactgcttcaaatgaaatcctattacaaatgcaatctcttgcacaaaccttacctgaatactctatagtgagggctatgaatggcgttggtgaccgtcttgctccacaactcatcgccgaaattggcgatgttcgaagattcaaaagtggtaaagcattaaatgcatatgctggaaacgatgctccaccattccaatctggacagttcgaaagtcaaaataggcatatatcaaagcgtggagctcctgctcttagaaaagcctgttatgaagtaatgcaatgtttgaagatgcataaaccacaagatgatcctgtatatcaatttatgattaaaaaagaagaagagggcaagcctttgaatgttgctaaaatggctgctgttaataaatttcttcgcatctattatgctaaggtaatggaactctacagataacacttgtatataatttacattctttctcataaaaatgaggtctattaaagttacccttctttacttcataaaaaaattaaaaaagtacttgacttttattagcaagg

SEQ ID NO: 6043 - DNA, 1430 bp, unidentified
  source 1..1430: mol_type = unassigned DNA; note = element_9527fd7
  misc_feature 1..2: note = core
  misc_feature 3..220: note = LE
  misc_feature 221..1414: note = CDS
  misc_feature 1415..1430: note = RE
ctgatataacgccatgcaggggtcaggatggacctgacctgtgcggggagaccggcgttcggctatacggcttgagaccgtcggagctagataccggccctcgccctttgactgaggcggcgattgggttccaacggcagagaccggagatggcgcatcagcggacgctggtcagaggtaagcgagaacccctgggtcgaccaaaggtaaggagggcgccatgagcgctgtggtcggcatcgatgtgggtgcatataagcacgcggcggcggtcagcagatcgggagaacgggaagccgagcgaggtgtgtttcggctctctgccgaccgggctgggttcgacgaactggaccgctggctcgagcgccatggtccggtcgagcgggtggtactggagtcgagcggacactattactggccactggccagtcacctccaccgccgcggctacggggtggcggttgtaaatccgctgcaggcgaaatactttgccaagagccgcttacagcggagcaagtcggatccggccgatgcccgcacactggcggcattgggtatgagcgaggaaccgcggatcaaggacccgctgctgggggccgaagccaaggaggcggcccgtttttggggtggcctggtgaaagagcaggcacaggtccgtcagaagctattgcggctggtggagattggcttccccgaactcaaggagtgcttcgaagaccccctctgcgagacggcgctggccgtcctccgcgaggcgccgacagcgcgggcagctgcccgcaaacgggtctcgacgctggccgaaacgaccaggcctgggggtcggcgtcggctgggggagagcaaggcccgccgactccacgagctggccgagaagaccatcgcaccacccgagctggatgcccagatgagcttcgaggtggggatgctgattcagcagttcgacctcctcgacaagcagatcgagattgccgagcagcgggtggccgatgtcctcgactcggagctggcccggaggctgcaaaccattcccggcgtcggaccggcgttggccgccacattcatcgccgagatcggcgacatctggcgcttcgatgatttcgatcagctcgcctcctacgccggcgttcatcccaaagagcagagctctggcaccaagggccagaaccccgagaccagctggcacatggccaagaccggcaactcatatctccgctcggccgcctacaagatggccgtggtcggaacccagcacaacccgctcatccgcgctcactacctgcgcaagcgagctcagggcaaaagcgccatgaacgccattggccactccatgtccaaggccctggccatcgtctggggcgtctggcgttcaggtctcgacttcgaccccaccctcggaggccccaggacttgacaagaccctatgggat

SEQ ID NO: 6044 - DNA, 1233 bp, unidentified
  source 1..1233: mol_type = unassigned DNA; note = element_95294b2
  misc_feature 1..2: note = core
  misc_feature 3..243: note = LE
  misc_feature 244..1218: note = CDS
  misc_feature 1219..1233: note = RE
  misc_feature 6..214: note = bridgeRNA
cttgtatctcgactatcgcacctacagacgcgatagttctcgactgatcatcgaggaagaggaatgaagccgggcagcggctaaggccttgagcctgcactgtagattgagctcctcctcttcaacctcactcgccaagtccgaacggtatcctgagccctgcatctggcacggtagctcgcatcaacaaggctgagaccgagtgacggatgatcctcaatccgcgcatccgaggaagagaatatgtctaacgtcatcgggatcgatatcgccaagaacacattcgatgtcgccactcctctgcccaacggcaagtaccgcacacgcggcaagattcctaacaatgctgagggtttcgcacagctcaaccagtggctcaagttgcattccgagcccgacgccagggtcgtcatggaagccaccagcgtttatcacgaagccctggcagagcacctctaccaccagggttacgaagtcatcgtagtcaacccggcccgggtccattacttcaagaaaagcgaaggcatcaactacaagaccgacaaggtggacgccaagttgctggccgcctttgcccaggccaagcacgagtcgcccttgacgccctgggcaccggagcctgtggcgattcgccggctacgcgtcctgctgcggcgcctggacgacctgcaggagatgctgcagatggagcgtaatcgccaggaagtggcggatacggtggttcaggaatcgatccagtcgcacatcaggcacatcgaaaaagacatcgcccagacccgccagatgatcaagcaacatgtcgacgatgatcctgacttacggggcaagcgggatctcctgttaagcatcgacggtatcggcgagaaaaccgcatcagtgatcctggccgagctgggcgatctcaaggcatttcgtagcgcccgggccgtggtctcgtttgcggggttgaatccgcagttggccgagtccggccagtgcaatggtcgcacgccgatcagcaaggccggttcgggacgcatccgccgggcgttgtacttgcccagtatcaccgccatgaacatgagcgagccgctcatggcgatgaaagagcggctgcgcgccaaaggtaaagcgggcaaacagatcgtctgcgcagtgatgcgcaagatgctgcatatcgtgttcggcgtgctgaaatcgggtcatccttatgacccgaaattggcgcttgcccagtaacgggcaagacggtat

SEQ ID NO: 6045 - DNA, 1362 bp, unidentified
  source 1..1362: mol_type = unassigned DNA; note = element_9529ec6
  misc_feature 1..2: note = core
  misc_feature 3..75: note = LE
  misc_feature 76..1101: note = CDS
  misc_feature 1102..1362: note = RE
  misc_feature 1077..1349: note = bridgeRNA
tgatggggtggacgccccccgacggcatcgatgtgccagagtggaggtgtttcttgccactcagaggaggcgcccatgacggaagttagcaccatcggcctggatctggccaaaaatgtctttcaggcacacggagcgagcgctgcgggagaggtcttattccgcaggaagctacgacgcgaccaggtgctgggcttcttcgcagctcagccgccttgccttgtcgcgatggaagcatgccccggcgcccattattggggccgggagatcgggaagctcggccacacggtccggctcatcgcgccggcctatgtgaagcctttcgtcaagcgtcagaagaatgatgccgccgatgcagaagcgatctgcgaagcggcgcaacgcccgacgatgcgctttgtggccgtgaagagcgaggccaagcaggcctcagccgtgatcttccggactcgcgatattctggtcggccaacgtactcagctcatcaacgcgatccgcggccatctttccgaatacggtctgatcgcgccgcggggtcctttccatgtcgggcgcctcatcgcacacatcgaggaccccgcatcgagcgtaccggaggccgctcgctcctgccttgctctcctcgttgagggggtgcgtcatttgcaagagcagatcggcaagttagatgcggagatctctgctcgcgccaaggctgacgagatgacccaacgtctgatgactgtgcctgggatcggccccctgatcgccactgccattgaagctcttgcgccgccggcggagacgttccgatcgggtcgtgacttcgctgcctgggtcggattaacaccggtgcagcgctcgacgggcggcaaggaaaggctgggccgaacatccaggatgggagagcgaaccctgcgacggcttcttattatcgcagcgagcgccgtgatccgctgggccaagcgcaaaggggtgcctaaaggatcctggctcgggcggatgctcgagcgtaagccgccgatgctggtgatcgtcgcactggcgaacaagaatgcccgtatcgcgtgggcgctattgacgaagggagaaagttaccgggctccggccgtacctgcttgagcgggacggacttgaggccgttggcggcgtgaggaggtcaaaggacaggtatggcgcaacgtcggtgaggcgggatcaggagaaccaggcgcatggggagcgcttcgagcgcgttccagtgatgtggaccttatcctcgaactcccatacgggcccgcggccatgacgagccgcaacagaggccggacacatggcagcacccgatcacgcgcagcagactgcaccaaagattcttcttgcgtttgagggggcgtccataca

SEQ ID NO: 6046 - DNA, 1162 bp, unidentified
  source 1..1162: mol_type = unassigned DNA; note = element_9534295
  misc_feature 1..2: note = core
  misc_feature 3..172: note = LE
  misc_feature 173..1150: note = CDS
  misc_feature 1151..1162: note = RE
  misc_feature 12..214: note = bridgeRNA
cttgtcttatgacattgcggtccgtttgggccatgctggattgcccgggccggggtggccaccccggcccgggcggaaggggacggatcgtgaaaacgccggtcgttgtgggaccgggctagagtaggatcgcccctttcttttccatcaggcccgaacggataccggggttttggacccggatgacaagcatgggatagcggaaaagatgagcgacaatctaccacagacgatcggcatcgacatctccaaagcgagcctcgactgccatgtccaccctgccggcgccgagcgccagttctccaacaccgccaagggccacaaggcgctgatcgcctggctgcgacaatggccggtcgagcggatcgcctatgaggcaaccgcaacctaccatcgagcgctggaggcggctctggccgactggccctgcgttaagctcaacccagagcgcgcccggcgcttcgcccaggcgactggcactctggccaagaccgatcgcatcgatgccatgttgctggcccgtatggcggccaccttgcagccgccggtcagacccgctcgaagcgcacagcaggcgcagatggcggagctcatcaatgcccgagacggcctcgtgcgcgatcgcaccgcgctcaagaatcgcgagaagaacctcaccatcgccttcctcaagcgccagtgccggcagcggctcgagcagatcgatcggcatatcgaggcgctcgataccgagatcgccaacctgatcgccgccgatgccgcgctcgcccgccggcatgagatcctcaccagcatcgccggcgtcggaacgctgaccgccaaccagctcatcgccaccatgcccgaactcggcagcctcgagaacaagcaggctgcatccctcgccggtctcgcccccgtcgctcgacagtccggacaatggaaaggcaagagcttcatccgtggcggacgcgccaacgtgcggcaggctctctatatgccggccctcgtcgccgcccggtacaatcccgatctcaaggcaaaatatcagcagctcgttactgccgggaagcccgccaagatcgccatcaccgccgtcatgcgaaagctcgtcgtcaccgcgaacgccctgctcaaagccgatcgatgctggacgcaatctccagcttgatcatcacggata

SEQ ID NO: 6047 - DNA, 1435 bp, unidentified
  source 1..1435: mol_type = unassigned DNA; note = element_955c4b7
  misc_feature 1..2: note = core
  misc_feature 3..119: note = LE
  misc_feature 120..1151: note = CDS
  misc_feature 1152..1435: note = RE
  misc_feature 1188..1390: note = bridgeRNA
agatggggtaatcggcctgccagcttgtggatagctgaaaattagggtgctgcgcttcaggctgatggtgaaacgaggtccgcatttgcggcctcaagcatcagaaggagaagcgcagcatggactattttgctggactggatgtttcggtcaaggaaacgagcgtctgcattgtggataatgcaggcaagatcgtgcgggaagcgagagtggcgagtgaacctgaagctctgttgcaggttttgacgaacaccatctatcgcctcaagcgagtcgggctggaagctggaccgctgtcgcagtggctttacagcgttctggccgaagcgggcttgccggtgatctgcgttgagacgcgacatatgcgggccgtgctgaaggcgcagatcaacaagacggaccgcaacgatgcgcgcggcatagcacagatgatgcgggtggggctttatcgtccggtgcacgtgaagacgttacgcagtcagaagcttcgaatgctcctgacccatcgcaagctacttcagtcgaaggccatcgccatcgagaacgacctgcgtgccaccttgcgcaacttcggccttaaggtgggcatagtggggacggttaagtttgaggcgcgcatcaaggagctcgtcgcgaaccttcccgatgtggccctgctggtcgagccgttgcttgttgtccggcgagtgcttcgtgaacaggtcggcatcctgcatcgccgcttgctggccgtcgtccgagacgatgatgtgtgccggcgcctaatgacgatccctggtgttggccctgtggtcgcgctgacctatcgcgtcacggtcgatgtaccggcccgcttcaggaactccaaggcagtcggagcggtgtttggactgacacccgccaagtatcagtcgggcgagaacgaccgaaccggcgcaatatcacggtgcggagacgagatgatgcggatgatgctgtacgaagcggcccagagcatgctggtgcgttcgacgaaatggtcctggctcaaggcctgggcgatgaagatcgccaaacatcgcgggatgaagaaggcgatcgtggcgctggcgcgtcggctggccgtgatcatgcatcgcatctgggttgacagcaccgcgttccggtggactagggaagtcgcagtggcttgagagctgtgcaggatcaaaccagataggagaagaacctgagatccacccaacggtggaatgatgtccctcgcgggacgatggatgaggtgagatcgtttgtccgcttggacctgccgtcatactgacggcaaggccgcccaaaagattgttccacctcgtcttcgaatccccatgatggaagggccttggtgccgagtccgaagagaagcgcgagcccgtgagcgacatcgacactggagtggtggatagcctgaaagcgcttgacccagacggccgattagaga

SEQ ID NO: 6048 - DNA, 1364 bp, unidentified
  source 1..1364: mol_type = unassigned DNA; note = element_95635bd
  misc_feature 1..2: note = core
  misc_feature 3..88: note = LE
  misc_feature 89..1114: note = CDS
  misc_feature 1115..1364: note = RE
  misc_feature 1133..1363: note = bridgeRNA
acgatggaatggtctcccccctcaaacggcatcgcaatgtgccaaacttggaattgaacaatcaagttaacaaggtgaggagaccaaaatgaatattacaacgattgggctggatttagcaaaaagtgtgagtcatgtggtgtgctgtaatcaggcaggcaagattgtgcgaaaaaaaatgttgagacgaactcagatactgcatttttttagtgagctatcaccctgtttggtgggagttgagtcatgtgccagtgcgcactattgggcgagagaaatagcgaagtatgggcatcaggtaaaacaaatcgcaccacagcatgtaaaagcgtatgtgcggggtaataagacggactttaatgatgcgctggcgatagcagaagcagtagtgcgccccgagatgcggtttgtgcaaacgaaaacgcaaacccaacaagatattcaggcattacacgtgatgcgtaagaaatgtgagcgggatagaacggccaacagtaatgaaatacggggattgctcaatgagtacggaataattcttccggtgggcataagtcatgtctataaatcactgcctgaattatttgaccggcaggttgagaatggtttgagtgaattattcaaagaactgttagagcgacactatcaaaaacttgtagagctggatgagcacctggactggtatacaaagaaaattaaacaactaagccaacacgaagcttgtagacggctacaaagtattcccggagttggtccaattatagccagtgcgctttatcaacatatcggcaatggcagtgagtttaagaatggtcgggcagtttcagcatcactggggctggtacccaaacaacatagctcagggggcaagcataatttacaagggattagtaagcgtggagatagctatctaagaaccttactcattcatggtgccagggctgtcatgcgagtgagtaaacataaagagacgccattgtctcaatggataaagcgaatagagcaaacgcgggggagaaacaaagccgccgttgcactggctaataaattagcccgaatagcttgggcactattagcacaaggtggcgattatcagcctgagttgacaaccgcttaagttaataatgaaccagttcactcccaaggattgctgaataaacataacgtgatgacaatacggttaaaccgacatatcgaaaacctgatagggcctgtggattttaatccgtgtcaacgataaggacgatatgggcgaagttcatcgaggctcgaagtgaaaatacttcaacgagaagccggatatacggacgcaaaccattttagtcaaaacagcatgtttactcttgcaataacgggggagaccatat

SEQ ID NO: 6049 - DNA, 1529 bp, unidentified
  source 1..1529: mol_type = unassigned DNA; note = element_956e3ad
  misc_feature 1..5: note = core
  misc_feature 6..265: note = LE
  misc_feature 266..1507: note = CDS
  misc_feature 1508..1529: note = RE
ctcactggtgcaccatccgcgtgtccgagtccctcacttgatcactaggtgggagggttcgggtgcacccctggtccccgccgggccatcgccacgcccgctcgaccttcgaggtccagcgtgagttccgcgaggcccggcggcccagggcaccccgactggctacagggctatgcgccatggagcgccgctcagtgagcgaccggcagcggtgtcccgggaccaccgggtgtcttcccactgaggcaacagcgaggagacaacagtgagtatcgcccccgaccccctccacgtgcgtgtcacagcggggctggactgggccaaggacgaccacgcggtctgtgtggtcggcgaccaaggggaggttctggaccggttcaccgtccggcatgacgcggccgggttgaagcagatggcccggcggattctgcgcgccggggtcgagcaggtcggcatcgaacgcggcgacggccccgtcgtggacacgctgctggcggccgggctggtcgtgttcgtgatcccaccggggcagctgaagaacctgcgctcccggtacgggtcggccggcaacaaagacgaccggttcgacgcctacgtcctggccgacgtggtccgtaccgacgcccgccggcttcggcccatgctcaccgacagcgcggcgaccaccgcgctgcgttccagcgtgcgcgcccgaagagacctggtcggccaccgggtcgccgcggcgaaccagctgcgagcccacctgcagatcgtgttccccgctgccgcaacacttttcgccgacatcgactcggcgatcaccctctcgttcctggaccgcttcgccacccaggacgccgcggactggctctcgcccacccggctggccacctggctgaaaagcgtctcctacagcggcggcgtggaccccacgatgctgcacgcccggatcctggccgcaccccgcggcgccaccggcgcgcacgcaaccacccacgccggcaccaccgccgcgctggtcgccctcctgcgcgtcctgaacacccaaatccacgcgctggccaccagcatcggcgaacaactcaccacccaccccgacgcggcgatcttcacctcgctgccccgctccgggaccatccgcgccgcccggctgctggccgagatcggcgacgcccgcggccggttccccacccgcgagtccctgacctgcctggccggcgtcgccccctccacccgacaatcgggcaaggtcaaaaccgtcaccttccgctggggagccgacaaacagctgcgcgacgccctgtgcgacttcgccggcgactcccgccgcgccaacccctgggcagccgacctctacgccaaagccatcgcccgcggctgcgaccacccccacgccgtccgcatcctggcccgcgcctgggcacacatcatctggcgctgctggcaggacaacctcccctacaacccggccctccacggcgccctccaaaccctcctcaaccaagatcaaccagccgcagcctgacccaggggttgacacagggcaa

SEQ ID NO: 6050 - DNA, 1390 bp, unidentified
  source 1..1390: mol_type = unassigned DNA; note = element_9580ec0
  misc_feature 1..3: note = core
  misc_feature 4..93: note = LE
  misc_feature 94..1134: note = CDS
  misc_feature 1135..1390: note = RE
  misc_feature 1127..1377: note = bridgeRNA
tgatggcgtggacggcgcccgcaacggcatcatcctcgtgagaggcgtgccaagatggctgctgtcgagcactcatctgaaggagcaccgtccatggacaaggctatcaccgatctcagcacagttgccaccgtcggcctcgatctggccaagcatgtcttccaggtccacgcgatcgacgatgtcggccatgtcgtcacgtctcgcgcgctgcggcgcaaagatttgatggcattcttcgagcgtctgccgtcgtgcctgatcggcatggaggcatgcggctcggcgcatcactgggcccgtcagctaatgaagcttggccatgacgtccgcctgatgccgcctgcctacgtgaaggcctatgtccgccgccagaagaatgacgccgcggatgcggcggccatttgcgaggcggtgacgcggccttctatgcgttttgtgccggtgcgatcggtcgagaaccaggctgcgctcatgcaccacaaggtgcgcgaacttctggtggcacagcgcacccaactgctcaacgcgctacgcagccatctggccgagatcgggatcattgccgcgcagggaccgaacaatgcccgtgctctggcggttctcatcgtggaaggcaacgacatgatcccggcgatcgtgcgcgcggcgctgttgcctgtggtgcgtcggttgaacgaactcgatcaggagatccggcaaagcgatcaggccattctggctctggccaaagccgatgcgacggcacgccgcctgatgagtgttcccggcatcggtcccgtcaccgcctctgcgcttgccgcaagcgtccaggacatctccgcgttctcgggcccgcgcgagttcgccgccttcctcgggctcacgccgaggcaaagttcatcgggcggcaaggagcggctggggcgcgtttcgaagatgggcaaccgatatctgcgcaagctgctcgtcgtcggcgctcacgcggtcctcttccaccggaaacgctgcagcgatgcattgagaagctgggccgaccgcctgatggagaccaaaccgttcaagcttgtcgccgtagcgaccgccaacaagctcgcccgcatcgccttcgcactcatgcgtgatggggcacactatgccggcacacggacgtaatagcagccgcagcagctgaggccgcggtccagaatcgagggtgacagtgacgtgatgggaacagacgaggacagatcccgaaagcctgcaacatagtcggagcttcgagttcgttctcttgatcaggccaaaggatcagcggacaccatcagggccagcggtcacagcgccgcaccaacaggccggagacatgaccgcacccgcgactgtcccaattgccggaacaagcccttgatcggcgggcgccgtccagaca

SEQ ID NO: 6051 - DNA, 1451 bp, unidentified
  source 1..1451: mol_type = unassigned DNA; note = element_95836a0
  misc_feature 1..4: note = core
  misc_feature 5..225: note = LE
  misc_feature 226..1437: note = CDS
  misc_feature 1438..1451: note = RE
  misc_feature 12..218: note = bridgeRNA
gtccctaaggttgttaggtgtctggggttggtgccctggatgcccggggcggtggggtgtagctgatgcggttttgccttggtcgaggctcgaaaggactggctgcctcaccgcgctggacgctccggctgctgattgagagcttgttgcgggttgtcgctgtttagggatctgtcggcggggttgtccacgggcgcaacgacttcgacggtcaggagcaggtgagtggcaactcgcccagagatatgggttgggatcgacgtcggcaagcagatgcatcatgcgtgcgcggtcgacgagtccggtaagacggtgttcagccagaaactcggcaacgaccaggccgcgatcgaggcgctgatcggtcgcgccgcccaggccgccgatcgggtgcggtgggcgatcgacctgaccagcccgttggcgttgctgctgatcaccgtcctcttggccgccgagcaggccgtgacctatgttcccggccgggtggtcaattcgatgacccacggattccggggcgaaggcaaaaccgacgcccgtgacgcgaaggtgatcgccgagaccgcccgcatgcgccgcgacctcaccgaggtcaccatgcccgacgagctggtggtggggctgacccaactgaccggttaccgcaccgacctcatgggcgactgggtcgccgggatcaaccggctgcggtcgctgctgggatcgatcttccccgccctggaggctgcgttcgactactcgaaccggaccccgctgatcctggtcgccgggatgtgcactcccgctgaactgcgtgcggccggactcgagggtatccaggcgtatctggccgccaacggggcatggaagccggggatcggtaagaccgcggccacagcggccgatgccgccggacgccaaaccctggctctgcccggcgaggccgacaccgcgatactggtcaaacgcatcgcggctaaactgctcgatctcgatcgcgagatcaaggacaccgacaagctcattaccagccgattccggcagcacccgtgggcgcacatcatcgagtccctgccgggtatgggaccggggctgggggcggagttcctcgtcggcaccggcggcgacctcgccaccttctccagcgcgggacgcttggcgtcctacgccggcctggttcccgttccccgtgactccggtcgcgtcagcggcaatctgcaccgcccgaagcgctacaaccggcgcatgcgcagggtgttctacatggcagccctgtccagcctgcgggttccaggcccgtccaggcggttctacaaccgtaaacgcggtgaacggcttatccatacccaagccctcctagcgctggctcggcggctggtcgacgtgttgtgggcactgctgcgagacggacgcgaattcaccctcgacacaacgaatcccgtcgctactgcggcttgacaggttcattgaga

SEQ ID NO: 6052 - DNA, 1466 bp, unidentified
  source 1..1466: mol_type = unassigned DNA; note = element_958aa30
  misc_feature 1: note = core
  misc_feature 2..228: note = LE
  misc_feature 229..1452: note = CDS
  misc_feature 1453..1466: note = RE
  misc_feature 13..240: note = bridgeRNA
ctactagagacttccctgcaggatcggtgtctggccagactcggtccaggtgtccggcgggaggctctccacgcggctgcccacctttgctttcgggtgtggctctctaccggtctgcagtccgtcgggcaccgtggcgaggcgtggctcgaaaggggactgcccagctcgtagtagcactgcccacctcgccgtcccttatcggtacgaggcatgcaggagaacgctatgacgaaggtgattatcggggtcgacccccacaagctctcggccaccatcgaggtcgtcgaccgccgcgagaggctgctcggctccggccggttcagcaccgaccaggccggctacaccgccatgcggacctatgcgaagacgtggcccgaacgggtctgggcgattgagggcagcaacggcgctggccgacccttggcccagcgcctcctcaaggccggcaagcacgtcgtggacgtcccggccaaactcgccgcccgggtccggctctttgacaccggccacaaccgcaagaccgacgcccgtgacgcccactcgatcgcgatcgtcgccgtgcgcaccacgaccctgcgggtgctgcgccccgacggggagcttgaagcgctgcagatgctgtgcgaccgccgcgaggagctgacccggctgcgggtccagaccgtgaaccggctccaccggctgctgaccgaactggtccccggccacgcgaagaaggacctgaccgccttgcaggccaaggcgatcctcgccaccgtgcgtccgcgtgacgtggccgggaagacgcggcgcaggatcgctgccgaggagctcgccgacctggtcgctgtcgaggcgaagatgaagaaggccaccgccgagcttaaggtcctggtcaaggcccgcgggtcacggctgatggacctgcgtggtgtcggaccggtggtcgccgcccgcacgttggccgacgtcggggacgtcgcccggttcgccgaccgcaaccggttcgcgtcctggactgggaccgcgcccttggacgcctcctcgggcgagcagaaccggcaccgtctctcccgagccgggaaccggcggatgaaccacatgctccacatcgccgcgatcagccagatccgcctcgacaccgaaggccgggcctactaccgacgcaagctcgccgccggcaagaccaagctcgaagcgctgcgctgcctcaagcgcaggatctccgacgccctctaccgccaactcctcgccgacgccgaccgagcagcgctcagcaagcaacaggcgcccgatgacacgggcccgggagggcactgcggggcgtctcaagaatccagcgcggccgacctgcccccgcacatcgacacttcggatcagccacttcccggacccgcagaactgacgctacgccaggccccgacgacacggaagacccaccaccgcgacaccctcatcaccaccccttgacaacaaaggggagc

SEQ ID NO: 6053 - DNA, 1170 bp, unidentified
  source 1..1170: mol_type = unassigned DNA; note = element_958fcb6
  misc_feature 1..2: note = core
  misc_feature 3..222: note = LE
  misc_feature 223..1167: note = CDS
  misc_feature 1168..1170: note = RE
  misc_feature 24..191: note = bridgeRNA
cttgtatgtttactcgtggcaggcctaaaaaggggctgtcggggcgaagggacgaggctggcatctgaccgcaggtacagaccgtgggagatttcgtcccgcccctcacctcaagcgccgataaggaatcgatcggcacaggaccgacgatagatggcaagccagcgcacggtgaggccccgacagacacttccacgctagctccgaaggaggatgatggcaatgtctgcaacgacttcgcgtatcggggtggatgtcggcaaggccgaggtctggttcagcatcaacggcgaacccgctcagtgctgcaagaacacgcctgcggcgatcgagcgctggatccggggcctgacggaaccggcggatttcgcgatggaggccaccagtgactaccacctggtgacggcgctggaggcgatccggcaaggccaccgggtatatctgatcaatggctatcgcctgaaccgctaccgcgagagcatcggcggccgcgccaagacggacgcgggcgacgcccgcctgctggtgcgctatctcgagcgagagcaggacgacctgcggccctggacgccgccacccgagggctaccaaacgctgcagaagctgctgcggcgccgcgccacgctggtccgcgcccgggtcatgctgcagcagagcctgcggggtgttcccgaactgcagaccggcctgaaaagcctgctccgtcagatccagaagatcgacgatgaactccagcggcatctgcacaaggccgttgaccgtgccggctggtcagaggactcacgccgctgcaaacagatggaaggggtcggccccatcacggccgccgccctgaccatggccttccaccgcggtcattttcgcagcagcgatgcgttcatcgccttcctagggctggatgtccgggtccgcgactccggtcagaaacgcggtcgacgccgactcaccaagcagggtgatccggaagtgaggcggctgctatacctcgctgccatgcaggccaaatccaaaccggcctggcaggactactatcagcgctgcctggaccgcgggctggctacgacccaggccctcaacgccctggcgcgaaaactggcccgcgtcgccttcgccctgatgaagaaacagagcgactatcagccgaaggtgccttgcgggcagacatagaat

SEQ ID NO: 6054 - DNA, 2144 bp, unidentified
  source 1..2144: mol_type = unassigned DNA; note = element_9592f8c
  misc_feature 1..2: note = core
  misc_feature 3..370: note = LE
  misc_feature 371..1669: note = CDS
  misc_feature 1670..2144: note = RE
ctcactgatggacctcactggtgaccctgcttggggcggtgcggagggaccgtcatcttgccggacgtgaccggtatgtgacgttcctgttgcgggatgtgcattgtgcgggatgcggctggaggtccacagttagcgggtcggtggccatgatcaccgatgcacccccaggtgccaccagtcaccgccttgaccttctagacccttcggtgaggtccgggatcagttctgcggggctggtggttgcccgggacgcgcggatcgtctacagagccatgcgcttcgagcgccggacagtgagctgacgacggcgtcccggttccgtcgggtaaagggtgcctcccgctgagtaagcagcgaggaggctgtgatgaagtatgccctgattcaggttctgcctgatgttccggccgggcgggtgttcgccggcattgactgggccaccgctgatcacgtggcgtgcgtggtcgacatggccgggcgagtgagagaccggttcagtgccgttcatgacaaggcggggatcgctgagctgatctcgcggctgcgcgggggcggggtcagcgaggtcgcgatcgagcggggcgacggcgtgctcgtcgcggcgctgctggccgcgggcctgacggtggtggtgatcgcctcccggcaggtgaagagcctgcggtcgcgttacgggtccgccggcgccaaggacgacaggttcgatgcgttcgtgctggccggcacgctgcgcaccgaccgggcgcggctgcggccgctgatcccggacacgcccgcgaccctggcgctgcgggcggcggtgcgggcccgcaagaacctggtcgcgcaccgggtggcggcatgcagccagctgcatgcccgcctggccgcggcgttccccgctgcgatcggcctgttcagcgatctgggcagcccgatcagcctggcgttcctggagcgcttcggcagccaggacgccgccggccagctcgatgagcaggcaatcgccgcctggctgaagaccatctcggtgcggggccgcccggccccggtcagcgtgctgtgcgcgcggctgcgggccgcgcctggcggagcgaccgggcaggacggggccgccctggcaggcgtcaccgccaccttgaccgcgacggtgaccatgctggccgcccagatcaagaccctggagaccgtgatcggcgtccagctggccgcccgccccgacgcgcacatcttcacgtccttgcctcgcacccgggcactgcgtgccgcccggctgctggccgagaccggggactgccgggcccgtttccccgacccggattccctcgccgggctagccggggtctccccggtcacccgccagtccggcacgcacatctcccgcaccttccggtgggcggtcagccgccagctccgcgacgccgtctgcgacttcgctgacggctcccggcacgccagcgcctgggccgcggccatctacgacgccgcccgcgcccgcggcaaggaccacccgcacgccgtgcgcatcttggcccgcgcccggatctacgtcatctggcgctgctggcaggccggcaccgcctgcgaccccgccaggcacaacgccctccagcgcgtcctggcagcccgtgaccaggccagcgagcccgcagccgccgacgctcccgtgccagggcagggccggtgacggccgcgctgccggcggcgctgcgcgcctgcgcggccgggtactaccccgccgaagccggcgccgggctgctcgtcagccacggctgcttcctgcaacgccgcgacttcgccgacttcatccgcgccggcaccagcatcagcgacgcggccaccacgatggccgaagtcgactgggacgccgcgatcagcgccctgcaggccgggcagctgcccgtcagcggcggcgaacagcgcatcctccagctcgccgccagcatcgccgccggaacccccgtctccctccgcgacaccatccccggcctcgacgaccgcaacctgcagctagtaatcacagccatccggcacaccgcaggacaacgcccccagcaccactaaccccacccgcactccacgccccgccggcaaaccaggcggagcctgccacgcaaccgcaaaaccggcaaaccatgacgttcaaggtccatacagagcta

SEQ ID NO: 6055 - DNA, 1407 bp, unidentified
  source 1..1407: mol_type = unassigned DNA; note = element_959617d
  misc_feature 1: note = core
  misc_feature 2..228: note = LE
  misc_feature 229..1395: note = CDS
  misc_feature 1396..1407: note = RE
  misc_feature 14..243: note = bridgeRNA
ctacttgttttactggatctacgaccgcagcccggccaggcttggtcgaggtgatcggtggggttgctctcacattcggctgcccgccggtggtttgggtgtggctcagatctggcgtgcgccctgctggtcaccgcggcgtggagtggctcaagaggggtctgcccagctcgaagtagcgctgccctcctcgctgaaccaggttcgatctgagcgggaaggcacagcgtgggacgagtcatcatcgggatggatccgcacaagcggtccgcgacgatcgagatcatcgacgagcgggagaccgtgctcgcggcgggccggttcggcaccgaccgcgacggctacaagaccatgctggccatgggccgccgccacccacagcgggtgtgggcggtcgagggctgcaacggtatcggccggcacatcgcccagcgcctcgttgccgacggcgaggcggtggtggacgtcccggcgaagctgtccgcccgggtgcgggtgttcgccaccggccagggccgcaagaccgacccggtcgatgcgcacagcgtggccgtggcggcgttgcgtaccaagggattgcggcaggtcgcggtcgatgacgcgacggttgcgttgcggctgttggtcgaccgccgtgacgggctcggacacgcccgcaccgatctgctcaaccgcatccacaagctgctgcttgagctgctgcccggtggggcgaagaagttcctgtccgccgctcaggcccgcgcgatgctgaacacgatcaggccgcgtgacctcgtcgggcgtactcggcgccggctggcttccgagctgatcggtgagctggtgcaggtggacaagaagatcaaggcggcgaacaaggaactgaccgagctggtcgagcagacgggcagcagtttgcaggatctcaacggcatcggtccgtccggcgccgcccgtctgataggcgatgtcggcgacattcaccgtttcgccagccgcgggcacttcgcgtcgtggaacggcaccgcaccgctggacgcctcctccggcgaccagcaacgccaccggctgtcgagggccgggaaccggcgcatcaaccgggtcctgcacatcatggccgtcgtgcagctgcgccacgacacacccggccgcgcctactaccgacgccggcgggccgagggaaagaccccgatggaagccatgcgcagcctcaaacgacgactgtccgatgtggtctaccgacagatgatccgcgactcgaaggccgccacagggacgagcccgggaggacacctgggggcgactctgcaatccagcgcggctgacccaaaccccgaggtcagcacttcggaacagtcacttcccggacccgccgaggtccagcctagaacacaatgtcccgacgccgcttgacaagaggggagc

SEQ ID NO: 6056 - DNA, 1355 bp, unidentified
  source 1..1355: mol_type = unassigned DNA; note = element_959fa88
  misc_feature 1: note = core
  misc_feature 2..352: note = LE
  misc_feature 353..1324: note = CDS
  misc_feature 1325..1355: note = RE
tcttaagtttacaattccttaaatttaaggattaatcagaaaagacaaaagagaggaataaggttaatatacacgcagagactttagatctcgtcaatcccgatgcttcgggattaatcccctctctttttgttcattttatttctatttgtttttaaggtattcaagaacctcatacttcggtttctacacagatttcgtactcccgatagctatcgggactgtgaggccttttggacctcggttttaagtcgttgaaactcgcgtagattgtcctttactcattgctcaatattctaataaataagaattcgtgaatcttcgtttctcgatttcataaaaacattttcttatgaataaaggtattaaatattttgggattgacatcagctatttggtttttgatgttacagactctgatggtaattatcatcagttcaagaacaagttatcgggctttaaaaagtttgcaaaactcttgagttcgaacagccattgtgtgatggaagctacagggtattaccattatcagttagcatactatttactcgaaaacggtataaatgtatcagtagaaaatcccttgtctgtaaaacggtttatccagatgaggctgtccaagatcaaaacggacaagagcgactcaaaactcatttgtgattatgctcaggaagtagatttaaaactttggaaaggcaactcaaaagaggtacaggaatgtcttcaaatcgtcagaaccctttctgtatatacaaagcaacgtactatgataaagaacaaattacatggggaatctgttttaggagaaccaagcaaagctgttttgagatcattgaaacgaagtttaaaacagcttgataaagagatgaaaaccttagaggctaagttgttggttttggtgaaagagacacatcaagatttatttacacgtataaaaacgatacctggaatcggtagaaagaccgccattacgctaatagttctaacaggtgtttttgaacgtttctcaagcgcaagtgaactgtgtagctatgcaggtcttacacctgtgatcaggcaaagtgggagcagtgtaaaagggcgaccgcgaatcagtaaaatgggcaatcaaaaactccggaatttattatttatgtgcagttttaccgcttgcaaatataacaaggcttgtagggatctttatgaacggattgtggccaagggaaagagtaaaaaattagcattaattgcagtatgcaacaagctattaaaacaagcttttgctatcgcaaaatcgggattgatatttgacaatgaatataaaagtacgctagtgaaaaattaatggaattttacttgttttttagcacagtact

SEQ ID NO: 6057 - DNA, 1499 bp, unidentified
  source 1..1499: mol_type = unassigned DNA; note = element_95a4115
  misc_feature 1..4: note = core
  misc_feature 5..271: note = LE
  misc_feature 272..1474: note = CDS
  misc_feature 1475..1499: note = RE
ctcactggcctaccctcccacgagacggaaactctaaggctctggtcaggtagagagaggacagtggggcgagatgatcggaattcggggagagccacgttcgctcgccgcgtgacggccagcatgagacccgctcccccggataaaacgagaggcccagaccggccacaggatgatgcgccacgtgcccaggcaggccagagcgccaatcagtgagcgaccggccggacctctcaccgcgcagtgtctcgccgtccccggagacgacgcaatgagattcttcgtcggcatcgattgggcgagtcgggcccacgcggtctgcatcgtcgaccagcccggccgcgtccgctggcagggctccgtcccgcacaccaccgagggcctcaccgaactcgtcggccggctgcgccgcttccgcggccggctccgcgtcgccctcgaacggccctcgggcctgctcgtcgacacgctcgtcgccgccggggtcgagctcgtgcccatccaccccaacgccctcaaggcgacgcgcccgcgctactccgccgccggcagcaaaagtgacccgggcgacgccttcatcctggcggatctgctccgcacggatggccatcgcttccccgcgctgcgcccgccctcggacgatacccgggccttgcgcgccctcgtgcgcggccgcgacgatctcgtccgtcagcgcctcgcgctcgccaatcagctgcgcgccctgctcgagcgcttctggcccggcgccgccgccatcttcgccgacgtcgactcgccgattgccctcgcgttcctcgcccgctaccccacgcccctcagcgccgcgcggttgggcgaaaagcggctcgcccagttcctcggccaacacgcctactgcggccgccggcccgtgggcgagctgctcgctcgcctgcgcacggccccggcgagccaagtcggcgaggccgaagccgaggccagcggcgacctcgtccgcgccctggtcgcggtcctgaccccgctcgtcggccaggtccagcacctgtccgccgccgtcacggcggcgctggctcagcatcctgacggccccctcgtgcagagcctgccccgcagcggcgccgtcaatgccgcccagatcctggccgaactcggcgacgatcgcgcgcgcttccccagcgatgaacacttcgcggccgaaggcggcctggcgccggtcacccacgcctccggtcagcaccacgccgtggtcttccgctgggcctgcaacaaacgcctgcgccgcgcgctcacgaccttcgccgataactcccgccatgcctcgcgctgggccgccctcgtctaccagcgcgcccgcggacgcggctgtcgccatcagcacgccatccggatcctcgcccgcgcgggggcgcggatcctttggcgctgccggcaggatcgcgcaccgtccgacgtcacccgccaccgcgccgcgcaggccctcgctgcggcctgagcgcgcgatggttgacacaggatgt

SEQ ID NO: 6058 - DNA, 1588 bp, unidentified
  source 1..1588: mol_type = unassigned DNA; note = element_95a9cab
  misc_feature 1..2: note = core
  misc_feature 3..79: note = LE
  misc_feature 80..1114: note = CDS
  misc_feature 1115..1588: note = RE
  misc_feature 1363..1575: note = bridgeRNA
tgttggggtggacggcccccgacggcatcatttgtgccagaatgaggctgttgagggtctcattgaaagggagccgtccatgtccgacattactcgcattggcgtcgatacgtccaaggccgtcttcacgttacacggcgtcgacgcgacgaaccggccggtcctgcgcatgaacctgcggcgcgggcaagtgatcccattctttcgcaaactcccgcccacgatcgtcgcactggaggcgtgcggcagctcgcactattgggcgcgggaaatcgcggcgctcggccacacggtgcgcctcgttccacctcaatacgttaaaccgtatgttaaacgcagcaagaacgatcgcatcgacgcagaagcgatctgtgaggctgctgggcggccaggtatgcacttcgtcccggcaaagaccgcgcaacagcaagccgatggcatggtgttgaaagtacgcgacacactggtctgccagcgcaccgcactgatcaacacggttcgtggtcacgccgcggagtttggcgtcattgccgccaaaggggccgcgaaagccgaggtgctgttttccgccattgaacagcaagcagacattccccaggcagccacggagatgttcgccgtgttccgccagcagatcatcgatatcaatgcccgcatcgccgaactcgacgccaagctgcacgccgcgcacaaggccaatcccgtaagccagcgcctggctaccatcccgggcgtcgggccgatcaccgctctgacgttcgcgatcgagatcgatgcggcgcagtacgagtcgggtcgtcacctcgccgcctggtcgggattgacgccgaaggaacgctcgaccggcggcaagcagcggatgggcgggatcagccgcgccggcaacgagagattgcgccggctgctcgtcgccggcgccacttcggtgatccaggccgccagcaagccgggcagccggcacatgacccagtggttgcgcgcgctactggcccgcaagccgcgcaagcttgccgccgtggcactcgccaacaagatggcccgtatcgcctgggcgctcatgaacagtggcgagacctaccgacgcaacgccaccatcgccgtcgccaaggcgtagccgaaaattaaaatgcttagaactccaaggaaaaagtccatgacttgccaatttatcgcccgcagatccatgaccggcgccatagcagccgagccatcacgggcagtgcgtgccctcgatcctgtggtgtcagcaacgatcctgaattgccgcacggcttcggccgtgaccaggcgaccgaatgacccatgccgcggcctgggtcacgatgcaacgcgccgagccgccggctgagcggcgcgtggctgccgggtgagagagctcatcgagatgacgatcggacgaaccgaggatccagaaaacccgttgcgggccctggccttcgaggccgctcccctgtttgggactggatcgcggaacccatctgggccagcggtcgttgcaccgcgtcgaacaggccggacacatgatcgcagtcgatccgcgcgtcaattctctcgtcgatcctcttgaaccgaacgggccgtccacaca

SEQ ID NO: 6059 - DNA, 1281 bp, unidentified
  source 1..1281: mol_type = unassigned DNA; note = element_95ab3bd
  misc_feature 1: note = core
  misc_feature 2..278: note = LE
  misc_feature 279..1250: note = CDS
  misc_feature 1251..1281: note = RE
  misc_feature 46..185: note = bridgeRNA
tcttaagttagcattttaataaaaacactaaattaagacctataaataagaaagaacaaaggagaggaataaggttattatacacgcagagactttgatctcgtcaacattgaaaatcccctctcctttttgttcatttttttatatgtcttttaaaggtattcaagaacctcattcttcggtttctacacagatttcgtacagttctatgaggcttttagacctcgcttttaagtcgttgaaactcgcgtagacgtcctttcaaaaatcattttattatgaataaagatattaaattttttggcattgacatttgccatttggtttttgatgttgcagactctaatggcaacttttaccagtttaaaaacaccctttctggatttaaaaagtttgcaaaaatattagatatagatagccattgtgtcatggaggctactggatattatcattaccaattagcttattatttgttagagtcaggtattagagtttctgtagaaaatcctttagcagtaaaacgctttatacagatgaaattgtctaaaatcaaaaccgataagagcgatgctaaacagatctgtgaatatgccaaacaagtcgaattaaagctctggaaaggtaactctaagcaccaaacagagtgccttcaaataaccagactccttgctatatatacaaaacaaagcaccatgattaaaaataaattacacggtgaatctgttttaggaaaccctagtaaagcagttgtaagctctttaaaacgtagtttgaagcaattgcaaaaagaaataaaaatgctagaagacaaacttttgattttagttaaacaagagcatcaagaagtattaacccgattaaaaagcataccaggtattggaaacaaaacagccctaatgttggtggttctcacagatggttttaaacgatttaaaagtggtagtgaattgtgtagttatgcaggatggactccagtaataaaaagaagcggcagcagtgtaactggccgaagtaaaataagtaaaatggggaaccaaaaacttcgaaacttattatttatgtgcagttttaatgcctgcaaatacaataaagcttgtagggatatttatgagagattagttgctaaaggaaaaagtaaaaaattagcactaattgcagtatgcaataagctattaaaacaagcttttgctattgctaaatctggactaatatatgaggatagttacagaagttctttggtgagaaattaatgcttttttacttgttttttaccacagtact

SEQ ID NO: 6060 - DNA, 1392 bp, unidentified
  source 1..1392: mol_type = unassigned DNA; note = element_95b0838
  misc_feature 1: note = core
  misc_feature 2..82: note = LE
  misc_feature 83..1108: note = CDS
  misc_feature 1109..1392: note = RE
  misc_feature 1158..1382: note = bridgeRNA
tgatgatgtggacggcctcacctcagcggcatcatagtgccaagacgtggtcgccggagcgccacaaaaagggagaccgtccatgcaaaagtttatcagaataggtgttgatctcgccaagaactattttcaggtccatgcactggtcagcgaaggcggttccgctgttacacgtaagttgacgcgatcgaagatgcgagaattctttgcgcaaatcgagccttgccgcataggcctggaagcctgcggctcagcacattattgggcccgcgagctccaagcgatggggcacgaggcatttttgatgccaccggcttacaccaagccttacgtcaaacgcggcaaaaatgacgccgtcgacgcggaagctatctgcgaagcagtctcccgccccggaatgcgctttgtaccaatcaagagcgcggagcaacaagcgacgctgacgttgcacaaaacgcgagatcttctggttaagcagcggaccatgacagtcaatgctttgcgcagtcatctgtcggagttcgggattattgtcgccaagggcatcgggcatgtcagcgatttgctccaactggctgaaacggacgcgaggcttccgagtgtagccaatgcgtcggtgaaggccttggcgcagcaaatcgacgcgatcgatcaatcgctcgacgatcttgagaaggagatcgccaacgctcattcacgaagcgagatgagccagttgctcgttgaaattcctggcgtcggcaaaatcactgctacggtgatctccgccagcatgccagatccgaatgtcttcagatcgggacgcgattttgccgcttggcttggccttacgccaaggcaaaactcaagcggaggcaaaccatcgctcggggccatcaccaagcaggggaataaatacataaggaaactgctcgtgctggcggggacgtcgctgctaaatgtcgtgggcaaacgtaagggcgtcttgcgggactggatcgtcgggctgttggcaaaaaagcccgcgcgcctcgtgacggtcgcaattgcgaacaagctcgctcggatcatctgggcgatgatgaagaccggcgaaagcttccgcaccgagatgttcatgaaagcatgaacaatccactcgtctctggatgggcatcctaaagggagatctgtagtctcaagtttggtgagcacggcgagacatgatgaatgacacggtcattaccgaagaccaggaaaaacccgaccagtcgtctgagcgtaaagctcgcatccttgatgcggttcccggtcgtcggatttcatcagggccagcggaggcataatctctgcactaacaggccggacatacgatcgaagccgaccaagtcgttcaaaaggtcaaaaagtgcttgccatcagaggccgtccaca

SEQ ID NO: 6061 - DNA, 1455 bp, unidentified
  source 1..1455: mol_type = unassigned DNA; note = element_95b76c8
  misc_feature 1..3: note = core
  misc_feature 4..219: note = LE
  misc_feature 220..1440: note = CDS
  misc_feature 1441..1455: note = RE
  misc_feature 9..211: note = bridgeRNA
tccctaagtttgtaggtgtctggggttggtgccccggatgcccagggcggtggggtgtagctgatggttgcttgcctttgttgtggctcgacaggaatggctgccccgccgtgctggacgctccggcctctgattgagatctgatgcggttcgtcgctgattagggacctggtggcggggttgtccacgggcttcggttgcgtgaacggaagtgcgagagtggcgctgcgtcaaaagatctggattggcatcgatgtcggcaggatcggccatcacgtgtgcgtggtcgatgagaacggcaaggtgtgctggtcggggaaactggccaacgaccagcgggcgatcgaagcggtgatcgaccgggcccgcaagaccgggatcgagtcgcagtgggcgatcgagctgaccagtccgcttgccgcactgctgatcacggtgctgctggccgccggcgagtcggtggtgtatgtgcccggccgcatggtggccaccatgaccggggtgttccgcggcgagggtaagaccgacgccaaggacgcccacgtcatcgccgacaccgcccgcatgcgcggcgatctgcaaccggtgaccgcgcccgatgaactggtggctgagctgacccagctgtcgagctaccgcagcgacctgatgggcgactgggtgcgcggggtcaaccagctgcgcgccatgctgggtgcgatcttccccgcattggaggccgcgttcgactactcggcgcgttctccgctgatcctggtcgccgggatgtgcaccccggccgagattggggacgccggaatcgatggtgtcactgcgcatctcaccgagaatggggcctggcgcaaaggtatcgacgccatggcagcggcagcggtagccgcagccggaactcaggacatcgccgtgcccggcgaggccaccaccgccatactgatcaagcggctggcggtcaaactgctcgagctcgaccgcgagatcaaggatctcgacaagcagatcaccgcccgattccgcgaacaccccccagcggcgatcatcgagttgctgcccgggatgggtccgcacctgggcaccgaattcctggtgagcaccggcggcgacgcggtggccgaattccacactccgggccggttggcctcctacgcaggacttgtaccggtgccgcgcgactccggtcgcatcagcggcaacctgcaccggcccaaacgctacaaccgcaggctgcggcgcgtgttcttcatggctgccttgtcctcgatcaagaacgaggggccctcgcgcacgttctaccagcgcaagcgaaccgaaagactcattcatacccaagcactcctagcctcggcccggcgcctggtcgatgtgctgtgggccctgctgcgcgacaaccggcccttcgacaccaagcccccgagcatcaccggagtcccagctgcggcttgacatcgtcattgagat

SEQ ID NO: 6062 - DNA, 1408 bp, unidentified
  source 1..1408: mol_type = unassigned DNA; note = element_95bc25f
  misc_feature 1: note = core
  misc_feature 2..306: note = LE
  misc_feature 307..1368: note = CDS
  misc_feature 1369..1408: note = RE
  misc_feature 89..272: note = bridgeRNA
ctttaagtttgcagcgtgaatataagagtcataataactcttaatatgaatacgttcaataaatcgtataaacatgaagagattacacggtttttccttacctttgttgtaaaaaggaaggattaactgccggaggtcaacccaacgagattactaggcaccagcccatgaaacgttacaggccctccggatttcaagctgcaaattccaaataggaaggtaggctcgaagcctaattaaagtagtggcaactcacagctttccttagttaatcgcttcctgtaattttaaaacgggtacaaaggtatgaaaaaaatcgtaattggcattgacatttcaaaagaaaaaattgatgcgacagcaattgacatcaggaacattcatctgcgagtgaataaactggattatcaagtgttcgagaaccgtccaatgggtttccgccgtatgcttgtatgggcccggcatcttgcagaggggacagaactacaggacgttctgttctgctgcgagacgacgggcggctacgatagggtaatgtgtgactacctctatgccaaaggcctggatatctggcgcgaaagcgccttacagatcaaactgaggagcggactccgccgtgggaaggacgacaaggcagactcgctggtaatagccgagtacgctatgcgatatatggacaaggccgtcatgtaccagtcgcccagcgagaccatacgggaactcaaggctctgctgctctaccggcacaagctcactcaggagaagaccgcaaagaaggtaaggatggctcaattgaaggaaactgctgccaagagcaagtcaatgacctttatcttgcgtgatgcgcgtaagggcatcaagatgctggagaagagcatcaaggaatgcgagaaacagatacaggaggtattcaagagcgatgaggacctccagaggagctataaccacctgaaatccatcaggggtgttgccattgtcaatgcgacggccatgatagcctacagcaacaatttcaagaacatcaccactgctaacaagatggcgacctattacggggtggccaggttcaggaagaagtctggcacaagcattgacaaaaaagacgaagtaaagcaatactccagttccatgctaagggcatacctgacacaagctgctgaatgcactatagaggaacatggtatataccatgattactacatcagaaagaaagcagaaggcaaaccgtatggcgtcatccttaataacatcaagaacaaactcatacatttggcattctcgctgatcgaaaatgacatagattacgaagaaaaccatgagtttctcagggcacagaaaaggaatacaaatgaaaatatatcgatttagagaatattaactaaatatgtttggataattccataggaag

SEQ ID NO: 6063 - DNA, 1373 bp, unidentified
  source 1..1373: mol_type = unassigned DNA; note = element_95c913f
  misc_feature 1..2: note = core
  misc_feature 3..89: note = LE
  misc_feature 90..1112: note = CDS
  misc_feature 1113..1373: note = RE
  misc_feature 1138..1359: note = bridgeRNA
gatgatgtggatggctcctgtccgcggcgtcgcaatgcgccataatacagttgttatcaaaacgactgacttaattaggagccacccacatgcatattactacaatcggcctagatttggccaagaacatttttcaagtccatggcgtacaagaagatggaacagttgcgtttaatcggccgctgcgccgtgcgcagatgataccgttcttcgcagggctagagccctgtctcatcggcatggaagcctgcgggacaagtcattattggggacgagaattgcgagcccttggacatgatgtaaagctcatgccaccagcttatgtgaagccttacgtcaaacgaggtaaatccgacgcggcggatgcagaagcaatctgcgaagccgtaacacggccaacaatgcgatttgtcgaaatcaagtccgcagaccagcaggccatactctgccaacaccgcgcccgtgagattatggtcggacagcgcacacaactctcaaacacaatacgtggcctgataggcgaatttggtattaccatccgaaaagggctggaaagcatacgtcactttgcagaagacattcaaaacggtaatgcgcctgacatccctgagatagggcaagacgttatccattctttatgtaaccagctcttatctttgcacgttcgcatcaatcaactcgataaagctattgccgctgcagcgaagacagatcaccgtatcaagctgctgcaaactatccccggcatcgggcctatcaatgcgtccgccatcgtcgccacaatcggcagtgctcaccaatttaaaagcggtcgcgatcttgctgcttggatcggtctgacgccgcttaataaatcctcgggcggtaaagagaggctaggcaaaatatcgcgtaagggtgatcgatatctacgaaagctactcgttgtcggtatgtcagcccgagtgcgcgccgccatgacaagacccgaacgcgttgatccgtggaccgctgatatcttgaagcgaaagcctacacgtgttgccacggtggccatggccaataaaacggcacgcattatctgggcggtattgaccaaaaatgagtcgttcacaccgagacacacagcttagaaataaagagcaacaaaaaggaggaagtgacttacaaggacgatgagacatgatgacaatccggatcagaccgggagccgagaaaacccgactaatgtccaggactttaatagtccgcaaaccggaatgggactcaactcgcggaaatcatcagggccagtggcaaagccacatcaacaggccggacacaggaccgtatctgatacaggaacgtcaaaagcgtctcaaataatccttgcaaagagggagccatccacacag

SEQ ID NO: 6064 - DNA, 1472 bp, unidentified
  source 1..1472: mol_type = unassigned DNA; note = element_95cbc68
  misc_feature 1..3: note = core
  misc_feature 4..263: note = LE
  misc_feature 264..1325: note = CDS
  misc_feature 1326..1472: note = RE
  misc_feature 11..240: note = bridgeRNA
cccgttatcttcttcgcggtcctgcaagagggccgctggcctccgggcccggtatgactgttgcccccctgtcgagtggatgacctggggggtggtgtcgccgggcccgaggggtgccgtcggagacgctgatcagaggtccggccaccgcccggcccggcgcaatgccgggccacttgcgggcggcaggtctgcataacgtggatgcgcgcgaacggccccggcaccaaggccggcacggcatcgacgcatgtgggggcacggtgatcgacatcgacgagacgggcgtcttcctcggcctggacgtcggcaagagcaaccaccacggccatggactcaccccggccgggaagaaggtcttcgacaaggccctgccgaacggcgaaccgcagttgcgggccgtcttcgacaagctcatggccaagttcggcaccgtcctggtggtcgtggaccagcccgcctcgatcggcgccctgccgctgaccgtcgcccgtgacgccggctgcaaggtcgcctacctgcccgggctcgtgatgagccggatcgccgacctctacccgggtgaggccaagaccgacgcccgcgacgcggccgtcatcgcggacgccgcccgcaccatgccccacaccctgcgctccctcgaactggccgacgagatcaccgccgagctgaccatgctggtcggcttcgaccaggacctggccgaggaggccaaccgcacgtccaaccgcatccgcggcctgctcacccagtttcatcccagcctcgaacgcgtcctgggcccccgcctggaccaccccgccatcacctggctcctggagcgctacggatccccggccgccctacgcaaggccggccgccgcaaactcgtcgaggtcgtccggcccaaagcgccccgcatggctcagcggctcatcgacgacatcttcgacgaacagaccgtggtcgtccccggcaccaacaccctcgacgtgatcatgccgtcgctggccaagtcactggccgccgtccacgaacaacgccgggcactggaggcccagatcgaagccctgctggaggcccaccctctttcccaggtcctgacctcgatgcccggcatcggcgtcaggaccgccgcagtcctcctggccaccgtcggcgacggcaactcgttccccagcgccgcccacctggcctcctacgccggcctcgcccccaccacccggcagtcggggacctcgatccacggcgaacatgctccgcgaggcgggaaccgacagctcaaacgcgcgatgttcctctccgcgttcgccgccctccacgatcccgcctcgcgcagctactaggaccgctgccgggccagaggcaaaacccacacccaggccctcctccgcctcgccagacaacggatcaacgtcctattcgccatgctccgcgacggaaccttctacgaaccccgaaccccacacctcgcttgacgaaagacatagagg

SEQ ID NO: 6065 - DNA, 1313 bp, unidentified
  source 1..1313: mol_type = unassigned DNA; note = element_95d678a
  misc_feature 1..2: note = core
  misc_feature 3..233: note = LE
  misc_feature 234..1235: note = CDS
  misc_feature 1236..1313: note = RE
  misc_feature 7..218: note = bridgeRNA
tcctttagatttgtgcaggataaataaagaggaaaaatatatatctttatatcaataaaagttaaccaagaaaaagaggtgaactaacgtgtaatctaggcagaagccctatgcgcggagatagtcctctttttcttttcagttgaattgccctaagtagaattgtaggtcgatagcctaataaaggatttagtgaattcaacctatggttaacataaaatctacacaaagatatggaaaagaaaaggtttgttggcattgacatctcgaaaaaaacattggatgttgtcatttatgattcaaaaaagaaacatgcggattgtaatacttaccgtcgtgtaacgaatgatgaagaaggatacaagatccttttggactggtttaaatcggaacgaataaaactgtcagagttggttgtcggcctggaaaacacgggtgcgtacggttatgatctgtgcctcttcctggagtcaaaacaagtggattattgctcttttaatccgttgacactgaaacgctccatgggcttggtccgtgggaaaaatgacaaggtggatgcagaacggattgcttatttcacgtggctacatcgagacgagttaaaatacaccaaactggccggaagtacgattttacgtctgcgcgaactttcgacagaaagaaaacgtttcgtcaaacaacgtgctgaatatgaagggttacttacggaaagaaaaaggccggacatgacaagtacctcccttcgtgctgaaaagatgcgacgaatattggaagaagaaatagatgccgtagaaaaagaaatggaagaggtgattaagcaggatcctcaaatccatcagaatttccaactgctaatgagtataaagggcattggcaaagtaaatgccatttccacgatcatacatacaaataacttcgaaagttttcaaacagcccgtcaatatgcttgttatttgggcatagcccctttcgaacactcttctggaaccagtatcaaaggaaagccgaaagtgagttgtgtcggggccaaacagttgaaagcagacttgtctcaagcggctgtgtctgctgttcaatgggacagggaaataagactgtattacgtacggaaaataaatgaagggaaaacttatggagtagttttaaatgcaattaagttcaagctggtttgccgaatgttttccgttattaggcggggaactccttatgtagatttaatggcttataaaaattaaacggacgggctgtcacttccatccgtttaacttatttaactgaattgcttgtgcaaaaacttgtgcaagtcttagaat

SEQ ID NO: 6066 - DNA, 1530 bp, unidentified
  source 1..1530: mol_type = unassigned DNA; note = element_95e8aa8
  misc_feature 1: note = core
  misc_feature 2..112: note = LE
  misc_feature 113..1141: note = CDS
  misc_feature 1142..1530: note = RE
  misc_feature 1189..1461: note = bridgeRNA
gaatgaaagggacttccccgtcccgaaagcagggcgcatttgcgcggtacggcatcaaagtgccacgatgggaagtgcaacctctcatcaactcgctcgaaaggggaagtccatgaccatcgtaaccgtaggcatcgacctggccaagaacgtcttcgccgtgcatggcgtggatgcggccggcaaacccgtgctggtgcgccccagcgtcgcacgcgacaagctgctggagctcatcgcctcgctgccaccgtgcctgatcggcatggaagcctgctcgggcgcacaccactgggcgcgtgaatttgacaagctcggccacaccgcgcgcctgatggcccccaagttcgttgccccctatcgcctctcgggcaagcgcggcaagaacgacgccgccgacgcggcggctatctgcgaagccgtcacccgcccgcaaatgcgcttcgtgcccctcaagagcgccgaccagcaaggccagctcatggtgcaccgcgcccgccaaggcttcatcgaacaacgcaccgccaccctcaaccgcatccgcggcctgttgtccgaattgggcatcgtgctgcccctcaaagccgccaccgtgcgccgtcaagccctgcagcatcttgaagacctgcccggctgggccaacaccgtcattggcgacctgctcagtgaagtcagccacctggacgaacgcatcgcccagtacgaccgccacatcgccctgatggcccgccacagcacccaggcgcagcacctcatgcaactggccggcatcggcgagaccaccgccacggccatcgtcagcaccgtgggcaatggacatgactttgtttgcgggcgcagctttagcgcctggctgggcctggtgcccgggcaatacagctcgggaggcaaacagcgcctgggacgcatcaccaaggcgggagacgcctacctgcgcagcctgctggtcatgggagcgcgagtggtactggccgcggccatgaacagcaaagcgcccaagcaagaccccctcagccgctgggcacgtgctctggccgagcgccgcggctactggcgcgcggtggtggccatagccgccaagaatgcccgcctgtgctgggccgtgctgcaacgcggggacaacttcaagataccagcctgaacaggcgagccaaagagaacagcgaaacagtgaaacagcagaatcagaaaaccaccgcgtgaaggcagtcgttgatgtgcaaagggttggacctgcgcccgggaatgctcgatgaattctgggggagtgacgggagaagatcccaagtcccgactaacgaatggagcccccggcgcgcgtctttcatcagggtctgctgccagcaataggcagcgtcaatgaccgtttgtagtcacgccgtccgcaccgtttgccaacaggcatcgacgcgctgcaagtacgaggttgggagctgattgctggccaatgagcaaacccgtgcctggactgatcgtgcagcgatccatccagggagaggtattgcttgcgaaggtggggaagcccttgta

SEQ ID NO: 6067 - DNA, 1422 bp, unidentified
  source 1..1422: mol_type = unassigned DNA; note = element_95eb699
  misc_feature 1: note = core
  misc_feature 2..76: note = LE
  misc_feature 77..1108: note = CDS
  misc_feature 1109..1422: note = RE
  misc_feature 1190..1413: note = bridgeRNA
taatgagatggtccgccgcttgatctccacgttgaggtgggtgatcttgttggcaggttcaaggaggatcatcgatatgcagattcgttcggttggcattgaccttggcaagacaacctttcacctcgtagccctgagcgcagcaggcaaggtgctgttgcggaagaagttcactcagaagcagctcatcaccttcaccgccaacatgcagaccagcttgatcgggatggaggcatgttcgggagctcacttccttgggcgggttctgcgagaacaaggccatgacgtgaagctaattccagctcagtttgtgaagccttttgtgaagtccaacaagaacgactttctcgatgcagaagcgatcgccgaagcggtagaccggcagaacatgcgcttcgttccgattaagacggacgaccagcttgatcttcaggccatgcaccgcgtgcgggatcgactggtcgcacgccgaacctccgtcatcaaccaactgcgagccttcctgctcgagcgtggtatggtcttcgccaagactcccttcaagctgaagcaggcgatgcccgagatcctcgagaacgcagaggcgaacctcacgccacgcatgcgtagcctcgtcagcctgctgtggagcgagtggaaggacctggagcaacagatcgtagcgatgaacgaagaggtcgaacagatcgcttcttccgatccagcctgccagcgactgaggcagatcccaggcatcggcccgttagtggcaaccgcgatcgttgctgcgatcggcaacggatcagccttccggaagggtcgtgagttctcctcctggctgggacttgtaccgcgacagtactcgaccggcggcaacgcccgacttttcggtatcagcaagcgcggcaattgctatctgaggaagctgcttgtgcatggtgcccgctccgccgtcctccgcgtcaagcgagagcgatcgccgttcggcccgtggctcgatgcgcttgagcaacgagcaccggtcaaggtggtcgttacagcagcggccaacaagttggcccgcatcgcctgggcggttctagcgagcggcgacgactaccgcccagcaacggtctcgatggccgcttgagcaggcacggaaaagacgccttcggcttggaagcgcagaatcgcgctcccactttaccgcaccacggcgacgactaggaatttccaccaaggtctgcactggatagctaggacgaccgaacagttccccacggcgtgctcgaaacctgttcccgaaaatggtcttccatgaccgtcccgtttatcaggaagagcacgcagcgcaactcatcatggccaggagactcgactctccactcaaaggccgaatacatttgcgcagatctgtcattcgccccttcgcttttcccttgcagtcgggcggcggaccataca

SEQ ID NO: 6068 - DNA, 1429 bp, unidentified
  source 1..1429: mol_type = unassigned DNA; note = element_9608dd3
  misc_feature 1: note = core
  misc_feature 2..94: note = LE
  misc_feature 95..1129: note = CDS
  misc_feature 1130..1429: note = RE
  misc_feature 1190..1424: note = bridgeRNA
taatggaatggacgcccacttcctattacggcatcaaagtgccaaagtagtggttgcttgatagaccactaaccaaagaaaggggcatccaaaaatgaagattacgacaattggtatcgacttggcaaagaatatttttcagattcacggcgttgatacacatggcaaggttgccctgcgcaaacaactgaaacgagcagagatgtccccgtacttcgccaacctgcccccgtgcctcatcggcatggaagcctgcggcagtgcacaccattgggcgaggaagctggaaggcttcggccacacggttaaattgatggcgccgcaattcgtcaagccctatgttaaaaccaacaagaacgacatggccgacgctgaggccatctgcgaagcagtggccaggcccaatatgcgctttgtcagcatcaagaccattgagcaacaagccatcctctcggtacaccgtgcacgacaagggtttgtcaaagcacgtacagcacaggcaaaccagatacgcggattgctctctgaattcggcattgtcatcccgcagggcatacactccgtgatgaagcagataccggagatactggaagatggcgagaatgaattacccggcacatttcgccacctgattgcgcgcctgacagacaatctgaaagagatggatagccaggtagatgaactggaaaagcagatcaacctgtggcaccggcagaacgaggcaagccgcaagctggccgatatacccggcattggtcccattaccgccagcgcgattgtggcaaccgtaggcaaagctcaggagttcaagaatggccggcagctcgcggcatggatgggcctggtaccgagacagaaatccagcggtggcaaacagaacctgctaggtatcagcaagcggggcgacacttatctgcgcacattgctaatccacggcgcgcgttctgtcattcaccatgcaagcaataaaaacgaagcggaaagttggctcagcaagctcgtgaaccggcgcaacaagaacatcgctgcagtgggtctcgccaacaaaaatgcacggatcatctgggcgctattggcccatgatcgactattccgccttgattacacagcggcagctgccgcggtgtaatcaaggcggttaagtaaaaacagtttttaacagtagaaagttattaccgagttgtagacgttgtaccaccgattgcataggcaatcatgaaatgatggcgagacaggtcagaccgtgagtgagtaaatccggtcaactttaagaacgaaaagttcgataacgtaataggagctcactcagcgtattccatcagggacagaagcattgcgcttcaatcaaagtccggatgtatggctgcaatctttacctattctcgaaattatgaattgagggcttggcaaaaaagtgggcgtccatgta

SEQ ID NO: 6069 - DNA, 1428 bp, unidentified
  source 1..1428: mol_type = unassigned DNA; note = element_961a931
  misc_feature 1..3: note = core
  misc_feature 4..131: note = LE
  misc_feature 132..1151: note = CDS
  misc_feature 1152..1428: note = RE
  misc_feature 1191..1428: note = bridgeRNA
agaatgaaatgaacgcgtcccaccccgaagccgtgagagcggaagatgtgggtagatcctcacgggccaacggcatcgaagtgccaaagtaggagaatgtacgcatttcccgtcaaaccggaggatccacgatgaacagcatggcagtgggcgtagacatcgccaagaatgtgttccaggtgcattacgtcgatcaggcaactggagaggtcgtgaataggccgatcaagcgggcaaagttccttgagcactttgcgaatcgcgctgcgtgcctgatggggatggaggcgtgcggtggtgcgcatcactgggcgcgggaactgacgaggatgggtcacgacgtcaggttgatgccggcggagttcgtgaaggcattcaacatccgcaacaagaacgatgcggcggatgcgcgggcgatctggctggcggtgcagcagccgggcaagccggtagcagtgaagaccgagatgcagcaggcgatgctggcgctgcaccggatgcgtgagcagctggtgaagttccgcacgatgcagatcaacggattgcgtggactgctgacggaatacggcgaggtgatgagcaaggggcgggcgaagctggataaggaaatcccggcggcgttgggccggatcgccgagcgtctacccgcggcgctgatcgatacgctgcgcgagcaatggaacgggttgacgaggctcgacgagcaggttgccgagatcgaacgccggatgcgcgaatggaagaaggaagaccgggcggtgaagtcgatcagcgagattcccggcgtggggttgctgacggcgacggcggcggtggcgatgatgggcgatccgaaggcattccgctcggggcgggagtttgcggcgtggaccgggctggtgccgaagcagactggctcgggcggcaaggtgaatctacacgggatcagccggcgtggcgacacatatctacgcacgttgctgattcacggcgcgcgagcggtgttgacgcatgcgaaggagccaggtccatgggtcgcggagatgaagaagcggcggccaacgaatgtcgtcgtggttgcgctggccaacaagatggcgaggacgatctgggcggtgctcgctcataaccggccgtaccggaaagattatgtgagtgtgaagctggcctgagcggctctcgcgagctagaagatcaaagtttgacacagggtgaacgtcgataggttgcggagcagtcgagtgtgatgacaagccaggtaggaccaggactcgccaaacctgaatactctctcgagcttcgagctcgccgtgagaatgaggcgcgggtcagcaaatttcataggggcccgcagcggcaggaccggctgcaacaaggccggatatagaactgcagcccatcctgtctgtcggaacacaagaaaactgtcgcaaagggacgcgttcatat

SEQ ID NO: 6070 - DNA, 1378 bp, unidentified
  source 1..1378: mol_type = unassigned DNA; note = element_962d375
  misc_feature 1..3: note = core
  misc_feature 4..88: note = LE
  misc_feature 89..1111: note = CDS
  misc_feature 1112..1378: note = RE
  misc_feature 1147..1365: note = bridgeRNA
tgatggggtggacggcccctcccaccggcatcgcgatgtgccatgctgggtctgtcatgaaccaggcaacaggaaggaaccgtccgccatgactcttaccacactcgggattgatcttgctaagtctgttttccagcttcacggcgtcgatgaggcgggcaccgtcattatcaggaagaagctacgccgcagcgccgtgctcgacacgctccggatgctagagccctgccttgtcggcatggaggggtgcgcgacggcgcactactgggcccgcgagatatctgccctcgggcatgaggtgaagctgatgccgcccgcctatgtgaagccctatgtcaaacgcggcaagaacgacatggcggatgctgaggcgatttgtgaggcggtgacccggccgacgatgcggttcgtgcctatcaagagtgcggagcgccagggtgttcttgtgttgcaccggactcgcgatcttctgatgcgccaacgaaccatgctgctcaatgcggtgagggggcatctggccgagttcggccttatcgcaccgcaggggccgcgtaaggtgatggaactagtcgctcaaatgcgcgaaggcgctcgtgcggacctgccagaaatcgcccgaacggcacttctggggatcggcctgcaactcgacgccctcgcgcggcagatccatgcgctcgagcgacagctgctcacctggcaccgacaggatgctgccagccagaggctggagaccatacccggtgtcgggatcattaccgcgacggcgctggcggccagtataccggatccgtccgtgttctgctccgggcgccagttcgccgcttttctcgggctgacgccccggcagaactcgtccggcggaaaggaccgactcgggcgtatctcgaaaatgggcgatggctacctgcgccgcctgctggtcatcggggcgacatccgtcatccgccgggcagagacgaacccgtctgcgaccggagcctgggtgcgatcgctgctgacacgcaagccgccgcgggtcaccactgtcgccatggcaaacaaaaccgcaaggatagcatgggccgtgctggcacgcggtgaagcctaccgtgcgccggccatggcataaccgaatacgaaccgcgggcagtcaaacctgttcgctccagactgtaagggcagaatgtagatgatgatgatctaaaagggaccgcagccggaacaccccgaggtattgtcagggcgtcatagcccgctcctctgagagggacctggccagcggacttcatcagggccagcggtcacagaccgcgtcaacaggccggacacatgaccgcatccccgcagatcaacaatcctcaaactttactcttgcagaaccggggccgtccacaca

SEQ ID NO: 6071 - DNA, 1401 bp, unidentified
  source 1..1401: mol_type = unassigned DNA; note = element_9631d5e
  misc_feature 1: note = core
  misc_feature 2..57: note = LE
  misc_feature 58..1119: note = CDS
  misc_feature 1120..1401: note = RE
  misc_feature 1160..1396: note = bridgeRNA
taatggaatggtcacccctatctaatacggcatctatgtgccaaagttgaggtgaatatgaactctcaatttacgatagaggcaaccaatatgaatattacaacagttggcattgatctggcaaagaatgttctacaaatacatggcgttaatcaacatggtaagaaagtatttaataaacaattgcaacgtaagcaggtattaacatacttcactcaattaactccttgcttaataggtatggaagcttgtggcagcgctcatttttgggcaaggaaactacaagcacttggacatacagtgaaactcatggctccgcaatttgtaaagccctatgttaagacaaataaaaacgatgccgcagatgcagaagcaatttgtgaatcagtaactcgacccacaatgagatttgtgccaatcaaaaataatgaacaacaagcggtattatcccttcatcgtgcacgtcagggatttgttaaagcaagaacagctcaggcaaatcagatacgtggattattaatggaatatggtatcaacattccacaaggtattagtcacataacgaaaagaatacctgaattattagaggatgaagacaatgaactgcctggggtatttcgacaattgttacaacgactgggtgatcatttaaaggagcttgatcgtcaagtcacagaattagacacacaaattcaagcatggcataaagaaagtgaggtcagcaaaaaattggcctgtattccaggtattggcccgctcacagccagtgcattgatagcatctgtcggtgatgcaagaagttttaaaagtggccgacagttagccgcatggctaggactggttccaagacaacattccagcggtggaaagcaaatactacaagggatcagtaagcggggtgatacttatttgagaaccttgttaatccatggtgctcgttcagtgattcgaatagcggcaggaaaaacaactccaacacactgttgggccgtcaatttagtaaaacggcgtaacaaaaatatcgctgctgtagctttagctaataagaatgctcgaattgtttgggcactcttgacacaacatcgcaactatcaatcaaattattcgttggtagtataaatactaatttaaaaataacatcgacgttattaaaggaaataatttcaaccgattgcacaggcaatcatgacacgatggcaagacaggttagaccgtggcagattaaacctaattcacacagggagcataaagctcgacaggctgatcaggtatctgccagcatattccatcagagacagaggcttagttatagtctcaataaaaagtccggatctatggctgcaatctttaccttcttactgttgttgattgaaaacttggcaaactgggggcgaccatcta

SEQ ID NO: 6072 - DNA, 1667 bp, unidentified
  source 1..1667: mol_type = unassigned DNA; note = element_9635e41
  misc_feature 1: note = core
  misc_feature 2..308: note = LE
  misc_feature 309..1571: note = CDS
  misc_feature 1572..1667: note = RE
aaagaccattcctttctgcgaaaggcaccaacgaggaacgaaacgagggtgcgacttccgcgctaaaaattaataaataaatgttaaactacattttgagaaacggcacactacagagcacgcggaggtgagtggcgtagcggaatgccgctaacccgtatataaataggtcgccggatattcgttcaagcaccaacgagtaggcgaaagagcctgtaaactaatctttgtaaagacaatactcgtttttagcagaatatccagtccctgccgatttctcaaaatatatatgaaaagaggaatgattattggcaggaacagtagatattgtttaccccgtatgctgtggaatggacgtccacaaaaattttcttgtggcgtgtatagctacaaccgatgagagaggacacacaacacatgaaatgcgccgattttcaacattcacaggagatttgcgccgattgtcggattggttgttggctaaccgttgctgtgatgtgtgtatggaatcaagcggtaaatattggattccggttttcaatacccttgaaaatacttgtaacgtctgcctgacgcaccccaagtacgtcaaggcaatcaagggcaagaaaaccgataagaaagacgcgaaatggatttcggagctcttcaagtgtgatttggttcgttcgagctttatcccgccgccagatatacgtcaactacgtgatttatgccgttattacgtcaaattaacgggcatgtgcagaagcgagaaaaaccgtgcccaaaactgtttgacgatgtgcaatttcaaattggacgatgttttttcagatatttttggcaaaagtgccgctcgtgttcttgacgctgtgattgaaaatggcaattctgattttgatgttgctccgttgattaacggtaaatgcaaggcgaccgtggaagaaattcgagccgctcttgacggggaacttaatccctctcaaaccgaaaaactgaatttgatacgaaagcacatggaaaatctgaataatctcaaaatttctcttgaaaaacttattcttcggcttgcatccaaatatcaggctcaaattgacttattgcttaccgttccgggtatcaaagaaccgcttactgctattcgtattttagctgaaatcggcgttgatatgtccgtgtttgaaacgtccaagcaactttgttcatgggctgggcttacccctcaaaatcaggaaagcgcaggcaagaagaaaactactcgtatcggtcgcgccggcgaatacctcaaaccgcttttggtacagattgcgcttgctatcgttaaatctgataaatgcccggaactcaaaaacaaattccaagctcttaaaaagcggcgtggcggcaaaaaagccgttattgctattgcccgtaaacttttatctgctatttggatcattctctctaaaaaggaatcctataatcccgaactatatcgaatagctgataaaacgcccattaaacgtgaccttacgcctgaacaggcttttgctctcttacgtaagcagggctactctatttgtgattgggaattaacccttattacttgattttaccttgtttttatccttttttttgactgcctttcgcagtcagctttgctgtactctttttcagagtgcttgccctacgttttgtttcaaact

SEQ ID NO: 6073 - DNA, 1411 bp, unidentified
  source 1..1411: mol_type = unassigned DNA; note = element_963a220
  misc_feature 1..3: note = core
  misc_feature 4..78: note = LE
  misc_feature 79..1128: note = CDS
  misc_feature 1129..1411: note = RE
  misc_feature 1131..1398: note = bridgeRNA
tgatgtcgtggatggcgccctccaccagcgtcgacgtgccagaatgggcatgttgaagaaccggagaggatcacttccatgtctgagattgccacgatcggccttgatatcgcaaagaacgtcttccagctgcacgcggtggacaggagtggaaagatcgtcctgcgcaaggcgctgcggcgcagccaggtgcaggggttcttcagcaggctgccgccttgcctgatcgggatggaggcctgcgcgacggctcatcactgggctcggacgctcatggctttcgggcatgacgtccgtctgatcccgcccgcctacgtcaaaccctatctgcgccggcagaagaatgatgccgcggacgcggcggcgatctgtgaggccgtcgcgcggccgtcgatgcgcttcgtcccggtcaaaagtccacagcagcaaagcactctcatgctacacagagcccgcgatctcctgatcgggcagcgaactgccctgatcaatgccttgcgcggtcactttgcagagttgggcatcgtggtggcgcaaggcgctcgcaacacgcgccagctgatcgccttcctccacgaggaggccaatccagacttccccgcggcagctcgaactgcgcttcagcctttggccacgatgctgctcgggatcgagacgcagattgccaagctcgataaggccattctggcggcccatcgcagcgatccggtcagcatgagactggccgccatccccggcattggtccgattgtcgcttcctgtctcgcggccagcgtcccggacgccagcctgttccagggcagccgggagttcgcagcctatctcggcctcgtgccgcggcagcactcaaccggcggtaaggcgaggctgggctccatctccaagatgggcaaccggcacttgcgcaagctgctggtcgtcggtgcgcacgctgcgctctacagcatgaagtctggcaagaccaggacggctatggctgactgggcccggtctctgctggccaagaagccgttcaaggtggtcgccgtcgccttggccaacaagatggcccggatcgcctgggcggtgatggccaggagcacgacttacgagcccgggagcaagggagttgcagcgtcggcggcataggcgaccagttcaaacgatctgcccatagggcatcccagttggcacggtgacgatgagatgatgtgaagccaaagcggatatggaccgccggatctggcaaacccgtgacgttgtcttgcgtcagtcgagcgcgataatgtgagagggaccagcttccagcgtaaaacatcagggccggcggtcatgaagcaccgcgttcaaaggccggagacatgactgcacccgccccgctaggcctaaacgtcaacaacaatcacattgccaaacgggcgccatccagaca

SEQ ID NO: 6074 - DNA, 1183 bp, unidentified
  source 1..1183: mol_type = unassigned DNA; note = element_963d267
  misc_feature 1..2: note = core
  misc_feature 3..215: note = LE
  misc_feature 216..1160: note = CDS
  misc_feature 1161..1183: note = RE
  misc_feature 60..226: note = bridgeRNA
cttatatctttcgattggttcaaacttcagcgtgcagaccggctggtgagctgcatgccgatccggttggctggccgcggtgcagcttgtgtctcctgcgagcgaacaagctccgaccacagctcaaggcgtaccgcggctgcctcgttctgcgtcatcccgaatggttgattgatctcatttcgcatccgtaaggctgggagccggagaacaccatgagccaaccgatctttgtgggcatcgatgtggccaaggacaccgtggaggtggcctgctcggacgcatcgagccagtcgttcaccaacaacgaagccgggcacgcgaaggtgctgcgctggctggcacgcaagagcgtggccttgctcgtgctcgaagccacgggcggctacgaacaggcgtgtgcggtggcgcttgccgccgcggggttgcccgtgtcggtgctcaatccgcgtcaggcacgtgactttgctcgtgcgatgggtcgattggccaagaccgatcgcatcgatgcgggcgtgttggccgagttcgcggcggtgttgcacgcgcgcggtcatcagccacggccgcttgccagcgtcgagcagcgcgaactcggcgcactcgtggcgcggcgccgccaactcgtggtcatgctggtgtccgagcggcagcgcctgggtgtggcgcatgcccgcgccaagcccagcatcgaggcagtgatcgagctgttgctcaagcaactggccgacatcgatgacgacctgaagcgaacgctcaaggatcggcacgcggatctgtcggccttgctgcagtcggtcaagggcgtaggtccgaccaccacgagcaccttgattgctgaattgcctgaattgggtgcgctcacgcgcaagcagatcaccagcctggtgggcctggctccgttgaaccgagattccggcaccttccggggccagcgccatatcttcggcggacgtgccagcgtgcgccgcgtgctgtacgtcgctgcgctcgtggcctcgcgcttcaatccggccgtcaaagcctgctacgagcgactcttggccgccggcaaacccaagaaggtcgcgctggtggcctgcatgcgcaagctgctcatcacgctcaacgcaatcgcccgcaccaagacaccctggcgttcggacttcggctcgacttgattcagaggtgttcaagatggttg

SEQ ID NO: 6075 - DNA, 1581 bp, unidentified
  source 1..1581: mol_type = unassigned DNA; note = element_964d624
  misc_feature 1: note = core
  misc_feature 2..245: note = LE
  misc_feature 246..1454: note = CDS
  misc_feature 1455..1581: note = RE
  misc_feature 6..224: note = bridgeRNA
tcgtattatgggatcaaccagttctttctggttgatcctttttgcctttgctttgaggattaaggtagccgggtcgaacgcacctgcccgtgggactagattccgagagctataatgttcacctctacttgtcatgaccatgattgaggctggttgggacaaagatcccgtatcacatgcgatgctatggagcgacaagaagatttatagaggctgccggcaaatttacattaaggagaggtcagatgaatcctgttatcgggttagatatttctaaaggagaaagccacggacaggcttttttagatcgtggaaaaccatacaaaggaacgttttatttcgagcatacgcgagaaggactcgagaaactccttcaaactattcgtgatgtcgagcatgcggttggacttcgtcctacactgattctcgaggcaactgggcactaccaaagccctgtcgttcaattcctagaggaacaccactatttatacattgttattaatccgctcatttcaaatcgccttagaaagtcccatcttcgcaaagtaaaaacggatgctgcggatgcttatcttttgggcgatctttactacagggaagagtttgagccttttaagaaaaggggcgtgcaactgcttaatctgcgttatctgacgcggcaatatgagacgttatcaaagatgtgcgtgcaaacaaagctgcaattccaggcggttctggatcaggttttccctgcatacaagggtgttttcggagctatgtattcgaacgtttctcttcgtttcttaagtgagttctcaacatcatcttccgttctgcaagcggatgaggaaacccttaaaatctcaatcagagctctgctttcttcaaaacgaggtcgttcagaagcttggattaatgaacgagttcaaaggctgatgaatgcagcaaaacaaaatccctttcaacaaacgatgtactctagccatttaattaatttaaagattctgatcacccttattcttcaataccaggagcatctagctgatttggaacagaatatagatgccctggcaaaagagatgaaagagtatgatttgattcagtcgattcctggtattggccataaaattgctgcaacaattttatcggaaattggagaagtcgaccgatttgatcatccaaagaaactggtcgcgtttgctggcattgaccccagtgtttttgcttcaggtaagttcacagcaactcgaaatcggatcaccaaacgcggttcccggcagcttcgatatgccctagttatggccgtgcagtgtgggttgatccgttctcgtaacactcggattaaagatttttacgaccgcaaaagagccgaaggaaagcctcacaaagttgctctagtggcatgtgcaaataagctggttcattggctgtatgccattttaaaaagtaagaaatcattccgtctgacataacaaaaagttaatggtataaccttccaacacaactcgaattggaaggttgtttggcatgcttatttttcactataccataaggtttctaattattttgctggaaatgttgacaagctattagctggta

SEQ ID NO: 6076 - DNA, 1721 bp, unidentified
  source 1..1721: mol_type = unassigned DNA; note = element_964ee9a
  misc_feature 1..5: note = core
  misc_feature 6..362: note = LE
  misc_feature 363..1544: note = CDS
  misc_feature 1545..1721: note = RE
  misc_feature 122..343: note = bridgeRNA
ctgctataatatcgaccgtagatattccctgcataatggtcgaatatctatgcaggagagtatgaccttctattctccctgaaacggtgttttcttcaagcagtttgaccggctctcctgcaaactttgttgtccctcccggaatccttccgagtgtgatataatatacctaccggacagaggttactcttgcattttctctgtgactttcagttcacttaaagcagcgtgagacctctaccttatggaaattcatttatcagccggatgttgaagccaagtgctttcttctaatgtccaagcaggttatgattcataaggaaccgaggatactgtccgaaaaaattcaaggaggttagaacatgttcattgttggtgttgacattgccaagcgaagtcatgaagctatcgtgatcaatgattcaggcggcattgtcaaaaaagcattcaacttcaaaaacgattccgaggggttcaagaaactgatcgatgcacttaacagcatcagtaccgatccgtctgactttgtcatcggaatggaatccactgcgcactattggctcgctttgtattcgggcctcagcaaaagtggatacaccgtgcatgtcttgaatccaatacaatcgaacgctctgcgcggaatgtacatacggcaggtaaagaacgacgaacatgattcgctcatcattgccgatgtcattcgttttggaagatataccgaaggaggaatgccgccttcggaactgtatgagttaagagaattgtgcagagcgcggtcttttattgtagatatgacagccgatctgaaaagaaaagtcatatcactgctcgatcaaactttccctgaatacgaaaccatttttgcaaacatcttcggattgacttcatccgaattgctcctgaactgttctacgcccgaagagatcctcgccattgacacagcaaagttggctgcaatcatagagattccaagccgcaaacgattcagcatacccaaggcagagcaaatcaaagaagttgccgccaactcatttggtatcgtcatggagtacggtacaacaagccttctcatcaagcagtacatggaacacattcgttatactgaaatgcaaatagccgggcttgaggaaaagattaccgagctctattcccactttgatacctatctcacgaccattcccggtatcggtatcatccttggcgccaccattctgagtgagattggagacatctctcgcttttcatcttctgccaaacttgcggcatttgcagggatagatcctaccgtaaagcaatccggtgagtttactgctacacataaccacatgtccaagcgcggatcgccctatctgcgcagagcactatggcaagcttctacctgtgctgtcatacacgattccgccttgaaaacattcttcgagaagaaacgcatggaaggcaaaccatatatgaatgccattggtcacgtcacgcgaaaaatgaccaacataattttcgctgtgcttcgtgacagcaaaccctactacttacgcgataacacctgaatcgcagattcatattttttcttaagcccttgattgtctttagcaaatttagaggtgactgtcaagggcgggcgaagcacgcttgttttacccttgaccggcaccgaaaaatttgtatttttatgcacggacttaagaaaaaatctttcattttcctcttgacaaatttatagccgg

SEQ ID NO: 6077 - DNA, 1390 bp, unidentified
  source 1..1390: mol_type = unassigned DNA; note = element_9653539
  misc_feature 1..2: note = core
  misc_feature 3..79: note = LE
  misc_feature 80..1117: note = CDS
  misc_feature 1118..1390: note = RE
  misc_feature 1116..1377: note = bridgeRNA
tgatggggtggacggccccacacggtatctgaagtaccatattgagggttgtcgccatctcaatagaaggagccgtccaatgggtgatattattcgcatagggctggatacgtccaaacactttttccaagtgcatggcgttgatgccgatgagcatgttgttgtgtgccgcaagctgaaccgtcgtcagatggaggggttctttgcgaagcttgggcccgttgaggtgggtcttgaagcctgcgggtcgagccaccactggggtcgctggctggagagtttgggtcatacggttcggatgatgcctgcgcagttggtgaagccctatgtcaagcgcaacaagaacgatgctgccgatgcggcagggttgtgtgaagcgatgagccgcccgactatgcgttttgtaccggtcaagaccaaggcccagcaggcggacctgatgctgatgacgcaccgcgagcgtttgatcaccgaacgaacgcgactgtcgaataccattcgcagccatgcgactgagttcgggcactgcgtcgcgcgcggcctggcgcatctggagggtttgctggcgacgcttcaagccgacacggatttgccggagatggcggccacgctgtttgagcggatgagtcgggactatcaccgtctgtgccaggagatcgccgagttggaagccgagcttgtcgtctggcacaagcacaatgaatgcagccgccgcctggagcgtattcccggcgtcgggcctgtctgttcggcgctgctggtcatgaaggtgaccgatgtggcggccttcaaatccggccgggacttcgcggcctggctgggccttacgcccaaggatcattcgacaggcggaaagctcaggcttggcgggatcacaagagccggcgatgaaatcctgcgatgtaagctcgtcgccggcgccacagccgtcatccagcatacccgaagacgcggaaagggatccgcctggctcatcaacttgctcaagcgcaagccgcctaagctcgccgccgtcgctcttgccaacaagaccgcaaggatcgcctggaaactcatgaaaacaggtgaaacctacaccgacaaacccgcgcaatcccagacactctgcgccgcctgacaatctgccggggcggggccttcaatacccgaaacggctggtaccggaccttgcaggagaacacgcagatggtgtgatcgagcgatccaacacgaaggacactccgccgcccccactggctacacaaaaagccgaggtggtgattggaacctctgtcgcggaaaccatcttggccagcgtcaaccaatacgcacaaacaggccggacatatggacgcaagcgtaccgatcacagcaacaaatgaactcttgccgggaaggggccgtccacata

SEQ ID NO: 6078 - DNA, 1237 bp, unidentified
  source 1..1237: mol_type = unassigned DNA; note = element_96542ea
  misc_feature 1..2: note = core
  misc_feature 3..148: note = LE
  misc_feature 149..1222: note = CDS
  misc_feature 1223..1237: note = RE
ctggtatgttgacagatagggaaaagtgacagataaaaggcctgtcattttccggcaaggggtggtgaagttcgttagtgacagcagtccaagaactcgtcacaaagattagctcccgctcctggtcctctgttcgagaacggacaaaatgttgcggccccgcaaggtgagcctgaatcaccagagcgttcgcagacagaaggcagccggcccggaagcagttgaacaagggaaaggaaacgagatgcatattcttgggatcgacatcgccaaaggcacgtttgacacagcgctgacgcaggacaatcaggcgtatgcgcaggcgagcttcagcaacgacagccaggggttcaagcgtgtggtgaagtggctcgccacccaccaggtggaagcgttgcacgtctgtctggaagcgaccggtcgctatggcgatgcgctggctgattacctgcacacgcaaggccaccaggtgagcctggtcaacccagcccagattcacgcctatgggcgcagcaagttgcggcgcaacaagaatgaccggctggatgctcaactgattgccgatttctgcttcacccaacagcccctagcctggaagccgcctttgcgcattgagcgggaaagccaggaactcagccgccatatcgccacgctcaaggaagaccgccaacgcaagcgcaaccaactggcggctgggctgacttccccgccgctccgtcgctccatccaaaagacccttgacttcctgaaccaggagatcgaactgctcgaaaaggagttgcacgaactgctctcccaggaccccgacaaagcccagcagattgaactgctttgctccattccaggcatcggccgtctcaccgcctgccgcttcctggctgaggtggatgtgacgcgctttcgtcaggcttcccacctcgccgcctatgccggcctggttcccactgagcacacctccggcgcgtccgtgcgcaaaaagccccgcctctccaaagtcggcaaccgtcacttgcgcaccctgttctttatgcctgcgctttccgcccatcgcttcaatcctatcattgccgacctgcatgcacgtctcactgagcgcggcaagcccaaaatggccgtcgtcggcgccgtcatgcgcaaactgctccacctcgcctatagcgttctcaaaacccgcaagccctttgacccccaacatctgcattccataccagttgggggttgactttcaacacaaaat

SEQ ID NO: 6079 - DNA, 1425 bp, unidentified
  source 1..1425: mol_type = unassigned DNA; note = element_96584c2
  misc_feature 1..4: note = core
  misc_feature 5..205: note = LE
  misc_feature 206..1411: note = CDS
  misc_feature 1412..1425: note = RE
  misc_feature 17..174: note = bridgeRNA
ttccctaagaatgtgaggcggtccgggaggaccgggtgtggctgatgatggtttgccgctgatggctcgaggagaatggccgcccggtccttcgggacgctccgaccactgattgagaactgcggtcatcgctggttagggacctgtcggcggagtgttcttcgggccacgcaagtgctggtcacggtgggacggagcgacgggcttgagcgcggttcacgagcggatatgggtcggcgtcgacgccggcaaggggcaccactgggcggtcgctgtcgacacagacggcgagatcttgttctcgacgaaggtggtcaacgacgagtcgcagatccttcacctcatcgatgccgcccgggagaaggccggcgagatccggtgggcggtggacatctccggccgtgcgtcgaccctgctgctggccctgctgatcggccgcggccagcatgtcgtctacgtgcccggccgcaccgtcaaccgcatgtccggcgcctaccagggcgagggcaagaccgacgccaaggacgggcgcgtcatcgccgaccaggcccgcacgcgccccaagggcttcacccggctgcacacccctcctgaactggtcagcacactccaactgctgaccaactaccgggccgacctgatcgccgaccgggtccgcctgatcaaccggctgcgcgacctgctggtcggcatctgcccggccctggagcgggccttcgactactccgccgccaagggccccgtcgtgatgctgaccgagtaccagaccccggccgccctgcgccggatcggcgtcaagcggctcacgacctggctggagcgccgcaaggtccgcggagccgacgttgtcgccgcgaaggccgtggaggccgcgcagtcgcagatgacggaactgcccggcgagaagcgggccgcgaagctggtctgcgacctcgctcaccagctcctggccctggacgagcggatcaaggacaacgaccgggagatccgcgagaccttccgcaccgacgagcgcgccgagatcatcgagtccatgcccggcatgggccccgtcctcggcgccgagttcgtcgccatcgtcggtgacctgtccggctacctggacgcgggccgtctggcctcccacgccggcctggcaccggtcccgcgcgactctggccgtcggaccggcaactaccaccggcccaagcggtacaaccggcgcctgcgctggctgttctacatgtccgctcagaccgcgatgatgcggcccggcccgtcccgcgactactacctcaagaagcgcggcgaaggactgatccacacccaggccctgctcgcgctcgcccgccgccgagtggacgtgttgtgggcgatgctgcgtgacaagaggctcttcacccccgctccgccggtcacgcagacggcttgacacgatcattgaga

SEQ ID NO: 6080 - DNA, 1598 bp, unidentified
  source 1..1598: mol_type = unassigned DNA; note = element_965aa3b
  misc_feature 1..2: note = core
  misc_feature 3..271: note = LE
  misc_feature 272..1486: note = CDS
  misc_feature 1487..1598: note = RE
  misc_feature 12..291: note = bridgeRNA
ctgttacaataaatttgcggcaagtagcttagcagcctgctaaggactttaccacattgttgcctaactggtaaaatgagtaaaatggcctgacgcctttctccaaggactctttttaagacgtccgttaaaaagtctgtcagtcaaccgctcatttccagcgttcgttttatgcaggttgaaccgcttcttgtgggtccgggtcaccaaacagattgaatcggcaatgatgtaggttggattgccaaattctatcggtaaggagttttttatgaacaccgttggtattgatgtttctaaaggcaaaagcatggttgccgttgcccgtccctttggtcaagtggttcttaaacctttttcggtttctcatctttccagtgaactcagaaagctggcgatctctctgaaaagcctggaaggggaaactcgggtcattctggaacatactggacgctattatgagcccattgctctgatgctccataccgcgggtctttttgtcagcgcggtcaatcctaagctcattaaagattatgggaataactcgttacgccaagcgaaaacggataaagccgatgcccttaaaattgcccgttatggccttgacaattgggcggaattacgactgtatacgccgatggataccattcgctatcaattaaaaactttaaatcgccaatacgccctttatacgaaaaacaaaacggcccttaaaaacaatctcatttcccttttagaccaaacctatccgggggtcaacgcacttttcacgagtcctgtccgtgaggatggtcaccagaaatgggtggattttgcaaccaccttctggcatgtggagggtgtccgttctttaagcttaaacgcctttacacagcgttatcataagtggtgtaagcgtcacggttattccttttcttcagcaaaagccgctgaaatccacgccgcttctaaagaacagattgcaatccttccaaaggattctttgacaaaaatgctcattcaacaggcggtacagtcactcaacgccctttccaaagtggcttcttcccttcgtttggaaatgaaagacctcgcacaacagctcccggaatacccggtggtcatggccatgtatggcgttggcgattctcttggcccgcagctcatggctgaaatcggcgatgttcgaaggtttcacaaaagaaacgcccttactgcctttgctggtgttgatccaaaagccaatcaatcgggaactcgcgagtctaaaagtaatccggccactaaacacggctccccaaaacttcgtaaaacgcttttcttagtcatggagaccttgattaaaaagtcacctcttgatgatcctgtttttcagttcatggataaaaaacgggctgagggcaaaccctaccatgtctacatgactgctggtgccaataagtttctgcgcatttattacggaaaagttcgggagtacctggccacacttgttgataccttggaataaacaccttgcttttttctctttttcagaccggcctttttcctccggtctttttagcatgcctttttttcagtattatcttttttcattttctccttgactttttatttgcagg

SEQ ID NO: 6081 - DNA, 1829 bp, unidentified
  source 1..1829: mol_type = unassigned DNA; note = element_965af99
  misc_feature 1..2: note = core
  misc_feature 3..356: note = LE
  misc_feature 357..1715: note = CDS
  misc_feature 1716..1829: note = RE
  misc_feature 141..315: note = bridgeRNA
ctagtataataatgatgtagtcaagaatgactactgattaatagttacaaaatccaatctaaacatatttatatagataccgaaggaggattcctcctccatcagaggttctataaaagcgtacaatatttatcatgtctgcggcttccataatgcaccaggcttagtattgaggtataatcactgaaggcaggaccattgacgtctcctccttgggaaccagtgtatttccactggtgaaacctcttagatagtctgtcagtccattcggtggtgatttatgctttggctggttgggaagccacaggctatacctgtataagccgctaggttgtgtatccgccttttggaaatggatgcctgccggaaaggataaaactatgcactataaaaaagtacttgcgatgatcgcagacataccctacctctctgtcggacttgatgttggcgctgacttctcctggatgtccatcatgctcccaaacggcaccctcactggaaaacctttcaaaatcctgcattcagacccttcttccagggaacttgccgttacaaaaataaaggaagcccaagagatgtattctctcgaaagccgctgcttccttgagtccaccgggatctaccacatcccgctcctgtgcttccttcgtgataaggggtttgactgctcggtcattaatcctatcatcactaagaatagcacaaatctgaatataagaaaactgcataatgataaatttgattcaaaaaaagctgccaaaattggcctggatgcttccctgaagatctccattgtcccagatgacgacatcattgatctccggaacttggtccgcgactactattatttcaaagacctgcagtcggcaatcgttcttaaactaaacgcggaactcaaagtatccttccctgcttacctgcaggtgttcagcaagatcacgacacagacttccttaaaactgctcgaggcatatccacttgcatcagacatgctcaacgccccaaaggatgaagtaatcgaaacaatccgtactacggcacgttttgggacaaagtatgcttttaccaaatatgagtccctctgtgccgctgccaaagatgccgctgtgtttggacgtgccctgcccagcaatgccattcggatcagactctatatcaattcctaccaggaataccagaagtatctggactccatactggaagaactacacaaagctgtggataaactgcaaggaaaacctgcttatgaccgcatctgtattcttcagtcattacgcggcggcggctttttaagcgctgttgtcctgattgcagagatgggttcctttgacctgttctcctcaccaaagaagctctatgcttattttgggctggatccagctgtgaaacaatccggcaagttcaacggagataatgtccatatgtccaaacgaggatcaagccttgcacggcgtatcctgcatatggttgccttaaacaacctaaaggtggataaaggaacgaaattgcctgtaaatccagtaatttacgattactacgtccgtaagtgttccagcaagaaaaagaaggttgctgttggtgcagtcatgcacaaaatctgtaacatcattttcgctatgctccgggataacaaaccttttgagatcatcacacctgaagagcactgcgaccgctatgcagtagagcatcctgagattatcaataaagctgcctaatggatcattaaagcaatttcaaatcccatatcaatgggttttattaaagttaccctttttaaatgataaaatatttatttttttcaaatcaactcttgacatttcttagctgga

SEQ ID NO: 6082 - DNA, 1629 bp, unidentified
  source 1..1629: mol_type = unassigned DNA; note = element_965b8cb
  misc_feature 1: note = core
  misc_feature 2..268: note = LE
  misc_feature 269..1492: note = CDS
  misc_feature 1493..1629: note = RE
  misc_feature 33..244: note = bridgeRNA
cctcatatattctttctgccgcttctcgcgcagcggccgcgctcttttctcgtagacgcgaatatgggataaagggtgtgcatggggcggagggcgcttgccgcggattcatggagctaggctcttgcggaaaggctggcgcctccggcccgcaggtggacgcgaattaggcaggatgccgttcggcggctgatctcccatgaggttgcgcctgcaggatccggagggaggccccggccccgatggaacgcgctcgaaggaggcaggcatggtctacgtaggaatcgacgtcgcgaagaggtcccacgtgctcagcgccgtgggcgccgatggcgagacggtaatcgggtcgttcaagttcgccaacgccgacgccggcttcaagaagctggcggaccgcctggcgaaggccggcatagagccgggctcgagcctcttctgcatggaggccacggggcactactgggtggccctgttcgacttcctctcttcgcgcggcttcgacgccgcggtcgtcaaccccatccagaccgacgcgttccgcgacgtgtggaccatccgcaaggtcaagaccgacgcgctcgacgccgccatgatagccgacctggcgcgctacaagcgctacgagccctcggcgctcggcgacgaggcgacagacgagctgcgcgcgctcgcgcgctaccgcatgtccctcgtggagcgctccaccatgctcaagaaccgcgccacggcgatcctcgaccgggtgttccccgagctcgacggcctgttcgccggctcgttctcccagacgcagagagcgctgctcaagcatgcggccacgccgcgccaggtgctgtccaccgacgtgcgcacgctggccaggatcctcggcgaggcgtccaacggccattgcggtcgggccaaggccgagcaactcaaggccgcggccaaaagctcggtcggcgtcgggttcggctccgacacgctggccttcgagctgcggatgctcatggaggagctcgacttcgtgcgcggccggatcgacgaggtcgaggccgagctcgcccggctgctcgacgccacggccggcaggtggctgctcaccgtgcccggcatcggcccggcgctcgccgccacgatagccggcgagatcggcgacgcgaaccgcttcgccggccccggccagctcatggcctacgcggggatggaccccacgaggagcgagtccggcgagaccgtggcctcggacggctccatgtccaagcgcggctcggccgtgcttcgctgggcgctcatgcaggccgcggactgcgcccgcaggtacgacccgtacttcggcgagtgctacgcaaagaagaagtctgaaggaaagcaccactacgtggctctctcgtgcgtggcccgcaagctcatgggcgtgtgcctggccctcatgaaagagggcaggccctacgagcccgcaccgcccgcacgccataggcccgggcatctcaaggaggccgattcgtagccatctcgtcgacaaccgcatacctccgttatcggccctgctgggccttccggcatgcatgctctttatcccatattcgcttctcaacgttcctatctaaaaatcctgggactatcccttgactttaaatagcaggt

SEQ ID NO: 6083 - DNA, 1387 bp, unidentified
  source 1..1387: mol_type = unassigned DNA; note = element_966bb4f
  misc_feature 1..3: note = core
  misc_feature 4..119: note = LE
  misc_feature 120..1139: note = CDS
  misc_feature 1140..1387: note = RE
  misc_feature 1152..1383: note = bridgeRNA
agatggtatgggcgcctccctccgtgggccggcgatgcgcgccgaggtggaccctccgaaacggcatcgacgtgccacagtggagatgcgttcttcaaccactgatcggaggatccatcatggagcttaatgtcgttgccatcgacatcgccaagaaagtgttccagctgcactgggtcgagctcgataccggcagcatcgagtctctcaagctcaagcgctcccaactactggcctggttcgccagtcaccagccagtgcgtgtggtgatggaagcgtgcgggggcgcgcacgaatggggacgtgagctgatcaagctgggccatgacgtgcggctgctgccgccaaagatggtgaggccgttcgtgcaacgcaacaagaccgacgccgccgacgcacgcgccatctggaccgccagtcgtcaacccggcgtgcgcttcgtcgcactcaagagcgaggcgcagcagatcgtgctggcattgcacagggtgcgcgcgcagctgatgaagatgcgcatcatgcagaccaacgagttgcgcggcctactgtacgaattcgggatcgttcttccggagggccatcccgctctcatgaaggaattgcccgcggcccttcggactgcgcaagccaggttgcccgccatgttcctggacaccctgcacgaacaggtgcgtcgagttgcgcaactgcaggccgacatcggtgccatcgagcggcgcctgtcgcatcagatgcgcgagatgcctgcgtgcaacaccgtcgccgagatccccggcgtaggcctgatgaccgccacagcgatcgtggccagcatgggctcgccctctgccttcaaggatggccgcgagttcgcggcctggatcggacttgtgccgcgccaaaccggcaccggcggtcgcgtccgccaactcggtatcagcaaacgcggggacgcctacctgcgaactctgctgatgcacggcgccagggctgtcgtgcgatctgaccgagcaacgacatggccttggcttgctgctctgctcaagcgcaagccgtacaccgttgcagtcgccgcagttgccaacaagatcgcccgcacgatctgggccctgctcgccaagggtcaagcttggcagccgagagcctggcagccagcctgatcgggagcacaaaggttaggagagcaagcgagccacacgtgtgatgggccagacaggtcggaccgcgacgggaaactccgatagggaacttgagccttgagctcggtgttcagatgggaaccccgttggcgaatgccatcagggccagcaggctgccagcctgcacaacaggccggatataagactgcagcccagcctcctgttcgtcacaccaccgactcacttgtaatccgggaggcgcccatata

SEQ ID NO: 6084 - DNA, 1397 bp, unidentified
  source 1..1397: mol_type = unassigned DNA; note = element_966f3c2
  misc_feature 1: note = core
  misc_feature 2..84: note = LE
  misc_feature 85..1122: note = CDS
  misc_feature 1123..1397: note = RE
  misc_feature 1162..1392: note = bridgeRNA
taatggaatggacgcccccttcctaacggcatctatgtgccaaagttaaagtgttatccacacttagcggaagggagcgtcctcatgcagattacgactgtttcggttgacttggcaaaagccgtgtttcaacttcacgcgatagatcaacaaggaaaaacagcgctaaggaagcagcttaaacgtgatcaggttgtgcctttttttgccaacctggagccctgcctagtgggcatggaggcatgtggcggagcccactattgggcaagaaaactgcaggcacttggtcatacggtcaagttaatggctccgcaatttgtgaagccctacgtgaagtcgaacaaaaacgatgtagctgacgcagaagcgatctgtgaagccgttactcggcccaacatgcgctttgtgccgatcaagacggtagagcagcaagctattttggcggtgcatcgcgcacggcaagggtttgtaaaggccagaacggcacaagctaattcgattcgtgggctccttggagaatttggcgtggtcttgcctcagggcattcgacatatcgtcgagcgtttgccggatattttggaagatcatgaaaacgctcttcctggatcgttacgccaactgatgcagcgcttgatggagcatttcaaagagctggatcgacaggtcgtcgagttggaacgagagattcaacaatggcatcgcagcaatgaggacagctgccgcctggcagaaatcccaggcgttggcccgctcactgcaaccgcgctagtggcgtcagtgggtgacgcgaaaaacttcagtaacggtcggcaaatggcggcatggttggggttagtgccgcgacaacactccagcggaggcaagcccacattgttggggatcagtaaacggggcgatggttatttacgcaccttgctgattcatggctcacgctcgatggttcgagtggtggagagcaagacagatccttcggcggattggctgaaggggttattggctcgtcgtcacaccaacgttgctgtcgttgcacaggctaataaaacggcccggatagcctgggcattattggcccatggcggcaagttccgacccgactacacccccgacgtaacggtggcgtagccggcccggtggaatgaaaaagtgatgcgttagaaggagtacttccaaggttgctcaggcgatcatgacgtgatggcaagacaggtaggaccgggatcgggtaactctgccccgctcacagcgcttcgagcgcgttgtggtgataagagcccgatcagcgaattccatcagggacagaggcaccgcctcacttaaagtccggatgtatggctgcaaccttatcccgtctgtgttttcacgaattgagtgcttggcatactgggggcgtccatgta

SEQ ID NO: 6085 - DNA, 1369 bp, unidentified
  source 1..1369: mol_type = unassigned DNA; note = element_9677063
  misc_feature 1..2: note = core
  misc_feature 3..77: note = LE
  misc_feature 78..1103: note = CDS
  misc_feature 1104..1369: note = RE
  misc_feature 1080..1356: note = bridgeRNA
cgatggggtggacgcccctcgacggcatctatgtgccaggatggcggtgttaagaaccgcatacagaggaggcgtccatggttgaggttagcatcattgggttggatctggcgaagaattcctttcaagtccacggagcgagcacagatggcacggtagttattcgtaagaaactaagtcgaggccgagtgctcaagtttctggcggttcaacccaggtgcacggtggcaatggaggcctgtgccagcgcgcatcactggggacgagaaattggccgattgggtcacgatgttcgtctgattgcgccgatctatgtgaagcccttcgtgaaacgacaaaagaatgacgcggcagacgctgaggcgatttgcgaggcggcgcagcgaccgaccatgcgctttgtggcggtgaagagtgaagacaagcaatcctcggcgatgatcttcaagacccgtgatcttcttgttcgccagaaaacccggaccattaatgctctgcgggcacatctggccgagtttggcgttattgctcccaagggtccagcgcatttgggccgacttgtcagccaggtggaggaccctgaaaccagtctgccggaacctgtccgcaccctttgtcttatgctcattgatcttgttgggaaattaatcgaacaaattcgtgtactggatggtgagatcaaaacccgctctcgcaatgacgatgtcgccaaacggttgatgacgatcccgggcgtcggccctgtcattgcaacggctttggaggcactggcgccacctgccgaaaccttcaaacgaggtcgagactttgccgcttggacgggactgacaccccggcagcggtcaacgggtggcaagccaagacttggcaagatatcaaagatgggtcagcgcgatcttcgccgccttttgatcattggtgcatccgctgttgtccgttgggcggcaaaacggggggctccggaaggctcttggcttgcgcgtatgcttgttcgcaaaccgcgaatgctgattgtcgtggcgctggccaacaagattgcacggatcgcttgggcgctcatggcccacggaggaatataccgagctccagtgcgtgtggcttaagctgcacgaacgctgcgaggcggtcgaggatgtgagcaggtcgaacggaggtatgggcaaacggtcatcgagacgggattgggaaaaccaggtcaggcggacagcgccagttgagcgcgcgtgagcgtattggactcgatcctcgcatctccatacaggcccgcggcgcgtgaaaagccgcatattgaggccggacacacgtcagcacctgaccacatgctcaccgaaggaaagattttgcttgcatttaccggggcgtccacaca

SEQ ID NO: 6086 - DNA, 1368 bp, unidentified
  source 1..1368: mol_type = unassigned DNA; note = element_96786bc
  misc_feature 1: note = core
  misc_feature 2..308: note = LE
  misc_feature 309..1118: note = CDS
  misc_feature 1119..1368: note = RE
  misc_feature 1132..1358: note = bridgeRNA
taatgggatggtccggccgtgctcctacctggccagtcgtatgctggctagcggcacgcagacaaggagcacgccatgtcccaaattctcagcacagttgccgtcatcggcattaatatcggcaagaactcgttccacctcgtcggcctggatggggacggcgccatcgtgttgcgtcagaagtggtcgcgaggtcaggtcgaagcgcggctggccaatgcgccgctgtgcctgattggcatggagcctgtgtcggtgcgaatcacctcagccgcaagcttaaggcgcttggccacgacgcccggctgatgcgggcgaagtatgtgcggccgtactccaaggggcagaagaacgattttcgcgacgctgaggccattgccgaggcagtgcagcgtccgacgatgaagtttgtggcgacgaagaccgccgatcagcttgacctgcaggcgcttcaccgggtgcgggagcgattggtcagtccgcaccggcatcatcaaccaaatccgcgccttcttgctcgagcgcggcgttgcggtgcgtcagggacttcggttcttgcgtgcgagctgccgcgcattctggctgcgccgcccgaagtgctgtcgcctcgcatggtacacctcattgagggtttggccgaggactggcgccggctcgatgagcggatcgattgcttatccggcgagatcacggccgtagcgcgcctggatgctggctgtgagcgattggtgagcgttcctggcatcggaccgatcatctccagcgccattgtggccgcgatcggtactggcgacgcgttctctaaaggtcgcgacttcgcagccgggctgggtctcgtacctaagcagatctcgaccggcgaccgcaccatactcggcaagatatcgaagcgcggtaaccgctatctgcgcgttctgttcgtgcaggccgcctgggtggtgctgatcaaaccgcagagctgggagcgtcatgggctcaagcgctggatcgaggcggccaagaagcggctgcaccgcaacgtgctcgctatcgcgctcgccaacaagctcgcacgcatcgcctgggctgtgctggctcgtggtcgagctttcgaggtaaggccagccgtttctgcgtgagaagctaaggacttcctgccgaggtctgcgagagatgagacgagatggaagtacggtcttcccggcgcatgcgaacactggtgaccctataatggtccagttgagacctttcggctaatgaggtcgcacgcgcgctgatatccatgatggccaggagcatgcctccaatcaaaggccggatacattgatgcaagaccgcttaccgccaactcatcaaagttctcttgcaacgcacggccggaccatacat

SEQ ID NO: 6087 - DNA, 1359 bp, unidentified
  source 1..1359: mol_type = unassigned DNA; note = element_967c37d
  misc_feature 1..2: note = core
  misc_feature 3..70: note = LE
  misc_feature 71..1093: note = CDS
  misc_feature 1094..1359: note = RE
  misc_feature 1122..1345: note = bridgeRNA
tgatgacgtggacggctctccatctaccctgcattatggtgtgcggggcaatttggaaaggagagcagttatgggaacggttacgattattggtctggatattgcgaagtctgtttttcaggttcacggtgtggatgcgcaaggcgaggctgccgttcgtcggcgcctgacgcgcggccggttgttgaagttctttgccggattgccgccttgcctgattggcattgaggcgtgctcctcgtcgcattattgggcgcgtgaactcgttgctttggggcatgaggtgaagctgatgcccgctcagtatgttaaaccctatgtgaagcgcggcaaaaatgatgctgccgatgccgaggccatctgcgaggcggtgacgcgcccgaccatgcggtttgtcggcatcaagacgcccgagcagcagagcgcgatgatgttgcaccgggttcgtctgatcttaaaccgtcagaggacacagctctcgaatgcgatgcgggctcatctggccgagtttgggattatcgctcctgctggccgcaatggcctggaacggttgctggatgttatcgcagaccctgatgacttgcgccttcctgccgatgcccggctctgcctggagatgctggtgagccagctgcggatggtcaaggaacagatactggagaatgatcgtcgtattctcgcgcaagcccgcgagacggacgtgggccgccgcctgatggagatcccgggagtggggccattactagccagtgcctttgttgcaacgattaccgatcctgctgtcttcaaatcgggcaggaaccttgctgcctggatcggtcttgttccgcgtcagaactcaagtggatccataatgcggcttggaggaatctcaaaggcaggcaatcgctatctgcggcagatgctcatcgtgggtgccatggctgtcatccgtcaggccatgcgttacggcgacaagtatccttggctttcgcagcttctggcgcgcagtaaggccaaggtcgcagctgttgcgcttgccaacagaaacgcgcgcacgatctgggcgatgatgatgagcggagagcactatcgcaatccggttgcggcatgatataagcagcgctgagtatagcgcgctaaagaggttggaaaggagcgacaggagttgatgcaaaaagccggttgaaaccgccgaaacgggaaaacccagaacgacccagcacttcgagtgcgtgaaattgatcgggacccgcttcgcgcgaatggcattagggccagcggcaatatgtgccgcataaataggtcggacacatggccgctccaaccagcgacgcagaaaccccagtcaaaccaccccaacggagagccgtccacaca

SEQ ID NO: 6088 - DNA, 1382 bp, unidentified
  source 1..1382: mol_type = unassigned DNA; note = element_9690386
  misc_feature 1..2: note = core
  misc_feature 3..82: note = LE
  misc_feature 83..1105: note = CDS
  misc_feature 1106..1382: note = RE
  misc_feature 1143..1377: note = bridgeRNA
cgatgtgatggacacctcccccttacggcatcaaagtgccagactgaggtgtacctacagttaactggaggaggtgtccatcatgaatattaaacgtattggtctcgacctggcaaaaaatgtcttccagatacatgccgtggatcaccgtgagcatgttgtccttcgtaaaaccctgcgccgtgaccgcatggcggcctttttcacccaactctcaccgtgccttatcggtattgaagcctgtggctctgcccactactgggcccgggagctgacccgtatggggcataccgtacgcattatcccgccccggctggttaagccttatcttaaaggccagaagaatgatgccaacgatgccgaagctatctgcgaggctgtcagccgccccgggatgcgcttcgtggcgatcagaacggaaaggcagcagacgctgcaggcggagcaccgcgtccgggccagactcatccgtgcccggacagccctgagcaatgagatacggggtctgctgggggagttcggtgtggtgttgccagcgggaatagcgcaactgcgtaaggcgctaccggagatagtgtcgcagcaggtgcagtgggatgagtgttttattcgtctgctgtgcgaactgtcagaagagctgcagggactggatgagcgtgtcgcccgccacgacaggcggcttcagcagtcagcacgggatgatatccggataaaaaggctgctggcgatagaggggatggggccggtggtggccagtgccctggtggctgcagtgggtgatggcagacagttcaggagcggccgggaaatggcggcttatctggggctggttccgcggcagcactcaagcggaggaaaggcgcgactgggccatatcagcaagcggggggaccgctacgtgcggacgctgataatccatggagcgcgggcagtgctgaatgcgtgtcagaataaaactgacaggcgcagccagtggttgcagggggggtcggagagacgaaaccggaacatcgcgacggtggcgctggcgaacaagaatgcccgtatagcatgggcgctgctgagtcgtgaagaggattaccatgggatacaggtcaccggttaaccggtgacctgtatcccatgcgttaaaagagcaataacctgccgtaaggttgcagccagagaagcgagatgagtaacaggtaagaccagcatcagtcactccggcctggccgaaggctccctgataagcaaagccgctagcccgaatggaaacagatgcgcagataacatcatggcccggatacgacggtatcgtaagagaggccggatatacgaacgcaacttaccccgttacacaaaatgcagagatggcttgcataacgggaggtgtccatata

SEQ ID NO: 6089 - DNA, 1805 bp, unidentified
  source 1..1805: mol_type = unassigned DNA; note = element_9695167
  misc_feature 1..2: note = core
  misc_feature 3..382: note = LE
  misc_feature 383..1666: note = CDS
  misc_feature 1667..1805: note = RE
  misc_feature 64..349: note = bridgeRNA
ctcgtataattaattttgtagttagcttttattgaatttccagtatctaatctaactacaaaatgcaaagataactggaaatttacaagagtggtatagaattgctcctaaacgtcaatatttatattagagaattggcgtaggactattcagattctccttgttggtcacttcggtgatacttctttaaaagagtgtttccctagttgtattgttaacttctaatccagtcgttgttcaggttactaaccgattagcgtagcaactaatcatcaacgttaataacttagttcttattagtgcgagggtgttgatgcattacaaacttaggggtaatcctatgccagttcttgttttattttaattgaaaggtggtgataccatgaataacgctttaacaactaccttattcattggtatagatgttagttctcgaactaattacgtctttgccctagatttctttggcaaaaaattattatcatttcaagttaaaaacaaccttccaggttcggagcaaatggtatctaaaatttgttcttgcctaaaagaaaataatcttacacatctaacagtcgccatggaatcaacctcattctatagctggcatttagcgaatacattatcatctcatgaggcattagtttggtttaaacctaaagtttactgccttaacccacgtgttattgcagcatataagaaatcttttgttgacatggataagactgatccaaaggatgcttttgtcattgcagattttgcgcgagttggcaaaataactacttctccatggagtggtgctgaatacatagctttacaaagacttactagatgcagacttcatataattgaaaatataagccgtgaaaagtcttatattttatcaaatatttttctaaaatttagcgagttagctgtattagataaaaatgaaactccattttcaaatatatttggagcaacttcagaagctgtattaacagattatatgtctgctgaagacattgctaacacaagcattgaaaatcttattacttttcttattgataaaagtaaaaatagattttcaaaccccgaagctacagctgaaatacttcaaagagctgcaagagactcttataggcttgataaagccttatatgatcctttaaatgcaactattgcagcttcactaaactgtataaaagctttagaaaaagaagttaaatctttagataaagctatcgaaaaagccgttaaaggcttcggtaaccatcagtaccaatgcttaatgtctattcctgggattggtccagtatttgcggctggaataattgctgaacttggtgatataaccaaatttagcaatcaagcttgcgtagcaaaatatgctggtctaacttggcgtaagaagcaatcaggcaattttactgctgacaacaccttcttgaccaaaaccggtaataagtatttaagatattacttattagaagcttccgctagcgtcattaggcatattgatgaatattctgcttattatcagaaaaaatctgatgaagcattagtacataaacataaaagagcacttgcactaactagccgaaaacttgtaagattgatttttgctttgctacgcaataatcaactttatacctctaatgaggtagttgaaaaagctacaatttaatatgtgcagtacagccttttaattgccagtaaaattttggtaattaatataggattatttcttgtactctttttttcataagacaaactaagaaatttccaatttaatttaaaatttatattgacatattaccagtcgt

SEQ ID NO: 6090 - DNA, 1375 bp, unidentified
  source 1..1375: mol_type = unassigned DNA; note = element_96983e9
  misc_feature 1: note = core
  misc_feature 2..89: note = LE
  misc_feature 90..1121: note = CDS
  misc_feature 1122..1375: note = RE
  misc_feature 1148..1370: note = bridgeRNA
caatgggatggactcctcctcccacgcgcggcatcgaggggccaaactgggattgagtatttccagttgtcgggaagaaagagtccgttatgaagcttagtcgagtaggtgttgatctggcaaagaacgtatttcagttacatggtgttgatcgtcatgggagggcgatctggaggcgtcgactgacacgtaagcaatggctgtccgcgttgagtgcgcaagcagatcctgattgtgagattggcatggaagcatgtgccagtgcgcatcattgggcacgcacgttgcaatcacttggctacaccgtccgtctgatcccgccacagtttgtaaagccgtatgtgaagagcaacaagaatgacgccaatgacgccgaagcgatctgtgaagccatgagtcggccgaacatgcgctttgtgacggtaaaaagtgttgcccaacaggacatccaggctacccatcgcatccgggcggagctgatggtgcagcgcaaggccaaggcgaaccagatccgcggcctggtggccgagtacggcttggtagctccactcacattgcctgccttacgtgcggctattccccactggctggaggatgccgagaacggactgaccgattactttcgctcgttattgaatggcctgtggtccgacttggtcctgctggatgatcgtgtgctcgagatggatcgagagatccagcgactcgccaaccgtaatgaggtgacccggcgattgcagcagctgcgtggtgtcggcccgatggtcgcgacggcattggtcgccaccgtcggtactgccgagcaataccccaaaggccggcacatggccgctgcattggggctgacaccacgacaaaacagttccggcgggaaagagcgcttgctgggcatcagtaaacgcggcgatgcctacatgcgaacactactgatacacggtgccagggcggtggtcagccaagccaagcacagagaagatcggctcagccggtgggtcactgatatcgccacacggcgtcacccgaatgtcgcggcggttgcactggccaataagacggcacgcatggcctgggccatgctgcgtcacggtactgattacgatcctgatttcgtgatgagctgaagtcagggagaaaggagatcctcaattacgattgcaacagcaaactgaagaatggcaaacaggtcgaaccggcgtcggtcaaacccgttaatttccgtgtgcttgaagtacgtaggagcgattgggaactgacgcgcgaataacccattgtggcccggcatcaacgtatgccacctcaagaggccggatatacgttcgcagtcgtgccaggtctgccatcaacagattgcttgcaatgaggaggagtccatata

SEQ ID NO: 6091 - DNA, 1533 bp, unidentified
  source 1..1533: mol_type = unassigned DNA; note = element_96a96ac
  misc_feature 1..2: note = core
  misc_feature 3..243: note = LE
  misc_feature 244..1416: note = CDS
  misc_feature 1417..1533: note = RE
  misc_feature 3..219: note = bridgeRNA
cttgtattataaagtagtagtttttagtgaccttttttaagatcatgtgctacactgcaagagatgctgtggattggtattttcctcctaccgttcgacggttataattaggctccaaccacagccctttgcagatttgttaatcagttagataccgccagacggtttatgttgaacaaggttacaaggcaaagtgttctgtggattacagcatcacaaatctttaccctggaggtattcatcatggtttgcgttggaattgatgttgcaaaggacaagcacgactgctttatcctctgctcagagggtgaagttctggccgatgtgttcaccgttgccaacaatcgggaaggctttgagaccttgctgcaccgtattcattcctgtacccgacctacagacaacataaaagtagggcttgaggctaccggacactacagctacaacatcctcgggttccttcttgagaaaggtatgccgatcattaaccctctgcacaccaatctctaccggaaaagcctcagccttcgtcaaactaagaccgaccggatcgacgcacggacgattgcatctatgctcatgtctgatgtggacctcaagtcctacacagatacagcataccacaacgaagagctaaagtcactcacaagataccgttttgagaaagtttctgagagagccaagctcaagcagtccgtctctcgtctcgtcaatatcctgtttccggagttggaaacgcttgtgccaacactacacatggcgtctgtctatgccatgctcagcgagtttcccggtgcaaagcagattgccgccgcccacctgacgcatttcaaggccgtgctgtctgatgcctcgaaaggtcgctatgatcgggacaaggccgttcagattcgtgaggctgccaggctctcaattggctccaatatgccagccaaggctcttgaactccaacacaccatccgcttgatccgcgagctggataaggagattgctgagatcgaagctgccatcaagacgatcattgacgagatggccccgccaatcctcaccattcccggcatcagctaccgcatgggcgctatgattttggccgagatcggtgacttctctcgcttcgactcgccggataagctcttggcttacgctggcctttctccgtccacctacgaatccggcaagctcaaagcgaccggcgcgtatgctcacatggagaaacgaggttcacgctacctgcgctacgcccttttcaacgccgccaagttcgtttgccattgggagccgtccttcgccgcctatctcgccaagaagcgggccgaaggcaagcattacaacgtcgcgatctctcacactgcgaagaagcttgtgcgccttatctttgctttacagacttccggcaaggcatttcaacccgcttgatttcattcagtccatacagctcagagcgcccggtcggacgctcggttttctgcacccttttgtcgtctgccaattcacaacttctcttgttttgggccttgacttttaatagttagt

SEQ ID NO: 6092 - DNA, 1342 bp, unidentified
  source 1..1342: mol_type = unassigned DNA; note = element_96a9d6d
  misc_feature 1: note = core
  misc_feature 2..69: note = LE
  misc_feature 70..1074: note = CDS
  misc_feature 1075..1342: note = RE
  misc_feature 1111..1340: note = bridgeRNA
taatgagatggtcaccccctccttgtgtgcggtacgctggctgggtgttttatttcagaggaaaccaacatgaaaaacgttacgcttattggtatcgatctcggtaaacactccttccacgtacactgtcaggacgaaatgggtaatgcccttctgcgcaaaaagtttacccgaaccagactgatggagtttttagccagttgccaatcagcgactgttgtgatggaagcctgtgcgggagcccattttatggcgcgtcggattgctgatttaggtcatgaggcaaagctgatttctccacagttcgtccgccctttcgttaagagcaacaaaaacgattttgtcgatgctgaggctatctgcgaggcggcttcccgcccctcaatgcgctttgtttcacccagaactgaagaccagcaggcaatgtctgcactgcatcgggtcagagattcactgatacgccaacgcgttaaaaccaccaatcagatgcacgcatttttgctggagtttggcatcagcatgccgcgcggtattgccgtaattcggcgtctggccgccgtgctggaagaaaatgacttcccgccttacctggtaagggttctgaacaggctccacagccagtatatttacctttgcggggaaattgatgaaatcgatatggaactgaaaacccaccttgcggaggatgaaaccgcacagcgactgctgaccattcccggcgtcgggccggtaacagcaagcctgttagccgcacgactgggtgacgggaaaaactatgccagcagccgtgactttgcggcgtcaaccgggctggttccccgccagtacagtacaggtggaaaaacgacactgatgggcatcagcaagcgaggtgataagaatctgcgacggctgctggtgcagtgtgcacgcgtgtttatgctgcggctggagaacaacccagggcgtctggcagagtgggttaaaaagcagcttgccagccatcactctaacgtggtggcgtgcgcgctggcaaacaaactggcacgtatagcctgggcggttacggcacatcaggcggcgttcagcaaataaaagagccaacgaaaaactcttcagctcagtgagttaacacgttactttctggttttgcgaagacagataattgatgacatgaacggcatatcggcctgctgatgaacctgatctaaaaagtggctctatgaagccgactctcttttaaggttcggcaggcgcgaaactcatcgtggcgcgagcatgaatactcactagacgccgaatagatttacgcaagcccatcataaatcaaaatctgtgttgcaaaaacgggggtgaccataga

SEQ ID NO: 6093 - DNA, 1175 bp, unidentified
  source 1..1175: mol_type = unassigned DNA; note = element_96b3fc3
  misc_feature 1..2: note = core
  misc_feature 3..203: note = LE
  misc_feature 204..1160: note = CDS
  misc_feature 1161..1175: note = RE
  misc_feature 6..189: note = bridgeRNA
cttgtatctagctctgacggagagtttgcaccgattctgatcggggcgccagctcgatgccgcctgggtggtcaacaccgtgcgttagccggagcggcgtgcccgattgttcgtcgcacgagcccgaacagtggcgggggccgactcggtcgagcccgaattcggacaaggacgggccgaggcgactttccgcgggaggaccgatgcggatcgggatggatgtcgcgaaggcggagctcgtggtggcggcgcacccgacgggcgagcggtggacggtggcgaacgacaagcgcgggatccgcacgctggtggagcgcctctgcggcgaggccccggagttgatcgtgctcgaggccaccggtggctacgagctgctctgcgtggcagccctcgccgccgtcggccggcccgtcgtggtcgcgaacccgcgccaagggcgggacttcgccaaagccacgggccagctcgcgaagaccgatcgcatcgacgccgatagcctcgcgctcttcgcggagcgggggcgccccgcggtgcgcctctggcccgatgccgagacgcaggagctcgacgctctgcgctcccggcgccggcaattgctcgagatgctgggcgccgaacgccctcggctgggacaggtcttcggcacggggaagcagcgcgtgaaaaagcgcctccaagcccacatcacgtatctcgagcgcgaggtgcggatcgccgacaccgacttgggcgacatggtccggcattcgcccgtgtggcgggaacgcgatgcgctccggcagcgtgtgcccggcgtcggacccgtgctctcgctcccccggctcgccgatctccccgaactgggccggctcgcgcgccgcgagatcgccaagctcgtcggcatcgcgccgctgagtcgcgactccggcacgatgcgggggcggcggttcgtccagggcggccgcgccagcgtgcgcgcggtgctctacatgggggccttggtggcaacgcggcggaacgcactcatttgcgcgttctatcagcgcctgctcgccgcggggaagccgaagaacctcgcgctggtggcctgcctgcggaaactgctcaccattctcaacaccatcgtccgcacgggccaacgctggtctcccgagtatgccgccgtcccaattccggcttgacattcaagacagttg

SEQ ID NO: 6094 - DNA, 1509 bp, unidentified
  source 1..1509: mol_type = unassigned DNA; note = element_96b5f4f
  misc_feature 1..2: note = core
  misc_feature 3..264: note = LE
  misc_feature 265..1488: note = CDS
  misc_feature 1489..1509: note = RE
  misc_feature 20..259: note = bridgeRNA
ctaatgagttttaggagcgggccctgatccggcaagctcttggtgggttggtagccaccggcggatgagcactgacgggccctgagcgtgtcgagttcttaatgaagatcgtgccaccgccggtcggccgggagagctgaatggctgatgggatgtcgtgcccgtcctctttgctggtgggcgtgagcactcggttcattaggccgctgatggttctcctgctggctacgggccctgtttcgttgtcgaggacgggagagcgccttgctgttcgtgggtgacgattgggctgaggaccaccacgatgtcgagttaatggatgccggcgggcgtcggctggccaaggctcggttgccggagggggtggtgggtgtcgcccggctgcacgcgatgatcggcgagcatcttggcgacgccgacgacgaggccgtgatcgtcaagatcgggatcgagactgatcggggcccgtgggtgcaggcgttgatcgccgccggctacacggtgtatccggtaaacccgttgcaggcggcccgctaccgggaacgtctggcggtgtccggggctaagagcgacgccgcggacgcgcacatgctggccgacatggtccgcaccgactcgcaccagctgcgcccggccgccggtgacagcccggacgcggaggcggtcaaggtcgttacgcggatgcacaaaaccatgatctgggaccgcgaccgggccgtgcagcggctgcggcacgcgctacgggagtacttcccggccgccctcgcggcattcgatgacctcgacgccgccgacaccctggaactgctgggcaaggcccccgatccggccgccgcggcccggctgagcctcacccagatcagcgcggcgctcaaacacgcccgccgccggggcgacatcaccgccaaagccgccgcgatccaggcagtactacgcgcgcagcacctgggccagcctgtcgtggtcgctgccgcctacgcggcgacgacccgctcactgatcgcgctgctgatcaccctcaacgagcaggtcagcgccctgcaagggcaggtcgaggcccattttggccggcacccggacgctgaggtcatcctgtcccagccgggactgggtgtcatcctcggcgcccgggtactggccgagttcggcgacgaccacgcccgctacagcagcgcgaaagcccgcaagaactacgccgccaccagcccgatcacccgcgcgtccggcaagaagaaaaccgtcatagcccgctacgtgcacaacgaccggctcgtcgacgccctgcactaccaagccttctgcgcgctacgcgtctcacccggcgcccgcgcctactacgaccggcaacgcacccgcggcatcagcaacaacgccgctctacgacaagtcgcaaaccgcctcgtcggcatcctccacggatgcctcaaaaccggcaccccctacaacgaaaccaccgcctgggcacaccacctcagccaaaccgcttgacatccccacgacatgggatgt

SEQ ID NO: 6095 - DNA, 1362 bp, unidentified
  source 1..1362: mol_type = unassigned DNA; note = element_96b62a0
  misc_feature 1..2: note = core
  misc_feature 3..78: note = LE
  misc_feature 79..1104: note = CDS
  misc_feature 1105..1362: note = RE
  misc_feature 1080..1350: note = bridgeRNA
cgatggggtggacgccccccgacggcatcaatgtgccaaagtggaggtgttgaaaacaccactgcaaaggaggcgtccgtggaagaagttatcacaatcgggctcgacttggccaagtcggtctttcaggcgcatggcgcggatcgggccggcggcgtggtcttccgcaagaagctgcgacgagaacaactgctggcgttcttcgccagccagccacgctgcctggtggcgatggaagcttgcgccagcgcccactattgggcgcgtgagatcggcggcctgggccacgagatccgcctgatcccgccggcctatgtgaagccattcgtgaagcggcagaagaacgacatggccgacgccgaggccatctgcgaggcggcgcagcggccgacgatgcggttcgtcacgcccaagagcgcgcaggcccaaggctcggccgtggtgttccgaacacgtgatctcctggtcaggcagcgcacccagctgatcaatgcgctgcggggccatctagccgagttcggcttcgtggtccggcaaggcgcggcgcacgctgcgaggctgatggatgtggtcgacgaccccaacagcgatctgccgatcgaggcgcgaccagtgctggccatcatcgccgcgagcctgcgagccctacagggccaaatcgccaagctggatgctgagatcgccgcacgagccaagcgcgatcctgtcgccagacggctgatgactatcccgggcgttgggcccgtcgtcgccaccgcgctggtggcgctggcgccagccgccagcaccttcaagcgcgggcgtgacttcgccgcctgggtgggccttacgccacggcagcattcgagcggcggcaaggagcgactagggcgaaccagcaagatgggcgagcgcagtctgcgacgactactgatcctcggcgccagcgccgcggccagggtgtcgggccgcgagtccgcgcctgccaatccatggctggaaagcatgctggcccgaaagccgcggatgctggtcaccgtggcgttggccaacaagatggcgaggatcgtctgggcgctgatggcgcacggaggaacctacagagctccggccgtggcggtctaaccgccagggtctgaggcgtcggagaggcaaaggtcagacgagaggtatggcgcaacggtcagaagacggggttgggaaaaccagtgaaatgtccgagcgccttgagcgcgccaagtcgtgctggacccgatccgcgatctccatacaggccagcggcgtgtgaacagccgcatcaacaggccggacacacggaagcacctgaaccgacagcgctagagatctcgaaaaacctcttgcctcgaccggggcgtccacaca

SEQ ID NO: 6096 - DNA, 1417 bp, unidentified
  source 1..1417: mol_type = unassigned DNA; note = element_96ba20c
  misc_feature 1..2: note = core
  misc_feature 3..123: note = LE
  misc_feature 124..1212: note = CDS
  misc_feature 1213..1417: note = RE
  misc_feature 1169..1364: note = bridgeRNA
agatggggtattcggcttttgccccatctctgatgcggaacgtgaagaggtgctgcgcttcgagctgatgctagaacgtggtctgtgcgaaacagccacaagcatcaggaaaggaagcgcagcatgaagcattatgccgggctggatgtgtcgataaaagagacctctgtttgcatagtcgacgagagtggcaagatctgccacgagatgaaggtggtcagccacccggacgacctctctgcggctctgacaggcgcaggattgcgtctcgaacggattgggttggaagcagggccattatcacagtggctgttcgaaggcttagcgaaagccggattacccacgatctgcatcgaaacacgacacgccaaagcctttctcaaggcacagatcaacaagacagaccgcaatgatgcacgcggcattgcgcaaatgatgcgcgtcaatctctatcgtccggtgcatgtgaagaccctgacaagccaaaagcgccgagccctattgacggctcgtaagctgttgcaaggaaaatcgatcgcaattgagaacgacattcgcgggctcctccgcaattttgggctcaaggttgggttggttggaaccgcaaaatttgagaatcggatccgtgtattcattgaggacatgcccgatatggtcgaaatactgacaccgctgctggctgccagacggaagatccgtgaagagtttacctgcctgcaccacaaggtgctggctatcgtcaggtacgacgcggactgcaatcgtctgatgacgattcccggtgttggccctattactgcacttgcctttgtcagcaccatcgacattccggcacggttccggaattcaagggcggtcggaccggcaatcgggttgacaccggtactcaatcaatcaagtgaaagtcgtcgtgttggccgcatatctcaatgcggtgataacatgatgcgagcactcctctatgaggcagcgcaagtgctgctcacccgggtcaagaaatggtcatggctgaaggcctgggccacgaagcttgcgaagcggagtagccaccgacaggctatcgtggcacttgcccgtcgattggctgttatcatgcaccgtatgtggagcgatggtaccgaattccattgggccggcgaaagtctgattggtcaccgaaaagagatcttaagttccgtccttggcgggaaaatgtccttcgcgggacgatgaatgaagcgagttcgtgatttccaccgtgccgacagcaattttgctgtcaggacgattctcagattgagccgctacattcttctgatcccatgctgggagggccatggtgccgatcccgaagagaagcgagaactcgcgaaagacattaaaacgccgaccgggcggaaggctcgaagacacttgactgcaacacgccgaatagaga

SEQ ID NO: 6097 - DNA, 1592 bp, unidentified
  source 1..1592: mol_type = unassigned DNA; note = element_96c4ded
  misc_feature 1..2: note = core
  misc_feature 3..262: note = LE
  misc_feature 263..1471: note = CDS
  misc_feature 1472..1592: note = RE
  misc_feature 12..282: note = bridgeRNA
ctattacaatatgtttagggttaaggcacggcagccagccgtgtctttttccatatcattgcctaagctacaataaggggagcaactggctgaccaatccctccttgggctttcatgtccgatattaagactgtcagccatccccttattgcggcgttcgatttgagcaggttgagccatagagttcgcgtcacccaatagattgaatcggcaatgagaaaaagatggattccggttgcaaattcgtattggaggtagatacatgaactctattggcattgacatttccaaaggaagaagtatggtggccgccatgcgcccctttggagaagttgtcatctcaccctttgaagtacatcacaccgacagtgaactgagtgagctggcaaaactgctcaaaagcctggacggtgagactcgtgtggtcatggagtccactgggaactaccatgcgccggtagcgcagctgctccatgatgctggactatatgtttccgttgtcaatgcaaagctggtgcacagctacgggaacaacgatttgaggcgtgtcaagaccgaccggaaggacgccgtaaagctggcgaactatggccttgaccgctggcttaccttgccaagatatattccggaggaaaacactcggctgttgctgaaaaattgctaccgtcagtaccggcagtattccaaggtacagactgttctgaagaacaatttgatttccttgttggacacggttttcccaaatgcaaaccgcctgttcaacagccctgctcgcgccgatggaagcgagaagtgggtagatttcgtagcggagttttggcattgcaagtgcgtttgcgagcgctccgaaaaggcattcgtgaacaagtaccagcggtggtgccgaaagcatgggtacaacttcagcgaggataaagcacacgccatttacgatgaagccagcgggcatattggcgtcatgccgaaggctgaaaccacgaagctgcttgtggagcaggctgtatctcaactcagaaccacttcggctgcgcttgctgctctcaaacaggaaatgcactctctggcctctcaactgccggaatatcctgttgtcatggagatgtttggtattgggccgactctcggcccacagcttatggccgagattggcgacgtgcgccgtttttactctaagaaagcccttgtggcttacgccggcatcgatgccccgcccaacgactccggcgatgtaatcggcaggcacaagagcatgagcaaggtcggtgcatcatctctgcgccggaccctattccttgtcatgagcatctatttgcagacatcaccaccggatgaaccgatctaccagttcatggatagaaagcgaaccgagggcaagccctaccgcgtctacatgatggcatctgcgaacaaattcctgcggatctactacgctactgtgaaagcttacttagaatctttagaacagatctgaccttatcatatcgctctggttggccgccgtttcattttgagatgcgcagcggcctgattaggcgcgccatttttctattttcagtattttgattttccccccttgacaaaacttagcaggt

SEQ ID NO: 6098 - DNA, 1363 bp, unidentified
  source 1..1363: mol_type = unassigned DNA; note = element_96c76b3
  misc_feature 1..2: note = core
  misc_feature 3..74: note = LE
  misc_feature 75..1103: note = CDS
  misc_feature 1104..1363: note = RE
  misc_feature 1079..1351: note = bridgeRNA
tgatgatgtgaccgccccccgacggcatcaatgtgccaaggtgggtctgcgatgatccacaaaggaggacggtcatgtcggagactatcacggtcgggctcgatctggcgaagaatgtgttccaagcccacggggcagatggctctgggagagcggtgcttcgcaagaagctgcgacgggatcaggtccttgagtttttcggacggctaccgtgctgcgtcggtgcgatggaagcctgtggtggcgcccatttctggggccgggaaatcggcaagcttggacatggggtgaggctcatcccgcctgcctacgtgaagccctttgtaaaacggcagaagaacgacgcggcggatgccgaggcgatctgcgaggaagcgctgcgcccgacgatgcggttcgtgcctgtgaagagcgaagagacgcagggcgcggcgatggtgcttcgcgtgcgcgagcttctgatccggcagcggacccaagccatcaattcacttcgagggcatttgagcgagttcggacagatcgtgccacaaggggcggccaacgcgacgaagctgattgcaatcatcgaggatccagaatgcgatctgcctgccgacgccatccctacgctcaaggttctggtcgcggcactgacgcagttggaggcagagatcggcaagctcgataccgagatcgcccgtcgcgccaaagagaacgaattggcgcggcgtctgatgacggtgcccggtatcagcccgctgatcgcgacggccatagcgacccttgcgccgccgcccgagactttccgcaaggctcgagattttgcggcctggctagggctcacaccacgacaacattccactggtggcaaactgcggctcggagccacgaccaagatgggcgaacggtccctgcggcgcctgctgatcattggcgccaacagcgtcatcatcaagcgacatacccatgctgcagcccagccaggcacatggctgggcgggatgctgtcacgcaagccaccaatgctggtgcgggttgcgctggcgaacaagatggcgcgcatcgtctgggctctaatggcccgcggtggcgtttcccagtctccggcctcggcggcataaacccgctgtaggtcgcgaggacttcggagcgcaagagggcaaggagacgtttggcgcaacagtcgtgagacaggatcggaagaaccagtgtgcaacagagtgccatcgagcacgcggctttgatctggacccgaccttcgaacaccatacgggcccgcggcatatggaacgccgcatcatgaggccggatacatgtcagcacccgatgacgcgccaaaatcagctctgaagaatcctcttgcgcaaggggcggttataca

SEQ ID NO: 6099 - DNA, 1484 bp, unidentified
  source 1..1484: mol_type = unassigned DNA; note = element_96c803d
  misc_feature 1..2: note = core
  misc_feature 3..245: note = LE
  misc_feature 246..1439: note = CDS
  misc_feature 1440..1484: note = RE
  misc_feature 11..217: note = bridgeRNA
cttgtatgatacagttaagattttgacaatttaaaaagaagcctttatcctaaaatcaaaggatagaggtttcggcaaatcccttgagcgttagggctcgtacatggagtttgcttcctctgtctttttgtttagatccgaataagttagttgagcattatggctcgtatcaaaaacaaggctggattacaaaaggatcaagagggatgaaatctattctcattaattcttaatttccaaccaaaatggaaagctactacctcggcattgatgtgggaaagtttgaacatcaagccacgctcgtcaatgagcaaaaagaaatggttggccagtcgataagatttgccaataatatagattcattcactaatttaattgatcaaattaaaaaaggaatccctgaaaaatcaaacattcaagcaggcatggaatctactggacactactggctaaacctggatgcttttctaaaaagaagcgggatagaaaatgttcaaattatcaacccgattgaaactcaaaagatttcaaaaaccagaatcagaaaagttaaaaatgataaagtcgacagctttgagattgcaaagattgtttgcgacagaaaaaatgctaccgctattaaacagaatgaaaaactggttaaacttaaaagacttactcggttttgcgacaaaatgaaaaggcaggagaaatttatcaaaagagaaattgtaaatcttttggaggtagtttgccctgaatttgagggattattcaataatatttttctcaaaaccccactttcaattttggaaaagtatagcgatctaagaaaattggggcatgtcaaaaaagaagcttttgctgagcttttaaaaaaaaattcacgtggcagaattggagaagctaaatctgaattgattttgcaaaccatcaataattccgttggcaaaaactattgggatgaattctcggtaatgcaaattaaaatgcttttggataattttcgtttaatagaaaagcaggtcgaccaacttaaaaaagaaattgaaaaattcagcgatcaatttgaagacaaggtttatgtaaattctgtagtaggtgtgtcctcattttctgctgctgtgtatttggcagaactgggagatattgaaagatttaaaagtaaacatcagttgaccgcttttgccggcattgacgcttccgtttttgagtcaggggagtacaaaagaaaacaaggcaacagaatatccaaaagaggttcaaagtaccttaggaagcaactctactatgccgccaagactgccataatttttgatcctgaaatgaagaaattctatgagaaaaagaaaaaagaaggaaaacattacaatgtaattatgattgctgtggctagaaaaatattgatgcgtatttatatcgttttgaaacaaaaaagactttacgaagtcatatcataaagtcttgtttgccatcaaaatggacttgactgtatcatagttagt

SEQ ID NO: 6100 - DNA, 1164 bp, unidentified
  source 1..1164: mol_type = unassigned DNA; note = element_96d0aaa
  misc_feature 1..2: note = core
  misc_feature 3..204: note = LE
  misc_feature 205..1152: note = CDS
  misc_feature 1153..1164: note = RE
  misc_feature 12..210: note = bridgeRNA
cttgtcttatgaggatggcggcctttctgcgaggataggccgccgccgacgagccgcaaactcgccggcggcgggaagggacggatcgcaaaaccgctggtcgtgatggaccgagctagagtctgatcgcccttctcttttcctgtggcctgaacggatacgtgggcttgtgggcccgcatgacaagcagaggacctggaaaagatggaaaccaatgtagcccagaatctcggcgtcgacatctgcaaagcgacgcttgatgttcacctgcacccggcgggcatcgcccgccagttcaccaatgatgccaaaggcctcaatgccctgctgggttggcttggagatcatcacgtcacccgcgtcgtcttcgagccgactgggcgctaccatcacggcttcgagcggcggctcggcagcgccggcctgtcactggccaaggtcaacccgcgccaggcgcggcgcttcgctgaagcgatcggctgcaacgccaagaccgatgccgtcgatgccgagatgctggcgcgcatgggcgcgttgctcgagttgccgtcgaggccgatcgccagcgagatcctcgacaacatgaaggagttgcaggtcgccaggctcggactgatcaaggaccggactgctgcaaagaaccgcgagcacgtctgccgatcgtcgctgctcaagcggcaggcagcgcagcggcttgcccaggtcgatcgtcagatcgacgcgatcgacgccgagctgaaagccagcctctcccgcgagccggacctggcagcgcgcttcgacgtcctcgtctccatcccaggcattggcgagatcaccgcgatcgccatgctcattgacatgcctgagctgggtactctcgacagcaagcaggtcgcatcgctggccggactcgcaccaatcgctcgcgacagcgggcagcatcgaggcaagcgtcacatccgcggcggacgcgccgaactgcgacatgccctttacatgccggcactcgtcgcaacccggttcaatcccgacctgaaagccaaatacaacgctctcgtggccgccggaaaaccgcccaagcttgccatcacagccgtgatgcggaagcttgtcatcctcgcaaactcgctgctcaaggcaggccgaccatgggcaccaaaacctgcttgatcataacggata

SEQ ID NO: 6101 - DNA, 1393 bp, unidentified
  source 1..1393: mol_type = unassigned DNA; note = element_96f8bdb
  misc_feature 1: note = core
  misc_feature 2..95: note = LE
  misc_feature 96..1127: note = CDS
  misc_feature 1128..1393: note = RE
  misc_feature 1174..1390: note = bridgeRNA
taatgtaatgaaccatccccacccctgctaggcatttgcattttctctgcttagcacccaagttgaaagtctttaacccgggaatggagattgacatgacgattagtgtactaggtattgatattgcgaaaaacacgtttcaacttcacggcgcagatagttctggtaatacagttttaaagaagcgcctgtcgagaaacaaactttcagcctatgtggccaatttaccacgaagtctgattgtcatggagtcttgcggcggggccaattactgggcaagggtgtttcaaggtagcggacactcggtaaagttaatcagcccgcaatttgtgaagccctttgtcaaaaccaacaagaacgatgcgaatgatgcccaggcaattgtggaagctgcaagcaggccctctatgaatttcgtgcccatcaagcaggttgagcaacaagatatacaatctttgcacagggtccgcagccgagtagttaaaaacagaaccgccttgattaatgagatcaggggattatgtttagagtatggagtcatagtcgctccaggggcggcaaaggttaaacggtctctgtgctcaatcatagctgatgaagcaaacgaacttacacagtcctccagagaatgtatgaaagatctttgcaatgagctcatagagaatgaagctaggttgaagaaactggataaaaaggtccggcagatatgccaacaaaatgagacctgttaccgcctattgaaaatacctggtgttggtgaattaacagcaacggctattgttgcggctgtgcctaatgcgaatgaattcaaaaatgggcgccatatgtcggcctggttagggctggttcccaggcaatcgtccagtggtgataaacaggtgttgctgggtattagtaaacggggtgacaggtacttacgcaccttgctgatacatggtgcaagggcggcattaagccactacaaaaaaaccgacaccgattatgggcgttggttggttgagagaaaatcaacgctcagctttaataaggcggctgttgcgctggctaataagaatgctcggataatatggtctttgcttcataccggcgaagaatttaatagtaatattcaaatggcctctgcctgatactcaatatctggcagattcttttaattaaaacggaaaaatatcccaagtttgctgtagttgatttcaatgatggctaataggtcaaaccagctcttctaaaacctgtaacttgtcacggccctatgaggtcatggtactgatgaggaagaagagtgcgaatttacatcagggcacaagctttgcttggaagccgaatatatgaccgcaacttagacgtatagcaataattgaaaatcggcttgcaaaaggggatggttcatata

SEQ ID NO: 6102 - DNA, 1329 bp, unidentified
  source 1..1329: mol_type = unassigned DNA; note = element_96fb744
  misc_feature 1..2: note = core
  misc_feature 3..138: note = LE
  misc_feature 139..1074: note = CDS
  misc_feature 1075..1329: note = RE
  misc_feature 1096..1327: note = bridgeRNA
ttaatgagatggtcactccctccttcccagtactatgctgaggacaggctttcattcggagaaccatcatggaaaacattgcgcttattggtatcgatctgggtaagaactctttccatattcattgtcaggatcatcgtgggaaggccgtttaccgtaaaaaaattcacccgaccaaagctaatcgaatttctggcgacatgcccggcaacaaccatcgcgatggaagcctgtggcggttctcactttatggcacgcaagctggaagagttagggcattttccaaagctgatatcaccgcaatttgtccgcccattcgttaaaagcaacaaaaatgacttcgttgatgctgaagctatctgtgaagcagcatcacgtccatctatgcgtttcgtgcagcccagaaccgaatctcagcaggcaatgcgagctctgcatcgtgtccgtgaatccctggttcaggataaggtgaaaacaactaatcagatgcatgcttttctgctggaatttggtatcagcgttccgcgaggtgctgccgttattagtcgactgagtacccttcttgaggacagtagtttgcctctttatctcagccagttactgctgaaattacaacagcattatcactatcttgttgagcagattaaagatctggaatctcagttgaaacgaaagttggacgaagatgaggttggacagcgcttgctgagtattccctgcgttggaacgctgactgccagtactatttcaactgagattggcgacgggaagcagtacgccagcagccgtgactttgcggcggcaacagggctggtaccccgacagtacagcacgggaggtcggacgacattgttagggattagcaagcggggcaacaaaaagatccgaactttgttggttcagtgtgccagggtattcatacaaaaactggaacaccagtctggcaagttggccgactgggtcagggagttgttgtgtcggaaaagcaactttgtcgtcacctgtgctctggcaaacaagctggccagaatagcctgggcactgacggcgcgacagcaaacttacgaagcataaaggcagaaatacaccagtttaaacaatcattcatctggttttgcgaatactgatattgatgatactaacggcccaccggcctgttgaggaacctgtaaaacggaaaggctcattgaagccgtatattttctggaggttcatcaggcgcggaactcatcgaggcgcgggaataaaatcccattcagacgccggatagattcaagcaagccaacttgtcgtcaaaatcggtgttgcaaaaacgggagtgaccataga

SEQ ID NO: 6103 - DNA, 1377 bp, unidentified
  source 1..1377: mol_type = unassigned DNA; note = element_96fc12f
  misc_feature 1..2: note = core
  misc_feature 3..84: note = LE
  misc_feature 85..1119: note = CDS
  misc_feature 1120..1377: note = RE
  misc_feature 1195..1316: note = bridgeRNA
taattggatggactcgcccaagccgaggcgtctgcgcgccacggtggcattcttatagaagccaacgacagcgagggcgaggccatgaaaaagcatacgacgatcaaccagtctttgtcagccgaggcggcggcatgcaccacagttgcggtggatcttgccaaaagagtctttcagctggccggggaggatgccctcggtcaggtgttgttcgaggatcgaatcaagtcacgtgaggcctttcaggcatttcttcataagcttccagcgagcgtgacggtgttggtggaaaccgggccaggcgctcaggcatgggcgcgattgctgcaaacgcagggtaatccagtccgcatcctgccggcccagcatgttgccaatcatcgcagcggcccgaaaaatgatcgcaacgatgcattggctatcttgcgcgcaggccgcgatagcaagatctcagccgtaccgctcaagagtgcagcggcgctggcgatgcaggctctgcacagggcccggcagggatatgtacggcgacgcactgcggtcggcaatcagatgcgcggtttactgctggaacacggtgtggccatggcgcagggtgaaatagcgatcagccagctcgagcctcggatactggaagatgccacccagccgttgcccgatttgctgcgcgaactgatcgccgaactgctgggcgaatggagtcaactgggcgaacgcgtcaacgtgctgaccggtcggctggaaacagccgcgaaggcggacgagacggctaagcggctgatgacggtgcgcggtgttggcccgatcatcgccacggcgctgttggccaagcagaccgagcctaaacgctttgccaacgcccgcttgttcgccgcctacttcgggttggtgcccagtcagcacagcagcggggagaaggtccggctgggcaagatgagcaagcatggcgatgcttacttgcgcagccggacgaccaacgtctcctgcgttggatatcccgtctgggtcgcaaggaggcggcggtgcgattggccaaccgcaacctgcgcatcctctgggtgctactgcaaaacgaccagacttatcgtcgccagccgggcactgaccaggaggctgcgatgagtcactgataacagagttctgccaccggggcgttaagccgctccaacccatgctaagaacattgaccccaggtcagaccgtcgcggattgatgcctaagctgctactggcccttgaggccttactgtaatcggcataccgcgagcttacccaatgttggccagaagccgttgaaggcttcctcgaacaggcctcatacatagatgcaaccgggtagcagtgttcaaaagcgggttgaacgcgggggcgagtccataca

SEQ ID NO: 6104 - DNA, 1451 bp, unidentified
  source 1..1451: mol_type = unassigned DNA; note = element_97024a7
  misc_feature 1..2: note = core
  misc_feature 3..128: note = LE
  misc_feature 129..1172: note = CDS
  misc_feature 1173..1451: note = RE
  misc_feature 1204..1403: note = bridgeRNA
agatggggtattcggcttgagcctcatcttcacacgccggtgggctgtagaggggtgctgcgcttcgagcgatgatagaacgtggtcatgtttttcaacagccacaagcatcggaagggaagcgcagcatgaaacactatagcggcctcgacgtatcggtgaaagagacgtcgatttgcatcattgatgaaaccggcaggatttgccgcgagatcaaggtggtcagccatcctgacgacctggtggccgtgctacgagatcctgcctggaatttggagcgcatcgggcttgaagcggggccgctgtcgcaatggctgttcgaaggcctcgccagggccgggctgccggtgatctgcatcgagacgcgccataccaaggcattcctgaaagcccagccgaacaagaccgaccgcaacgatgcgcgcggcatcgcgcagatgatgcgggtcaacctgttccggcctgtgcatgtgaagacgctgaccagccagaaacggcgggccttgctgacggcgcgcaagctgctgcaggagaaggcgatcgcgattgagaacgacctgcgcggcctgctgcgcaatttcgggctgaaggtcgggattgtaggcgccatgaagttcgaggagcgcatccgggagctcgtggatgacatgcccgacatccgggaaatcatggagccgttattggcggcacggcagaaactgcgtgacgaattcacccgattgcacaagaaggttgtcgacatcgcgcgcgatgacaagacatgtcgactgcttatgacgatcccgggagtagggcccattgtatcggttgccttcaccagcacgatcgacattcctcagcggttcaggaactcaaagaccgtcggcgcggtattgggtctgacacccaggatgaacgagtccggcgagagcaagcgcgcggggaaagtctcctgttgcggagatggcatgatgcggatgctgcttcatgaagcggcgcaaaccctgctctcggtcgtcaggaagtggtcatggttgaaagcctgggcgatgtctgtcgccaggcggcgagggcgggccaaggcgatcaccgcactggcgcgcaggctggctgtgatcatgcaccgcatgtggagcaacggcacagagttctgctggacacgggcggagcttgcgggcgcatcacacgcgtgatcggccgcgtttccatcaatactgagattaaccagttccgcggtccgcggacaaatgtccctcgcaggacgatgagtgaagcaagttcggccctcccctggtatcgatcggatcgaccgatcagaacgcgtgggagattgttctgcttcattcttctgaccccatagtgggagcgccgactggcgcatcccggagagaagcaagaccctgcgaaggcccttgacctaaccgccaacaacaagatcgaaaatcgcttgacctcaaccagccaaatagaga

SEQ ID NO: 6105 - DNA, 1410 bp, unidentified
  source 1..1410: mol_type = unassigned DNA; note = element_970c685
  misc_feature 1..2: note = core
  misc_feature 3..95: note = LE
  misc_feature 96..1139: note = CDS
  misc_feature 1140..1410: note = RE
  misc_feature 1180..1405: note = bridgeRNA
taatgtgatggactccaccctcctgataacggcatcattgtgccaagcgtgccagattgggctggcaagcggtaaagccaagagggggagtcactgtgaatgctaacgcaaaagtagctggcttggatatcgcaaaggaagtgttcgtcgcggtagggttggatcgtaacggcaagaccgtaatgaagctcaagatgaagcgcagtgaggtactgccgacgttcaggaagctgcagccgatggcgttaggtatcgaagcatgttcgggatcgcactactgggcaagggagctgaaggcactgggccacgatgtcaagctgatcgctgcgcagcatacgcgggcttttgtaagtggcaataagaacgatactaatgatgccgctgcaatcgccgaggcccgctcgaggagttcaaccaaatatgtgccgattaacacgccggcgcagcaagatttgcagatgctgcaccgcgcacgtagtgccttgatgagcgagcgtatagcaatgattaaccgtattcgtgcgtttgccggagagtacggccgggtgttcgctgcaggggttgcgaagttcaaggctgggctgctggcatggctggcagatcctgataatggtttgtctggcatggcattggcgacgttccgggagctcaaggagcagctcgacgacaaagagcaaaggatgctggcgtacgagcgcaagctgaaccaggctgctaaatcggaagtggcgcagaagctcatggaggttccaggagttggtcctctcactgcaacagcagtcatggccagcgtggcggacccgcatcatttccgcagcggccgagactttgcagccaatctcggccttgttccgcgagagcacagtagtggtggcaaacagcgcttgtacggtatcactcgtaaaggtgacagccacttacgcacactgctgatccatggcgcgcgaagtgccttgcgttgtgccggaaacaaaacagacagccaactgcgttgggccagcaaccttgcgcaacgtcggaacttcaacgttgcctctgtagggctggctaacaaaatggccagggtaatctgggcgatattagctcatggcagaagctatgttccggtctggccgaacagcacgaccagaccggcctgaggaaacaacaacttgtaaccgattgaaggagtaacaccgccaagtttgcgatgatgaagaacgaatgatgccaacaggtcggaccggcgtcaggtgaatccgttgaccgtacgggccttcaaggccggcaccctataaggatcctgacgcgcgtatcacatcagggccagagcacgaagagcgctcaacacacaggccgaatagatacacgcaattcttcctaaaggcagaaattcaatcttcttcttgcaaaacgggtggagtccataga

SEQ ID NO: 6106 - DNA, 1359 bp, unidentified
  source 1..1359: mol_type = unassigned DNA; note = element_970c7f8
  misc_feature 1..3: note = core
  misc_feature 4..43: note = LE
  misc_feature 44..1105: note = CDS
  misc_feature 1106..1359: note = RE
  misc_feature 1121..1346: note = bridgeRNA
tgatggtatggacggcccccgcacccggcaactgagtgccataatgcggctgtactcggccgcaaaagaggggaagccgtccatgagcaagattgtcacaatcgggttggatatcgcgaagcacgtcttccaggttcacggcgttgatttcgtgggggagatcgctctccgtcgtaagcttcggcgatcggaagttctttcgtttttcgaagggctggagccgtgtctggtcggcatggaagcgtgtgcgacgagccatcactgggcgcgccagttggtggccctggggcatcaggttcggctgatgccaccagcatatgttaagccctatgtgaagcgtcagaagaatgacaccgccgatgcggaggcgatctgcgaggcggtgacacgaccgtcaatgcggttcgttcccgtaaaggatgagcaacagcaggcggttctgatgttgcatcggagccgcgaacttctgatccgtcagagaacgatgctgatcaacgcgcttcgggcgcacatggccgaacttggcattgtcgtcaggcaaggggcgaccggggtcgatacgttggtaacgttcgttgaggacgacgaacacgatatgattccaccaatcgctcgcacggcgcttttaccgctcgtcgatcatctgcgggatgttcagagacggattgctaagcttgatcacacaatcatcgagtggcatcgctcaagcgagcagagccgccggctggcgacggtccccggcattggccccatcaccgccagtgcattggtcgccacgatctcggatccaaccttattctcttccggtcgccaacttgctgcgtggcttggtctggtgcctcgccaaaattccagtggcggcaaggaacggctcggtgggatcaccaaaaaaggcgatccttaccttcgtcggctgttggtgatcggcgcacatgcggtactgcggttcgtccgaaaaagtaaggcaaccactatgcaatgggcggccaggctacttgatcggcggccttacaaactggcggcggttgctcttgccaacaaactggcgagaattgtttgggcagtgatggtgaggaatgtggaatatcggccgcaagggacataattggccgcaggctgaacagattggtgaggtgctgacgatgtgatgacgaagcggtcagagaaccggagattggacaaacccgacattggtctcaggtgcccttcgagcacgatgacgtgaatgggatccgatctcgcggacttcatcagggccagcggtcatgaggaccgcgcaaataggccggacacatgagcgcaccagaccggatcgtcaaaatgtcaaaaacaccttgccaaaagggggccgtccacaca

SEQ ID NO: 6107 - DNA, 1191 bp, unidentified
  source 1..1191: mol_type = unassigned DNA; note = element_970cf64
  misc_feature 1..2: note = core
  misc_feature 3..292: note = LE
  misc_feature 293..1045: note = CDS
  misc_feature 1046..1191: note = RE
  misc_feature 12..209: note = bridgeRNA
cttgtcttatgattttggcagtttttatgcgaagctggaacagctgcgcagcacgtcatttatgccaggcagcggcggaggttggaccgttcccctcttggtcgttgaggaccgtcgctgagtaaggtcacctccgtctttttttgaaacctgaacggatacttgggctttgggcccgcatgacaagacaaggttaggaagagacacatggaagataccattgggatcgacatttcgaaagacacattggacgcttattggttgtcctcgcgagagcacaggcagttttgcgatgacaaagctggcgctaaggcactcgcattttgggcgagaaaaacagaagtttcccgcgtcatttttgaagcaacaggcatttatcacaggtgcatcgaaacgggcttggctcaacacgggatcagctttgcacgggtcaatccgcgtcaggcccgccggttctgcgaaggtgagcgatttggtcgccatcggttcaagactaatcgcgaacggccggctggccaaaacggaccgggtggacgctgcgctattagccaaaatgggcgtacttctggaattgagagcagaccaacccaaaagcgaaacacttcatgatctcaagcagctggcaacagccaggctggcattgatcaaggaccggaccgcagcaaaggcacgacttgccgcaacgacgcacgtcctgccttcccagcagatcaaacgacgtctgaaacagatcgaacgtgacttgtcgcaagttaccgaggcaatcgatgccatcgttgcggcagacaaagatctcgctgcacgcgccgagattcttacaagcattccgggcatcgcaaaggtaacagcctgtgcgatattaaccgaaatgcccgaactcggacatttgagtggcaagaaagcagcggcgctggcgggccttgcacccatatcgaggcaatcgggaaagtggcaagcaagaaacgcatccagggcggtcgcgccagcgtcaggcgcacagtctatctgccagcggttgttgctacacgcttcaatccagacatgaaggcaaaatacgaacatctgatatcgactgggaaatgcaagaagctggcgatcacagccgttatgggaaagctgattgtcaccgcaaatgcccttctacgggatcagcgaaaatggggcgaatatccagcttgaccaatacggata

SEQ ID NO: 6108 - DNA, 1367 bp, unidentified
  source 1..1367: mol_type = unassigned DNA; note = element_9712cb4
  misc_feature 1: note = core
  misc_feature 2..76: note = LE
  misc_feature 77..1108: note = CDS
  misc_feature 1109..1367: note = RE
  misc_feature 1137..1355: note = bridgeRNA
tactgagatggtccttcgctttcatcctcatcttagttgtgaggatttgtaggcgacttcaaggaggatcatcgacatggagattcgttcagtaggcattgatcttggcaagacgacctttcacctggtggctcttggcgataacggcaagctgctaataaagaagaaattctctcagaagcagttgattgccttcaccgcgaacatgcagaccagcctgatcgggatggaggcctgctccggggcgcatttcctgggccgtactttacgcgaacagggccatgatgtgaagctgatcccggcccagttcgtgaagccgtttgtgaagtcgaacaagaacgacttcattgatgccgaggcgattgctgaagcggtcactcgggagaacatgcgattcgttccgatcaagacggatgaccagttggatctgcaggcactacatcgtgtgcgagatcgcttgatcgctcgacgaacctctgtcatcaaccaactgcgagccttcctgctggagcgaggcgtcgtgttcgcgaagagcccggccaagctgcgcgagtgcatccccgagacccttgaagacgccgacgaaaagatctccccgaggatgcggaacctgctggctctgctttgggaagagtggaaggatcttgatcagcagctggaagacatgaaccatgaagtagaacggatcgcttcgagtgatccggcatgccaacggctcaggcagatccctggcatcggccccctggtcgcaaccgcgatcgtggccgccatcggcaacggcgccgccttccgcaaagggcgtgactttgctgcctggacgggtctggtgccgaagcagcattcgactggcggcaagaccaagctggccggcatcagcaagcgaggtaatcgctacttacgcaagatcctcattcatggggcgcgctcagtggtgtttcgatccaggcgagagcgcatcgcgatgggcgagtggatgaacactcttgagaccagatcttcccggaatgtgctcatcgtcgccatggctaataagctggcaaggatcgcatgggccgtgctatcgagtggccaggattatcgggcagtgcaagaaccaatcgctgcctaaagcaaacagcacgatcaagattgagttttcccaccgaggtctgcattggataagcagtgatgaaagaacagtcaaaacggcgtacctgaaacctgttttctcgaatggcccttatacggtcgggggatttcgtaggacagggacgcggcgtatctcatcatggccaggagaatcatctccacccaaaggccggatacattaacgcagactttctctcgtctctatacttttcccttgcattcaggcgaaggaccataca

SEQ ID NO: 6109 - DNA, 1194 bp, unidentified
  source 1..1194: mol_type = unassigned DNA; note = element_9719f99
  misc_feature 1: note = core
  misc_feature 2..225: note = LE
  misc_feature 226..1188: note = CDS
  misc_feature 1189..1194: note = RE
  misc_feature 28..199: note = bridgeRNA
cgcttgtatgctgaggcccgacaggtcagaaaggggcttgtcggggtggagggactaagcccgcatctggccaaaggcacagaccgtaggagatatcgtcccacctctcaccgtagcgcctataaggaatctatcggctcgaagctcgagaccgacgatttatgcaagccagcgcctgggtgagccccgacaagctgtggatcacactaactcggaggttctgtcatggcaatgcgcatgcaaccgctactcatcggagtcgatgtcagcaaagcaaaactggatatctgcgaggcaccggggcagccgctgcggcagctgtgtaatgagcgcagcgcaatccgcgcctggctcaaggccttgccggggccggcctgtatcgcggtggaggccaccaacaccttccatctgctgctgctcgaagaggcgcaccgcctcgagcacaccctgtatgtgatcgatggttaccgtcttaaccgctaccgcgagagcatcggcgggcgggccaagaccgatgctagtgatgcgcgcctgctgcgacgctatctcgaacgcgagcaggcagaattgcgcccttggagcccgccaccgaaaggctatgtctgcatccagcggctgctgcaccggcgcgccgtactggtcaagagcaaggtggcactcgagcagagcctgcgcgaattgcctgagctcaagcgctcggccaaggtgcttatgcgccaactcacgcgcctcgataccctcatccaacagcgcctgcgccaagcgctcgagcaacaaggctggctggctgagctcaagcgctgccaggctatcgagggggtggggccgctcaccggcgccgccctggtcatggcctttaaccgcggaccctttaaaagcagcgatgccttcatcgccttcctcggcttagatgtccgagtccgtgactccggacaatgccgcaaacggagaaagctcaccaagaagggcgacccggagctgcgccgcctgcttcatctcgctgccatgcgtgcctgtcacacgcccgcctgggaagccttctaccaacgctatctggaccgcggactgaccaagatccaggcgcttgtcattctcgccaggaaacttgcccgcatcgccttcgccctgctcaagaatcaaaccacctaccgcaccaatgccctacgggagacttgtttaacgacatagaatctc

SEQ ID NO: 6110 - DNA, 1512 bp, unidentified
  source 1..1512: mol_type = unassigned DNA; note = element_9725171
  misc_feature 1..2: note = core
  misc_feature 3..79: note = LE
  misc_feature 80..1054: note = CDS
  misc_feature 1055..1512: note = RE
  misc_feature 1247..1499: note = bridgeRNA
tgatggggtggatggccccctcacggcatcgattgtgccaaagttgggtgtcaggaacaccaacggacgggagccatccatgacagaggttacaacgatcgggctggatttggccaagacggtattccaggtgcacggggttgatgcatcgggggtggtgagggtgcgtcgcgcgctgcgccgttcgcgggttttggcgtttttcgccaagctgccgccttgcctggtcgggatggaggcatgtgcgacggggcactattgggcacgcgagatcgccaagctgggtcatgaggtgcggctgatcgcgccggcctacgccaaggcctatgtccggcggaacaagaacgacgcagccgatgccgaggcgatctgcgaggcggtgagccggccatcgatgcgctttgtcgcgatcaaaagcgagacgcagcaagcggcggccggcattcaccgggtgcgcgagatgctggtgaaacagcgcacgatgctgatcaacaccttgcgcgggctgatggccgaatatggcatcgtcgtcgccgagcgtcctcgactcgtcggcgaactggtcgccatcctggccgatccggcggacgagcgcatcccagcgccgctgcatgacggcctgatggcgctggtggaaacgctgcgcggtctcgagcaacgcatcgagcggatcgagcagcagatcgtcggctggggccgcgacaatgcgacctgtcgtcacctgatcaccatcccgggctacggaccgatcctgtccacggcgatggcggcaatggtgatcgaccccgcggctttcaccagcgcgcgacacttcgcggcatcgctcggcctcgtgccgcggcaggagggcactggcggcaaggtcaagctcggtccgatcagcaagcgcggcaatggctatctgcgccggttgttggtcaatggcgcaatgtcggtgttgtgcagcaggcgcgccaaagaggatccctggctggcgaaattgctcgaaaccaaggagcgcaggtcgtcgcctgtgcgctcgccaacaagatggcacgcatcgcctgggcggtgatgatgcgccaggaggactaccgcaaccggcggcacgatcagtcgtgcccccgacctgaacgagcctggcgccgtgctcaccgccgtcaagaccgctgcgcgcacgcctgcggcggtggccttcggccagtcttgactgcggctgcgcgcagcgccactgcggaaccaggtcgggacggagaaacggctcgctgatcgaacagagaaacaggacttgagcacacaacgacttgcgagggtgaagacgcgtgatggcatcgtcggtcgaccgacggatcgagggagacctatccgaggacatggggcaacgcgaccccgcgagcctgatcaggcctcgatccacggaacccatcagggcctggggcctaccgccgcgccaacaggccggacacatgaccgcaagcgaccttcggttccagtacgcgaaattctccttgcgagccgggggccatccacaca

SEQ ID NO: 6111 - DNA, 1510 bp, unidentified
  source 1..1510: mol_type = unassigned DNA; note = element_972ac3c
  misc_feature 1..2: note = core
  misc_feature 3..247: note = LE
  misc_feature 248..1480: note = CDS
  misc_feature 1481..1510: note = RE
  misc_feature 47..225: note = bridgeRNA
cttatattaggtttgttgcatgtaatcatagatcaggtgactttatggaaaccgatttcacagagcttgctggtatgaggaccacccttccccgattccgtggaggatcaaaaagagaccgtcccgcccagcaaaagaacggagccaaaggttcaatagaaagttgtcccttggaggaccgatataaggcgaactttccgttcacggcacttggaattggcaatacacaaaacaggaggatgagaaattgcaacggtattacttgggagtggattgggccgacaaaagccatcagctgtacgtggctgatgagagcgcaagaaaaataaaagagctggaagtccaacagacccctgaggagatggctgagttggggtgctggctcgatgagagccggagcaacgggctcgagctttgggcagccattgaaaagccccacggtcggattgtggattttcttttggatcatggcgtggtggtctatccggtgaaccccaaggcgctggatcgggccagggaccggtttcgcatgagccagtccaagagtgattgtttcgatgcctatgtgttggcggagtttttgaggactgatcacgctcatctgcgcgctcttgagcccaataccgccgaggcccaagaacttaagatactgactcgggatcaccagcggcttgggcggcagaaaacccgtcttctcaatcagatcgggataaagctcaaagaatattaccctcgtccgttggaggtctttgaggatctggaaaccaagatcgcgctggattttctcaaagcgtacccaacgccgcaggccctctggaagcttacgcgccgaggctggaagcgctttgccaaacgcgaccatcacctcagtgaggcacgctctaacgagctttgggacaagctcaacaagcctcagctcgcggtcccacaacacgtggttagagccaaagccaaacttctgctggcattggtgggacagctggaggcctcggtgaaggcggtcaacagctacaacgaggaggttgaaagttttttcgccgctatgccggcagctgaaattgccaagacgctgcccggcgcaaaaagcgggaccacggtcgccacgatttgggctgagctgggcgatgctcaaaaccgttggaattccttcaggcatcttcaggctgaggcgggagcggttccagtgactaagtccagcagcaaaagccgtgtggtacagtttcgattcgcctgtaacaagcatctgcgacatgccctgtactggttttcttttaactctctgaagcgatctgagtgggcgaagaagtactaccgggatcaacgggccaaaggccacagcaaacatcaagcgctcagagctctgggagccaagtggctcaagattatctttgtgatgtggcgagaccataaacttatgatgaaaactaccacttggcgaacatcgcccgacagaaaatgcgccaggcggcataaaaaataaacgaggcacttgacaagcctcatagaaagt

SEQ ID NO: 6112 - DNA, 1598 bp, unidentified
  source 1..1598: mol_type = unassigned DNA; note = element_9733fe0
  misc_feature 1..3: note = core
  misc_feature 4..272: note = LE
  misc_feature 273..1445: note = CDS
  misc_feature 1446..1598: note = RE
  misc_feature 21..245: note = bridgeRNA
cttgtatattaatattagacagaatcatggcattctgttaaatgcttcttttactcccataagccatgtgggataatagaaccgtacaggttgagggcgtagttgctctccttgaagttaagcttcgttattaagacttacgcctcatctctgcgggcagtatgcgaatgagctggatgggtagttgacccgtatgtctaacaaggttgcattcccgtagagtcatgcggataacctccatctgtaacttttcattgaaaggttggtgcaacatgttttacatcggcatcgatatctccaaaaactcccatgagattagcattcttgacgcttcccatggaattgtagaaccgtctaagaaagtcgctaatactgctgccggtactgctaaactgctcactttgttcgaaaaacatcaggtattgcctgacaactgtctcattggcatggaatcgacaggtcactactggctcgtattttactctttcctcgtcggcctgggattttccgtcaaggtaatcaacccgattgtcactgatgcataccgcaacatgctgatccgaaaggtgaaaaacgattcggttgatgctttagtaatcgccaaagtacttatgctgggcgagtatcaggagtcttccgtagccaacgaagaaacactcgcattaaggcagctgtgtcgtttcagggcttatgaggtcgatacatgctcggatttgaaacgcaaggcaatcgctttgctcgaccaagtctttcccgaatatgagagccttttctccgacactttcggtatttcatcccgtgaagtcttaagcaatttcactacgcctgaagaattaagccggatcaatacccggaaattatccaatctccttgccaagtcaagcaaaggtcgtttcggagtggagaaagctcttgagcttaaagctgtcgcgtcaaaatctctgggaataaaaatcgccacggatgcctttgccttccagcttcggcagctcatcgaccagcttgagttcattgaagaacaggttgaaatgctcgatgcacagattgcggagtatatggaacgaacaaattctttcattacgacgatacctggcatcggtcctgtcatcggagctgtaatagtcagtgaaatcggtgacatctcacgcttcagcgacggtaagaaactggtcgcttatgcgggcttggatgcttgcgtcagtcagtccggcaatttcgaaggttctcagatgcacatgtccaaacgaggttcgccctatctccggagagccatctatactgcagccaatgtagcctcatggtccgatccgaatctttcggaatattacaaacgtctcaagacccggggaaagcaccacaatgttgctgttggtgctatagccagaaaactttgttacattatctttgctgtactttccgaaaacagagcgttcgaatctcggtagcgtttatttctcttatctgtttccgacacaaattaagctgtgtttttgttttgttacacttttcctattcaattttcaagtttcattgctttttactgcttactgcttttaggttttttatcttaaaatgtcgcttgacattttatagctggt

SEQ ID NO: 6113 - DNA, 1808 bp, unidentified
  source 1..1808: mol_type = unassigned DNA; note = element_9735b72
  misc_feature 1..2: note = core
  misc_feature 3..298: note = LE
  misc_feature 299..1546: note = CDS
  misc_feature 1547..1808: note = RE
  misc_feature 12..324: note = bridgeRNA
ctcctacaatataattacggtgataggcacggcagccagccgtgtctgttttcgtgttcacgccaaagctgttagaatgggagagcaattggattacagatcatccaggggctacgcgcccgtatgaaagtcagtaaccatctctctcattcgcagccgttcgatttacgcaggtagtcccgccgcttccccagagccacctgaagggatgttggtgcgttcgtgtcactcaggagattgtatcggcgatgaacaaagatggattccagttgcgaaatacaatcacaggaggaacaagatgaacgcaatctcagtcggaatcgacgtgtccaagggacacagcacggtggcggcgatacgcttccccggggaagtggtgtggaagccgcgagatgtcgtgcacaccgccgccgcgctggaacgcctggcctacgacattaagttgctggggtacaacgggcccgaggttcgggtggtcatggaggctacagggcgataccatgagccggtggcccaggaactccacgaggtcgggaacttcgtcagcgtggtcaatcccaagctgaccaaggacttcgggaataacacgctgcgaaagaacaagaacgacaaagcggacgcccgcaaaatggccagatacggcctgcaaaactggaacgagctgcgggaatacacacccgtggaagcggcgcgggcgaaactcaagcaattcagccgccagtacaacctgtacagcaagatcaaggtgcagttgaagaacaacctcatcgccatgctggatcaggtgttcccgggcgcgaacgaactgcacgacagtcccgccaagccggacggacacgaaaaatgggtggatttcgtcacgacgttctggcactgcgaatgcattgccggcatgagcgaagccgccttcattgagcgctaccgcaagtggtgcaagcgttttggctaccatttcagagaggcaaaagccgccgatctatgggtttgcagtttagggcacgtcaccacgctgcccaaaaacaccaacaccaaaatgcttgtcaccgaggccgccaggcaactgaccagtatctcccgcacagttgaaatctaccgcgccgagatgctgcgcctggcccaaatgatgccggaatacgatgttgtcatgggcatttacggcgtgggccccactatcggcccgcagctgatgggcgagatcggcgacgtacgcgacttcaccagccgcaagtccctggtcgctttcgcaggcgttgatcccggcgacaattcgtccggcaagcatgtgtcccaaagcgacaagacatcgaaaagcggctcaccgctgctgcgaaaagtcctgtttcaggcggtcaatacatacgtcaagaaaaagcctgtgggcgagccggtctaccagttctacgccaaaaagcgggccgagggaaagaagtattacgtgtgcaccaccgcctgcgcgaacaagttccttcgcatttactacgcccgcgtcaaggaacatctcgacaaaacgcttcctgaagaagatcgctttccttgtcaagggtagggtggagattttttcgcggtcaggacataggcgaaaaaatacgacccgaccttgacaacgctcctcaaagcataatgggatgtggggcgatgccgctctgcggcattggcacatgattgcatctcacttgaattgcggtgccggcttgcaaaaaacactgtggctgacgtcgagctttgctatgacctcctttttgtcctgctggttctcgacaactcttcacgattatttcgcgtttagggcttgacttttatttgcagga

SEQ ID NO: 6114 - DNA, 1556 bp, unidentified
  source 1..1556: mol_type = unassigned DNA; note = element_9739288
  misc_feature 1..2: note = core
  misc_feature 3..537: note = LE
  misc_feature 538..1434: note = CDS
  misc_feature 1435..1556: note = RE
  misc_feature 17..237: note = bridgeRNA
ctcgtataataatgttgtagttaattactaactacatatatatttttaaatctcattttttatgagataattaacctaacagatagaggttgtagtttccctccttgaagttttatcttccttacttagactgacacctcttctttatatcacatatacgtatgagctggatagtacttgttactgcatatctaacgaggttgtatgatttaaagtttgaggttttctctatctgatttctttttagtaggtgattttatgttttatattggtattgatatcgcaaaacacaatcacgaagtttccattattgatgataatggaaaagctttaggtaaaagtttttctattagtaattctcaaaaaggtgttgataagtttaatacttatcttgattcttttaatattacttctgaaaattgtgtaattggtatggaatctactggtcattactggattaatcttttctcattttgagttaatttaaaatttaatgtcttcgttatcaaccccattcaatcagatgctttcagaaaaatgtatattagaaagactaaaaatgattctaaagactcatatattattgctcagattatgcgatttggagagtactcctcatctaatatttctgatgaaaatatatttgctttaagacaactatcaagatatcgcacatctcttgttgatgaatgttctagttggaaaagaaaaattattagtattttagatcaagtatttccagaatattcaaatttattttcagatacatttggagttacttctaaggaacttttatctaaataccctttacctgaaaatatgttagaattatcaactgaagagctaacaaatcttttaactaaagcaagtaaaggtagatttggaaatgaaaaagctcaagaaataaaagaatctgctaaaaattcctttggtgtatcttttgcaaaacaaactttttcatttcagataaaacaaattattaatcaaatttctttcatagaatctcaattgaaagaacttgataatgaaatatcaaatatgttgaaagaactaaactctgaaataactactataacaggtataggagatattttgggcgcttgtattctttcagaaattggagatatctcaagatttgaaaaagcttcacagctagttgcttttgcaggactagatgtagcagttaaacaatctggagaatttacaggaacagaaatgaaaataactaagcgaggctctccatatttacgaagagctatatggttagctgcaacagttgccagttttaaagatcctgcattatctatttattacaaaagtttaatagctagaggcaaaaaacatttaacagcaataggcgcagtatcaagaaaaatgtgcaatattattttttctgtacttaagaataaaaaagcatatactccaaatatttgataaaacctagtataaagggtatttagacctaaattaatctaggtctttttgtgctacaaattaaaataaatttagaaaaaaattaaatttttaaaaaatttacttgacatttgatagctggt

SEQ ID NO: 6115 - DNA, 1535 bp, unidentified
  source 1..1535: mol_type = unassigned DNA; note = element_973940f
  misc_feature 1..2: note = core
  misc_feature 3..241: note = LE
  misc_feature 242..1420: note = CDS
  misc_feature 1421..1535: note = RE
  misc_feature 3..218: note = bridgeRNA
cttgtattatagagtagtagttattagagccccgttccaaaggctgtgctacactgtaagagatgctgtggattggtatattttacctaccaccagatggtttcgataaggttccaaccacagccctttgcagttttgttaatcagttaaataccgccagacggtttatgtggaacaaggttacaagagcaaagtgttctgtggatacagcatcacaatctttccatcggaggttttcatcatggtagtttctgttggcattgatgttgcaaaagacaagcacgactgcttcattctcaactcagaaggcgaagttctggcggatgtgttcaccatccccaacaatatggatggcttcaactgtctgctacaaacgattcgtgactgcaccacccctcaggacattataaaagtaggacttgaggcaaccggccattacagctacaacatccttgggtttctgcttgacaacggtctggccacctatgtcttgaatcccttgcgcaccaatctgtaccggaaaagtctcagcctaagaaaaacaaagactgaccgtgtggatgcacgcacaattgcagctatgcttctgtccgacataggcctcaagccctacacggacacaacataccacaacgaggaactaaagtcactaaccaggtaccgttttaataaggtgaaagaacgcgctaagctgaaaagctctgtttccagactggtatgcatcctgtttcccgaacttgaaaagttggttccgactctccacggggcttctatctatgctttgctggaagaatttcctggtgccgttcaggcttcaggtgcgcatctgaccagactgaaatatcttctgtcagatgcctccagaggccgttacggacgggacctggctgtggagatccgggacgccgcaagaaattctattggctccagaatgcctgccaaatcccttgaattgcagcataccatccggttgatccgtgaactggatgcggaaattgaggaaatcgagacagcgattcaaaccattatggatgagatacactctcccattaccacgatccccgggattggctaccgtatgggagccatgatccttgccgaagtcggtgatttttcccgctttgaatctccagacaaactgcttgcctatgccggtctctcaccctccacctaccaatccgggcagctcataaattgctatccacacatggaaaagcgaggctcacgatatcttcgctatgccatttacaacgccgctaagtatgtctgcctgtgggatcccacctttgccgcttaccttgccaaaaaacgggcagaaggcaagcactacaatgttgcaatttcccacgcggccaagaaactggtacggctcatctttgctttagagaagtctaggcaaccttacaatctggcggcgtagtttactcctgatagcccaccgaggtcctgacgggcctctgctttgctattcctttttcaaccatctgggccttacaaccatcattcaatttgggggttgacttctaatagttaat

SEQ ID NO: 6116 - DNA, 1371 bp, unidentified
  source 1..1371: mol_type = unassigned DNA; note = element_97433b1
  misc_feature 1..2: note = core
  misc_feature 3..190: note = LE
  misc_feature 191..1114: note = CDS
  misc_feature 1115..1371: note = RE
  misc_feature 1090..1359: note = bridgeRNA
tgattctgtaaccgcccccccggcggcatcgatgtgctatggtgggatcgcaacaatccatattgggaggcggtcatgtcggagattaccacggtcggactggatctggcgaggaatgtgttccaggtccacggtgcagacagcaaaggcagtgctgtcttgcacaagaagctcagaagggctcaggtgcatgagttcttcgccaagttgccgccctgtcttgtggcaatggaggcctgcggcggcgcgcatttcgcttcggttccggggtcgggagctggccaggcccggccacgacatcaggctcatcccgcccgcctatgtgaagcccttcatcaagcgacaaaagaatgatgcggctgacgccgaggcgatctgcgaggcagcgcagagaccgaacatgcgcttcgtgcccgtgaagagcgaagaaacgcagggggcggccagcgttttccgcgtccgggaattgctcatccggcagcgcacccaggccatcaacgcgcttcggggacatctcaccgaatacggccaggtcgtgccacagagcgcgacgaatgcccggcgcctgattgcgcttgtcgcggacgagtacccggaactgcccgccacggcgcgggcctccctaaaggtcctgacggcaacgctcgcccaactcgacgatcaaatcgagaccttggatgccgagatcacccgtcgagccaaggagaacgacgtggcgcggcgtctgatgaccattccgggcatcggtccgctgatcgccacggccattgccacattggcgccgccgccggaaatgtttcgcaagggccgcgacttcgcagcatggcttgggctcacgccgcggcagcattcgactggcggcaagcagaggctcggtgccacgacgaagatgggcgagcgctccctgcgccggttgctgatcatcggcgccaacaatgtcatcatcaagcgtcattgccacgcttcggcgcgccccggcacctggctggcgagaatgctggagcggaagccgccgatgctggtccgggtcgccctggcgaacaagatggcgcggattgtttgggcgctgatgaagggcggagagatctatcgggctccggccatggcggtataaggtccgctagcggtcgcgaggtcgtcggagcggaggagggctgagagcagcttggcgcaacggccgctagacagggtcggaaaaccagagcgcaacagagtgccaccgagcacgcggctttgatttgggtccgacccgcgaacaccatacgggcccgcggcatgacaacggccgcagcataaggccggatacatgtcagcacccgacaccgcgccaaattgctccaaaaccctctttgcgcaaggggcggttataca

SEQ ID NO: 6117 - DNA, 1379 bp, unidentified
  source 1..1379: mol_type = unassigned DNA; note = element_9743418
  misc_feature 1..3: note = core
  misc_feature 4..87: note = LE
  misc_feature 88..1107: note = CDS
  misc_feature 1108..1379: note = RE
  misc_feature 1119..1366: note = bridgeRNA
tgatgaggtggatggcccctgtgtccgacgatggtgagtcgtattgtgggctgttgtcgaagcaaccctagcaaaggaccatccaccatggagattaccacgatcggcctagatttggccaagtccgttttccagcttcacgcggtcgatactgatggcgctatcgtatggcgcaagaaggtgcggcgcggagcgctcctcgagacgctggcgcaggttccggcctgcctggtcggaatggaggcctgcgcgactgcccatcactgggcgcgtgagatatccgctctgggtcacgaagttcgtctgatgccgccagtctatgtgaaggcttatctacggcgccagaagaacgacgccgccgatgccgaggcgatctgcgaggcggtgcgacgtcccaccatgcgcttcgtgccgatcaagggcgcggagcggcaggcggtgctcgtcctgcaccgctcgcgcgaactgctggtgcgtcagcgcactatgctgatcaacgcggtccgcggccattgtgcggagtttggactggtcgcggcccaaggtgtgatcggcagccgcgatctcgttgagcggatccggcaggcagacaacacagtgctgccagacatggctaaggatgcgatgatgcttttgatcgagcaactccatgcactcgtccggcagatccaggcgctcaatcgacgtctcctggtctggcatcgccaggaccaggccagtcagaggttagctaccatcccgggcgtgggtgtcatcagcgccaccgccctagccgcctcggtgaccgatccgagccagttccgctcaggccgggagttttctgcttcgctgggcttggtcccacgccagaactcgtcaggcggcaaggaccggctgggacacatctcaaagatgggagatcgctacctcaggaagttgctcgtggtcggctcgacatcggtggtgcggcgggctcggactgccggcaccgccgccaactgggtccgcagcctgctcgagcgcaagccggcccggctggttaccgtggccatggccaacaagaccgcccggatcgtctgggcggtgctggcgcgcggcgagacctatcgctcgcctgccgcaatctgagaataatcgcggcgcacatgcgcggccgcatcgaactgtaagggtgcccattgaactgatgatgacgatctgaacgcggccgcaagggccgggacaacccgcggtgctgtcagagcttcgagctcgctagactgaatgggactcggccagcggacaacatcagggccagcggtcatcatgcaccgcacaaacaggccggacagatgaccgcaccctgaaagatcagatcatcaactcaatttaccccttgcagcgcaggggccatccacaga

SEQ ID NO: 6118 - DNA, 1327 bp, unidentified
  source 1..1327: mol_type = unassigned DNA; note = element_9743f29
  misc_feature 1..2: note = core
  misc_feature 3..68: note = LE
  misc_feature 69..1043: note = CDS
  misc_feature 1044..1327: note = RE
  misc_feature 1094..1325: note = bridgeRNA
ttaatgagatggtcactccctccttcccggtattatgctgaggacaggctttcattcggagaactatcatggaaaacattgcgctcattggtatcgatctgggtaaaaactctttccatattcattgccaggatcgtcgcgggaaggctgtttaccgtaaaaaatttacccggccaaagttgatcgaatttttggcgacatgccccgctacaaccatcgcaatggaagcctgtggcggttctcactttatggcacgcaagttggaagagttggggcattccccaaagctgatatcaccacaatttgtccgcccgttcgttaaaagcaataaaaacgactttgtcgacgccgaagctatttgtgaagcagcatcgcgtccgtctatgcgttttgtgcagcccagaacggaatctcagcaggcaatgcgggctctgcatcgtgtccgtgaatccctggttcaggataaggtaaaaacaaccaatcaaatgcatgcttttctgctggaatttggcataagcgttccccgaggagctgccgttattagccgactgagtaccattcttgaggataatagtttgcctctttacctcagccagttattgctgaaattacaacagcattatcactatcttgttgagcagattaaagatttggaatcccagttgaaacgaaagttggacgaagatgaggttggacagcgcttgctgagcattccctgcgtcggaacactgacagcgagtactatttcaactgagattggcgacgggaagcagtacgccagcagccgtgactttgcggcggcaacagggcttgtacctcggcagtacagcacgggaggtaggacgacattgctgggaattagtaagcgaggtaataaaaagatccgaactttgttggttcaatgtgccagggtattcatacaaaaactggaacaccagtctggcaaattggccgattgggtcagggatttactgtgccggaaaagcaactttgtcgtcacttgtgctctggcaaacaagctggccagaatagcacggccctaacggcacgacagcaaacttatgtagcataacggcagaaatacaccggtttaaagaattactgatctggttttgcgaatactgatattgatgatactaacggcccaccggcctgttgaggaacctgtaaaacggaaaggctcattgaagccgtatattttctggaggttcatcaggcgcggaactcatcaaggcgcgggaataaaatcccattcagacgccggatagattcaagcaagccaacttgtcgtcaaaatcggtgttgcaaaaacgggagtgaccataga

SEQ ID NO: 6119 - DNA, 1447 bp, unidentified
  source 1..1447: mol_type = unassigned DNA; note = element_9767d23
  misc_feature 1: note = core
  misc_feature 2..229: note = LE
  misc_feature 230..1426: note = CDS
  misc_feature 1427..1447: note = RE
  misc_feature 9..230: note = bridgeRNA
cgttactttattcctgccccggttatgctggggtcggccagccaggtccggcatgatttctgcccccagtcgtccatgatccggggggtgttgtcaccgggcctggccggcagttagtcatcgctgataggggctcgatccagatagctgaggtcgcctgtaacgtggatgccgagactagctgccatcggtcgctggctattcattttaacctcttggaggacgaatgatggacatcgaaggctacaacagcgtcgaagtgtttatcggggtggacgttggtaagggcgcgcatcatgcggttgcgctggaccgcgaaggccggcgccttcttgactgcgcgttgcccaatgatgaagcacagttgagagcattgatcgccgggcttcgaaagcatggtcagttgctgctcgtcgtcgatcaacccgccaccatcggcgcgttaccggtggcggttgcgcgggccgagggcgtgttcgttggctatttaccggggttggcgatgcggcgtatcgccgatcttcatgccggcgaggcaaagaccgatgcccgagacgccttcattatcgccgaagcggctcgcggcatgcctcacacgctgcgctcactcaagctggccgacagtcaactcgccgagctcacggtgctgtgcgggttcgacgatgacttggccggccagatcactcagacgagcaatcggatccggggactcttgacccaagtacatccggcgctcgaacgggtattgggcccgcatcttgaccatccggcagtactggatctgctcgagcgctacccttcgccggcgcaactcgccgcggccaccgagaagcagctggcgaaccggctcaccaagctggctccgcgcatgggcaaaggcttggccgcccagatcgtccaagccctctcggagcagaccgtggtcgtactcgggaccaatgccaccagtatcgtgttgccgcgtctcgcgcgccaactggcggcgctgcgccgtcagcgagatgaggtggcccaagaggtcgagcgcatcgtccatgcccaccctctttatccggtcctgaccagcatgccaggagtcggcgtcaggactgccgccagactcctgaccgaggtaaccggcggagcctttgcctcagcggcgcatctcgccgcgtacgatggcctggcgccggtcaccaggcgctccggctcatccatccgcggcgaacatccatccaggcgagggaacaaaaaccttaaacgcgcgatgttcctgtcggcgtttgccgccttacgcgacccggtctctcgcgcctactacacccggaagatcggtcagggaaagcgccacaatcaagctctcatcgcgctcgcacgccgacgttgtgatgtgctcttcgccatgctgcgcgatggcactctctacagcccaaaactcccggcatgacacttgacaacaacatagggg

SEQ ID NO: 6120 - DNA, 1536 bp, unidentified
  source 1..1536: mol_type = unassigned DNA; note = element_9774a84
  misc_feature 1..2: note = core
  misc_feature 3..245: note = LE
  misc_feature 246..1412: note = CDS
  misc_feature 1413..1536: note = RE
  misc_feature 3..224: note = bridgeRNA
ctcgtatgttaaattaatattagttccttactctttcttgagtaagtgtatactgtctataggcactgtggattagtcgaactttcctaacgcatagacgtttttaattaggctataaccacagttgtctgctttaatgttaatcagttagataacgcatgacgttttaattagcacgaggctacatagcaggcagttctgtggaataagtaacagtgtcaatctaccataaaggagctattattatgatttacgtaggtattgatgttgcaaaggataagcacgattgtcttatcactaattctgatggagaaattctttttcctatctttaatatttctaatgatcttatcggattttctcttttacttcagcgtattcagtcttgttcaaataatcctgaaacaataaaaatagggctggaagcaactggtcattatagcaacaatatcgctgattttctcattaataaaaactaccacatttttattatcaatccgttacatactagtctatacaaaaaaagtcaaagctttagaaagactaaaacggacaaagctgatgcccaatcaatcgtatctatgttgatgacacagaagctaacgccctatgcacctgcatcataccatgaaaaagagctaaagtcactaaccagatatcgttttaaccttgtaaaagattgttctaaacttaaagtatccttttccagattaatgaacatcatatttccagaattagagaaaatagtacatgaattgcaggtaaagtctgtttatcagcttatgcgtgagtatacagatacaaacgctatttcaaaagcgcacctgaaccgattgactaatcttttatcaaaatattcaaaaggtcactacggtcgcgaaaaagcaattgaaatcagagaagctgccaaacaatccatcggtagctgtaatggtatacaagctatagaactacagcaaacattagctcgcattcatttgctcctggaacaaattgaaattattgaggaaagaatcaaaaggattgttcaagaaatagattctccttttatcacaattcctggcatctcttatataacagctgccatgatccatgctgaaattggtgatttctctgaattttctgatgcgggaaaaatactagcttttgctggcatggaaccatctatatatcaatcagggcagtatacttcaaacaaagccaaaatggtaaagcgaggttctaaatatttacgttttgctctctatacagccgctaaaaatgttggtaaatgggatggaaatttccaaacattcttgcagaaaaaacttgcagaaggaaaaccttataacgtcgcagtctctcacgttgcaaaaaaactggtaagagttctttacagtatggaaatcaaacatgaaatttatataaaataattctcatccctcatatgattttttcagaacagctataaaggtgtttttatttgtcatgcaattttttaggtatacattcaaaacagtttaaactaatataaatttactacttgacatagttagt

SEQ ID NO: 6121 - DNA, 1404 bp, unidentified
  source 1..1404: mol_type = unassigned DNA; note = element_97763e7
  misc_feature 1..3: note = core
  misc_feature 4..95: note = LE
  misc_feature 96..1139: note = CDS
  misc_feature 1140..1404: note = RE
  misc_feature 1138..1391: note = bridgeRNA
tgatggtgtggacggcgcccgcaccggcatctcgctcgattgagagctgtgccaagatggttgtcgtcgagcaaccctctgaaggagcgccgtccatgggaaagtctatcaccgatttgtcttctgtcacgaccgttggcctcgatctggccaagcatgtttttcaggttcatgcgatcggcgcctttggccgcgtgatcgtcgccaaggcgcttcggcgcaaggacgtattgttcttcttcgcccagttaccgaagtgtcttgtcggtatggaagcctgcggttcggcccatcattgggcgcgtgagctgatcaagctcggccatgacccgcggatgatgccgccggcctatgtcaaaccttatgtgcgcaggcagaagaatgacgcggccgacgctgccgggatctgcgaagcggtgacaaggccttcgatgcgctttgtcggcgtgcgcacgctggagaaccaggcggcgctcatgcatcacaaggcgcgcgaaatgctggtggcgcaacgcacgcaactgatcaacgcgcttcgcgggcatctggccgagattggggtcatcgcggcgcaggggcccaaaaacgcccgcgaattggcgggggtcgtcatggcggaaggcgacgagacgattccggcctgcgtgcgcgcggcactcgccccgctggtgcggcaactgcatgttctggaccaggagatcgcgtgcagcgatcgaactatcgccgcgatggctcgaggcgacgaaagggcgcgtcgactgatgaccattcccggcttgggcccggtgacagcctcggcgatggccgccagcgttcaggacgtctccgctttctcgggcccgcgcgagttcgccgcttttcttggcctgacgccgaaacaaaactcgtccggcggcaaggagcggctgggccgcatctcgaagatgggcaaccgatatttgcggacattgcttgtcgtgggcgcgcatgcggtcctctatcatcgcaagccgcacgacgacgcgctgcgatcctttgcgaagaagctcatgcagagcaagcccttcaagcttgtcgccgtcgcgctcgccaataaaatggcgcgcatcgccttcgcgatcatgcgcggcaggacaagctattgcgcagtttcggcctgacgactgccgacatcgtcagcagccaagggctgcacaagaatcgagggtgacaaagaggtgatgcgaagagcgcggtttgatcccaaagcccgtggcattgtctgcgccgtcaagcgcgctaatgtgattggggcaatggatcagcggacaacatcagggccagccgggcgtcaagacccgcatcgacaggccgaagacatgaccgcacccacgatcaaacgcaccgccgcaaaataacccttgatcaacgggcgccatccagaca

SEQ ID NO: 6122 - DNA, 1219 bp, unidentified
  source 1..1219: mol_type = unassigned DNA; note = element_97a1675
  misc_feature 1..2: note = core
  misc_feature 3..160: note = LE
  misc_feature 161..1204: note = CDS
  misc_feature 1205..1219: note = RE
  misc_feature 12..192: note = bridgeRNA
cttgtatcttgctcgttgtgttggttagctgccatcacacgagccggggagagcttggtcccaaaccttaaggcctgaaaccttgccctgtagatgaagtcccccggctcactttcacgccagcattgacgctgaacggtagccaaggggaaaaccatgcatgcacaaggcgagcgggcgcgactggcgtattgattttttttacaaaggtgctgtcatgttctatctcggcattgatgttgcaaaattgaaattggactgctgtcttttgctcaatgaagcgggcagcaaacgcagaaccaaggctgttcccaattccaaagcaggagttgccgcccttttggaatggacagcaaagcacgaagttccagtctctgatcttcatgtcatcatggaggcaaccggcgtgtatcatgaacaaccggccttgctgcttattgaaagcggccttcttgtctctgtcatcaatccggcgcaggccagaaacttgggacgcggcatggccgtgcgcaccaaaaccgacaagacggacagctttgtcctggcccgctgcggcgcactgctcaagcctgaagcatggcagccaccatcgccggaggcgcggatgctccagtctcttctatcccgccgcgatgccgtggctgaagacctccgccgcgagaaaaaccggctggaaaaggctgaagccgctgatgcgcctcctcttgtcctgcaatctgttcttgatgccggcctttttcacaacgcggaactgaaccgtctcgaacaggctgtcaaggaacatattgacaatcatcccagcatgaaacaggatatgaacctgctgaccagcattccggcggtcgggccgcaaaccggcagcaagctgctcgcagttatgaaggcccggcatttccaatctgccagacagttagctgcttatttaggcgtaacgcctgtcgaacgccagtccggcagctcagttctgggccgtccgcgcctgtcgaaaaccggcccggccaagctgcgggctgtcctgtacatggctgctgtcacagcaatacgccataatccccatgtcaaagctgtctatgaccggctgcttgctcgcggcaaatccaaaatgtccgctctcggtgccgcaatgcgcaagctcgttcatctttgcttcggtgtgctcaaaacccgcatgccttaccagccagattatgcaaaaaacaattgaccggcaagacggtat

SEQ ID NO: 6123 - DNA, 1389 bp, unidentified
  source 1..1389: mol_type = unassigned DNA; note = element_97a82c0
  misc_feature 1..2: note = core
  misc_feature 3..92: note = LE
  misc_feature 93..1109: note = CDS
  misc_feature 1110..1389: note = RE
  misc_feature 1148..1387: note = bridgeRNA
cgatgagatggtctcctcccccttctaattcggcgtcgcaatgcgccatgatggagttgttaccaaccatcgagtgaagcgaggagaagaccatggacaagattacgacgattggactggatttggcaaagaatgtttttcacgtagtgggttgtaatgagcatggcaaaatcatcaggaagcggatgttgaagcgaccccaggtattggcgtacttcgccaacctgccggtaagtctggtcggcatggaggcctgtgccagcgcccattactgggcacgggagctgggcgccctgggacacgaggtgaagctgatcccgccccaatacgtcaaaccgtatgtgcggggtaacaagaacgactacaacgacgctctggcgattgcggaggcagttgttcgtccggaaatgcgctttgttggggtaaaaacacccgagcagcaagatattcaggcgctccatcgcctgcgggagaggcgcttgggtgatcgaaccgcactgtgcaatcagcttcgcgggctgctggccgagtacggcctggttttccctaaaggggttaccaccttacgccggcgtctgccggaactgttggccgatggcgagaacggcttgagtgacttgttccgtcagctgttggcgcagggctaccaacagctgcaggaactggatgtgcacatcgacttctatacacaagaactggtgtaccagagccaacaggatgacgcgtgtcaacggttacagaccattcccggatttggaccgattgtggccagtgtttttcgcagtgtggtgggcaatggcgaggcctaccggcggggccgggatgtatccgcctcagtgggtctggtgcccagacagcacagcagtggcggtaaagaggtcttgctgggcatcagcaagcgcggggatcggtatttgcgcagtttgctgattcatggcgcccgctcggtggtgatccaggcgaagcgaaaagaggaccgtttaagccgctggatcaaccggttggtgtcagctcgtggtttcaacaaggcggtggtggccctggccaataagatggcacggattggctgggtgatcctggcgaaaaagacgacctatcaggccgcataaggctggataggcatgaacggtattaacgagtagaggggtatcctgccgacgattgcgaagactttgtggcaaacgatgacacaacaggtaagacctgcgtatcgaaaacctgatcattccggtggctgctcaagaagccgttgcgccgaaaaggacgatacgcgcgcatttcatcgaggccagggggattgctcccccgttaacaggccggatatacggaagcaatcctgtccctgtcacctacgacacaaagccttgcaaaatgggaggagaccatata

SEQ ID NO: 6124 - DNA, 1377 bp, unidentified
  source 1..1377: mol_type = unassigned DNA; note = element_97a9d5b
  misc_feature 1..2: note = core
  misc_feature 3..298: note = LE
  misc_feature 299..1102: note = CDS
  misc_feature 1103..1377: note = RE
  misc_feature 1108..1364: note = bridgeRNA
tgttggggtggacggcccccgacggcatcgcaatgtgccagaatgaggtcgttgcagatctcaagcaagggagaccgtccgtggataaacttattcgcattgccatggatacgtcaaagagcgttttccagttgcatggcgtgaacgatgcagaacagcctgtgctgcgcaagaagctgcggcgcaatcaggtgcttgccttctttgccggacttccaccgcttgcggctcggcccattactgggcgcgtgaattgcgcgcgttggggcatgaagtggtgttgctgccgccgcaatacgtgaagccctatgtcaagcgctccaagtcggatgcggccgatgcgcaggcaatctgcgaagcgatgagccggccggagatgcgtttcgttcccgccaagagtggcgagcagcaaggatcccagatgctggccaagctgcgcgcgcagttcatcggccggcgcacacagctcgccaattcgatccgtggctttgcggccgagtttggccttgttgcgcccaaggggctttcccggctcggcgacctgctggccgacattcgtgccgacgcgacgattccggacacagccagggacatgttcgagacactgggacgcgactatgcgcatatcggcactgaggttgcctctctcgatgagaagctgcttgaatttcacaggcgcagcgaagtgagccggcggctggctgccataccggcgatcggtcctgtcggggcaacgttgctggccatcaaggtgccggatgcaaacggcttcaagtcgggtcgcgactttgccgcctggctcgggctgacgccgaagaaccattcaacagcgggcaagaacaggcttggcgtgattacccgcgctggcgatgagatgctgcgaagcgtactggtggtgggcgccactgctctcatccaacatatgcggcgcggcagtaaaagggtctggccatggctagcggccctgatagcgcgcaaagcccccaagcttgcggcggtggcgctggccaacaagctggcccgtatcgcctggaagctaatggtcagcggtgagcaataccgccccatcgctgccacccatccggcgcctgtgcagccgtagagcattcagaattcggcgccgagcccacactcgacgctgaaggccggaacttgcaagcagaggagaagatggtgtgaccggtcgaaccgggaccatcgaggcattccgaggtgctcaccggcagccaatgtcgtgtacgtgtttggaactcgctatccgcgtagcccatcttggccagcgctctcaaatccgcgcgcaaaaggccggacatatgagcgcaagcgatccgatcaactatctccccaaatccttgcaagcagggggccgtccacata

SEQ ID NO: 6125 - DNA, 1415 bp, unidentified
  source 1..1415: mol_type = unassigned DNA; note = element_97ab92a
  misc_feature 1..2: note = core
  misc_feature 3..89: note = LE
  misc_feature 90..1130: note = CDS
  misc_feature 1131..1415: note = RE
  misc_feature 1146..1402: note = bridgeRNA
tgatggtgtggaacgactccgctcttgcggcatcctgtgccaggagctcagtcgtcagcggactgagtcgtagagaaggaggtcgtcccatgaacgagactacaacaattggactcgatatagccaagcaagtctttcaagttcacggcgtcgccgtagatggcacggtgacggtaaaacggcagcttcgcaggtccgaagttatcagattcttcgataggcttccgcgctgccgtgtgggtcttgaagcctgtggtggggcgcacttctgggctcgcgagctcaccgcgctcggccacgacgtgagactgatcccggcgtcctacgtgaagccgtatgtcaaacgcggcaagaccgatgcgatcgacgctgaagcgatctgcgaggcggtatcgcgaccaaccatgcgtttcgtaccgatcaagacagtcgattgccaagcgggcgtgatgctcttgaagacaaggtatcttctcgtcaagcagcgaacccaatcgattaactccctgcgcggtcatctgagcgaactcggtatcatcgcggccagggggacgggaaaggtcgaaacgctgatcgcgatcattcgcgacaagactgacgagcggattcctgctgttgcgcgaagagcgctcgagatgctggctgaccaagtcgaagcgctcgtccgacgcatagcaacgctagagaacgagatcgtttccgaggttcggcgcgacgacactatgcgacgactggctacgattcccggtgttggtcccatcaccgccgcaacgattgtcgctttggtgcccgaccccagggcgtttaactccggtcgacattttgccgcgtggatcggcttgacgccaaaaatgcattcgacgggcggcaaggagcggttggggagaatctctaagatggggaatcccgtgttgcgttccttgctggtcgtcggcgcgacggccgtatcgagacacgcgcgccgtggcgcaacagtatcgccttggctgaccggcctgctggcgcgtcgacccgccaaagtggccgccattgcgctggccaataaaatggccagggtcatttgggcgcttcttacgaaaggcggcgtgttcacccgcaggccagccacggcggcgcagcatgcagcctgacttgaacatgacttaaggaattggtcggcgacaccgccggccgaccaagggcaaggtgcactcgatcaatgatgacctccacgggacgacatctcgatgagacacaggccgggattcccaacgcgccaagcgagcgcgctgatttgtatggccagtcttattgcgaacgtcatcaaggccagctgcccaagggccgcacacaaaggccggacatatgggcgcaccgctcccgtatgaggtcagcaaaggaaaagagagcccttgaccgcggggtcgttccacata

SEQ ID NO: 6126 - DNA, 1417 bp, unidentified
  source 1..1417: mol_type = unassigned DNA; note = element_97b0f9e
  misc_feature 1: note = core
  misc_feature 2..62: note = LE
  misc_feature 63..1091: note = CDS
  misc_feature 1092..1417: note = RE
  misc_feature 1197..1411: note = bridgeRNA
tactggcatggtccgccgccgaaacccctcgagggtgtagaggtgaacataggaggcgttccatggagattcgtaccatcggtatcgatttggggaagactgtttttcaccttgtaggtgtcaacggacgcggcgaagttgtagttcgcaagaagtgctcacgtcttcaactgcttcgtttcacgtcgaatgtttctttgtgcctgatcgggatggaggcctgcgcagggtcgcacttcctcggcagagctctgcgggaacaaggtcacgatgtgcgcttgatgccggcccagtacgtgaagccctatgtgaagaccaacaagaacgactacatcgatgccgaagcgattgcagaagcggtcacccgtccaagcatgcgctttgtgccgatcaaaacggatgaacaactcgacttgcagtcgctgcacagggttcgagagcggtgggtggggcgccggactgcggtgatcaaccagatccgcgggatgctgctcgagcgaggtataaccgttcggaagggacgccgtcacatcgaagaagctctgcccgggatactggaggatcctgacaacaagctgtctggcgcattgagggttttgctgggcgagttgcgtcgtgagatgcagtacctgcacggacagatccaagagagcgacaagctgatggaacgtatcgccggcgagttggagcagtgcaagcgcctgatggcgattcccggaatcggaccaaccatcgctacggctacgattgccgccatcggcaacggcgcatcctttcggaagggacgaggatttgcggcctggctcggtgtggtgccgggagaacactccacgggaggcaaacacaagccaaccgaaaccagccggcgcgggaacagataccttcggaagctctacgtgcaaggcgcgcatgctgtactgcaaagcaggaactaccaggtccctggcctcggcgcatggttggaccggctgtcagcgcgcaagcgcattcaagtggttgcagtcgccctggccaagatagcgcgcatggcctgggcggtgttgtgcaaaggagaagcttatcggccgccgctgttaacgatggcagcctgatggcctgcagataacgcctgacgcaaaagcgccaggcttggaaatcgctaaagcgattcccacatccacagaccaacgacgacgctctgatttctaaaattcctgccaggtttgctggcgaaccatgagatggcaaaacggtcgatcccggcgctctcgaaacctgttactcggaattgcctcgcaaggcagcgttactaacaaggacgagagtgcagcgcattccattcaggccaggagttcactccaataaaggccgaatacattcgcgcagaccaatcccgccttctgcattcttcgcttgcaaaacggcggcggaccataca

SEQ ID NO: 6127 - DNA, 1375 bp, unidentified
  source 1..1375: mol_type = unassigned DNA; note = element_97c1045
  misc_feature 1: note = core
  misc_feature 2..298: note = LE
  misc_feature 299..1105: note = CDS
  misc_feature 1106..1375: note = RE
  misc_feature 1144..1373: note = bridgeRNA
taatggaatggatccatccccttttaatcggcctcgcaatgggccacgatgaagttactaaaactcatcagaaagaggacaggtccatcatgaagattactacaattggtttagatatcgcaaagtctgtttttcattttgttgcagtaaatcaggcaggtaagctagttaaaaagaagatgctcaggcgaaaagatgtgattcactttgctgccaagatagagccatgcctaatagtcatggaggcctgtggtagcgcaaactattgggctaggagtttcaaaaactcgggcaccaagtgaagttaatcgcgccacaatttgtcatcccctaccggcaagggaataagaatgattataacgatgcccttgcaatagcagaggcagcacaaagaccaaatatgcgtttcgtacaaccaaagcctgtcgaacagcaggatgtacagatgcttcaccgaatgagggagcgtttaaacaagcagtctacagccttagtcaatcaggttagaggtatgttggcagagtacggtatcgttatagcaaaaagcaaagcggcatttaggagagcttttcctgatatcttatctgatgaaaacaatgagctgacagtgaaaggacgatatatatttacccagttgcatgaagagtttatcgatatcgagaagcgcctaaaaagctgtgatgctcaaatactagaagagagaaatacaaatccagtttgccagcgtgtagagacttctccaggcattggccctatcacttcaaccgctttttacgcagcggtaggagaaggaaaagatttctccaatggcaggcacttctcagcctggtgtggcttagtgccaaaacagcatagcagtggcggcaaagataacctgctagggataagtaaaagaggcaatgcctacttacgaacgttatttatacacggcgcaagagcagtcttgcagcgctgcggaggcaagcaagataggctgagccgctgggcatacgccttggccgaaagaaagggcttcaataaggcttgtgttgcagtagcgaacaagcttgcaagaatgacctgggctatcgccgctagggaagatgaatataggacatttgcgtagctgttgccctaaagtaagataaccgagttagtgtaagacataccagcaagttgctatgacacttgatttgatgatgagacagtcagactgctctacttaaaacctaactgccgcaagggctctaaagaagccgtgtagatgatcaggaaagtagaggcacatatccatcagggccagaggttaacctcataaacaggccgaatatatgggtgcaatgaactcttctcaaaattgatatcaaatgtcttgcaaacgggatgggtccatata

SEQ ID NO: 6128 - DNA, 1183 bp, unidentified
  source 1..1183: mol_type = unassigned DNA; note = element_97c7e1c
  misc_feature 1..2: note = core
  misc_feature 3..205: note = LE
  misc_feature 206..1168: note = CDS
  misc_feature 1169..1183: note = RE
  misc_feature 6..210: note = bridgeRNA
cttgtatgttcagccatgaccagtgcggtagagtttggtcgtcgttgaggcgaccaggccggcccgtgcagtttgtctcgcgcttgggtgatcgagcccgtcagtgagtagaaagcgtacggatgccgcactggtcttcatgaagcccgaacggttacgcgcgctgcgatcgagtgcgcatgcacaagcaggggatccgaagatcatgtctgcaacctcagtggtggtgggcatcgacgtggccaagacgcatgtcgatgtcgcggcgttgggcaccgtgttcgaaacccagcgatttaccaatgatgtcgatggccacttggcgctggcggccgcgttggcaccgctgggtgcggtcctggtggtgatggaggcgaccggcggttacgaggcggcgctggcctgtgccctgcaggcggcgggcttggtggtggcggtggtcaatcccagacaggcacgcgacttcgccaagtccatgggcaaccttgccaagaccgaccgcatcgacgcccgcatgctggccgaatttgcggcggttgtggcccgccgcgacgacctcgcgcatttcattcgcccactggccaatgccgagcagcaggcgctggcggcgttggtgacgcgacggcgtcaattgctgaccatgttgctgggcgagcgccagcgactgcagctggccatggcgctggtccgcccgagcatcgaggccatgatcgacgccattcgcgcccagctcgacgacgtggaggcgcagatggtcgcccatgtgcgtgaacacttcaccgaactcgaccaattgctgcagtcggccagcggcatcggtcccgtggccagtgccaccatgattgcggagctgcccgaactcggccgcctcaatcgccgccagatcgctgccctggtcggcgtggcgcctatcgccaatgactcgggcaactcccgcggtcgaagacgggtgcaaggcgggcgcttcgagatccggcgcgtgctgtacatggcgaccctcagcgccgccagacacaatccttccatcaaagccttctaccaccgccttctcgccgccggcaagtttcccaaggtcgcgttggtcgcctgcatgcgcaagctgctgaccacgctcaatgccatggtcaggacccaccaaccttgggacaagtcgcttcatcgcgcttgacacgaaagacggtta

SEQ ID NO: 6129 - DNA, 1298 bp, unidentified
  source 1..1298: mol_type = unassigned DNA; note = element_97cc6b9
  misc_feature 1: note = core
  misc_feature 2..255: note = LE
  misc_feature 256..1251: note = CDS
  misc_feature 1252..1298: note = RE
  misc_feature 40..248: note = bridgeRNA
cctttagatttgtattataaatattatctattatgataggggtctggggggagactcataatttataaaattgttcataactttactgtataacaaaaaaaagaacagggtgaactttgcttcgacataggaattatgacctacagcctgtattagtccctgttctttattacggttgcctagaaccatataggattttagtttaaccttcaaaaggtcttagtttaagcaaccatttttaaacactataaaattatgaaaacaaaaagaattatcggtattgatgttagtaaattaaccatggattgttgcgaccataatagtggttcacaaaaaaagtttgataatacccttgcagccattgccgagatggtagagtggtcattgaggatcagtggtgctactaaaaaacaactgtggtttgtatttgaacatacaggcttatatagccaagaacttatccagtattttggtggcaatggttatcagttccatgtagcccctggaatggagattaagcgttcgttgggtgttgttaggggaaagagcgataaggcagatgctaaacgtattgccttatatggctatcgttttcgtgaagaattagaaccttttcaaatggcaagtgatactttggcaagtctaaaacgcttaatgtcgatgcgcagaaaattggttgcacagcgtgcaggccatatagcaactttaggagaacaagaaaggattcttaataaagaaaatgaaaaaatactgttccaggcgcaacaagaagttatcaatacacttgatctacaaataaccaatatagaagaggaattgaaccggctcatagaagaagacccagaactgcaaaacctatatcggctcttgacaagcattaaagggataggaaaggtcactgcaaggtttttaattgtatataccgttgggttcaccgcttttgcaacgtggagaaagtttgcttcctattgtggtatagctccatttcccaatacatcgggaacaagcattaggggcaaaaccaaggtaagtcaccttgccaacaaagaaggaaaagcccaactaagcctttgcgcaggttccgcaatacaatataatcccgagatgaaggcattttacgaaagaaggatcaaagaaggaaaaaacaaaatgagtactttaaatattattagaaataaaatattggccagagcatttgcagtaataaacaggggaaccccatatgtcgatacaatgaaatatgcatcctgaacaataaataaaatctattgaaaaatatttggtgaagtcataggata

SEQ ID NO: 6130 - DNA, 1573 bp, unidentified
  source 1..1573: mol_type = unassigned DNA; note = element_97d1689
  misc_feature 1..2: note = core
  misc_feature 3..269: note = LE
  misc_feature 270..1442: note = CDS
  misc_feature 1443..1573: note = RE
  misc_feature 3..245: note = bridgeRNA
cttgtatgatgtttatagaagcaaaaacaccataacttcctttctttttaatatcgtggttcaatacaattcagatactgtggacttttgatttttacctgtagcttgactactcgactggagtgtattgccgctgcctttatctgaattgtttatctgctggatgagccggagcgtatgttcctgagttcttatttcaatcaagtctacgatgataatcgttggtggatatcacgatatcagactttatgaaagggaggtacaacctcatgatttacgtaggcatcgacattgccaaacttaaccattttgcatcagccatatcttctgatggcgtggaactcatgaagccgttcaaatttactaacgacggtgatggcttccaaatgctggattcccgtctcactgcactttcttatgaagacgacagcatcatcatcggtcttgaatcgacggcacactacggcgacaaccttgtaagataccttgttgcctgtaattacaacgtgtgtgtactaaaccccatcaaaacctcggtcatgcgtaaagataacatccgcaagaccaagacagacaaagtcgacacattcatcattgccaaaacacttttgatgcaggattcctataggtttgtctctttctatgaccttgacctgatggatctcaaacagctcggtcggttccgccagaagaccattaagcagcgaacccgcttaaagatccagctgacttcctatgttgaccaggtcttcccggaactgcagtatttctttaaatctggcctgcatcagaaaactgtctatgctcttttgaaagaagctcccacgcctcaggacattgcttctatgcacatgactcatctgagccacctccttgtggctgcctcacacggccactttaagaaggaacaggccaaagaattaagagttctcgcacagaagtctgttggtgctaatgacagcgccctatctattcagataactcacaccattgcacagattgagttactggatagccagttgaacagtgtcgaggctgaaatgacacagatcatgaaattcaatgattctgttatcatgaccattccgagtatcagttacatcaacggcggaatgatacttggtgagatcggcgatatacaccgtttctcctgccccgctaagctgcttgcttttgccggtttagacccttctgtttaccagtccggtaattacagtgctagacgcaccagaatgtccaagcgtggctccagagtgctcaggtacgcactcatcaacgcagcacacaatgttgtaaagaacaatgccaccttcaaaacctattatgacaaaaagatggcagaaggtcggactcactacaacgccctcgggcactgtgccggcaaacttgtcagggtcatctggaagatgctcactgacgaagtcgaatttaacctcgattaggaggtctgtataccaataccgatagattttgaaaatgcacctttagggagctttattaaggttacccttttttaccaccgatacgaaaaagaaattttttgctaatttaggcttgacttttcatagctggt

SEQ ID NO: 6131 - DNA, 1244 bp, unidentified
  source 1..1244: mol_type = unassigned DNA; note = element_97e5e3a
  misc_feature 1..2: note = core
  misc_feature 3..248: note = LE
  misc_feature 249..1226: note = CDS
  misc_feature 1227..1244: note = RE
  misc_feature 6..212: note = bridgeRNA
cttatgtgttgactctcccccgtaggcgggagagagtcgccgactgatcatcggtggggacggggtgacgccgtcgggctcccaaggctttgcgcctgttgcgtagattcgcgcccccgtcccgttttatctgccgcgagccgcaacggtatcttaggcccgcctctggcgagagcctgcacgcgtaaggatcggcgtggcggatcttcgatgattgcagactcaatctcaatccaaggagctctctgatgaccccatccatggtcggcgtcgacattgccaaggcgacctttgacgttgccacgccgctggaggcgaaaggcaagtatcgaaccaagggtaaagtgcccaacacgccggcaggctttgctctgctggctgactggttggctcaacacgcgcctgaggcgggcgtatgcatggaggcgaccggtatctaccacgaagccttggccatcttcctggtcgagcacggcgtgatcatatacgtgatcaacccggcccaggttgccgcttacgccaagagcgaactgtcgcggaccaagaccgatcgcactgacgccaagctgctggctcgttttgcgctcgcccagcaacacgccgcgaacctgcgcccatgggtgccaccgaccccggcgcaacggcggctgcgcgccctgatccatcggctcaacgatctggagggcatgcgccagatggagcgcaaccggctcgacgtcagtgacccctcggtcaatccatcgatcagccagctgatcgagacgctggacgcacagatcgcggacctgaaaaaggccattcacaaccacattgactccgacccagatttgcgccgagacagcgacctgctggcttccatcccgggcatcggcgagctcactgcagccttcgtcctgggctgcgtgggggacctgcgccggttcgacgacccccgcaagctcgacgccttcgctggcatgaatccggccgtgcgcgaatcgggcaaatggaagggccaaagccgcctgtccaagatcggccacgctctgctgcgcgccaagctgtacatgcccgcaatgaccgccatccgccacaacgtcgccgtgcgcgccctgttcgagcgactggtcgctcgcggcaaaccacgcaagctcgccctcggcgcagcgatgcgcaagctgctgcacatcgcctggggggtcatccattccgccaccccgtttgaccccaaagtcgcccttgcatgagggtggccaagacggtat

SEQ ID NO: 6132 - DNA, 1461 bp, unidentified
  source 1..1461: mol_type = unassigned DNA; note = element_97e9534
  misc_feature 1: note = core
  misc_feature 2..217: note = LE
  misc_feature 218..1447: note = CDS
  misc_feature 1448..1461: note = RE
  misc_feature 15..250: note = bridgeRNA
ctaatagagactcctgctaggcgttgcggcttgccgtagcgttcgagaggtccgatgggctggctcccgaaccgcctgccgactgcgtcggtgacgttggtctggctttagatcgaggtgcctgcccgtcggttctcgccgtggcgtggctcgaaagaggtgcgagcgctagcagatccgttattaggcatgcccgccatggttgctgggttcccggatgaggatgcggagcatgctagtgacggcagtgatgatcggggtcgacccgcataagggctctcatacggcggtggcgatcaccgcggcggagcagccgctggcggagttgcgggtccgcgccagcgccgctcaggccggcaggctggtcgcgtgggcgcaggcctggccggagcggacctgggcggtggagggcgcgggcgggctgggtcggctgctggcccagcagctggtcgcggctggtgagcgggttctggatgtgcagcccaagctggccgcccgggtgcggctgctggaggccggtgacacgaacaagaacgacccgaacgacgcgctgtcggttgctgtcgcggcgctgcgctccaaagcccggcgggaggtgaaggccgaggaccacgcggtggtactgaaggtgtggtccaagcggcaccgcgaccttgcccggtcccgcaaccaggtcgcgtgcaggctccacgcggtgctctgtgagttgcgtcccggcggcttctccaaggaaatctccgcagcccaggcagctaaaatcctggaacagatcgagccgtgcggtgccgtcgctgtggctcgccatgagctggccgccgagttcctgaccgacctgcgccgcctggacgcccagctgcgcgacaccaagaagaaactcgccgccgcggtcagggcgtcgggcaccaccctcaccggcatcttcggcgtcggcccggtcatcgccggcatcatcatcggcgatgtcaccgacgtgacccggttcgccagccgggaccggttcgcggcctacaacggcactgccccggtcgaggtgtcgtcggggaaccggaaagtccaccggctgtcgctgcgaggtaaccggcgcatcaaccacgctatccacatggccgccatcacccagatccggcacgctcacagcgacggccgcgccttctacgacaagaagatcgccgaaggcaagacgcacaaagaggcgctccgagcactcaaacggcgaatcagcaacgccgtcttcgcccgcctacgagccgacgcgcgcaaggccgccgcagctgtcggcaggggcccgggagggcaaccggggaacgactctgttgccagcgcggccggctcgcaccccgagcaccggctcttcggaccagccactcccgagcccgccaccacactacgacccggcaacccgggccggcgaaaggtagcggcgaaagcaacgacccgcagcccttgacagcaaagaggact

SEQ ID NO: 6133 - DNA, 1155 bp, unidentified
  source 1..1155: mol_type = unassigned DNA; note = element_97f83eb
  misc_feature 1..2: note = core
  misc_feature 3..207: note = LE
  misc_feature 208..1143: note = CDS
  misc_feature 1144..1155: note = RE
  misc_feature 13..213: note = bridgeRNA
cttgtcttatggattggattggctctcggtgtagaagggagccactgcccgccacgccatttatggcgggcagtggcggcggtttgatcgtaagtggcttggtcgtcgtggaccgcgtggaagtttgatcaaccgccgccttcaccaggggcctgaacggatacgcgtgtgacaaggcacgcatgacaagcataggacatggcgaagatgacagatcataccattggcgtcgacatatcgaaatcccatttggacgtgttccggttggaagatggtgcggcgcagcgcttcgagaatgcggctgcgggatttcgcgctctggtcaaatggctgggcaaggctccggtggcgcgggtcgtgttcgagccgacgggggcgtatcacaaagcttttgaggtggcgctgggagagaagttccccttggtcaaggtgaacccgctgcaggcgcgccggttcgccgaggcgcacgggaccagggccaagaccgatgcggtggatgcgcagatgctggcccggatgggggcggcattcgaccttgcgccccaggcaccgtgttccaaggaaatgcgtgttctcaaggaattgcatgttgcgcgtgccgggctgatcaaggatcgcacgagattgcgcaaccgcgcccaaacccaggatatcgcggtgctgaaacgccagaccaaggcgcggctcatactggtggaacgccagatcgccgagctggacgccgaaatcgcagagcgtatcgaggcagagcagaccactgcacgcagtcgcgatattctgtgttccatgccggggatcggtgccgtcacggccgcagccatgctgaccctgatgcctgaaattggcacgcttgaacgcaaacaggtcgcgagcctggcaggcctcgcgcccatcacccgccaatctggccagtggcagggcaaagcgttcatcggcggcggccgcaaaccgttgcgcgatgccctctacatgcccgcgttggtcgccatgcgggtcaacccggatctcaaggcaaaatacgccgcgctccgtgacgccggaaaacccgccaaggtcgccatcgtcgccgtcatgcgaaagctgattgaaatggccaatgctctcgtcaaagctgatcgcaagtggacgtctgaaaccgcttgatcaagacggata

SEQ ID NO: 6134 - DNA, 1430 bp, unidentified
  source 1..1430: mol_type = unassigned DNA; note = element_97f9cf9
  misc_feature 1: note = core
  misc_feature 2..79: note = LE
  misc_feature 80..1144: note = CDS
  misc_feature 1145..1430: note = RE
  misc_feature 1199..1421: note = bridgeRNA
taatgggatggacccgccgtgctcccgccctacccagccagcaaaactagcggggggctaacagcaccaggagcttcccatgtcccgcaagactaccaaccttgaagcagttgcaacaatcgggatcgacatcggcaaaaacacgttccaccttatcggtctcgacgagaagggcgcgatcgttctgcgacagaagctgttgcgcggccaagttgtcactcggctcgccaacatgccgctctgcctcatcggcatggaggcgtgcgtcggggcgcatcacctgggtcggcaacttaaggcgctcggccacgacgcccgactgatgcctgcccgttatgtccgcccgtattcgaaaggtcagaaaaatgactttcgcgacgcggaagcgatcgccgaggcggtgctgcgtcccaccatgaagtttgtcgccatcaaaacggtcgaacaactcgatcttcaagcgctgcatcgcgtccgcgaacggctggtttcccagcgcaccagtgtgatcaaccaaatccgtgcattcctgctcgagcgcggcatcgcggtgcgccaggggctgcgggcgctgcggaccgagattcccatcgtccttgcgatgacggacaagctgtcaccccgcatgatccgtatgatcgaggatctctgcacggattggcactatctcgatgagcgcatcgagaccgtgtcggacgagatcgcgacattgtctgaggaggatgagggagccaagcgccttatgacggtgccaggcattggtccgatcatttcaactgcaacagtggccgcgatcggcaggggcgacgtgttctccaagggcagagattttggcgcatggctcggtctcgtgccgcgacagatgtcgaccggtgggcgcacggtcctcgggccgatctccaagcgcggcaatcggtgtttacggatgctgttcgtgcaggcggccaacgccgttctgctgcatccgcagagctgggagaagcatggcctcaaatcctggatcgaggccgcagctcggcggctcaatcggttcaagttggcaattgcactcgccaacaagctcgctcgcatcgcctggggcgttctgcagggcgggcgcaacttcgaggtcagatcaatgaagtctgcggcacaagctgcgtgaatctgcctacatgcctgtgatcggcagcaacgcaatgtgaggccgtaatcgtttccccacccaggtctgcgagagaaacagaagagatggagaattggtctccccagcgcatccgagaactgagccccgatatagcccttcgaggcatggtcgctaatgagatcggatgcgcgcggatttccatgatggcccggagcatgagctccaaagagaggcctgatacattggtgcaagaccatactccagccttaccgttttctcttgcaacgcacggcgggtccataca

SEQ ID NO: 6135 - DNA, 1141 bp, unidentified
  source 1..1141: mol_type = unassigned DNA; note = element_9800c86
  misc_feature 1..2: note = core
  misc_feature 3..197: note = LE
  misc_feature 198..1127: note = CDS
  misc_feature 1128..1141: note = RE
  misc_feature 11..207: note = bridgeRNA
cttgtatcttggcattttagccgtcgtgctacaaaacagagcggctgcgagatcctaagcgtctcgggtcggagctcattgcccagaccgtggtgtagtttgatccgcagccgccgtgttctttcaaactcgaacagttacttgagcgatcccctctgtgcgggaccagctcgaatctacaagaaggagtctctcatatgaaggaagaagttgtctactgcgggattgatgtggccaaggagcaactggatgtcgctctggggcaagagcgctgccgagtgcctaataccaaggagggcatcgcgcagttgttaaagcgattcaaagggcagcggctcaagctgcacgtgatctgcgaagctagtggcggttatgaaaaagccatcgtcacggctctacaaaaaagcgctctggcggtcagcttggtgcaagctaaccgcgtgcgacagtttgcgcgcgcagctggcgttttggccaagaccgaccagatcgacgctggcatcctgttgagcttcggtatggccatgcgcccgccccccagtgctgcgcagtcggagcaaatcgctcgtttgcgtgaggtggatgcacagcgccggcacttaagccgactgcttcgcgcagaacaaaaccgccttgcgccggtatcctgcgcagagctgcgcagcttgagtcgcagtctcatcagcaaagtcaaaaagcagatcagcacaattgacgtgcgcatcgccaccttaatcgcgcaagaccaaaacctctgcgccaaggcacaaaagctcacttccattgctggcgtgggacctcgcacagccgcactgctcctggcccaaatgcccgaactaggcagcctcaaccgaggtcaagctgccgctctcgctgggctagctccatttaaccgcgacagcggctcgatgcgtggcaaacgaacgatcttcggtggccgccgcgctgtgcgcaccggcctctacatggccgctgtagccgccgcacgctacaaccatatcctggctcctttttatcaacgcctccgcgctgccggtaaaccgcccaaagtggctctcactgccgtgatgcgaaaactgctcctcgctctaaatagcgctcttactccaacactaaacccagcttgaaatcaacacagtta

SEQ ID NO: 6136 - DNA, 1373 bp, unidentified
  source 1..1373: mol_type = unassigned DNA; note = element_98044b9
  misc_feature 1..4: note = core
  misc_feature 5..256: note = LE
  misc_feature 257..1363: note = CDS
  misc_feature 1364..1373: note = RE
ctcactggtgcaccatccttgtatcggtaaccgtgaggctgctgatgcacccgaggtgccgccaggccaccgccccgctcgctcgacgcgttgaagtccaccatgagttctgcggggcctggcggttacccggggcgtgccgaccgtcgacagggctgagcgccatcgagcgccgaacagtgagcggactggcagtcacgtcccggtaccggaattgagggtgcctccccactgggctaacagcgaggaggcagacatgcagtctgccagtacgagtttgccggcggtagcaccagatggcgtgaccgccggcgtggactgggccagcaccgatcacgtggcctgcgtcgtggacgcagccgggaaggtggtgacgcgcttcaccgccgctcacaccgccgacgggctcaaggcgctggtgaaaggcctggccagggccagggcggccgaggtcgcgatcgagcgcggcgacggcctgatggtcgaggcgctgctggcggccggcctcaccgtcgtggtgatcagccccaaccaggtgaagaacctgcgctctcgctacgggtcggcgggcagcaaggacgaccggttcgacgcgttcgtgctggccgacaccctgcgcaccgaccgggcccggctgcgttccctgaccccggacaccccggcgaccatcacgctgcgctctgccgtccgcgcccgccgcgacctggccgcccaccgcgttgcgatgtgcaaccagctgcgcgcccacctggacctggtcttccccgccgccgttggcctgtttgccgacctggactccccggtcagcctggccttcctggcccgcttcgactgccaggaccgtgccgactggctgtcgccccggcggatggcagcctggctgaagagcaccggctacagcggccgcaccagccccggggtgctgcacgaccgcatcaccgcagccccccgcggcgccaccggcgacaacggcaccgcccggacccacgtcacccgcgccctggtcaccgtgctggttaccgtgctggtcaccctcgccgagcaaatcaaggccctggcagcccagatcgccgagcagcccggcctgcacacagacgggcacgtcttcacgtcgctgccccgctcgggcaccgtccgcgccgcccggctgctcgccgagatcggcgactgccgccagcgctcccctggcccctcctcgctgatgtgcctggccggggtcgcgccgtccacccgccagtccggcaagatcaaagccgtcttccgctgggccgtcaacaagcaactccgcgacgccgcctgcgacccagcccagcacagagccctccaacggctcctcgctcaagatcaactggccgcagcttgacacagggcta

SEQ ID NO: 6137 - DNA, 1398 bp, unidentified
  source 1..1398: mol_type = unassigned DNA; note = element_9811975
  misc_feature 1: note = core
  misc_feature 2..89: note = LE
  misc_feature 90..1124: note = CDS
  misc_feature 1125..1398: note = RE
  misc_feature 1170..1390: note = bridgeRNA
caatgggatggacgcccccaccctcaacggcatcagcgcgccaaagtggaagcgttagcagccacttaacgaggatgggagcatccgccatgaatactacaactgtcggtattgatctggcgaagaacgtttttcaggtgcatgggatcgatgcacgagggaaggtggtgctgcgaaagcagctgcgccgtgagcaggtggcggtgtatttcgggaacttgccgccttgcttgatcggcgtggaagcgtgtgcgaccgcccatcactggggccgtaggcttgagcgccttgggcatacggtacgattgatggcgccacagttcgtcaagccgtacgtgaagacgaacaagaacgatgccgctgatgcggaggccatctgcgaggcggtgagccggccgaatatgcgcttcgtaccgatcaagagtattgagcagcaggccatcctgtccgtacaccgtgcacgccagggcttcatcgaggcgcgcacggcgcaggccaaccagatccgcggcttgctcggcgagtttgggttggtcatcccgcaggggatttgccatgtcgcccagcgcgtaccggcgctgctggaggatgccggcaacgagctgccgttggcgttgcggcaactgatcgatcgcctgacctgtcatctcaaggaactcgaccagcaggtacgtgagctcgagcgccagatcatcgcctggcaccgcggcagcgagctcagccggaagctcgagaagatccccggcattggcccgctggcggcgaccgcactcgtcgcctcgatcgccgacgccagcagcttcgataatggccggcaggtatcggcctggctaggccttgtgccacggcaaagctcgagcggcggcaaatcagtgcttctcgggatgagcaaacgtggcgatgtgtacctgcgcacgctgctgatccacggggcccgctcggccatcctcgcggccaggcggcaaaaggagcgcaagaacgtctggctgaccaacttgcttgaccgacggcacgccaatatcgctgccgtggcactggccaacaagaacgtgcgtaccgtgtgggcgctactcgcgcacggccgcgacttcaagcctgactacttgccggtacccgccgcatagccaaaacagctgccagcaagaatgtccgcgacaggagatcacaccaccgattgctcaggcgatcacgcagtgatggcaaaccaggttagaccgtggttggaaaaacccagaaaatccgcagcacctcgagtgcaaacacgcgaatgggagccagccagcagatcccatcagggacagcggcacaggccgcagcaaaagtccgaatgtacgggtgcaatctgtccctgcaagcccccacgaaccgaaagcctggcaagcctggggcacccatgta

SEQ ID NO: 6138 - DNA, 1396 bp, unidentified
  source 1..1396: mol_type = unassigned DNA; note = element_9813d3c
  misc_feature 1: note = core
  misc_feature 2..138: note = LE
  misc_feature 139..1101: note = CDS
  misc_feature 1102..1396: note = RE
  misc_feature 1132..1394: note = bridgeRNA
atggtatggacgcctccccctcgctgatcgaccgcgaactgtggagacacaggtgatgaagggggcctcgcagtcaacggcatcgagtgccaaagtggaagttctatgcagcaaccacttacagacggaggccccgaaatggatcgtacgacgtatggcttggacattgcaaagaacgtgatgcaactgcactgggttgatggcgagacgggtgagatcgggcgcaagaagctcgctcgagccaggctgggcgagttcttcgcacagcggcagccggcgcgccaggtgcgcgcgtttgtgcgcagcaacaaggatgacgcggccgatgcacgcgcgatctggctggcggcacagcattcggacattcgtcgggcaccggtcaagacaatcgagcagcaagcggtgatgtcgctgcaccgggcacggtcgcactgggtgagcgtgcgcaccgccacgatcaacatgctgcgcagcttgttgtatgagttcggtgtcgtgctcccgggcggcaagaaggccgcactgaagacgatgggggtcaagcgcgccgagatcgacgatcaactgtcgccgctgatgcgccggctggctgacctgcagctcgaaacgctcaaggaggtcgagcgcagcatcgatcggctcgaagccgagatcgccgggcagcaacgccggatcgaccaggcgcgcgtgctgcgcgaagtgcccggcatcggcgtgctcggtgcgacagcgctggccgccacgctgggcgatgcgagcggctggcgctcggggcgcgagttcgcagccagcctggggctggttcctgcgcacagcggtacaggtggcaagactcgcatcggccatctgagcaagcgaggcgacccctacctgaggacattgctcatccacggtgcgcgttcggtgattgcgcacgccaaggtcatgcccgtgtggcttgagcaattgctgcgacgccggccgccgaacgtggcggtggtggcgttggccaacaagatggcccgcacggcctgggcgctggtagcgcacggtcgggtgtaccgatcggagtggaagagcactccgccaagtggctgcggcgcgcaagcgcaggcagcttagatcaacaacctgagacaacaaccgataggagtggaagccgcaaagagtgcgtgagtcgagtcgatgaagtgatggtggagcggtcggaccgcgggtcgggtaaagctgaatttttgtccgggcaagccttgtgcgaagcccgtaccggagatgagcaccgaccttgcgcatgaccatcaaggccagtgggcgggcttcggtccgatctgcacaaacaggctggatataagaccgcagtcattaccgccagccggaacttcaagaactcgcttgccacacgggaggcgtccatata

SEQ ID NO: 6139 - DNA, 1364 bp, unidentified
  source 1..1364: mol_type = unassigned DNA; note = element_98147aa
  misc_feature 1..2: note = core
  misc_feature 3..81: note = LE
  misc_feature 82..1107: note = CDS
  misc_feature 1108..1364: note = RE
  misc_feature 1084..1351: note = bridgeRNA
tgatggattggatgcccctcctgccggtccaatgtggaaccgtccgagctgctctggctcggagcaatgcaggaggaagaaatgtcagaggtattcatcgtaggcgttgatttggcgaaacgcgtcttccagattcatgctgctgacgttggcggccatgcgatctaccgcaagaagctaagccggcctcagttcgccaaatttctggcagaaacaccgggctgcgtcatcgcaatggaagcctgtgcttccgctcactactggggccaagaggcgaaatccgcaggacatgaggtgcggctggttccagctgggtacgtgaaaccgttcgtcaaacgccacaagagcgacgctgtcgatgcggaggcgattactgaagcggcgttgcgaccgtcgatgcgcttcgtacctgtgaagacgccagaccagcaatcccaagcgatgctcttccggacacgcgagatgttcgtgcgccagagaacgcagagcatcaatggacttcgcgcacatctggccgaattcgggattgtgcttcggctcaggatccgaaacccggacaccttcaggcgtgaagtcgcagcacgagccagcgagttgcctgacctggcaggatcgttggcagagtgccttctggtacagatcgcttcaataagcgagcaaatctcggctttggatatgaagatcaagctgcgcgcgaggtcgtcgcgtgacgcgcagttgatgcaaacgatgccgggcgtcggccctatgtcggcgatggcagttcaggcattctgcccgcccgcagagaatttccggaccggccgcgatttcgccgcgtggctcggcttggttcccaggcagcattcaaccggcggcaaggaacggttggggcgtgtcacgaaaatgggccagaaagacgtcagacggctgctgatcataggagctatgtccgtgctcaatgccatcgaacggcgaaagcgttgcgtcgaaccgtggctcacccgtatgctcgagacgcggcctcgaatggtcgtggcggttgctttggccaaccgtatggcccggagactttgggcaatgttggcgacgggccaagactatcaagttccgaggtctgtcgcataaggcaaacctcagatcccggcaggtgtgtgaggacgaaaggatcgaataaggaaagcggatcgacgagaatgaactcgggaaaccagtgcaacccttcgcggcttcgagcccgataaactgatttggacccaagttcgcgtatctccataagggccagcggtcacatgcgccgcacaaacaggccggacacgtgacagcacccgatcatgctatccagacttcgataatttgctcgcataaacgggggcatccacacg

SEQ ID NO: 6140 - DNA, 1439 bp, unidentified
  source 1..1439: mol_type = unassigned DNA; note = element_9821588
  misc_feature 1: note = core
  misc_feature 2..489: note = LE
  misc_feature 490..1422: note = CDS
  misc_feature 1423..1439: note = RE
  misc_feature 8..232: note = bridgeRNA
cgttatcttttagctggtccttgaaaccgagggctacggtcgccagacccggtatgacttctcgcccctgtcatcaatgatccggggggtggtgtcgccgggtgtgggggcgtcgacggaccgctgatagggacagggccgctgatcgtgagcaggtctcttcataacgtgggtgtcgggtgttgacgtcggatcggcgaccggtggtaaccggacaaaggactgcttcatggacacgagttacgccgttttttgcggcatcgacgtgggaaaatccgaacatcacgccgtcggtctcgccgtcgacggaacccgtctctacgacaaagccctacccaatgacgagggccgcctgcgcgctgtgttcgaccgcctcgccacacacgggccgctgttgatcgtcgtcgatcagcccaacacgatcggcgccctgccggtcaccgtcgcccgatcctgcgggcaccaggtcgcgtaccttcaggtctgtcgatgcgccgcatcgcagatctgtatcccgggcaagccaaaactgatgcgcgggatgcgttcatcatcgccgacacggcccggaccatgccccacacgctgcggcgagtagataccggcgatgacacactcgccgagctggatgtgctgatcggtttcgatgacgatctcgccggcgaagcaacccgcatcagcaaccgaatccgcggactgctgaccggcattcaccccgcgctcgaacgagtcctcggaccgcgtgtgacacacccggcagtgctcaagatcctgtcccgctgcggtggccccgccggcatccgcgctgctggtaaacgaaaactgaccgctatcgccgccaaaaacgcacccaggatgggggcaaggctggttgcggagatctacgccgcactcgagtctcagacggtagtggtgcccgggtccgcggctgccgagactgttctacccaaactggcggactcgctcaaagagacactgcaacaaagtaaaacaatcgctgtggacgtcgagaggatgctcgatgcccaccctctttcctcggtcctgatctcgatgccaggcatcggaatcaggacagcaccacgcatcctcctcgaagtcggtgacggttcggcattcaaatcagccggacacctcgccgcgtacgccggcatcgcacccgtgacccaccgatccggaacctcgatccgcggtgaacaccccgcgaggtcgggcaaccggaaactcaaacgagcactttttctttcggcctttgccgcgctgcacgaccccaccagccgcgcctactacgaccgaaaacgagccgaaggcaagaaacacaacgcggcgctcatctgcctcgcccgccgccgatgcgacgtcctattcgccatgctcaagaccaaaaccctctaccaaccgcccacaactcaagccgcttgacagaaaccatagggaca

SEQ ID NO: 6141 - DNA, 1144 bp, unidentified
  source 1..1144: mol_type = unassigned DNA; note = element_982f06a
  misc_feature 1..2: note = core
  misc_feature 3..193: note = LE
  misc_feature 194..1069: note = CDS
  misc_feature 1070..1144: note = RE
  misc_feature 36..202: note = bridgeRNA
cttgtatgtcgggaaaggagcattgtgaggggtgacgggggccgagtcgtcatagttcagcccccgtcgcgaccggaagcccgcaggcgtctcggatatcagaccgcgagtgagcttggtgctccggtcgcttcttccatacccgaacagttgccagggcacgagcccgcatcagcaaggatgggatacgaagatggccatgctctctttctgcggtgtcgacgtgtcgaaggaccgcttggatgtggtggtgctgcctgaggggtggttcttttcggtgagtaacgacacagccggctgggccgagctggtcgcaaggttgcgcccgctcacggtctccgcgattggccttgagccgagcggtggttacgagcgcgggatcatccgtgccctgctcgcagcagggctgtcggtgcgacgtatcaacccgaacaagcttcgtcagttcgcccgcgcccgcggcgtgctggccaagaacgaccgcctcgatgcgcggctgatcgcagagtatgtcgcgatcatgtcgacacgagttgtgcagcgggacgctgcggtcgaaaggctcgccgagatcgtgacgatgcggcgacagctgtgtgacgagcatgttgcggccgagaaccaggcggctcatctcgaggatgccatgctgaggcggctcagcaaacgccgccagatgcgactggaggccgatatccgcctcctcgacaagcgcctggccgagatggttgccgccaatgtggctctcgctcagcgctatgagctgctgacctcgatgccaggcgtcggcccggtgctggccttcacgctcatcgccctgttgccagaactcgggaagatgagccgcaaacagatcgccgccctcgtcggcctcgccatgacttcgacagcggcaagctcaagggacaccgcagcatctacggtggtcggatgtcggtccgtaatgtcctctacatggccgccctcagcgcaagccgatacagtcccgccctcaaagccttccacaatcgcctcgccgacgccgacaaaaaatccaaggtcatcatcgtggccgtcatgcgaaaaatgatcacaaccctcaacgctatgctccgcgatagtgctgcatggcagccgcgatccgcctgagccaacaacacagttg

SEQ ID NO: 6142 - DNA, 1377 bp, unidentified
  source 1..1377: mol_type = unassigned DNA; note = element_9830376
  misc_feature 1..2: note = core
  misc_feature 3..83: note = LE
  misc_feature 84..1103: note = CDS
  misc_feature 1104..1377: note = RE
  misc_feature 1143..1372: note = bridgeRNA
cgatgtgatggacacctcccaccttacggcatcagagtgccagactgaggtgttaacttcagttcccagggggaggtgtccacatgaatattaaacgtattggcctcgatctcgcaaaacaggttttccagcttcatgccgtagatcaccatgaacgcgttgtgctgcgtaaaaccctgcatcgttcacagatgctcagctttttcatccggctcgaaccctgccttatcggcatcgaagcctgcggctcctcgcattactgggcccgggagttaacccgcctcgggcaccgggtgcttattatcccgccccagttcgttaaaccttatctgaagggcaataaaaacgatgccaacgatgccgaagcgatctgcgaggcggtcagcaggcccgggatacgctatgttgccatcaaatctgaggcccagcagagcatgcaggctgagcaccgggtccgtgcccggctgctgcgggacagaaccgcgctgagcaatgagatccgcggaatgctggctgagttcggccttgctcttcctgtcggactggccgccctccggcgggccctgccggagatactttgtcagcaggaacaatgggatgaccgttttatccgcctgctgtgtgagctggcggaagagctgcaggttcttgatgcgcggctggagcgttacgaccgccggctcagacaacagggacaggaagatgatcgtatcagacggcttcagaccatcgggggtatcggtccggtaaccgccagcgccctggttgccgctgtgggtgatgcagggcagttcaaaagcgggcgggagatggcggcctggctggggctggttccgcggcagcactcgagtggcgggaaaacccggctgggtcatatcagcaagcggggggacagctatctgcgaacgctgctgatccacggagcccgtgcggtactgaatgccagcggtcacaaggaagaccggcgaagtaagtggcttcagtcagtggctgaaaggcgtaacaggaatgtcgcaacggtggccctggcggccctggccaacaaaaatgtgcgtattgcctgggccgtgctgagccggggggaagagtatcgcgtggtgtaatacagcccggcgtcatatcagagaagagtaatcctgtcgtgagattgcagggtcattaagcacagatgtgtaacaggtaagaccgacacctgaaaactccggtttacccgaaggctccctgcgaagcaaagccgttaggccgaatggaaccaggtgtgcagataacatcatggccgggtacgacggtaccgtaagagaggccggatatacgaaagcatcttactcccgttacacaaaatgcagaatggcttgcataacgggaggtgtccatata

SEQ ID NO: 6143 - DNA, 1220 bp, unidentified
  source 1..1220: mol_type = unassigned DNA; note = element_9830fb7
  misc_feature 1..3: note = core
  misc_feature 4..222: note = LE
  misc_feature 223..1185: note = CDS
  misc_feature 1186..1220: note = RE
  misc_feature 35..200: note = bridgeRNA
gttgtatatttaaatttatttttatacctttgcattcgatttacatctaagtatggaataaggccgattaatcgttagtgtttaacaccgtttcgaacgttttgtccccatactttttacatccaaaaactggatagttcgttgggctgtgaccccgcattagcaacgatagtgttcagatgtataagatgtttatctaaatgctattaatctataacggttatgatgtacattggtattgacgtaagcaaggattcgttcgtagcagcttatccaagaaagaatggttacacaaccaagactttcaagaatgacacaaaaggagtgcgtggttttattacttcgcttccagaagattgccattgcgtgatggaggcaacaggcaactacagcatgttattgctttatctccttcagcaagcaggcattcctactagtatggagaatccgcaaaagattaagcatttctcgcgcgctatgatgactgtcaccaagactgacgagatagatgctaagcttattgctctgtatggcgagaaaatgaatcctgaaccatacaaaatacccacagagagcattcttttgctaaagcaaaaacgtactgttttgcgccaattaaagaagcatttaactgctactaaaaatctacaacaagcacttgcagtattacctaaacaggatcttgcaagcaaacgcactgtagagaaaaccattaagtttttagagcgccaaattgcagaattagaagatgagataaccaatctttctaacaaagagtatgctcgccagatgtctttgctaacatccattaagggaattagtaatactattgcatctgcacttattgtggctactggtggttttacatactttagcaatgctaagcagatttctagatatttagggctttgtcctacatatcaacaatcaggtacatcagtaaatgtcaaaggtcatattaatcgcaatggcgatccgcacctacgtggtcaattatatgttgctgcgcttgtatgtattcaacacaataaagcatgtaaagacacatatgaaaaattgcgtgctaaaggcaaatcagctaaggttgcacttattgccatagcaaataaacttattcgtcaagcgtttgctgtagttacaaataatcaaccatatattgatggttttgtatcgtcaattgcataaaagtgatattttttattaattttttaatatagttc

SEQ ID NO: 6144 - DNA, 1155 bp, unidentified
  source 1..1155: mol_type = unassigned DNA; note = element_9841423
  misc_feature 1..2: note = core
  misc_feature 3..210: note = LE
  misc_feature 211..1143: note = CDS
  misc_feature 1144..1155: note = RE
  misc_feature 12..213: note = bridgeRNA
cttgtcttatgctgatcctggctcttgtgcgaaaaaggagccagcgcgtgccacgccatttatggcgcgcgctggcggtggctggatcgtcaaaggcttggtcgtgaaggaccgttttaaagtgtgatcagccatcgtcttcgcctgaggcctgaacggatacagagcggcgtaaagccctctatgacaagcataggacacgcgaggacaatgaaagataccatcggaatcgacatatcgaaagacactctcgacgcgcatcgtcagatcaataaccaagcgcggcaattcgcgaacaccccagctggcttgcgggcacttcgtcgctggatcggcgccacagtgccggatctggtggtctatgaggcaaccggtgcttatcacgccaccattgaacgcagctttggcggtgttctacctctcgtgaaggtgaacccgctgcaggcgcgccgtttcgcgcaggctctcgggacaagggcaaagaccgatgccgttgatgcgcgcgttctggccatgatgggatccgcgctcgatcttgtgccggatgtgccagcagacaaaaatcagcctgctctcaaagagttgcagatcgcacgcatggccctgatcaaggaacgaacgcgattgctgaaccggtccaaaacgcagtccctggccattttgaagcgccagtcgaaagcccgacttggacagattaaacgccagatctctgaactggaagaggcgctactcgatctcgcgcgccagtgtccgaaacgcgcacgcgccttcgacattctgtgttcgatcccggggctgggccggatcactgcggtcgcgatcctcgtcgagtgtccggaaatcggcacgatgacccgcaaacaaatcgcgagccttgccggtcttgctcccatgacccgacaatcgggccaatggcgtggtacggcgttcatacagggcgggcgcaaattcctgcgcgatgcgctctatatgcccgcactcgttgcagcccgctacaatccggatctgaggcagaaatatctagcgatgatatcgcatggaaaacccgcaaaagtcgcgctgaccgcactcatgcgaaagctcatcgaactgaccaacacactggtccaaaaagatcgggaatggagccctaaatcagcttgatcaaaacggata

SEQ ID NO: 6145 - DNA, 1524 bp, unidentified
  source 1..1524: mol_type = unassigned DNA; note = element_984a25d
  misc_feature 1: note = core
  misc_feature 2..230: note = LE
  misc_feature 231..1460: note = CDS
  misc_feature 1461..1524: note = RE
  misc_feature 14..245: note = bridgeRNA
ctacttgttgacttgccctaggaccgatgcccggccaggctcggtctaggcgcccggctcgtcgctctcttttcggctgcccacgctggttgtgtggctctcatttggcctgcgcgggccgggtgctgtcttgggcagggagaggctcaagaggggtttgcccaggctcgaagtagcggtgccctccctcgccccgtacgtcaacctgcgggatcaggcgggagggtgtcatgagcgcagtggtgatcgggatggatccgcacaagcggtcggccacgatcgagatcatggacagtgatgaggccgtgctgggcacgggccggtatggcactgacgtgcctgggtaccgggcgatgcgccgggcggtgcggcactggccgcaacggacctgggccgtcgagggatgccagggcatcggccggcacatcgcccgccggctgatcgccgacggtgaacgcgtcgtcgacgtcccgcccaagctgtccgcccggaccaggctgttcgccaccgggcagggccgcaagaccgacgcgaccgacgcgcactccgtcgcgctcgccgcgacccggatgaaggggctgcgcgaggtggctgatgacgagcagctggcagtactgcggattctcgctgaccgccgccggtcgctgggtgaagaccacagccgcatgatctcccagctgcaccagctgctgctcgagctgatccccggcggggcgaagaaaaacctgtccgcggcccaggcgaaggcgctgctggccacagtccgcccgcgggacgccgcaggccaggcacggcgccgggtggccgctgagctgatcagcgacctggaacgcatctaccagcgtaagaaagccgccgacaaagaactgcggaacctgctcaaggagaccagcactacgttgaccagcctcaacgggatcggcccctccggtgccgcccggctcctggtcgaggccggcgacatcacccggttcccctccaaagcgcacttcgcgtcctggaatgggaccgccccgatcgacgcgtcctccggcgaccaggtccgccaccggctgtcccgtgcagggaaccggcagatcaaccgcaccctgcacatcatggccgtcgtccagctccgccaccgcaccagcgagggacgcgcctactacgaccgcaaggtcgccgccgggaagacaccgatggaagccatgagatccctcaagcgcaggctctccgacatcgtctaccaccagatgatcctcgacgcccgggcgaaggcagcgggcccgggaggacacctggggacggctactggctccagcgcggccggctcgcaccccgctgccggcacttcggagaagtcacttcccgggcccgccaccagcgaccctacccctcccaggccggaccgtttttcaggtctttccgccgccccggccccacgccggaccgcagccgctgtcaagcgcccctctgcttgacagcggcgaggaccggcacacactcacaagggcggaaacgaccccccttgacatagaggggagc

SEQ ID NO: 6146 - DNA, 1231 bp, unidentified
  source 1..1231: mol_type = unassigned DNA; note = element_98567d5
  misc_feature 1..3: note = core
  misc_feature 4..360: note = LE
  misc_feature 361..1179: note = CDS
  misc_feature 1180..1231: note = RE
  misc_feature 48..215: note = bridgeRNA
catcctatgtttgcaaaaggaagttctttggaaattttataaatttatttcaacagaagaaagagaaagataaaagctaaatcttgtcattggtcaattaagactgttcggaatgctagttcctttctctctctgcttttgaacttggacagttcgttggtcataaagaccgtatttaggattgataagtctcaagcagatttcttccgtttactttaatttccttaaaaacaaatgtatgaaaaaaagtaacaattatgttggaattgacatctcaaaattaacttttgatgtagctatttctagttctgatgacaagtataagtattttaaatttgctaacaatcatgaaggtttttgatgtttttagagtatttaaacgtctctgaatcaacttgtgtaatggaagctagcggtccctattatttaaaattagccacttttttgtcagatcaagcaatagatgtttgtgttataaatccattaataattagaagattttctcaaatgcgaatgagtagggcaaagacagataaaaaagacgctatgcttattgcagaatatggaaaaactgaaaaacctgatttatggcaaccagaagcagcctatgttttagaacttaagcagatgcaagcttatttagagcaattgaataaaaacagaacagggtttacagttcaaaaagaagcttttgatcaaaaccctattaaaagtgaagtgcttgaaaaaagtttaaattctgtgatagaaacaattgatcaagaaataaagcaaatcgaaaaaagaatggagttaataataaaaactcatcatcaagaaatgtttaatcagctaaaaagtataccaggaatggggagtaaaacatctttgcttttaattgtaatatctggaggctttagtaagtttaataatcataagcaacttgcttcgtatgttgagatatcgcccagaatatttgaatcaggaacaagtgttaaagggaaatctaaaatttgtaaaatgggtatgagtaaaattagagctttgctttacatgtgcgcttggtcagcaaaaagatgcaatgaaacttgcaaagcattatatgatagattggtagaaaaaggaaaatcgaaaaagcttgccttaattgcagttgtaaacaaactattaaaacaagcttttgcgattgcaacaaaataagaatattattcagtgaaaattaactaaaataaatttggaaataaacacagtt

SEQ ID NO: 6147 - DNA, 1838 bp, unidentified
  source 1..1838: mol_type = unassigned DNA; note = element_985cb87
  misc_feature 1..3: note = core
  misc_feature 4..238: note = LE
  misc_feature 239..1453: note = CDS
  misc_feature 1454..1838: note = RE
cttatatgttaagattttggtaagctctctcaaacaagagctgagcaggatgagcctgctcaagaaacactgctggggaaaggctcttttctccacacagcttgactgataaagcaagattgtccttcccctggcagccctcctgggcacatcgatgattagagggtcgttgcttcgagcactcggcatataaggacccgatccccccaggaatgcttctcgcaaaggagatggaacgatgtggtacgttggtttggactgggcagacacacatcatgacgttgatgtcctcgatgaagccggtaaacatgttggagcgcgccgcttttcccacagccaggaaggcttgcatgacctgaagcagtttttgttgagctttacctctcaacctgaagaactggcttgcattctcgaaacgaatcacgggctgctcatcgctttcctgctttcggctggccttcccgtgtatccagtgaacccgaaaacgatcaatgggttgcggaaagtagcaggaggcaagactgatcgcattgacgcgcgtttgttggcaaaagcgggatacttcaacttggctgagctgcatcgcttggaacctgatagccctaccgtccaggaattgaaaatgttgacacgcgatcaggatgctctggttcagatgcaaacgcgcctggtcaaccaattgaccgcttgcctcaaggaatactatctggtggccttgaagttgttctccaagctccagcagccttccacactgcgttttttgcaagcgtacccaactccccaagcagcacagtgtgcgtcggttgaagagataacggctaccttgcgtctgggaacgtttcccaacccagcacaggccgccgcctcgatggttgaggaactgcaccatcctcagttggtcgccagtgaagtcaccgtgcgcgctaaatcgcggttgatgctgtctctggtcaaacaattgctggtggtcattgaagaccttgccagctatgagaaggcgattcagaccctttttttgacccataaagaccatgcgatctggagttctcttccacgagcaggcaagcgtctggctccgcgcttgcttgctgaatggggggatgatcgcacacgctatgctgatgccaacagtgttcaggaactggctgggacagctcctgtcccctaccaaagcggcaattacgctaaggcgcacaaacgctttgcctgcgtgaagccctggcgcaatgatctgtaccaattcgcctggcaatcgacgctctcggagccgtgggcggcttcgtattaccaacgcaaactggcagaaggcaaaacgcacagcatggcccttcgcgctctggccaatatctgggtgcggatcatgtaccggatgtggatgagtgagacgtgctatcaagccgagacctttgaagccgcgaagctggctcacgcgcctcgccaacgtgccgcctgaacccaggctgtccctttgcgtcacacttggttgggcacgctcagcactgcgaagttctttgtcagtgctgatatcgtgtgctccaacggagtcgcccaagcggttcccgccgcgtcccttctgccgacggtgagccgttcctgcgcacctgcctgttgctccaacgtctgccgcggcccaccaccgcgttcccgactcccggtgtgggttgctcgctccaggccacaccgagtcaaggccgcgcaggtggtgagagagtcgggtgtgggcgcgcttgtcttggccttgaccggtgtggaaaacttgcatcaccacacgggaggcagcttcacctacgttcaccttgctttttcctttcttgtttttggctcttgacatagagggt

SEQ ID NO: 6148 - DNA, 1587 bp, unidentified
  source 1..1587: mol_type = unassigned DNA; note = element_9861db8
  misc_feature 1..3: note = core
  misc_feature 4..264: note = LE
  misc_feature 265..1479: note = CDS
  misc_feature 1480..1587: note = RE
  misc_feature 11..241: note = bridgeRNA
cccattacagtattaggtgagtcctcaaattgattcgggacttggtcgccgaccgcggtatggctctttcgccctgtcatttccatgatccggggggtgctgccgccgcggacgggacgcttggtgaccgctgatagggacatggcccgccgcgcaggtcttgggatgcggtgaggcctcctcgtaatgtggctgccgggaccgggcgtcatgatcgcacgtcgatcgcggcggcccggaggcgaacggacaaaggagaccgccatgcaggccaatgacatcggcgtctggctcggacttgacgtcggcaaggaatcgcaccacgcgtgcgccctcgaccggaatggcgacaaagtccatgacaaacatctcggacaggacgagacggagatccgggacctgctgtcccgcctctcggaacgcggccgtgtgctgctggtcgtggaccagcccaacaccatcggctcgctgcctttggcggtggcccgcgacatgggcgtggccgtggcgtacctgcccggaggggcgatgcgcaaggccgcccagcttctgccgggagacgcaaagaccgacgagcgggacgcgtacgtgatcgcgttcaccgccctgcacatgccgtccactctcagggattgcggcagcgacgacgagaccctcgccgggctgaaagcgccctccggctacgacgaggacctcgcatgggagaccacgcggcacgtcaaccgcctgcgcagcctgctgctgcagatccaccccgcgttcgaacgcgcactgaaatcggacagaatcaccagcggcacggtcctggcgctgctcgagcgctacggaggccccgcgggcatgcgccgcaccggcatcgcgcgcgtctccgaatgggccagaagccgcaaactgcgcaactccgccgccatcgtcgcctccctgttcgacgcgatcggcaggcagaccgccaccgtggccggcaccgaagccgccgagacggtgatccccgcgatcgcccgccagctcatggaactcaaacggcagcggcgcgaggtggcggggcgggtcgagcgcctattggagaaccaccctcttctcacggtcttgaccagcatgccaggaatcgcggccaagaccggaagccagattctcctggccatcgacggcgacatcaccaggttcgagaacccggcccgcctcgccgcctacgccggcatcgcgcccgtcacccgacgaagcggcaccagcatcaggggcgagcacccctcaagaggaggcaacaaacggctgaagaacgccctatggcagtccgcgtccatcgccgcgttccacgacccggaaagcaacgcctactaccggcgcaaacgagccgaggggaaacgccacaacgccgccatcatctgcctcgcccgacgccgttgcgacgtcctctacagcatgctcaaaaacggaaccctctaccaacccaagcaaaccgacctggccaaggccgcctagccgacatcacgcaggaccaacaccgacggcaccggacacagggcgaaacgcgcccgaaaacgccaccaacaaacaaccccaaacggattgacaaaaccatagggacac

SEQ ID NO: 6149 - DNA, 1478 bp, unidentified
  source 1..1478: mol_type = unassigned DNA; note = element_9865669
  misc_feature 1..4: note = core
  misc_feature 5..250: note = LE
  misc_feature 251..1468: note = CDS
  misc_feature 1469..1478: note = RE
  misc_feature 50..225: note = bridgeRNA
ctcactggtgtacctcttggggttgagaggctacgcctggaggggtaggtctctttctctcgtgtacttgtcgtgaccgccccggatgcttgccagcagatggcccgcatgagacctgcggcacggcaagtgccgggaggtctttacgggctacaggaagcagcgccaggtttagcggcccagagcgccagtcagtgagcaacccgcaggacctcccgacacgaacattgtgtacctctggaggtcgtttatgagctatttcgcgggtatcgattggggtggcgcccagcacgcggtttgcgtgctcgacgaccacggcaagatcatcctgagcactcaggtgagtcacgatgcgcgggggctgagcgggctgtgccaacgtctgcagcgcatcgatccggccgtcccggtcgcgatcgagcgtccttcggggttgctggtcgacacgctcctgcaggccggcttggctgtggtgccgattcatcccaacgtggtcaaagcctgccgaccacgctaccgggccgccaccggcaagtacgatgcaggcgatgcctatgtgctggctgatgtgctgcgcaccgacggtcaccgctttcgcacattggcccccttgagcgatgccatgcaggcattgcgggctctggttcgcagccgcgatgatctggtggccgagcgcatcgcactcgccaaccagctgcgcgcactcctcgagagcttctggcccgctcccgccggtttgtttgccgagatcgattcgcctatcgcgctggcgttcatcgagcgctaccccacccccgccagtgctgccagactcggcgagaaacgccttgctggcttcctggccgccgaaggctactgtggccgaacttcccccgcacggctgctgcagcgactcagagaggctcccccaggtcaggccggcagtgccgaacagcaggccaagggcgctgtggtcagcgctctggcccgtgtgctctcggtcctggtcacccagctctcccgcatcacctcgcgtatcgaacacgacatcggcgagttgcccgatggcagcatcctgatgtccttgccccgcaccggacgtctcaacgctgcacagatcctggccgaactcggcgatgtgcgtgagcgcttcgccaccgatgaccagctcgctgccgaggcaggccttgctccggtcacctgtcaaagcggcaaaagcaaagccgtcatcttccgttgggcctgcaatcaccgattgcgtcgcgccctcaccatctgggcggacaactcccgtcatggctgtgcctgggctaaatccatctacgacaaagcacgtgcccgcggctgtcgtcatccccatgccgtgcgcatcctcgcccgcgcttgggtacgggtcctgtggcgcatctggagcaacagatccacttaccagccccagctgcacaacggcgcaagagcattcctcctcaccgctccagctgagtgttgacacaggaagt

SEQ ID NO: 6150 - DNA, 1340 bp, unidentified
  source 1..1340: mol_type = unassigned DNA; note = element_986f31d
  misc_feature 1..2: note = core
  misc_feature 3..81: note = LE
  misc_feature 82..1119: note = CDS
  misc_feature 1120..1340: note = RE
  misc_feature 1094..1325: note = bridgeRNA
agataattggactcccccacaccctggagtgtggggtaatataatcgttaccacacaaatatattatagagagtccgcaatatgtatcgtactaaagttggcgttgatttagcaaaaaaagtaattcaagtttgtatctacagagataaaaaggtgctttctaatgaagaaatgacaccggacgagtttctttgttggctgattgccgctaaacctgcgacgattatatttgaggcatgtggcacatctaattattggctgcaaagggcaagagaagcaggacatgatgcgcgtctcatttgtgccaaattagtatcagtcgtcagacaaaatcaaaaaacggataaaaacgatgcgttagcgattattcaggccgcgctgttgcccgacattacctttatatcggggaaaagtgctgagcaacagcaattgcaatcgatacaacgcttgcgggaattggccataaaacaacgggatgcctctagaaaacaaattgtctctttattattactggaattgaattttcgttcacctaatagtggtacgggcatgataggcaaaatagaagatattttggaagatgctgagaatggattatccctagagtttcgacaagcaatcaatgcagcaaaaagtcaatttgagtgtgtggttaaaacgatagcaacctatgaccgaagtttggaaaaatccatacaaacacatccggactgtaaaaaattactcaagcttgaaggtgttggccctattaacgcagtcaatctttatatctcacttggatgtgccgaattggggacatttagcaaaggaaaagatgcctctgcttgtataggtttaacgcccattcagcacagctctggcggcaaagtgaaacttgggacgataggcaaatgcaagaacagtatgctcagggcccaacttattaccggtgcaatggcggtcgtgagggcaattgtcaaccgagaggcaaaaacccaaaaagaagtgtggctcaaagccctagccgaacgacggggcaataaatgtgcggcagtggccttagccaacaaaaccgtgcgaacggcctacgcaatgctgacaaagggaaccgagtataaggctgaattactcgcagcctaaaaacgagtctatacaacaaaaaatgcataaacgaagataaaaatcagctggtttagtcagttaaaaacatagagcttagcgctcgcgctaaagatttgacaaccagttcgcgtaaatatcatagagccagagtttgctactcaattagagctcgtacataagtacgcatttatttctttgcttaacacaatttttgttgttgacatgggggagtccacata

SEQ ID NO: 6151 - DNA, 1354 bp, unidentified
  source 1..1354: mol_type = unassigned DNA; note = element_9881aee
  misc_feature 1: note = core
  misc_feature 2..72: note = LE
  misc_feature 73..1104: note = CDS
  misc_feature 1105..1354: note = RE
  misc_feature 1106..1344: note = bridgeRNA
tatgggatggcccgcccttttcctcggcatccgatatgatgccggtgctagagaagggaaaggagcggaccgatgtctattgtgatccttggcgttgatctgggcaagaatgcttgcagcgtagtcggcgtcgatgcggtcggcgcggtgatcgtgcgcaggtcgatgcgccggcaaacgctgatcgacttcgtggcgaagctgccggcgtgcatcgtggcgatggaggcgtgctgcggtgctcaccatctcggccgcgtgttcgccgcgcatggtcacgagatccggctgatgtctcccgagtatgtgcgcccctacgtcaaggcgcagaagaatgacgatcgcgatgccgagggaatcgccgaagcggcgtcacgtccaacgatgcgcttcgtcgaactcaaaacccaggagcagttggacatccagacactgcaccgggtccgttcgcgcctggtggccgagcgcaggaacctgatcaaccagttgcgcgcgatcatgctagagcgcggtacgatctttccggttgggcggcgaaagctggaactgggcgtcgatgccttgctcaccgaagagggcgcaacgctgtccccgcgagtgcgccggcttgtcggcgaacttcgcgccgagtggcgagatctcgacacgaagatcgaagctctgaacgccgagttcatcgaactggctcgcaatgatgccgctgcacggagactgacgtccattcccggcgtcggggtcttgaacgcgaccgccctcattgcggctgttggcaacgccagtagtttcgccaaagcgcgggacctcggggcatggctcggattggtgccacggcaacacacgacagggggcaaaccgcggctgcttggcatctccaaacgcggcaacacctacttgcgcaccctgctcatccatggcgcccgcgcagccctgccatcgctctcccggagtgacacgcccctcgggcgatggctcaaagccatgctggagcgcggagtccaccggaatgcggtcgtggtcgcacttgccaacaagctggcgcggatcgcttgggccgccctgcgcaaggacgctaactttgagcgccgctatccagtcgcggcataaccagatcggccgagtgctcgcgcgggcataggccaacgttgtttgcaggaaggattgaaaagatggcctgacagtcgatcggcgtttggaaagcccgaccaaaaaaatggcacttgctgccggcgtctttattgtggctccaaacgtgcggatgtccatcttggccgtggctcaccacgagaccgcatacgttgacgcagactgatcagaacaccgtaaaatcctgcttgcagacggggcgggccatacg

SEQ ID NO: 6152 - DNA, 1388 bp, unidentified
  source 1..1388: mol_type = unassigned DNA; note = element_9888471
  misc_feature 1..2: note = core
  misc_feature 3..210: note = LE
  misc_feature 211..1221: note = CDS
  misc_feature 1222..1388: note = RE
  misc_feature 13..192: note = bridgeRNA
cttgtatgtaataagaatgtggtggttagctaccatcacatgaggcggagtgagctagtaactatccttaaggctaagaccttcggtgtcagctatagcccttcgcttcacctttcacgccagcattaacattgaacggttgccaagagcgatgactctgcatgtacaagggtaataggcgtgatggttctgtgaaaggagaaaacggctatgtttcagttaggtattgacgtcagcaagaaaaccctggatttgtgtctgttgcgcgaaggcgtaaaaggcagggtgaaaacgcgcaagcttaaaaacgattttaatgcggccagtgctgtaattaattggctctgcaaacagcacgtcgagctgacagatgtccatatcattatggaagccacgggcgtttatcacgaatcattagcatatggccttcacaaggctggtgcgatgatatcgcttgccaatccacacctcagtagagaatttgcccggggtatggggatcctgacgaaaaatgacagggttgatgcttatatgcttgcctgttacagcgcgcttaaagcaccagacgcgtggatacctccgccgggcaatatccgccacctcagtgcccttttacgtcgtcgcgacgctcttgttgcagacagtacccgcgaaaaaaacaggctggaaaaatgcagggcagcagatacccctgctgttattactgaatccatagaaaacgtgctccaaagtttaagtgcagaactgaaacacctggatgctctcatacaagaccatctcgatcagcatcctgaattaaaaaagaattttgaactgctgacatcaataaaatccgtaggttttcagttgagtctgaatatgctggtcatcctgcgtagccatcacttcgaaacagctgaacaggctgatgcctttctcggtgtagttcctgttgaaaagaactcaggtacttcagtcagaggaagggggcggttgtcaaaaatcgggccgccagagaaccgtgcaaaactctatctggcttcgttgtgcggcatgcgatttaacccgacgatgaaggcaatgtatgagcgattatgccagcgtggcaaggcaaaaatgtgtgccattggtgcactgatgcgaaaacttgttcactggtgctatggcgtactgaaaacacaaaaaccgttcgatgcagaataccgtttttctgatgagcacagcgcatgcaaggtgacatgatgcagtcgttccatgtggcactggagtcattaacgtaaatctgtggtggccgattagagaggcgcagctacgataaatcgaaagctggcgctggcagtttgctgacagcgttcagggtgttattcaccaaaagctgaagtctattttttcttgacttagcacggtag

SEQ ID NO: 6153 - DNA, 1538 bp, unidentified
  source 1..1538: mol_type = unassigned DNA; note = element_988ad2e
  misc_feature 1: note = core
  misc_feature 2..273: note = LE
  misc_feature 274..1431: note = CDS
  misc_feature 1432..1538: note = RE
  misc_feature 23..263: note = bridgeRNA
ccattacagtctgaagtgggccaccgataaatttcgatggcgagcattcggcgcattgcctacgatacgggcaagccccgaggggccgccgatcgggcgcctccggatggccgtctgcccctgccccgtagagggcccggggggtgttgccaccgggggcgctcgccgctccggacgactgataggaaactgccgggcgcaagcgccacggccaggtaatgtgggtgtcgcagggaggggttccgatcggcctaccgattggaggataacaccgtggcaccacctagaatgccggaagccgtcatcgggctcgatgtcgggaaattgtcccattgggcatgcgtcgcgacccgggacggcgagataccgctgagcgcccccgtcgcgaacagggagggcgatctggactcgctgttcggccgcttccccgacgcgctcgtggtcgtcgaccagtcgcgcaacataggcgccctcgcgctcgcccgcgccaaggcggccgggatgtcggcggcgtacctgccgggactcgcggcacacggggccgccaggctcttcgccggcgacgccaagaccgacgagcgggacgcaatggtcatcgcgaagacggcgctgggcatccccgacgcactcctgccggtcggggatccgggcccgacggtcgcggcggcgagggcgctggccgcccagagaaacttcctgacctgcgaaaacaccaggagcaagaaccggctgcgcagcatcctgctggaatcgtgccccgccttcgaggcgttggtcgacctgtccgacggtccccagctgaggctcatggcatccctcggcggggcctggtcggtggccgacgccgggccccgcagggcggcggcgctcacgcgcggggcggcgcgcggcaagatcgaggccctcgtccgctcgacggcctcctcgacaaggccggacgcggcggccatcgccgccgaggaccgggcggtgaggctgctcgcgcgcaggatctccgagaactcggcggagatcgatgtgatcacggcggagatatccgccctcctcgagggcgacgatacctaccgatgcctcctgacggtgccggggatcggccccaaaaccgcttccgagctcgcgatctccatagatatcgaagacttcccaagccacgacaggctcgcgtcgtactgcggcctggcgccgcgcaaccgccagtcggggacctcgatctcctcggtgacggcatcgcgccaaggcaacaagaggctgaagaacctgctcatattctcgtgcaactgccttacccggacagagggaagatggggcgattactacgctaggtgccgagagcggggcatgccgcacggcaaggcgctcaaggcgctggcacgaaagaggctgaaggtcatctacgcgatcatgcgggacagggtgccctacgccgcctagtcgaagcgctccgaacagattggagcccatcggccgaaaggcctggcgttagcatgtcgcgattcaatctcgaaaacagcattgcccagttgacaaaactataggaa

SEQ ID NO: 6154 - DNA, 1450 bp, unidentified
  source 1..1450: mol_type = unassigned DNA; note = element_9892e6c
  misc_feature 1..4: note = core
  misc_feature 5..221: note = LE
  misc_feature 222..1436: note = CDS
  misc_feature 1437..1450: note = RE
  misc_feature 10..214: note = bridgeRNA
gtccctaagtttgtaggtgtctggggtcagtgccctggatgcccagagcggtggggtgtagctgatgagttcttgcttcggtcgaggcttcgaaggactggctgccccaccgcgctggacgctccgactgctgattgagagcttggtgcgggtcgtcgctgtttagggatctgtcggcggggttgtccacgggcacgaactgcgaggtcaggagcacaaagatgacaactcggccagagatatgggtcggaatcgacgtcggcaagacagcgcatcacgcgtgcgccgtcgacaatgcaggcaccacggtcttcagccagaaggtcgacaacgaccaggccgcgatcgaagcggtgatcgcccgcgccggccggatcggcgagcaggtgcggtgggcgatcgatctgaccagcccgatggcactgctgctgatcagcgtgttgctcgccgccgaccagacggtgacctatgtgcccggccgggtggtcaacacgatgacccacggatttcgcggcgaagcgaaaaccgacgccaaggacgcgaaggtgatcgccgagaccgcccgcctgcgccgagacctgaaccaggtcaccatgcccgacgaactggtggtcggactgacccaactgaccggctaccgcaccgatctgatggccgactgggtcgccggaatcaaccggctgcggtcgctgctcggatcgatcttcccggcactggaagccgcattcgactactcgacccgcactccactgatcctggtcgccggtatgtgcacccccaccgagatccgcggcgccggaacggtaggggtcgcaacatatctcgctgagagcggcgcctggaaaccggccatcgcgaaaaccgcggccacggcggtcgaggcggcgcagcggcagacgctggccctgccgggtgaagccgataccgcgatgctgatcaagcgcatcgcccgcaagctcctcgatctcgatcgggagatcaaggacaccgacaagctcatcaccacccggttccggcagcacccgtgggcgcggatcatcgaatccctgcccggcatgggaccgggactgggcgccgagtttctcgtcggcaccgggggtgatctggccaatctcgccagtgccggacgcctggcgtcgtatgccgggctggtgcccgtgccccgtgattccggtcgggtcgccgggaatctgcgccgcccgaaacgctacaaccggcgcatgcgcagggtgttctacatggcggcgttgtcgagcctgcgctacgagagcggaccgtcgcgacggttctacgaccgcaaacgcagtgaacgacagattcatacccaagccctactggccctggcccggcgcctggtcgatgttctgtgggcgttgttgcgtgacggccgagaattcagcatcgacaacccggctccggccgctgctgttgcttgacacagtcattgaga

SEQ ID NO: 6155 - DNA, 1374 bp, unidentified
  source 1..1374: mol_type = unassigned DNA; note = element_989a3d0
  misc_feature 1..2: note = core
  misc_feature 3..79: note = LE
  misc_feature 80..1093: note = CDS
  misc_feature 1094..1374: note = RE
  misc_feature 1137..1336: note = bridgeRNA
tgatgatatggactcctctcccttctgacggtgtcatataatgcacctgatataggcaaagaaaaaagaggagtccgaaatgaataatagcgtaataggtttagacatcgcaaaaaatatctttcatatgtacagtattggtgttgacaataaagtgattaaaaagaaactaaagcgcgctgaaatgttagccttctttgccacttaccaaacaagcctgattgggatagaagcgtgtggtggagcgcattattgggcaagagaattggccaagctagggcatgaagtaattcttttaaatgcgcgctacgttaaaaatttcgttgtcggcaataaaaatgattataacgatgcccaagctatttttgatgcggttactcgccccaataaacgggtggtggctgtaaaaacggttgaacaacaagatattcagttaattcataaaattcgccagggctatatagataaacgcaccgccttagtgaatcaaatacgtggtttgttaagtgaaagtggcattgtgattcatcagggcattaatcaggttagaaaagaattaccgtttattctggaagatgcagaaaataaactaacccccataagtcgcgaattgtttgccgagcagtacgaagaattaaccaagctagatgagaaaattaaacaacaagaccagcgcattacccgcctatgtgccaataatgaaaaggcaaaacgctttttagacgtgaccggtgtgggccccatgacagcgagcatagttgcggctgatataggtgaaggaaaaggctacgttagcagtcgtgattatgccgccagcttaggcgtggtacccaagcagcatagtagtggtgacaaacaagtttatttagggatcagtaagcgtggcaaccgttatatacgcaccttattaattcatggtgctcgtgcggtattgaaaaactgtaccaataaaacagatgctttaagtatctggctacaagggctgatagagcgacgtggatttaacaaagctgcggtcgctttagccaataaaaatgctcgcatactgtggtctatggcggtcaccggcaaggcttatgaagtcaaagcataaaggagcacgagccggattaactgagtaaccaagattgcggaggcaagttaacaataagtgatgacaacaacaggtcagaccggtgctttcaaaccccgttcaccccagtggctctttagaagccgataggttggttgaggagaaagtgcgcggatagattatcaggagtcctgaggtaataaaacctttgttagagaccgaatatatggctgcaatcttgatctctgttgatgacattaactggtgaaaacttggcttgcaataaatgaggagtccatata

SEQ ID NO: 6156 - DNA, 1621 bp, unidentified
  source 1..1621: mol_type = unassigned DNA; note = element_989cb31
  misc_feature 1..2: note = core
  misc_feature 3..283: note = LE
  misc_feature 284..1504: note = CDS
  misc_feature 1505..1621: note = RE
  misc_feature 13..309: note = bridgeRNA
ctactacaatatacttatggttaatatcccttgcagccagtaaggaattatccatcttgttgcttaagctgttaaaatgtaagagcaatcggtatagcgatttcatccttgggcttcgcgcccggaccgcagtctgctaaccagctcttcattcgcagcattcgttttatgcaggttgagccaccttaagggtgcgttcgtgtcacaccacagtagattgaatgggcaatgagtaaagctggatctgatcaattgcaatctttgaaacagggagtgacattttatgaatatgaacgcagtaggtatagatgtttccaaaaggaagagtacagttgcaatcctccgtcccggcggagagatagttaagaagccttttgatgtgccgcacctttcttctgactttcgatcgcttactcggttgatccaggatcttgatggagaaacacgcatcgttatggaatgcaccggtcactactataagccaattgcccgcagactgtcgcaggcaggtttcttcgtcagtgctgtaaaccctcatatcatccgtaactttcaaggccacgataatcctctccgcaaagtcaaaacagacaaggcggattcggtgaaaatcgcacgctacactcttgacagctggggaaatttgaaacagtatactcttatggatgaattacgttctcaactcaaaactatgaatcgtcagttcagcttctacacgaagcacaaaactgctatgaaaaacaatttgatcgggctgatcgatcagacttatccaggtgccaacacctactttaacagtcctgtccgtgaagacggctgccagaaatgggtggattttgtggatacctactggcatgtggattgtgtccgtaagatgtcattgactgcttttatcaatcactatcagaaatggtgtcaccgcaggaggtacatcttcagcaagtcaaaagctgaagaaatctatggaaaagcaaaggagcttgttcctgtacttcccaaggacaactttaccaaacggatcatcaaacaggcgatagcacaattaaatactacatctaagactgtagaagaactgcgcaatcttatgaacgaaaccgcttctaagctcccagaatatccagtcgttatggcaatggagggagtaggcccatctctggggccacagcttatggccgaaatcggtgatgtgatgcgttttactcataaaggcgccattacagcatttgctggagtagatcctggagtaaatgcatctggagagtattcccagaaaagcgtacatgcctcgaaacacggctcaccagtattacgaaaaactctgttccagatcatggaagtgctgatcaagaacaagcctgatgatgccgtatatcttttcatggacaagaaacgtgctcagggaaaaccctattatgtctacatgaccgcaggagccaataaatttctacgcatttactatggaagagtaaaagaatatcttctgaacttgtctgaattaaattgatcactttatgtcctttttcaggccgacatttctggcggtcttgttttgatacctagttttcgatctatacaatactttcaatatcccataatttacccttgactttttatttgcagg

SEQ ID NO: 6157 - DNA, 1357 bp, unidentified
  source 1..1357: mol_type = unassigned DNA; note = element_98a0f2b
  misc_feature 1: note = core
  misc_feature 2..66: note = LE
  misc_feature 67..1116: note = CDS
  misc_feature 1117..1357: note = RE
  misc_feature 1129..1351: note = bridgeRNA
taatgggatgaccagccccgccctccggcgcaggctgtgagtgcgataggaagaaggagaccaaccatgcatcgcaatgcacctcgggcggcggcagtctatggcgtcgatctcggcaagaacctgtttcacgtcgtcgggctcgatgagcgaggcgccgtcgtccagcgcgtcaagttccggcgcgacacggtgctagcgttctttacccgcgcgttaccgagtctggtgggtatggaagcatgccctggatcgcagtggctggcgcgcaagcttcaggcgatgggccacacggtccggatcgcgccggcgcagttcgtcaagcccttcgtgaagtcgcagaagaacgacaccatcgatgccgaggcgatcgccgaggcggtgacgcggcccacgatgcgcttcacccaagtccgaacgacagagcagatcgatctgcaggccttgcaccggatcagggaccaactggtcagaagccgtacacgcctgatcaaccaggcgcgcgcattctgcctcgagtatggcgtagcgatccggcagggcaccggcgtcttccgctccgatctgccccgtgtcctcgcggacgataccaacgatctgacgcccgctatgcgggtgatgctgagcgagctcttcgaagacgtcgagcgggttgatcagcgcatcgcttcggtgacgcggcagatcgaggcattggccgaccgtgaagacaaggctaggcggctcatgaccataccaggcatcgggccgttggccgcaacggcactgctcgctgcagttggtgatggccaccagttccggcgcgcccgcgagctggcggcgtggctcggtctgacaccgagagaacactccaccggaggcaagaccaccttgctggggatcagcaagcgaggcaaccgctacgtcaggaagctactggtgcacggggcccgatcctgcgtcacccaccttaaccggacacgggatcggatcggccattggctcgatgcgctgcaaagcaggatgcacgtcaacaaggtgacggtggcccttgcagccaagatcacgcggatggcatgggctatcatcaccaggccgggcgttatctacgagcggcacgatccggtcgtcgcctaagggcgctggtcaacggaaagcgaggctcgggaacgtgatgacgaaacagtcgatcggcgcatcgtaagctctgtgcaaaaaagcgtgctcctgcacgaaccgtttatctgagaaccctgcgcgcggatctcatcatggcctggccgcaacagcggtccactcgcgagaggccggatacatttaggcggactgccgtcgtcagaacgaaatcgatccttgcccgggcggggcaggtcataca

SEQ ID NO: 6158 - DNA, 1743 bp, unidentified
  source 1..1743: mol_type = unassigned DNA; note = element_98a5194
  misc_feature 1: note = core
  misc_feature 2..274: note = LE
  misc_feature 275..1519: note = CDS
  misc_feature 1520..1743: note = RE
  misc_feature 13..294: note = bridgeRNA
cctgttactatatatttgccccatgttcgtggcagccagccacaggcgagggacaactcattgcccaagttgtacaatgtgaaagcaatggtctggcggcatcctccaagagcaatacgctcgttgcaaagtcagtcagccggccttcccattgtgcagcgttcgatttgtgcaggttgagcgcccgttgtggtcactcgcgtcagcgaacagatagaatcggcgatgggtaaaggcggaatgccgttgcagtaacacatcgggaggattccatatgttcgcagttggtgtcgatgtttcacacggcaggagcacagtggccgtgctcggagccaagcgtaaggttgtcatgaagccgttcgaggttccgcataccgtagacggattcgcttctctggcggaaaagctgaacggtctggacggcgaagtccggatcgtcatggagcacacgggcaggtattacgaatcgttcgccatgagcatgtaccgcgccggtttcttcgtgtctgccgtgaatcctctggccatcagggattaccaggagggcatcagcgtccgcaaagtcaagaccgacaaggccgacgctctgaaaattgctcagtttgccattgacaaatgggagattttgccgcaatatactcccatggatacgattcgctacaacctcaaaactctgcaccgccagttccaactgtccagcaagaccaggaccgcgctgaacaacaacctgattgccctgctggagcagagctatcccggcgcaaaccggtactttgacagccctgtgcgcccggacggcacccagaagtgggtggacttcgtggataccttttggcatgtggactgcgtcgccggagtcagccagaacgcctttgtggagcgctaccggaagtggtgcaagcggcacggataccacttctccgaacagaaggccattgagattcatacggatgcccggcggaagttccccctggtgcccaagaccgacacctgcaagctgctggtgaaggaggctgttgcccagctaaacgccatctcccgcacagtggaaacctatcgcacggagatgaaccgcctggccgcccagctgccggaatatgacaccgtcatggccatgaccggcgtcggcaaatccatggggccgcagctcatggccgagattggcgatctgcgctgctttgcccactccaaatcgctggttggctttgcgggcaccgatcccatcaaggacgattccggcgacaagatctctggcagcaaccgcagcagcaagcgcggctctccttatcttcgcaagacgctctttgtcatcatgaccatcctgctccagcttcagcctcaggatgatcccgtttaccagttcctcgacaaaaagcgctccgaaggcaagaagtactacgtctacatgaccgccgggatgactaagttcctgcgcatctactacggcagggtgcgcgattgtctcagggaaaagggcctctgggacaacccagcatctcaagaggtcaaccctggttgacaggggttggattcaaccccttggctgcccaatagcactggcagcacgacgtgtcaaggaggcctcaggcacggcgaagccgcttgtccttgacgcggcgggatgactgtgctgcgcctccccttcggtcgcccttttcggacggcctttttgttgtacttttctcttgtcttcccatagccgtaaatctttacatctctcatgcttgattttttatttgcagg

SEQ ID NO: 6159 - DNA, 1418 bp, unidentified
  source 1..1418: mol_type = unassigned DNA; note = element_98a5db0
  misc_feature 1: note = core
  misc_feature 2..226: note = LE
  misc_feature 227..1405: note = CDS
  misc_feature 1406..1418: note = RE
  misc_feature 14..234: note = bridgeRNA
ctacttgtttcattgcctcaggaccgtggcccggccaggcttcggtccagacgtccgggctgtcgctcgcaaatcggctgcccacgcacgtcgtgtggctctcacatggcctgcgcagtcccgggcgtcaccccagggcggggagaggctcaagaggggtttgctctgctcgaagtagcgttgccctcccggctcgaactctctgttggatccatcggaggactcgttgagctccacacctgagcgcgtggtcatcggtatggacccgcacaagcgttccgccaccatcgaggtgatgaccggcgacgagaccatcgtcggtggtggccggttcggcaccgaccgcgacggctacgcggcaatgaagaactacgccaagcagtggccggaccgggtctgggcgatcgagggctgccagggcatcggccggcacatcgccaaccgactcctcgccgatggtgaggaggtcgtcgacgtccccccgaaactgtccgcgcgggctcgggtgttcgccaccgggcagggtcgtaggaccgacgccaccgacgcccactccgtcgccctggtcggcacccggatgagcgggctgcgtccggtggtcaacgacgagcagctcgcgctgctgcggatcctggtcgaccgccgccggtccctgggtgaggaccacacccggatgatcagccagctgcaccagctgctgctggagctgatcccgggcggcgcgaagaagtacctgtcggccgcccaggccaaggtcctgctggccaaggtccgtccccgcgacgtcgccggtaaggcacgacggcgggtcgccgcggagctgatcgccgacctcgagcgcgtctaccgacgctcgaaagaggccgacaaggagctgaaggaactcgtcgccgcgaccggcacgaccctgatggacctgcacggcatcggcccgtccggagccgcccggctgctggtcgaggtcgccgacatcacccgcttccccaccaaggcgcacttcgcgtcctggaacggcaccgcacccatcgacgcctcctccggcgaccaggtccggcaccggctgtcgcgggcaggcaaccggcagatcaaccgagtgctgcacatcatggccaccgtccagctgcgcacccccactgaaggtcgcgcctacttcgaccgcaagaaggcctcgggcaagacctcgatggaagcgatgcgctgcctgaaacgacgtctgtccgacctcgtgtaccggcggatggtcgacgacgccatcgcccgagcagcgacgggcccgggagggcaacggggacacgactctgactccagcgcgaccggctcacatccccacaccggctcttcggacaagccacttcccggacccgccaccagccagcctaagacaccacttcgcaaggccggttgacacagaggggagc

SEQ ID NO: 6160 - DNA, 1406 bp, unidentified
  source 1..1406: mol_type = unassigned DNA; note = element_98a801c
  misc_feature 1: note = core
  misc_feature 2..88: note = LE
  misc_feature 89..1141: note = CDS
  misc_feature 1142..1406: note = RE
  misc_feature 1174..1401: note = bridgeRNA
caatgggatggacccctccccactctacggcatcgagtgccagactggagttatgtggattccagtcacgaatggggagaggtcgaaaatgaagcttactcgggttggtgtagatcttgcgaagaacgtcttcgagctgcacggcgtggatcgtgctgagcgcccggtgtggtgcaagcggctgaagcgcaatcgctggattgaggagatcgagcaaaacgtggaaccaggcgtggagatcggcatggaagcctgtggaggcgcgcatcactgggctcgtctgctgcaatcaaagggttaccgagtgcggttgatagcaccgcagttcgtgaagccctatgtcaagagcaacaagaccgatgccaatgatgcgcaggcggtgtgcgaagcgatgagtcgaccgagcatgcggtacgtggcggtgaagactatcgagcaacaagatattcaagccgttcaccgtgttcgtgccagtttgatcagcgagcgaggtgcgaaggcgaaccagttgcgcggtttagcgtacgagtacggcttggtggcaccgcgggagattgccgccctgcgtctagcggttccggcgtggctggaggatgcgtccaatggactgacggtgcgtttgcgagcactgctttccggactgtacgcggatctgcgggcactcgatgaacgcgtgcgcgagctcgataaggagatccgggcgataggccgcgagaatgaagccgtaggtcggctgcagcagctgcggggaattggcccgctgattgcctcggcactggtcgctatgatcggagatgcccgccagttcaaaaacggtcgccatgtagccgtggcattgggcttgacgcctcggcagcacagctcgggcagcaaggagcgaatactcggcatcagcaagcgcggcgacagctacgtacgcacgctgttgatccacggtgcacgctccgcattacgtactgcgccgggcaagaacgatcgaatgagtcgatgggcgttggcactggcccagcgttcccacgtcaacgtcgcagtcacagcgctagcgaacaagatggcgcgggtggcctgggcgatgttgaagcatggctccgcctatgaaccgaatggtctggcggcatatagcgcacgcgcttcaggctgagagagggcttcaggctgagagaggagagttaccacggttgcgagcactctgagtcgatggcgaacaggtcgaaccggcgtcagcgaaacccgagaatgtccgcgggcatcaagcccgacgaagcaatggggagctggcgcgcgaatagcccatcgtggcccgacctcggttaatcgaggtcaacaatgaggccgtatatacgtgagcagtcgttacctcgtcgcacaaagaccggagtgctggcaattggggaggggtccatata

SEQ ID NO: 6161 - DNA, 1186 bp, unidentified
  source 1..1186: mol_type = unassigned DNA; note = element_98bd658
  misc_feature 1..2: note = core
  misc_feature 3..162: note = LE
  misc_feature 163..1113: note = CDS
  misc_feature 1114..1186: note = RE
  misc_feature 40..173: note = bridgeRNA
cttatataaaacatattagtcagatctgagtaatacagatctgactggggtgtaggccgttgactcccttgagcttaaagctcgactgggagcttggccaacctccaaattcggaccggaagttgggcaaaaagcccgaataaaacataagggtgaatacacatggaggccccagttgcagggatagatgtatcaaaagataaactaatagtatattttcaaggtaaattctacgaatttcctaacgataagcaaggttttgaggaagtgaagaaagtcctgccaagaggttgtaaagtaggtattgagagtaccggagtttaccacgttaaccttgccaagtgcttgatgaatgagtatgaggtgagggttattaatcccttggtaatcaagaagttcaaggattttaggggtaagaagagtgacaagaatgatgctaaaaaactcgctgaactagttgttaatatgggtagtgagtttacgttaagtgatgctagggagttgacgagtcaatgggattttatcgttaagagtattgttagggttaagaacaggttgaggagggacttaatcctcttgggttatagtgatagcttgtctaggaagaatttgagtgaagtattggagggtggggataatattatcttgtctgaggttaagtttcttttggatgagttggagaggcttgaggctaggaagagggaggttgagaagaggcttgaggatgttgttcctagggatagtttgatctttactataccgggtattgggaagacgctgggtttgataattttggcgagggtaggtgatgttaggcgttttgatgataagaggaagtttgtggcttattgtggtcttgatcctgttgttgagtccagtggggggagtgttgtgtcgcgaggtatctcaaggaggggtgatgctgttttgaggagggctttctatcttgcagctttgactgctatcaaggttaatccggtgatcaagcgtttttatgaggagcataagggtaggttaaagggtaagaagttgattgttgcatgtgctaggaagttagctgttattacttgggctgtgctgtattataataagccctttgatgctagtgagtaaagcaggtttcatcacttgcgtaagtagtgtggactatgctcgatttttcatggaaaggtttttataccggaag

SEQ ID NO: 6162 - DNA, 1564 bp, unidentified
  source 1..1564: mol_type = unassigned DNA; note = element_98bee5a
  misc_feature 1..2: note = core
  misc_feature 3..272: note = LE
  misc_feature 273..1445: note = CDS
  misc_feature 1446..1564: note = RE
  misc_feature 5..248: note = bridgeRNA
cttgtataatggaactatagtaattccattaatttattttcctttctcgattattttctatataatctaaatagacgctgtggattagttctgtcacctacagcagctgcccataaacagctgactgtttctattgaggctctaaccgcagctctatgtttatttgttaattagttagataacgcatgacgttttatatatagcaaggatacattcaacatagagttcgtggaaacatagcgtattaaaatttaaaaaaggagttgtttactatgatttttgttggtattgatgtttccaaagctaaacatgattgctgtatcattgattctgatggttctgttatcactaattctttacgtattgagaattcaaaattaggatttgaaactctttattcagccatcctttctaattcagatgatctaaacaacgtaaaaataggacttgaatcaacaggtcattacagcacaaatatcacaaattatctgtattcaaaaggctttaaggttcatattctgaatccattagccactaatctttttcgtaaggctggaacccttaggaaaactaaaacagataaaactgacgccaaagtcattgctactatgctcttttctgatgaatctaaatcctattcaccagtatcataccacattcaagagctaaagtcattaacaagacaccgttatcgcatgattggctatcgttccaaacttaaaatttctgtaacaagacttattgatattatttttccagaattgcctgatttattttggtcaatacatcaagcctcaagttatgctctattgcttgaattaccaacacctaatgacattaagtcttgtcatttaactaaacttattaacatcattactaagtcttcaaacggcagatatggtaatgataaagccattgccttaaaagaattagcatctaattccattggttctgctaatcgttctgttgcttttgaacttcaacaaacaattcgtcttattctctctattcaaaatgaaatagatattttagacaagcagatcaaaattgttgtagatgagattaattctcccattattaccatcactggtattggttataccttagccgccattattttggctgagattggcgacattgagcgattctcaacacctgctaaactcttagcctttgctggaatggagccttctacttaccaatccggaaagtttaatgcttccaaaacaccaatggtgaaacgtggttccacataccttagatgggctgttttgcaagcttccaggttggtaccaatgcgtgatgcaactttttccgcttatctatctaaaaagcgttctgagggtaaacattattgcgttgctcagagtcatataggcaaaaaacttttacgcattattttttacttgttaaaaaacaatactgcatttgttccacaaatgtaatgttctgtatccatccaatattttttcagaacaactctgttgttctatttgttatactcttttttatcttaataattttcaaattactttcaaatttttcttgactccatatagttagt

SEQ ID NO: 6163 - DNA, 1225 bp, unidentified
  source 1..1225: mol_type = unassigned DNA; note = element_98c5316
  misc_feature 1..2: note = core
  misc_feature 3..223: note = LE
  misc_feature 224..1210: note = CDS
  misc_feature 1211..1225: note = RE
  misc_feature 12..197: note = bridgeRNA
cttgtatcttgagccatggggtggttagctatcaccccatgagagacaggtgagtttctgcgactcctgagggagtgaaccctgttctgaagataaaacccctgtctctcacctctgacgccatcgcggacactggacggtagcctagggctggattgaccctgcatgcacaaggtaagtgggcgcagttggcatactttcttgatacgaggaggtatgaaccatgttctatctaggtatcgatgtatccaagctgaagctggactgcacgctgttgctggacccggacaacgataagcgtaagagcaaggtggtaccgaacagccgggacggcgtgcgggagttggttaaatggtgcgccaagcatggcgtgacggtggaccaggtgcatgtggtgttggaggccacgggtccctatcacgagcaagcggctacaacattgcacgatagcggcgtaagcgtttcgatcgccaacccggccaatgtgcacgactttggccgagcattggcgatgcattccaagacggatgcgctcgatagtctggtgctggcccgctatggcatggcgatgaagcccgcccgttgggagccgccgcctgcgcatgtgcgggagctgcgtgccttgattgcgcaggtggacgcgttgtccaaggatcgtttgcggacgatgaaccgtcaggagaaagctgaggccagtgcagctccggagctggtggagcgttcgattagcaacaccttgagcttctacgacgaagagatcgctcgcctggagaaggccatcgatgatcatatcgatcggcatcctgatctcaaggacgacgccacgttgctctcgaccatcccaggggttggccccaaagtggctcgaaccatgttgagggtgatgcgtacgcatcagttcaagcgagccgaggacttggcggcgtatctgggtttggtgcccgtgcaacggcagtctggcacctcattgcgaggacgtagccgcctatccaaggctgggccggctgatgtacgggctctggtgtacatggcaggcgtggttgccgccaagcacaatcctcatgtgcgggccttgtatcaacggctgttggctgcggggaagaccaaaatgtcagccatcggtgcatgcatgcgcaaggtagtgcatctgtgtttcggggtgctcaagacacggcaggcctataggcctgattacacattttctgcttgacgaccaagacggtat

SEQ ID NO: 6164 - DNA, 1642 bp, unidentified
  source 1..1642: mol_type = unassigned DNA; note = element_98c7769
  misc_feature 1..2: note = core
  misc_feature 3..232: note = LE
  misc_feature 233..1627: note = CDS
  misc_feature 1628..1642: note = RE
catttagccttggtgtggggtccgcgggcgggccgaacgtccgaccgggacacgtggtgatccctgagtgctgagtggtcgcccgcgggcccggtgtctggtcgagcggtgtccttgttcgggaacttggagccagctgatgggcgtggactcctgcttagagaatgtctgggccgtggccgtgatggtcagtcacctgtgatcaggaaatccgactgaggggagcaacacgatggctgtgacgttgggcatcgacgtggccgtccgggcggcgcatcaggccacgctggcccgcgacggcgccacggtatggcgcggcaggaagttctgtacacgacctgccgattttgagcggctctgggccgacctcaaccttgccgacccgagcgaactgacggtggtgatcgagccgacccggaacgcgtggattgtggtcgcggagtggttccgccgccgcggtgcccgggtcgtgatggtcccgaccacccagtccgcggacctgcgcaagtactactccaaacacaccaagaacgaccggatcgactccgagctgctcgcccggctgccactgttacaccccgaagggctccgggagtactccggtcagggcccggcggatgcgcttcgtcggctggttaagcagcgctccaccatggtcaagcgtcgggtcgcggtctacgcccgactcgacgcactggtcgagttgctcggcccgtcctggtacgcggtactggggtcgaactacggcatggccgccttggagttcctggcccggtacgccgatcccaacaccgtcatcaggctcggtcaggcacgcctgagccggttcctgatcgcccgttcccgtggtgcgtggcgggaggaccatgccgccgggctcaccgacgccgccaaagagactctcctgttgtggggtaccgacgggatggacttcgccgaactcgcgcaagacatcgcccacgaagccgagcaggccctgttcttgacccgtcagatcaagcagatcgacgaacgggtcgcaaacctctacgccgacgccgaccctcaaggcatcgtcgcctcagcaccgggtgtcggcccggtgatcagcgcggtcatcgccgggcggatcggtaacccgcaccggttcacctcgctggccgcgatccgcgcctacaccggtctggtgccgaaagtcagccagtccggagtcagcaaggtcgagtcctccatcaccaaagccggcgacccgttacttcgcgagatgctctgcaccgccgccgaccaagcccgcaagatcgatccccagatcgccgcgaagtaccagcgactcatggccggcgaccgccaccacgactccgcaatctgccacctggccaccctcatggtcacccggatcgcgacctgcatgcgcaccggccagcactacgccctacgcgacgtcgacggcaccccgatcaccgaggccgagggccgcgcgatcgtgaaggagcgctaccagctcgacccccgaggccgcgacaacgtccgccacaaacggatgcgcgatcgtcgcaaccaggcggcgggccaggagccacagaagtcgctgagcgctccaacatcccggcccgccaacacccagcctacgagcccccgcgtagcttgacgttccttaggaact

SEQ ID NO: 6165 - DNA, 1510 bp, unidentified
  source 1..1510: mol_type = unassigned DNA; note = element_98c9783
  misc_feature 1..2: note = core
  misc_feature 3..201: note = LE
  misc_feature 202..1476: note = CDS
  misc_feature 1477..1510: note = RE
  misc_feature 5..201: note = bridgeRNA
ctgatgggtctaccttccatcgcagaggcctccgtcggggaacgcttcgagcgcttgtccttcgaggactgaagtgagactgcgtccccggcgggtggtcttgaaggcctgacgccaacaagggtgtcgtccctcgaggactggtccatcagcacggtgctgtgccttcgcagttggtgcccgacgaacgaaggagacggagtgctcggagtgggaatcgactgggccgaggagttccatctcgtggccctgggccggccgggcgagggggtgttcgatatcgcccgggtcgagcacgacccgagatcgatcgacgcgctgatcgcccggatcgccaagctcgaagcggacccggccgaggttcgggtggtcctcgagacgagctacgggatgctcgtcgaacggctgatcgacgccggctacacggtggtcccggtcaaccccgacctcgtcgcccgacgccgtgggccggcgaagaagaaagacgacgccgaggacgcccgcatcgcctgtgtgatcgccctggaccgcttcgagcggttgcgggtgctggtcccccacggcgaggaggccgccgagctgcgctcgatcacccgtgacgaccaacgggcgtcgcgtgacgagcgccggctgctcaaccggctgcgcgccgacttgatcgcgacgttccccgccgcgctggtcatcgccggcgatgacatgggcgcccccacctttctgcgcctgttggaacgctggccgaccgcgaacgccctggccgcagcatcgcgcccggacctggtggccttcgcccgcggttgcaggcacggctggcccgaccgtttcgctgaccgggtcgagtcggctctgaccggcgaccacttcgtcgcccgggactggctcgtgcgagccaaaaccgacaccatccgcctcgcggccacccagctcctcgccctgggcacccagcgccgggcgtgggaacggcgcatgggcgaactgctcctcggcgctccccgcaccggccgcgtcaagcaacccaaggacggcgagcgggggccggcggtccctggcggcgagatctacttgagctttccgggcctcggtgatcgtctcgccgccagggtggccgctgagatcggcgccatcaccaacttcgaagggccgaacgggctgcaatgctacgccggcaaggcgcccgtcacccgccgatccggcaagcacgaactcgtcgtcgctaaccgtctcgcctgcaacggccatctccgtgacgccgtccagcagtgggcgttctgcagcctgcgaggctcgggctgggcccgggagttctacgacgcccaccgagccaagggcaacggtcaccacgccgctctgcgagccctcgggaaccgctggctcgaaatcctctggcactgcctcacccgcaacgtcacctacgacgaggcagtccacgtcgccaaccgcaaccaggcaatgggcatcacgagcaaagccgcctgacaccgaactgatgttcggggttgacaaagggtgt

SEQ ID NO: 6166 - DNA, 1355 bp, unidentified
  source 1..1355: mol_type = unassigned DNA; note = element_98ca738
  misc_feature 1: note = core
  misc_feature 2..74: note = LE
  misc_feature 75..1100: note = CDS
  misc_feature 1101..1355: note = RE
  misc_feature 1123..1351: note = bridgeRNA
taatgagatggtcaccctcacaccttgcgagggctacgctttcgcagggtgttttattttcggaggccatcatcatgagcgatttaacgctggtaggtgtcgatctcggtaagcatagtttccacctgcacggccaagacaagccaggccgagaggtgtttcgcaagaagctctcacggcagcagatgatgaggttcttcggcaatatcccgacatgcaccgtagtgatggaggcctgcgccggctcgcattttgtggctagggaactgatagcgatggggcatcaggccaagctgatttcgccgcagttcgttcgcccttttgtcaaaagcaacaagaacgactttgtggatgctgaggcgatctgcgaagcagctacgcgtccgacgatgcgtttcgtggcacccaagaccgagtctcagcagatactttcaatcatgcatcgcacgcgggagtcgttggtgcacgatcgcacgaaagcggtcaatcagatgcatggctttctgcttgagttcggaatcagcctacctaaaggtccgacaatgatgaagcgcttggggaatattctggccgagcatgaactgccggttcgactgacggtgttgctacagcgattgcatcagcacttcagttatctgaatgagcaaatcaaggaaatggataaagagcttgtaggccaactggccgacgatgatctgggcagtcgtttgctgagcataccgtgtgtcggcccgatcaccgccagccttttggctgccgaaatgggggatggtaaacaatacgggtgtagccgtgacttcgccgcgtccgttggactggtgccccggcagtacagcacgggcggcaaggcgaatctgctggggatcagcaaacgaggcgataagaacctcagacggttgttggtgcagtgcgccagggtttacatgtttaggctaaaatatcagcacggcgcgttggccgattgggtgcgctcaatgctctgtcgtcgccactcaaacgtggtggcctgtgccttggcgaacaaactggcaagaatcgcctgggcgatagcggcccaccatacacaatttgaagcagggccagacgctttagcggcctgatcctactgttgtgctgtaccacgaacgatccttccaggttttgcgataactgaacaattgatgatgtgaacggcccaccggcctggtaaagaacctgtgtcgaaaatcggctttcgaatccgatagacttttaaggattgccaggcgcgactctcatcgtggcgcggagcgtgctccgtccagacgccggatagatttaggcaaaccaactaaccatcactgatcagcattgcaaaaaaggaggtgaccatagat

SEQ ID NO: 6167 - DNA, 1522 bp, unidentified
  source 1..1522: mol_type = unassigned DNA; note = element_98caafc
  misc_feature 1..3: note = core
  misc_feature 4..491: note = LE
  misc_feature 492..1274: note = CDS
  misc_feature 1275..1522: note = RE
  misc_feature 3..220: note = bridgeRNA
cttatattatatttaacgcagttagctactgccaaagcccaagtggtatacttggaataagccactgtggattagttcatttcctccaatcgcttgacgatttccgaaaggatctaaccacagctttttgtttcaattggtaatgagtttgataacgcatagacgttttatctcgtctaaggtaacaaggcaaaaagttcgtggataaccaagtagacttgaaatactatatctggaggtactcccatgctttatgtgggcattgatgtcgctaaaaataaacacgatgttacagccttgaatgttcgaggaaaactgttcttaaaccactcactttttcaaataataaagctggttttgaactattagatctgtctcttcgacagctcaaccaagactgtctcatcgctcttgaagataccggacattatgcctttaatctactgaacttcctgcatgaacaaggatataaagtttacacctacactcctttgctcatcaaggaatttgccaaatcattatcacttcgcaagactaaaacggataagaaagacgctcatggcatcgctcttaaacttctttctgaccccaatcgtgaacaatttcaacacgataatcggcaagtagaactaaaaatactggctagacatattcatcgtctcaagaaaaaacagtctgattggaaagtacaatacactcgttgtcttgatatcatctttcctgagttggataaaatcgttggaaagcattcagaatatacctaccaactcttgacatgctaccctaatcctcagaaaaggcttgaggcaggatttgataagctgatagaaattaagcgattgaccgcttctaaaattcaggatatcctctcagtcgcacctcgttctatcggaacaacatctcctgctcgtgaattcgaaatcatcgaaaacatcaaacattacaagaggctcattgacaaggcggaaaaatgtgtcaatgacttgatggctgagttcaactcggtcatcacgacggttactgggattgggaatcgtttaggggcggtcatgttagccgagattcgaaatattcatgcctttgataatcctgctcaattacaagctttcgctggactggattcttctatttatcagtcaggtcagattgatttagctggaagaatggtcaaacggggttctcctcatctgcggtgggcactcatacaagctgccaaagcatgcgctcgcttttcacctgcttttaaggcctatcttaagactaagttagaataagaaaaacattacaatgtagccatcatccaccttgcaaaaaaacttatccgaaccctgttttatatcctaaaaaagagctgccatttgacgaacaaaaagtgatgtaatttctgaaatcaacacaggattacctttgaaaaaatggactttttcaagggctttttgccgtgctctaaaatcatcgccaaatcatcaaattgaaataagaaatagtttagataaaattattgacttttcttatagtttgt

SEQ ID NO: 6168 - DNA, 1570 bp, unidentified
  source 1..1570: mol_type = unassigned DNA; note = element_98ccd45
  misc_feature 1: note = core
  misc_feature 2..110: note = LE
  misc_feature 111..1223: note = CDS
  misc_feature 1224..1570: note = RE
  misc_feature 1337..1524: note = bridgeRNA
ataatatgaagtgaccgcctagattatcaagtcagggattttaacccataataatgagtgaaaacaaacattacgaatgggtgtataccctatgataataggaggccactatggaaaatataatctatattgggatggatgtccacaaggaaagctttagtttatgtgcattgcacggaacaactggggaaattttaggagaggcacgatgtgcttcaaatgtatctctcgtaaaaaaattcgttgagaaactgaaaatgaaatatggtgaagatataaaaattaaagctggatatgaggctggctgtttaggatattcactccataatcttctggaacaaaacgggattgattgtgatattttagctcccacaacaatgtacagttcatcaaaaaacaaaatggtgaaaaatgatcgattcgatgccaaaatgattgctcttaatttagcgaatggcacctataaagaagtatatgttccagaagaagaggatgttgccgtgaaagagtatatccgcatgttaggtgattttaaaacatctttgaaaaaaataaaacaacagataaaatcattccttttaaggcatggttgtgtgtatgaagggaaatcaagctggacaatcgcttatatgaaatggttaaagaatcttgatttacaaggattgtttaaagaaacgttggatgaatatctattacagtatgatgttttagttgataagattgagcgcttcagtctgagactagaagaattgtctcatagtgaaagatacgaagaaccagttggaaaattaagatgtttaaaagggatagacacaacatcagcaatgacagttcacgtggaaattgctgacttcactcggttcccgacagctaaggcatttatggcttatgtgggattgacgccaagcgaaagctcaagtggagagaggatcaatcgaagttcgattacaaagcaaggtaattcgaccgttaggtctactcttgtcgaatgtgcaaatgcgttggtcaaaggaacaatcggattaaaatcaaaacgagtgaaagcaagacaaaaagggcaacgaagcgaagtaatttcctatgcagatcaggctgtagaaaggttacaaagaaaatatcatcgcatgatatatcaagggaaacctagaaatgtcgccgtgacagctatcgcaagagaactggggtgttttatatggggattagaaacaggtaaaattcactgaaaataaagaagaagggatatgaaattgactgattcatagttagaaaccgaaggtatcaattgatggcatagatgagcttcagagatagtgaattccaggtctggctatctatgactcgcctcttctggcacagatgaaattctgataaacaagctatttattagaatgtgaaaagatgtgatccacgcaaggagattataagagcctaacgacggaccattaacctgaggtaaccaatccacgaataacagagtggttaactgtcgatagatcttatttctgaagcttttgtatgccattaaaaaatattatgggtgaaaaactattgacaaaggtcacttcataac

SEQ ID NO: 6169 - DNA, 1451 bp, unidentified
  source 1..1451: mol_type = unassigned DNA; note = element_98d289a
  misc_feature 1: note = core
  misc_feature 2..228: note = LE
  misc_feature 229..1434: note = CDS
  misc_feature 1435..1451: note = RE
  misc_feature 9..232: note = bridgeRNA
cgttactattttcacgccccgataatcggggttttggccagccaggcccggtatgattcccgcccccagtcgcagtcatgatccggggggtgttgtcaccgggcctggtgggtggctggtgatcgctgataggggtttggccgggatattccgacgccgtccgtaacgtggatgccgagacttgccaccgttgttgcaggccaatccgttcactctgcacaaactgcgatgcaagacacacaacaacgtgatgccgtcgatgtcttcgtcggcgtcgatgtcggtaagggccagcatcacgccgtcgcactcgatcgaaacggcaagcgcctgtacaaccaggcactacccaacgacgaggccaagctgcgtgccctcatcgccgagctcaagactcacggccgactcctgttcgtcgtcgaccaaccttccaccatcggcgcgcttcccgtggccgtagcccgtgctgaaggcatactcgtggcctacctgccgggactggccatgcgccgcatcgccgatctgcatgcaggtgaggccaagaccgatgcccgcgatgccgcaatcattgccgaagccgcccgctcgatgccgcatacgctgcgctcgcttcgattggctgacgagcaactcgccgagctcaccatgctgtgcggcttcgacgatgatctcgccgctcaggtcacgcagaccagcaaccgcattcgcggcctgctcacccagatccatccggcgctcgagcgcgttctcggaccgcgcctcgaccatccggcggcgctcgatctgcttgagcgctacccgtcgcccgccgcgcttgcctcaaccagcgagaagacgctcgccaaccgcctgaccaagctcgcgccccgcatgggcaaaagcttggcggccgagatcgttcaggctctgagcgaacaggccgtgatcgtgccctgcacgcaagctgccaccatagtcatgcctcgtttggcccagcagcttgcggccttgcgtaagcagcgcgacgaggtcgctgccgaactggaacaactggtgcttgctcaccctctttggccggtcctgaccagcatgccgggagtcggcgtcaggaccgccgccagactcctgaccgaagtcgcccataaggtcttcgcttcggctgcgcacttggcggcctacgccggccttgccccggtcacccggcgctcaggctcgtctatccgaggcgaacatccatccagacgcggcaacaaggtgctcaagcgcgccttgttcctctccgccttcgcagccttgcgggaccccgtctcgcgggcctattacgcgcgcaagatccagcagggcaagcgccacaaccaagcgctcatcgcgctggctcggcgacgctgtgacgtcctgttcgccatgctgcgcgacggcaccatttaccaacccaagtcagcccctaccgcttgacgaaacacataggggcc

SEQ ID NO: 6170 - DNA, 1328 bp, unidentified
  source 1..1328: mol_type = unassigned DNA; note = element_98e610c
  misc_feature 1: note = core
  misc_feature 2..65: note = LE
  misc_feature 66..1070: note = CDS
  misc_feature 1071..1328: note = RE
  misc_feature 1095..1327: note = bridgeRNA
aatgagatggccactccctcctcctggatactatgctaaaaacaggcttaattcggagaactaccatggaaaacattgcgctgattggtatcgacctgggtaagaactctttccacatccattgtcaggatggcaacgggagagcggtttatcgcaaaaaattcacaaggcaaaagctgtttgaatttctggcgcaatgtccggcaaccaccatagtgatggaagcctgcggtggtgccaactttatggtacgtaaactgacagaactgggacacacgcccaaattgatatcaccgcaatttgtccgtccattcgtcaaaacaaacaaaaatgactttgttgatgcagaggcaatctgcgaagccgcatcacgaccatcaatgcgttttgttaagcccagaacggagactcagcaggcaatgcatgccttacaccgtgtaagagaatcgctggtcagagacaaagttaaaacaacaaatcagatgcaggcatttttactggaatttggtgtcagcgccccaaaaggcccgacactgataaagcgtttcgcagaaattctggagacaaacgaactccctgcttacatggctggtttgctgcagaaattatgtgagcattatggttatcttgttaaacaaattaaagagttagaaactcagctgcagatatcactggatgaagatagtgcaggtcagcgattactctcgataccttgcgtcggccctttgactgcgagtcttctttccacccaattgggtgacggtaaacagtatggcaacagccgggattttgccgcttcaacggggctggtacctcgccagtacagcacgggaggtcgaactacgctgttgggcatcagtaaacgaggaaacaaaaagctgagggcactgctggtacagtgtgccagagtgtatctgcggacgctggcacacaggtcggggaaacttgccgactgggtcagggagttacaactgcggaagaataattttgtggtgacctgtgcactggcaaacaagctggccaggatcgcatgggcactgacgacccggcagcaatcctttgccgcgtaattataggttgtatttagaagtttaaacagtggcttatctggttttgcgaatactgatcattgatgataaaaacggctaaccggcctgatgaaaaacctgtggttaggaatggcagataaaatgccgcccagtttataaggttcaccaggcgcggaactcatcggggcgcgggctaaaggtccattaagacgccggatagattcatgcaagccaacaatatcttcaatatcggtgttgcaaaaacgggagtggccatag

SEQ ID NO: 6171 - DNA, 1191 bp, unidentified
  source 1..1191: mol_type = unassigned DNA; note = element_98e9e1e
  misc_feature 1..2: note = core
  misc_feature 3..222: note = LE
  misc_feature 223..1176: note = CDS
  misc_feature 1177..1191: note = RE
  misc_feature 3..200: note = bridgeRNA
cttgtatgtttcgggtgctggggtgaagagacatcgtgcgcaacatcagccgtttcgatcggactgacgaagtgagacctctctcaccccaccttccagcgtcgatgaggaactgcgcggcgcacaggtttttgcctgttcgaccgccgatctttaagcaagttaacgcggctggtgggatgtcaccccagcatgtctgattttctacaggaggattcaggtatgcaagctatccgtcgtatcgtaggcgtggatgtggccaaggaagaactggtggtggccgttcacacagaagcaggatctggcaaggtcgccaatagcgcccaagccatttctacgtggttgggcaatttggagcgcggaagtgtcgtggccatggaggcaacaggcaaataccaccgcctgttggccgaactggctcacgctgcgggcatgcgcgtgttcgtactcaatgctcgagacgttcacttctatgccaaggcactgggtgcacgcggcaagacggaccggctcgacgcaatggtcattgctcgctatgtggccgagcaccaggacgagttagtggcctggcaacccgcgcaaggtgtcgaacagcaagtgcaagacctgctgaaccggcgttggatgcttacgcgccaagtggtcacgctcaagttgagcctgcgtgacatgcccacgttgcaagtggccagcgaacgtctgcaagagcaattcgggcggacgtttgaggagatcgaccgtcaactcgaagagctcgtcagcagccaggatgagctcgccaaaggggttgcccgactcagaacgatcactggatttggggcgcaggcatcgatccggtgtgctgcgctgctgagcaaacatgccttccgcaacgctgacgcagctgtggcctacagtgggctggaccccaggcccagcgattcgggcaagaagaagggcctacgccggctgtccaaacgagggtctggcgatctgcgaaggcagctgtatcaagctgccttcgccgcgagccacagcaaggtgttcgcaccgacctacaaggcactgagagccaaaggattcgccactaccgaggcactggtcatactggcaaggaagctgttgcgcgtggcgtttgccgtgtggaagagcggcgaagcctttgatcccaacaaatttgcactgaaaacgacttgacaaaaaatatagaac

SEQ ID NO: 6172 - DNA, 1698 bp, unidentified
  source 1..1698: mol_type = unassigned DNA; note = element_98ea1b6
  misc_feature 1: note = core
  misc_feature 2..341: note = LE
  misc_feature 342..1550: note = CDS
  misc_feature 1551..1698: note = RE
  misc_feature 43..295: note = bridgeRNA
cattacgttgttagcggttccaccccagggcgccgaagattcatagccagtccacccgagtgaacgggctatgtttatgtccgttcccgccatccgaaaggacagtggaactagtcgctggcttcggtatggcttattcctgtccctgtctgaaaatgatccggggggtgatgtcgccgaaggcagtgacatactcaaacagctcaataggaacctgacccagcccaggcggcatgaggtctcacagtaatgtggatgccagcacgaagtatgtccgaccaaccccagcgatgaaacctaaataatccaacttctaattcatcgctaggaggcacacactcatggcctatgactgcgtcattggcatggacgtcggcaaatacttccaccacgcctgcgtcctcgatcctcaagacagacaagtcctttccaaacgcatcaaccagcatgaagggtcgctgcgtaaactgttcggcacttacctcgccgacaacgcctcagtccttgtcgttgtcgatcagcccaacaacatcggccgactgaccgtcgcagtcgcccaagcaatgggcgccgacgttcgctacctccccgggcttgccatgcggcagctttcacgcatccacgtcggcaactccaagaccgatgtacgcgacgcctacgtcatcgcccatgcggaccttaaccttccggatgccctgcgcagcgtcgaccgcgttgaggaagtcttcctccagctgaaagttctcaacggtatcgacgaagacctcgcccgggcctacacacgtctgattaaccagatgcgatccgcgctcgtaggaacctatcctgcattcgaacatgtcctgcacggacagatgattcaccgcaagtggatcctccacctacttgcaaaatacggtggccccaccaagattcgacgcatcggcaaagcacgcctggcagccttcgcacgtggtcacagggcgcgtaatcctgagcccgtcatcgatgccatgcttgcggccatccacagccagaccgtatccatcgccggcgcagaatacgccgaacttggcgtagcaatgtccgccaaagatgcactggccaagctagaacatcgtaaggaaatcgaggcccaagtactcgagctcattcaggacattcctcagaccgagattcttttgtccatgcccggcatcggcccgcgaagcgccgcgcagatcctcatgactgttggcgatatgtccgacttcccagatgcagcacacctagcatcctatgcaggtctatcgccgcggaccaatcagtcgggaacgtccattatgtcgaattcgcccaaccgagccggcaacaaaaaattgaagaacgccctatggcaatcgtcttgtgcatcgatcagattccacgagcgttcccggcaattctatgaacgaaaacgcaaagaaggcaaaagacacaacgccgcagtcgttgcactcgcacgccgacgtcttaacgttctcttcgccatgatgcgtagcggcgagctctaccgagacatctccacagtccaggaggccgcagcagcctagagcaaacagaacctcgccttaaaccgattgcgcaggccgcccagtcggctcctcagcgtgcccgaaaacaacatcgccgaagtaaaacagaaacccttcacaccccccaacagtctcacccacggagttgacaacctatataggaaca

SEQ ID NO: 6173 - DNA, 1433 bp, unidentified
  source 1..1433: mol_type = unassigned DNA; note = element_98ed697
  misc_feature 1..2: note = core
  misc_feature 3..215: note = LE
  misc_feature 216..1418: note = CDS
  misc_feature 1419..1433: note = RE
  misc_feature 10..221: note = bridgeRNA
tccctaccttgttgatcgggatgagcgagccattcgtagggttggctcacccagggggtccgggtgtggctttcagtcctctgccggtcgtggcttccgacgattcgccgcccggcccccacgacgactcggctgctcattaggaattgcggcactgatcgctcagtagggactcgacagcgaggtcgtccgtggtacccgtaggcaagcgaaccatggagaggcacgtgacagcgatctgggccggtatcgacgccgggaagactcatcaccactgcgtggtgatcgacaccaccggcaagcggctgctgtcgcgacgtgtcgcccatgacgagactgaactgctcaagctcctcggcgacgtcctcgctctgggcgaggtgaccgcctggggcatcgacctggccgacggcggcgccggcctgctgatcgcggtcctgctcaaccacggccagcacctgctctacatccccggaaggaccgtcaaccgcgcctccgagggctaccggggtgacggcaagaccgacgccaaggacgcggcgatcatcgccgaccaggcccgcgtccgccgggacctgatgccgctgcggccgggcgacgaactggtcaccgagctgaagatcctcaccggccgccgccgcgacctggccgacgaccgcacccgagccatcaaccggctccgcggccacctcaccagtatcttccccggcctggaacgcgaactcgacctcggcaacacaggcccgctggtactgctgacgggctaccagacaccggccgccatccgccgcaccggcctccgccgactgaccacctggctgcgcaaccgcaaggtccgcggcgccggccagctcgccgccacagccgtccaggccgccgaaggccagcacaccgccgtttccggcgagacggtcaccgcccaggtcgtgcacaccctcgccagggaggtgatgaccctcaacgagaacatcgccgagacggacaagctcatcgagggccggtttcgccagcaccgccacgcagaagtgatctccagcctgcccggcattggccctctgctcggagccgagttcctcgccgccaccggcggagacatggacatcttcgagaccgccgaccggctcgccggcttcgccggtgtcgcccccgcctcccgcgactcgggcaggatcagcggcaacctccaccggcccaagcgatacagccgacgcctccaacgcgtcttctacacctccgcgttgatcagcatccgctgctgtggcgagtcccgccgcttctacgaccgcaagcgcgccgagggcaagcggcacgtccaggccgtgctcgccctcgcccgccgccgggtcaacgtcctgtgggccctgctgcgtgacggacggtgctacgaacccataccgcccgtcacgcagaccgcttgacaactccattaggaa

SEQ ID NO: 6174 - DNA, 1612 bp, unidentified
  source 1..1612: mol_type = unassigned DNA; note = element_98f91c5
  misc_feature 1..2: note = core
  misc_feature 3..277: note = LE
  misc_feature 278..1489: note = CDS
  misc_feature 1490..1612: note = RE
  misc_feature 14..297: note = bridgeRNA
ctactacaatatatttatggttaatatcccttacaaccagtaaggaattatccatcttgttgcttagctgtataatggtggagcaatcggtatgtcggcttcctttcttggacttagtgtccgcaaaaaagactgataaccagctcctcatttgcagcgttcgttttatgcaggttgaactgccttggcacgttcgtgtcacaccacagtagatagaataggcaatgagtaaaactggtgcttatccattgcaatattttttaaggagtgacaaattatgaatgcagtaggtattgatgtttctaaaggtaaaagtatggtcgcaatcatgagaccttttggcgagattgtagtatcaccttttgaaatcaaacacacatctagtgacattaattcactaattgaacttatccattctgttgatggtgaatcccgcattgttatggaacatacaggacgctattacgaagctcttgcgcatgagctttcagcagcaaatctctttgttagtgctattaatcccaaacttattaaagactttgacaatgattctcttcgtaaagtcaagtcagacaaagctgattctgttaagattgctcgctatgcacttgacaaatggcaaaacctaaaacagtatagtgttatggatgaattaagaattcaacttaaaactatgaatcgtcagtttggtttttacatgaaacacaaaacagctatgaaaaacaaccttatcggcatccttgatcagacttatcctggtttgaatgcatacttcgatagtcccgcccgaagtgacgggagtcagaaatgggttgattttgcagcaacctactggcatgtagattgtgttcgtaaaatgtctctctatgcatttacctgccattatcaaaaatggtgtaaacgcaagaagtacaacttcagtcagtcaaaagctgaagaaatctacggaaaagcaaaggaatttgttcccgtacttcctaaagatgaaataaccaagctaataatcaaacaagctgtagagcagcttaataatgcatcagcaactgtcgaagagttgcgtgccctaatgaacgaaacagcttcaaagctcccggaatattcaattgttatgaatatgaaaggtgttggtccgtctttaggtcctcaacttatggctgaaattggtgatgtgagcagatttacgcacaaaggagccatcacagcatttgcaggtgtagaccccggtgtaaatgaatccggcacatatgaacagcgtagtgttcccacttctaaaagaggttcgtctaatttaagaaaaactctttttcaggtaatggatgtacttattaaaaccatgccacaagacgatcccgtctatcaattcttagataagaaacgtgcacaaggcaagccttattatgtctatatgaccgctggcgcaaacaagtttcttaggatttattatggtcgagtgaaagagtatcttgccactctgccagagtctaattagtcaaagttaatatccttctttagactggcactggttgtgatggtcttattttggtgccttctttttcaacctgtataaaattttcaatgttcattagtttagccttgactttttatttgcagg

SEQ ID NO: 6175 - DNA, 1624 bp, unidentified
  source 1..1624: mol_type = unassigned DNA; note = element_98fd0da
  misc_feature 1..4: note = core
  misc_feature 5..276: note = LE
  misc_feature 277..1494: note = CDS
  misc_feature 1495..1624: note = RE
  misc_feature 15..296: note = bridgeRNA
actactacaatatatttatggttaataccccttacagccagtaaggaattacccatcttgttgcttaagctgttagaatgagtatgacaataggtctggccaccttctactaggacttaacgtccgtaaaatagtcagccaaccagccctcattcgcagcattcgttttacgcaggttgaaccctcgttcgtgtgaaatccccagtagattgaataggcaatgagtaaatctggtattgaccattgctaatcatttcaaagagaggagtttttatcatgaacgctgttggtatcgatgtttccaaaggaaaaagtactgtcactatccgcaggcccggcgatgtggtccttatgccgccctgtgacattccccacacccaatctgctatcaacgctcttattgagcagatcaaaagccttgacggcgaaaccaaagtttgtatggagcataccggcagatactatgaaccggttgccaactggctttctgacgcaggcatctttgtcagcgctgtcaatcccatcctgatccgggatttcggggatgactctctgcgtactccaaagacagataaagcggattcgaaaaaaatcgcctgttatgctcttgaccgctgggcaaaactaaagcaatatggaagcatggataaaacgcgcaatcaactcaaaaccatgaaccggcagttcggtttttatatggaccagaaaactgccatgaaaaacaacctcatttcccttctggatcaaacctatcccggtgccaatgacttctttgacagccctgcccgcagtgatggctcccaaaaatgggtggacttcgtctacacctactggcatgtggactgtgtacgcggcaagtctctgcaatcctttacagagcattaccggaagtggtgcaaacgcaacggttataatttcagtgcctcaaaggcggaaacgatctatcagagctcttctgacctgatcgccgtatttccgaaagatgacagcacaaaggcgctgatacgccaggctgtcacgatgctgaacaccgcttcccagacagtggaggctctccgccttaaaatggatcagaccgccgccacgctcccggaatatccggtcgttatggcaatgaacggtgtcggcacatcccttggaccccagcttatggctgagattggagacgttacccgtttcactcacagagaagcgcttaccgcttttgccggtgtcgatcctggtaaaaatgattcaggaaaacacaaccagaaaagcgtacgcacttcaaagaaagactctccaagcctgcgcaaaactctgtttcagatcatggacggattgatcaaacgttctccgatagatgatccggtctataccttcatggacaaaaaacgctcagaaggcaagccgtattatgtctatatgactgccggagccaataagttcctccgcatttattacggacgggtaagggaataccttgcttctctggaagaatccaaagaaagctgatttcaatcccatactttgcttcagaccagcacactgcggtggtcttgttatgatacccttttttcaacctgtataaaattttcaaagttcattaatttctgcttgtttctgcttgactttttatttgcag

SEQ ID NO: 6176 - DNA, 1392 bp, unidentified
  source 1..1392: mol_type = unassigned DNA; note = element_99006af
  misc_feature 1: note = core
  misc_feature 2..71: note = LE
  misc_feature 72..1109: note = CDS
  misc_feature 1110..1392: note = RE
  misc_feature 1149..1387: note = bridgeRNA
caatggtatggaccccgccgcccggcggcggcgacacttcgacatccagaggatgagagaggagacatgccatggatatcataagaatcggtttggatctggcaaagactgtgtttcaggtccacggcgtcgatagcgacgaccggattctggtgaggaagacgctgcaccgcgaggctgtcgtgccgttcttcgcccagttgccgccctgcctggtcggcatggaagcttgcagcggctcgcattactgggcccgggtgctgtccgagctcgggcacgaggtcaggctcatcgcaccgcaattcgttaccccatacgtcaaatcgaacaagaacgaccgcaatgatgccgaggcgatttgcgaggccgtcggacgcccctcgatgcggttcgttccacagaaatcaccggaacaactggagatacaggccgtccaccgcatccgacagaggctgatctcgggccggacgcgacttgtgaatcaggtgcgcggcctattggccgaacatggtgtcgtgattgcccgcaacatcagccgcctgcggcaggcccttgggcagatcgaggatgggtgccggagggacgatggcgtgcccgacatgatccgcgagcttgtgatcgagatccgggcggagctgactgggctcgacaaacgtatcgcctgctttgaccgcaaaatccgtgtggtgttccggacgaatgagaactgccggcggatcggccggatcgaaggaatcgggccgatcacagcgacggccttggttgcggcggccggcgaccagagctgcttcaggaacgggcgggagttcgcggcttggctcggtttggttcccaggcagagatcgagcggcggcaaggcgcggctcttcggcattagcaagcgcggcgaccgctacctgcggacgctgatgatccatggtgcccgagcagtcttgggaaaggcccatggcaagacggatgcgaggagtctctggattggccgattgcgcgagcggcggcatccgaatgttgtggctgttgcgttggccaacaagaacgcgcggatcgtctggtccgtccttgcccggaacgagcaatacgatccgacacgcggcgcagctgtcagctgaggaaaacgaaaaggctggtcacaacggccgtcgcgctcgagtaattgcagcaacttggctggggatggtgaaagggtcgctcccatcgctttctgaacctgatgtgtggaccggcacggcacctgcggatgcctcgggggcattgaggagaaagcacgcggaaatccatcggggctcgcggcgacgaagactcgggccgctcgaagaagccggatatacgtccgcaattgcgaactcagagccagaccagatcagggcgttgcaattgggcggggtccatata

SEQ ID NO: 6177 - DNA, 1496 bp, unidentified
  source 1..1496: mol_type = unassigned DNA; note = element_9902579
  misc_feature 1..2: note = core
  misc_feature 3..234: note = LE
  misc_feature 235..1449: note = CDS
  misc_feature 1450..1496: note = RE
  misc_feature 12..197: note = bridgeRNA
tccatacctttcatcgtgggttgattcggatcactcgtaagatcgggacgcccaggggtccctggtgtggcttccatgctgttgccgctgatgtggcttaggaggattggccgccgggaccccgcgacgactcggccgctgattgggatgcgcggaacaagatcgctcgtatggacacgtcggcgaggtcgtctgctgggaccgtgaacacgcacgtcgagcgaggaggaccgggtgcccgaactgtgggccgggacagatgcgggtaagggcgagcaccactgcacggcgatcgacacggacgggaacaaggtcctctcccggcgggtgccgaacaacgagccagaactgctcgaactgctcggcgacgtcctggagttggccgacggaggccccgttacctgggcggtcgacctcaactccggcggcgccgccctgttgatcgccctcctggtcagccacgagcagaagctgctctacatccccggccggaccgtgcaccacgcctcggccgcctaccggggcagcgggaagacggacgcgaaggacgccttcgtcatcgccgacaccgcccgcatgcggcgtgatctgcagccgctgaccgagacgagcgagatcgcggtggacctgcggatcatgacggcccgccgtatggacctgtcggccgaccgcacccgcgccatcaaccggctccgcgcccagctgctggagtacttccccgcccttgagcgggcgttcgactacagcacctccaagaccgcgctcatcctgctgaccggctaccagacgccctccgcgctgcggcggatcggccgggcccggctgacgacctggctcaagaaccacggcgtccgcaccgtcaccaacgccaagagcgccgctaacaccgcgctcaccgccgccgaggcccagcacaccgtcgtgcccggtgagaagaccgccgccaggatggtccgcacccttgccatggaggtgatggccctcgatgaggagatcgaccagctcaacaccctcatcgaggaacggtttcgcgagcaccccgacgccgcagtgatcaccagcatgcccggcatcggcgacacgctcggagccgagttcatcgccgccacgggcggcgacatggccgccttcggcagccccgaccggctcgccggcgtcgccggtctcgccccggttccccgcgattcgggcaagatcagcggcaacctgcaacgccctcgccgctacagccggcgcctgctgcggatgtgctacctcgccgcccaggccgccgcaatccactgtcccgagtctcggcgcttctaccaacgcaaacgggctgaggggaagtcccacaagcaagccgtgctggccctggcccgccgtcgtctcaatgtgctctgggccctcatacgcgaccaccgcaccttcgagacagccgctgaccggcaagcaactgccgcagcctgatgcagtcacctggagtcaccactccggcttgacaacatcattgggaa

SEQ ID NO: 6178 - DNA, 1345 bp, unidentified
  source 1..1345: mol_type = unassigned DNA; note = element_990e44e
  misc_feature 1: note = core
  misc_feature 2..104: note = LE
  misc_feature 105..1109: note = CDS
  misc_feature 1110..1345: note = RE
  misc_feature 1114..1339: note = bridgeRNA
gaatgaaagggacttcccctactcgaagcgggttgtggcccgcacggcatcgaagtgccaagattgagtttgcgttgttcaatctgataacgagaggggaagtcatggaaaaggttactacgttggggatcgatctggcaaagagtgtgttctcgctgcacggggtggatggtgcgggtcgcgtggtgctcaggcgcacggtgcgccgcgatcagctgcttggggcggtggcggccttgccgccgtgtctgatcggcatggaggcgtgttcgggggcgcacgagtggggccggcggttccaggagttcgggcacacggtgcggctgatggcgcccaagttcgtggccccgtacagaaagagcggcaagaacgacggcaacgacgccgaggcgatctgcgaagcagtgacgcggccgaacatgcgtttcgtgccggtgaagtccctcgagcagcaggcgctgctggcaatgcaccgggtccggcaggggtttgtggtggagaggaccgcgattatcaaccggctgcggggcttgctctgtgaattcggcgtggtgctgccgctgcgctcggtgaccgtgcgccgccaggcggctgccgcggcggagaacctgcccgagctcgcgcgtcgcgcaatcggcgatctgctcgagcagctgcgctcactcgatgaacgcatcggtggctacgaccgggagatcgaagcccaggccaaactgtgcgagccggcgcagcgtctgatgaagatccgcggcatcgggcccaccacggcgctggccatcgtggccacggtgggcaacgcgcgcgagttcaagaacggccggcagttcgccgcctggattggcctgactccgagccagtactccaccggcggcaagccgcgcctggggcacatcagcaagcgcggggacgcctaccttcgcaatctgctcgtgcaaggcgcgcgttcggttttgaatagcgccggcaggcacccggaccgcatgtcgcgctgggtcctcgatctgcagccgcgccgcggctactatcgaacgctggttgcgattgccaacaagaacgcgcgcatcgcatgggcgttgctcgccaagggcgaatccatgcgctcggcatgaacgcacccatccgctaaagactgcaattgtcgatgacgaaacggtcaaaccggtgcccggagaacctgatcaaacacgacggcagcaactcatgccgactaacgagagaggtccgggcatgcggctttcatcggggccagagcattcaatgctcacaaacaggccggttatagtgacgcagtccgttcttccatcggcacaaacgcttccgttgcggaaacggggaagtccttata

SEQ ID NO: 6179 - DNA, 1612 bp, unidentified
  source 1..1612: mol_type = unassigned DNA; note = element_990f062
  misc_feature 1..2: note = core
  misc_feature 3..281: note = LE
  misc_feature 282..1493: note = CDS
  misc_feature 1494..1612: note = RE
  misc_feature 14..301: note = bridgeRNA
ctactacaatataaatatggttaatatcccttacagccagtaaagatttatccatcttgttgcttaagctgtataatgatggagcaatcggtatatcgtctacctttcttggacttcgcgtccgcaacgaagactgataaccagctcctcattcgcagcgttcgttttatgcaggttgaactgccaataggtacgttcgtgtcacaccacagtagattgaataggcaatgagtaaaactggttcttatccattgcaataaatcttaaggagtgactaatttatgaacgcagtaggtatcgatgtttcaaaaggtaaaagcatggtggcaattttacgccctttcggcgagattgtttacagtccttttgaaatcaagcacacatcccatgatattaattctcttgttgatctcatccattccgttaatggcgaatcccgtgtcgtgatggagcatactggacgttattacgaagtccttgctcatcagctttccgaggcggacattttcgtcagcacaatcaatcccaaactaatcaaagactttgataatgattctcttcgtaaagtcaaatccgacaaagcagatgcagtgaagattgctcgctatgctcttgacaagtggctgaatctgaaacagtatagtcttatggatgaattacgcaatcaacttaaaaccatgaaccgtcagtttggtttctatatgaagcacaaaactgctatgaaaaataaccttattggcatccttgatcagacttatcctggcgtaaatacttacttcgacagtcctgcacgaagtgacggcagccagaaatgggttgattttgcatctacatactggcatgtggactgtgtccgtaaaatgtccctgaatgcctttatcgaccattatcaaaactggtgcaaacgcaagaagtacaacttcagtcagtcaaaagctgaagaaatctatggaaaagcaaaggaacttgttcctgtacttcccaaggatgaaataaccaaacgaattatcagacaagcagttgatcaactcaacagcgcttcctctactgttgaggaactgcgcaccttgatgaatgatacagcctcaaagcttcctgaataccccattgttatggcaatgaacggcgtcggtccatctcttggtccacagcttattgcggaaatcggagatgttactcgctttactcacaaaggtgctattacagcatttgctggtgttgaccctggtgtgaatgaatccggagccttctcacagaaaagtgtgcctacatcaaaacgtggctctgctgatttacggaaaacactgtttcttgtaatggatgttcttatcaaaacaatgccacaggacgatcctgtatatcagtttttagacaagaaacgttcccaaggtaagccttactacgtttacatgactgccggagctaataaatttttgagaatctactatgggcgagtgaaagaatatcttgcatcacttcctcaatcagaataatttatacatatctttctgatagaccagcacaatgtggtggtcttattttgatacccttttgcaacctgtataaaattttcaaagttctttcaatttagccttgactttttatttgcagg

SEQ ID NO: 6180 - DNA, 1448 bp, unidentified
  source 1..1448: mol_type = unassigned DNA; note = element_991004a
  misc_feature 1..2: note = core
  misc_feature 3..235: note = LE
  misc_feature 236..1420: note = CDS
  misc_feature 1421..1448: note = RE
  misc_feature 41..199: note = bridgeRNA
cttgtacgatctcgactcatcgggtagtcaccgtgggaagagacagagacgggatccgggagagggtcgccgtgccgcccgtgaggcgttgtcctcggctgtgagattggcgccctcgcccggtgctcaagactcgaacggtatcctgaggcgccgccggcgtcctcgcgtggacaagggcgagcatgaacaccggctccgaggctttcgtccatccccgtcggaaaggacgcgaatgcgcttcgtggggattgatgtggcagccgagcggcacgtggtggccgcggtggacgagacgagcgccgtgcaactcaagccgacgccgttgaccgaggaccgggaagggtatcagaagctcctcggcctcctgggtgaccccggcgacacgctcgtcgccatggaggcgaccggccactaccggaagaacctcttcgcggccctcgtggcccaaggcttcgccgtcgccctgctcaacccgctgcgcacgcggcggtctgccggggaagagctgcagcgcacccggaccgacgccatcgacgcgctcgggctcgcgcgcttcgccgcccagaagcggcccaccgtcacccacctgcccgacccggcgaccgaggagttgcgggaaccggtccgctatcgggaccgcctggtccgggacttcggcgatcgcgtgcgccagctccaccggctcgtcgacctcggcttccccgagttcctccgctctgtccgcgatctcggcagcgagctggccaccgcgatcctccgcgactacccccccgccgccgcctttcgcggcgtcgcgctccggcgcccggccggcctgcgctacgacggccgccaccgagtcggcgacgagttggccaccgccctgctcgacgcggccacccgctcggtgggccgccgccacggcgaggcctaccggctccaggtccgcgatgcctgtgaggacctggagctcttgcgccggcgcctgcgcagcctcgagcgcgacatcgagcgcctgctcgagcgccacgaggtcggcaccctgccgacgacgatcgacggaatcgggccacagacggccgcccgcctcgtcgcgaccttcggcgacttcaccgcgttccccagcggcgccacgctggccgcctacgtcggtgtcatcccggccctgcggcaatccggcaagcgcacctccccccgagccgccctcacgccgccgggagccgcgggcctgcgggccaagctctggatgccggtgctcaccgccgtccgcaagaccccgtggctccgcgcgtactccgagggcctcatcgcccgcggcaagctcccgaaggtcgccctggtcgcggcgatgcggaaactgctccccgccgtctacagcgtggcaaccgatcgccgcccgttcgtgcccaatctcgtcgcggtggaaacacctcggtgaaaaaatcgcttgacggacgtcacggtat

SEQ ID NO: 6181 - DNA, 1395 bp, unidentified
  source 1..1395: mol_type = unassigned DNA; note = element_9915b6f
  misc_feature 1..3: note = core
  misc_feature 4..254: note = LE
  misc_feature 255..1295: note = CDS
  misc_feature 1296..1395: note = RE
  misc_feature 27..232: note = bridgeRNA
tctcctatgtttgtgtcaagcaaatgtagaagacattttttgttttatagatttgttttatagtgagaaaaggaagagttaaaatttgtcttagtagcatttgtagtatactgtttgtgagaaatgaccttcctttttttcgcttcctaaggcagaacagaatgtaaagcagaattacaatccagcttgaatatccaccaggagacaagtccaagggaagtttcactattgatttaattcaataagaattcattatgaatacactcaagcaggtcattggtattgacgtagggagcaaggaactcgtcgtttgtcttggaaagatcttcgccaacctagataaaaagctgtgccattatggtaattttcgaaatacggataaaggtctggtaaagctacaggaatgggttcaggctcatacttcagcagaaagtgctattcatttcgttatggaggccactggtgtttatcacgagaagttggcttacttcttggaatccaaggggtatacaatcagtattatcttacctaataagatcagtaattatttccgtacactggagataaagacaataacagatagaacctgttcagaagctatcaccctattcggccttgaacgccaccttgagttttggcgcagaccagatcccacctataagaggttaaagcaactcacgcgtgaaagagatcagctggttcaggaacgtactgccgtcaagaatcagctacatgcagagcaaacagaagccgagcccaatacaaactccttaaatagaataaaagaacgaatagcggtactgcaaaaacaggaaaaggaggtgttgacggagataaagctcattgttaaagaaaactctgtacttaaacaggaaacggataaccttatctcaattcctggaattgggctgctcactgcggtaacagtactagcggaaacaaatggtttcgagatgattagaaataaaaagcagctagtaagctacgccggactagatgtgaaggaaaagcagtcaggcacatcaattctaggcaaacctaccatatctaagcgaggtaacagatatttgaggaaatccctgcacttaccagcactggctgccataaggcatgatgagcattattcaaatacgtttacaaggcttgtatcaaaacatggtattaaaatgaaagcagcggtagctgtgcagagaaaactgcttgaactgatgtttattattttcaaaagcaaacagcggtatgactcacagtatcatatccaaaaacaaacatataatcaagtagctacaaaatagggcagctacgagagccaccctaaaacaggctggtacaagaccgcctaaattgtaaaattataaaaaataatcaatgctacacttgcatgttaacacagaa

SEQ ID NO: 6182 - DNA, 1336 bp, unidentified
  source 1..1336: mol_type = unassigned DNA; note = element_9916947
  misc_feature 1: note = core
  misc_feature 2..258: note = LE
  misc_feature 259..1320: note = CDS
  misc_feature 1321..1336: note = RE
  misc_feature 14..253: note = bridgeRNA
ctgtgaggatcgcgttcgcagcctgatgtgctgggctgtgggttggtgactgcgggtgtgaccctcggtgtgactggcttcgtgccttggtgcgacttgtccgctcgcggttgccggccccggcccggtcggaggaactggcctgattaggagcttgaccaccaggcgttagccgcgcggggtgtgtctcatcacagtcctgccgagcctccgtcccggaccggaaccacgtccccaatccggcgaaggagagaacgcatgaccagtctgaccgatctgcgtgaggtggtcgatgtcgtcatcggcgtcgacactcacgtccatacccactccgcagcggttatcgacagcgccaccggtggtgtcatcggcgagatcaccgtgccggcgacagccgcgggctatgccgagctggtggagttcgccggcgaataccccaccctgcgggcctgggcgatcgaagggaccggtggccacggcgccggcttgacccgtcacctgctggagtcatcgaagctcgtcgtcgagctggaccgtccgaagcggtccgcgcgacgcaacggcgcgaagtccgatcccctggatgcgatccgagccgcgcgtgaggcgatggcgcgaccgcggttgggaaccccgcgcagcgggagcgaacgccaggccctgtcagtgctgttgaccgctcgccgctcagcgatcaatgcctccaccgaggcgcagctgcaggtgttcagtctggtggtcgccgcgccgggaccgatccgcgtccggttccgtggccagaagctcgccgcgatgctcaacactgccgccgcgctgcgtgtccagtcagcgtgggacgtcgagacgaccagcaccgtcgtcgcgctgcgcaccctggctcgtcgcgcacacgcgatgttgaaggaggcacgtgagctgcagaaggcgatcttggccatcatccgcggctggcgccctgacctccttgcggagttcggcgtcggaccgatcgtcgcggcaacggtgttgtgcgcgtggtcccaccccggccgcgttcattccgaggccgcgttcgcgatgctcgccggcgtggcaccgatccccgccaacagcggccaggtcaccacccggtatcggctgaaccgttacggtgaccggcacctcaacgcggcactgcacaccgtggtccagagccggatccagtaccaacccgccacccgcgactacgtcgctcgtcgaacaggtgagggaaagaccagccgcgagatcaaacgctgcctggcccgctacgtcgcacgcgacctctaccgcctactcgaaagtggggccgcagctgcttgacaaagcataggagcgt

SEQ ID NO: 6183 - DNA, 1391 bp, unidentified
  source 1..1391: mol_type = unassigned DNA; note = element_9919a0a
  misc_feature 1..3: note = core
  misc_feature 4..90: note = LE
  misc_feature 91..1119: note = CDS
  misc_feature 1120..1391: note = RE
  misc_feature 1090..1377: note = bridgeRNA
agatggggtggttgccgtcctccccgaacggcatcgcaatgtgccaacgtggtggttggtaacgtagccacggaagagagaggacggcggatgaaggatacgatgattggggtggatctcgcaaagaatgtctttcagatccacgcggcgtcacggacgggtgaattgctgttccgtaagaagatccgccgaccgcagtttctacagtttatggcgagccagccacccgcgttgatagtgatggaggcgtgtgggagtgcccattactgggcacgggagctgatgagcgtagggcacgaagtaaaactgatcgctccgcactatgtgcgtcccttcgtcaaacgccagaagaacgatgccgctgacgcggaagcgatcgtgatcgcggcccgacagccggagatgcgcttcgtggtgccgaagactgaggagcagcaggcccgcgctgttctgttccgctgccgcgagcggctggttcatcagcgcaccgaactcgtcaacgccctgcgcgccacgctctacgagttcggcttggtcgtgccgaagggcatcactcacctcaagagcatcgaggacttcgttgaagacgagaatgtgtcgctcccagtgtttgtccggaaggaatgccgggaccttctggagcaaatcgaggagcaatcggctcggatcacggaaaagacccgcgccatgattgcagtatcggaagaaagcactacagcacagcgtctggagacgataccgggtgtcggaccgttgacggcgctggcggtggaggcctttgcgcctgcgatggagaatttccgcaatggtcgtgattttgcagcatggctcggcctggtcccccggcagttttcatccggcggcaaggaacggctgggccggatctcgaaggccggccaagccgacatccgccgactgctgatcataggtgccatgacgcgtgtgaattgggcgagccgcaagccgcccgtacccggcagttggctggcgcggatgctgacccgcaaaccgcgcatgctggtggcggtagcgctggcgaacaagatggcgcggacgatctgggccatgctgacgaggcaggagaattatcgggatccggtcctgtccgcggtggcgtgaggtgacctcactcgcgcgccgatagggccggtaagggggtgtgagaaggcgacgacccatatgggcacatgatcgagccgatccggatcaggaaaaccagccatggcttcggtgcagttagagcacggtcaagagatttggacctgatccgcggatcaccatatcggccagcggcttttggcatgccgcattcaaaggccggacagaagaccgcaatcgatcacccgtctataggggaagaaacttcttgcacaacggacggcaaccacaga

SEQ ID NO: 6184 - DNA, 1341 bp, unidentified
  source 1..1341: mol_type = unassigned DNA; note = element_993cc32
  misc_feature 1..2: note = core
  misc_feature 3..61: note = LE
  misc_feature 62..1078: note = CDS
  misc_feature 1079..1341: note = RE
  misc_feature 1124..1328: note = bridgeRNA
ttatgggatggacgcctcccgcttcccggcgacgatgcagtcgccaaccaaggagggaagcatggcactagaattattggcgattgatctcggcaagcgatcattccacctttacggcatcgacaccgatggggtgatcctgtcgaggaaggtcagccgggcgaagctggccgaggtggtcggcaacctggcaccgacgaccatcgcgatggaggcatgcgccagtgcgcattattggggtcaacgctggctcgtcgccggtagcgaggtgcgcctcatcaatcctcgtttcgtaaagcccttcgtcaaaggctcgaagaacgatgcggtcgacgccgaggcgatcttcgaagcggcgatgcgtccaacgatgcgcttcgtgccggtgaagtccagggaccagcaggacctgcaatcgcttcatcgtgcccgcgaccgcctgatctgccaacggacggctttgatcaaccatacgcgcggcctgcttgcggaatatgggatcgtactgccgcaaggcccgtggcgctttacagctcaggcaccggccgccatcgccgatgccgacctatcggacctggcacgagcgatcttcggcgagctcctggaccagctggacgagctcgatcgtcgggttaaaaagctcgacgcgacgatggttgctctctgccgcacgaatgagacttgtcggcggctcgcgaagctacccggcgtcggcccggtcgtcgccacggcgatcgtcgccgccgtcaacgacggccgacagtttcgctcgggccgtgagatggcagcgtggatcgggctggtgcctcgacaatatacgacgggtggcaagccacggctcggcggcatcggacgacgcgccaaccactacctcaggcgccagctgatccacggtgcccgcgccgtcgtcagccggttacccaagcatgacgacaaacatgacgatcgccgatcaacttggctgcgcgcccttgtcgcccggcgcggcttcaatcggacgatcgtcgcgctcgccaacaaaacggcgcgcatcgcctgggtgctgctgaaccgaacggaagaatacgcgatcgcctgaggcctgaggcgcagaacttctcggctttgcactcaggaccgcgaccgaatgcgaggtgaatactgatggcgcgtcggcacggaccgcagcttcaaaacctgatctacgacaaggcccacgcggccgatcatgttatgaggtcagaggcagcggactcccatcaaggccaggagctgatcgctccaggaacaggccggatagattcgtgcattccgtaccgccgataccagcagagtcatcttgcggcgggaggcgtccataga

SEQ ID NO: 6185 - DNA, 1457 bp, unidentified
  source 1..1457: mol_type = unassigned DNA; note = element_993f75e
  misc_feature 1: note = core
  misc_feature 2..236: note = LE
  misc_feature 237..1442: note = CDS
  misc_feature 1443..1457: note = RE
  misc_feature 16..240: note = bridgeRNA
ccccccccgttactatcttcacgccccgataatcggggctatggccagccaggcccggcatgattctcgcctccaagtcgaagtcatgatccggggggtgttgtcaccgggcctggtgggtggctggtgatcgctgataggggtttggccgggatatcccgacgccgtccgtaacgtggatgccgagacttgccaccgttgttgcaggccaatccgttcactctgctcatacttcgatgcaagacactcaacaacatgatgccgtcgatgtcttcgtcggcgtcgatgtcggtaaaggccagcatcatgccgtcgcgctcgatcgaaacggcaagcgtctgtacaacaaggcactacccaacgacgaggtcaagctgcgcgccctcatcgccgaactcaagactcacggtcgactgctgttcgtcgtcgatcagccttccaccatcggtgcgcttcctgtagccgtcgcccgcgctgaaggcgtactcgtcgcctatctgcccggactggccatgcgccgcatcgctgatttgcatgccggcgaagccaagaccgatgcccgcgacgccgcgatcattgctgaagccgcccgctcgatgccacatacgctgcgctcgcttcgactggccgacgagcagctcgccgaactcaccatgctctgcggcttcgatgacgacctcgccgctcaggtcacgcaaaccagcaaccgcattcgcggcctgcttactcaaatccatccggcgctcgaacgcgttctcggaccgcgcctcgaccatccggcggtgctcgatctgcttgagcgctacccgtccccgagcgcactggctgctgccaatgaaaagacgctcgccaaccgcctgaccaagctcgcaccgcgcatgggcaagaactgggcggccgaaatcgttcaagcgctgaacgagcaagccgtgatcgtgcccggcacgcaggccgccgccatcgtcatgcctcgtttggcccagcaacttgccgccttgcgcaagcagcgtgacgaaatcgctgccgaagttgagcggctggtgcttgctcaccctctttggccggtcctgaccagcatgccgggagtcggcgtcaggaccgctgccagacgcctgaccgaagccacccaaaaagccttcgccacggccgctcatctggcggcctacgctggcctcgcgccggtcacccggcgctcaggctcgtcgatccggggcgaacacccgtccagacggggcaacaaggtgctcaaacgcgccttgttcctctccgccttcgctgctttacgagacccagtctcacgggcctattactcatgcaagatccagcagggcaagcgccacaaccaagcactcatcgcgctcgcacggcgacgctgcgacgtcctgtttgccatgctgcgcgacggcaccatttacccacccaagtcagcccctgacgcttgacgaaagacatagggg

SEQ ID NO: 6186 - DNA, 1402 bp, unidentified
  source 1..1402: mol_type = unassigned DNA; note = element_993ffb0
  misc_feature 1: note = core
  misc_feature 2..80: note = LE
  misc_feature 81..1121: note = CDS
  misc_feature 1122..1402: note = RE
  misc_feature 1119..1390: note = bridgeRNA
atgttggggtggacggcccccgcacggcatcgatgtgccagaatgaggtcgttgaagatctcaagcaaaggagaccgtccgtggagcagattattcgaatcggtatggacacgtcaaagcacgtattccagttgcatggcgtgaacgcggctgaggaaccgatcctgcgcaagaagctgcggcgcaaggagatggtggcgttcttcgagaagctgccacctacagtaattgcgatcgaggcgtgcggcggatcccatcattgggcgcgcctgctgcagtcgttcggtcacgacgtgaagctgcttccgccgcaactggtcaaaccgtatgtcaagcgaggcaagaacgatgcggcggatgccgaagcgctgtgtgaggcgatgagccgaccgacgatgcggttcgtgccggtaaagacagccgacagccaggcggcattgatgctggccggagtgcgtgaccggctggtccgcaatcgaacgcaactcgccaacgcgatacgcggctacgcagccgagttcggtctgaccgccgcgaaggggatgagcaagatcgaaccattgctcgagcgcattgcagcagacgagacgctgccggatttggcgcgggagcttttcgctcttcatggcaaggaatacgcgcagttgcaggtgcagctggaaaaaatcgatgccaagctgatggcctggcatcgggccaatgaatgtagtcgtcgtctggcacaaatccccggcgtcggcccgatcggcgcgtcgctgctggtgatgaagatgcccgcacctgaggccttccaatcggctcggcatttcgccgcttggctcggcctgacgccaaaggatcactccactgccggcaaggttaggctcggcgtcatcacgcgtgccggcgacgaagccctgcgcagcgtgctggtcgtcggagccaccgccgtcatccggcatacccgatccggtcgaggcactgtttcgccttggcttgttgatcttctgaagcgcaagccgccgaaactcgcggccgtggctttggccaataagattgcccgcatcgcttggaagatgatggtgacgggtgagccctacaggaaaaatgctgcgacgcttgccttggcgcacgccgcatgaagatcagacagctacggggagcgcttctaccgctatcgtgctgagctgaggccggaacttgcaagagaagaggcagatggtgtgatcgatcgatccgagacgcgagacactccgaaagaaccatcggccgctacaggccgccggcgtgttggggactcgcgtcgcggaaaccatcttggccagcgatcatgtgtgatcgcgcccataggccggacatatgatcgcaagcgatccgatcaaaaagctgcttgacaatcttgcgagaagggggtcgtccacat

SEQ ID NO: 6187 - DNA, 1605 bp, unidentified
  source 1..1605: mol_type = unassigned DNA; note = element_9940866
  misc_feature 1..2: note = core
  misc_feature 3..263: note = LE
  misc_feature 264..1469: note = CDS
  misc_feature 1470..1605: note = RE
  misc_feature 12..283: note = bridgeRNA
ctattacaataagattggatggaaccctcggtagccagccgggggttttgtccgtctcgtgcctaagctacaatgggaggagcaactggctggcccgcttatgcttgggcttttatgcccgaaacgaagactgtcagccatcctctcattgcagcgttcggtttgagcaggttgagccttgagctcgcgtcacctaatagattgaatcggcaacgagaaaaagatggattccagttgcgtatttttgtattgggggaatgaatgtgaactgtgtaggcattgatgtttccaaaggtaagagcatgatcgccgtcatgcggccaatgggggaagtggtgatcccaccctttgaagtcggacacaccaatgttgagttgtgcaggttattggaactgctgaggggcttggatggcgagacccgtgtagtgatggaggccacggggaactatcatttgccggtggccagtttcctttacgattccgggttctacgtctccgtggtgaatgccatgctggtgcatggctacgggaacaacagtctgcggcgggccaagacggacaagaaagacgcgatcaagctggcgaactacggtctcgaccactggctgacactgcccagacatatcccggaggatgaagtgcggctcatgctgaaaaccacataccggcagtaccaacagtgcgccaaggtgcagactatgctcaaaaacaatctgattgccttgcttgacaacgcattcccggacgcgaaccgcttgtttacaagcactgccagggcggacggcagcgagaagtgggtggactttgtagctgctttcccacactgtgagtgtgtatgcgggttgtctgaaaaggcgtttacagccaagtatcaaaagtggtgcaagaaacacggctacagcttcaaccaggacaaggcgctggacatctatgcctccgcttgtgggcatttcagcgtcatgcctaagactggtaccgccaggctcctggtggagcaggcggtgtcccagcttcgggcagtttccgccgcactggccgcgctcaggagcgaaatgcagtctttagcatcgtccctgccggagtatcccgttgtaatgggaatgttcggcgttgacccggttctcggcccccagcttatggccgaaatcggtgatgtacgccgcttccattccaagaaggcgttggtagcttttgcgggcattgatgctccgccgtaccagtctggtcagatggagatccgtagccgaaacatctcgaagcaaggttctgctgccctacgcagaacgctcttcttagtgatgggctcgatcctttgctcctcgcccgccgacaatcctgtatatcagtttatggacaaaaaacgaactgaaggcaagccctaccgcgtttacatgatggcttccgcgaacaagttccttcgtatttactatgctttagtgaaaaagcacttggacgatcccgaagcctgactctgccccgcttaaatcggcttttcctggccagcgctaaaatttttattagtggtggcttgttttggtgcgccttctttcctacgtaaaaaaattccgcttttttaattttaggtgttgactttgattagcaggt

SEQ ID NO: 6188 - DNA, 1667 bp, unidentified
  source 1..1667: mol_type = unassigned DNA; note = element_9954466
  misc_feature 1..2: note = core
  misc_feature 3..577: note = LE
  misc_feature 578..1486: note = CDS
  misc_feature 1487..1667: note = RE
  misc_feature 58..273: note = bridgeRNA
ctggtatattgtaattgacccatctaactggtcatctacaatatacttctcctttctttcaacctttaataaccgtggttgaagacggttttgttaatttgtaaaattgaatatgtgaatgtggatttgtatattcaccccctgtagcttgactactttgagtaggttcttaccacaccttattccaaaacagtgattagttagatgagtctttgaattcgtattttgaaccaggttttgtggtctaagtgttgtggataaccattttcacacgtttctataaagaaaggatgtttatttatgaaattagttggtatcgatgttggaaagaacagtcatcacttctgtgtcatggacaaagaaactggtgaattcaatgttacacctacttctttttctaacaacaaagaaggatttgactttctgatcaactctcttaaaccgtattctaaaaaatcaattttaattggtatggaagacacgggggcattaccatgttgctcttctaaaatttcttcttagcaatggatataccgttgcattgatcaaccctaaaactacagatcttacccgcaagatggaaggtggcattactaagaatgacaaactggatacaatcactatttgtgatgttctagatactcctgagcgtaagaaacagtatcgtattactaaagttgaccgttttgatttatacgaacagagacaattgactcgtcatcaccataatctaaaggaagaactcaatgtctactgtaatcgactacagaaatcgattgatcttgtttttcctgaattcaacactttgttcagctcgaaatatagcattgtttacatgaatcttcttaaaacgtttggcagcgctgaagcaatcgcttctacagacattcgtacaattcgtaaatgttttgaaatcaaaggtagaggcaatcgtatttcattgactccggaaaaattaaaagaatgtgcaaagaattctatcggaatctcttctgaagttgagactatacagatcaaacacttggtaagccaaatcacgcttattaaagagcaaatcgctgaaatagataaaaaaatagaagagttctcaatcacaaacaactctcctatcctaagcattccagggatttctcatttctctggtacttctattttagccgaattaggagatattggcaattattccaagccttctcaaatcattaaatttgcaggagtagcaccatatcactatgaatcgagtcaatacaacgtccaacatactggcataaccaagaagggatctaagtatcttagaaagactttgtatcaaatcatactgactgtaattaacaataatcctgtattcaagaaatactatctattaaaaatttctcaaggtaaaggacaccgttgtgctcaaggccactgcattagaaagttgcttagaatcatttatcatttactagaaacaggacaatcatttgatcctgcattattaagataagacaaatgcatctaaagcatctgaacttttaaaaaaccgcattttaaaagttcttttcgtcatgcctaaatttaatccaatattcacattttcaaagatcaattcaaaaataactaaaaattctagtaattttatattttcaaactttttcataaaaattacttgaattttatatagttag

SEQ ID NO: 6189 - DNA, 1400 bp, unidentified
  source 1..1400: mol_type = unassigned DNA; note = element_9954a54
  misc_feature 1: note = core
  misc_feature 2..223: note = LE
  misc_feature 224..1387: note = CDS
  misc_feature 1388..1400: note = RE
  misc_feature 13..238: note = bridgeRNA
ctacttgttgactggtgttacggccgcagcccggccaggcttggtcgaggtgaccggcggtatcgctctctcagcggctgcccaccgcaagttggtgtggctctcatctggcatgcgtcccgccggtcaccgtggcgcggagaggctccagaggggtctgcccagctcgaagtagcgctgccctcctcgccgatatcaggtcggtgggatcgaggaggacagcgtgggacgagtcatcatcggcatggatccgcacaaacgatcggcgacgatcgaggtcatcgacgacggcgagaacatgctcgctcagggccggttcggcaccgacaccgccggctaccaggccatgctcaaggctggccgcaagtatcggcaccgcacctgggcggtcgagggttgcaacggcatcggccatcacatcgcccaacgcctggtcgccgacggcgaaaccgtgctcgacgtgccggccaaactgtccgcccgggcgagggtgttcgccaccggccagggccgcaagaccgaccccgtcgacgcccactcggtggccgtggccgccctacgcaccaagggattacgccaggtcgtcgtcgatgacgccaccgtcgcgctgcggctgttggccgaccgccgcgacgaactcggccgggcccgcaccgacacggtcaaccggctgcacctgctgctgctcgagctggtggcgggcggggccaagaaggatctgtccgcgctgcaggcccgcgccctgctcaacacggtgcgtccccgcgacattgtcgggcgcacccgccggcagctggccgccgagctgatcaccgaactcgccgtcatcgacaagaagatcaaaaccgccgacgcgcggctgaccgcgctgatcgccgccaccggcagccggctgcaagaactcaccggtatcggcccgtcgggcgctgcccggctgatcggcgacgtcggcgacatcgcccggttcgccagccgcgggcacttcgcctcctggaacggcaccgcaccgttggacgcctccagcggcgaccaggaacgccaccggctctcgcgggccggcaaccggcgcatcaaccgcgccttgcacatcatggccgtcgtgcagctgcgccacgataccgaaggccgcgcctactaccggcgccgagtcgccgccggcaagaccccgatggaagccatgcgcgccctcaaacgacgactgtccgacgtggtctaccggcagatggccgccgacgccaaggcggcgaggacgggcccgggaggacagtcgggagcggctcttcaatccagcgcggccggcccaatcccgatggccagctcttcggatcagtcgcttcccggacccgccgacacccaccctagaacactgctcctcgcccgctattgacacagaggggtgc

SEQ ID NO: 6190 - DNA, 1330 bp, unidentified
  source 1..1330: mol_type = unassigned DNA; note = element_995a692
  misc_feature 1..2: note = core
  misc_feature 3..63: note = LE
  misc_feature 64..1077: note = CDS
  misc_feature 1078..1330: note = RE
  misc_feature 1096..1329: note = bridgeRNA
atgatatgaccactccctctttcaacgttctatacttagaaaaacatcatcaggggaactatcatggaaaacattacgcttattggtctcgatctgggtaaaaactcttttcacatccatggccaaaatagccatgggaaagccatttatcgtaaaaaatttacgcgagctaagttgtttcagtttctggctaattgtccagcaacaaccatcgtgatggaagcctgtggtggtgctcatttcatggtgcggaagctcactgagctaggccactgtgctaaattaatctcgcttcaatttgttcgcccatttgtcaaatcgaacaaaaatgattttattgatgcagaagccatttgcgaagctgcatcgaggccatcaatgcgatttgttaaacccagaacagaatctcaacaagccatgcatgctttgcaccgagtgagagagtctttagtcagagatagggtcaaaacgacaaaccagatgcacgcgtttttattggagtttggcgtcagtgccccaaaaggcgcagcgttaatcaagggtttaaccgaaattttagagacaaacgaatttccgccttaccttgaaagtttgcttcaaaagctccgcgagcactatgattatcttcttgaacaaattaaagatttagagactcaattaaaggcatcgttgaacgaagattgcactggtcaacgcttactgtctattccttgtgtcggcccgttgacggcaagcctactttccactcatttaggtgatggaaaacaatatggggacagtagagagtttgctgcatcaacaggtttggttcctcgacaatatagtaccggagggcgaaacacgcttttagggatcagtaaacgaggcaataaaaaactccgtgcattattagtccaatgtgcccgagtctatctgcgaacactggcttatcgatcgggtaaacttgcagattgggtcaagcaattactacagagaaaaaacaatttcgtggttacctgcgcgttggccaataagctagccagaatagtctgggcacttacaacgcgtcagcagtccttcgattcagaatcatcatgacgaaataataaaatattaaacaatggcttatccgattttgcgaagactgattatggatgatattaacggctaaccgacctaatgaaaaacctgtggttaggaatggcagttaaattgccgctcaatttataaggttcatcaggcgcggaactcatcgaggcgcgggcataaaagccccttaagacgccggatagatttatgcaagctaacaatattatttaaatcagtattgcaaaaacgggagtggtcatag

SEQ ID NO: 6191 - DNA, 1416 bp, unidentified
  source 1..1416: mol_type = unassigned DNA; note = element_9968492
  misc_feature 1..2: note = core
  misc_feature 3..210: note = LE
  misc_feature 211..1113: note = CDS
  misc_feature 1114..1416: note = RE
  misc_feature 1179..1415: note = bridgeRNA
ataatggtatggacccactccacttcctaaccggcctctttagggccaaaatggaattgttaccaaccatttaacggaagcggagtggatcacctatgaacattacaacaatcggcttagatatagcaaaatcaatttttcatgtttttggggtaaccccggcaggccagcaggtgcaaaagaagcaactaaataaggaaacaggggctcatgtattttgcccacctcaaaccctgtttggtggcgatggaggcctgtgggggcgcccattattgggcaagagaaatcagagcgttgggacacgaagtgaaactcatagcgccccagtatgtaaaaccctacgtcaaaggcaacaaaaatgactataacgatgccgaagcgattgccgaggcggcccaaagaccaaatatgcgatttgtcccgctgaagtcagttgaacaacaggatattcagaattttcatcgtcagcgcgagcgcctcaaaaaagagcgtacggccttggtgaaccaagcacgtgggttattagccgaatacggtgtggtgatcccaaaaggggtcgctgcgctgcgccgagagctccctttgatccttgaagatgcggaaaatggattaagcgggctcagtcgagaattatttgccgaattgctggaagacttgcggggtttagaggaacgatttacgcactgtgagcgccgcataaaatcaatgaatcagggcaatgccctttgccggcgtttagacggcatcctcgggatcggccccatcaccgccagtgcgacctatgcggcaatcggcgatggcaaggagtttaacaatggccgccattattcggcctggttagggttggttcccgggcaacactcaacaggcggaaaagcggtattgctggggatcagcaaacgcggcaacacgtatctcaggcaactctatatccatggtgccagatcagtattactccacagtgcgaccaagcaggatcgattcagtcgctgggcacagtcggtattagcccgtcgggggcacaacaaagcctgcgtggctgtggccaataagctggccaggatggcctgggcggtcatggtaaaagggcaggcctatcggcttgccgtgtaacgaatacaaacagtgatttgactgaacgtcatacagacactcagttaatccaaagagaaggttaccctttccaacgattgcaaaagataatttgatctgatggtgagacaggtcagaccggctcattcaaaacctgtttcctgcattggccattataggccgtagggatgatgaggaggatgagcgcagataaccatcagggccaggaggcaaaaaatctccataaacaggccggatatatgagagcaatgatttcctctcacatcaatgatcaaatatcttgcaaacggagtgggtccatat

SEQ ID NO: 6192 - DNA, 1411 bp, unidentified
  source 1..1411: mol_type = unassigned DNA; note = element_997ce60
  misc_feature 1..3: note = core
  misc_feature 4..86: note = LE
  misc_feature 87..872: note = CDS
  misc_feature 873..1411: note = RE
  misc_feature 1155..1397: note = bridgeRNA
tgatgcggtggacggcgcccactctgcggcatcgaagtgccatagggtgattgtgccgaagcaaaccacattgaggggagccgtccatgggcgaggttatcacagttggtgttgatattgcgaagtcggtgtttcagattcatggcgtcgatgcggatggcacggtggtgatccgcaagcgtgttggtcgagtaaaggttcttgagttcttcgccgaattaccgccttgcctcgttggcatggaagcgtgtgcaacggcgcaccagtgggcgcgcgagctcaagaagctcgggcacgacacccgtctcatgccaccgacctatgttaaagcctacgtgaagcgcggtaagaacgatgcggccgatgcagcagcaatctgtgaggccgtgacgcggccatcgatgcggtttgtgccgatcaagagcgtcgagcagcagagcgcgctgatgctacaccggacgcgggatctcttgatccgccagcaaactcagctgatcaacgcacttcgtgcccacctggccgaacttgggctggtatcagcgaaaggacatgaaggattgcagcagctggttacggccgtggcggagagcagcgatgagcggctgccaagtaacgcccggtttgcctgtctagcgctcgttacccagctccacgcggcacaggcccagatcaacgggctcgacaaacgcgtcaccctggcccatcgcgccaacgcggacagcaaacgactcgaaaccattccagggttcggcgtgatcctgtccacggcggtcgtggcaacgatgaccgacccaaaggcgttcaggaccgggcgcgagtttgcagcctggatcggattagtgccacggcagaactccaccggcggaaagtaacgccttggctcgatttccaagcaaggtgatcgctatctgcggcgactactcgtcctcggtgcaatatccattgtcaggaccgcccggatgcggcccgacaagtatccttgggcaaccgaactgctggggcgtcggccggccaaggtagttgcggtggcgctggccaacaagatggcgcgaaccgcctgggcggtactggccaagggcgagacctatcgggcgccggctcgctcaagcagcgctgccatcgcagcagcggcttgaaggtgtcgatattgggaatgtgaggttacgtcgagggcgtacaagaaagtcgagggtgatgatggtttgatgcgaaccggttggaccggggatcgggagaacccgtttatgggtcaagcacccttgagtgcgagtgaatgatagggacccgatctgcggattacatcagggccagcggtcatcggcaccgcacaaacaggccggacacatgacttgcacccgaccgcaagcagaaaaccaaaagagcctcttgacccgtgggcgccgtccacaca

SEQ ID NO: 6193 - DNA, 1381 bp, unidentified
  source 1..1381: mol_type = unassigned DNA; note = element_9984ea5
  misc_feature 1..2: note = core
  misc_feature 3..82: note = LE
  misc_feature 83..1108: note = CDS
  misc_feature 1109..1381: note = RE
  misc_feature 1127..1370: note = bridgeRNA
tgatgatgtggacggcctctcctcaacggcatcatagtgccaaggcgtggtcgcaggagcgccacaaagagggaggccgtccgtgaaacagtttatcagaatcggagtcgatctggccaagaactattttcaagttcacgcggtggcgaatgaaggcgggcccgcggtgacgcgcaaattaaagcgctcgaagatgcacgagttctttgcgcagatcgagccctgcctcatcggcatggaagcctgcggctcggcgcattattgggcgcgcgaactcgagacgatgggccacgaagtgctgctgatgccgccggcttataccaagccctatgtcaaacgcggcaagaacgacgcggtcgatgcggaagcgatctgcgaggcggcgtcccgccctggaatgcgcttcgttccgatcaagagcgccgatcaacaagcgacgctgatgctgcacaagacacgcgaattgctggttaaacagcaaacgatgagtgtcaacgccctgcgcagccatctttcggagtttggcattgttgtcgccaagggaattggccgcgtcgacgaactgctcgaactggccgaaagcgatacgacccttcccgagatcgccaaggcggccgtgaagattctagcccaacatctcgaagggctcgacaaatcgatcgacgatctggagaagcaaatcggccgcgtccatgcacacagcgaaatgagccggttgctcgaccaggttcccggcgtcgggaaaatcatcgcctcagtgatctcggctagcgtgcccgacccgagtgtgttcaaatcgggccgcgattttgccgcctggctcggtctcaccccgcgccagaattcgagcggcggcaagcagacgctcgggggcatcaccaagcagggcaaccgatacgtcaggaaatcgcttgtcttgggggcaacctcgctgttgcgcgtcgtaggcaaacgcaaaggcgccttgcgcgactgggtcgtcgcgttgctggcgaagaagccggcgcgactggtcacggtggccttggccaataagctggcccggatcgtctgggcgatgatgaaaactggcgaacgctttcgcgccgagctgttcgcaaaggcataaggaaaaggccgccatcgctataagctagggggcctgagcttcgagtttggcaagcgcatcgaaacgtgatgaacgacacggtcgtgaccgaatgcctggaacaccctgacgctgagcatgagcacaaagctcgctccaatgatagggatccagtgcgtcggacttcatcaaggccagcggacgtatgtgccgcaccgaaaggccggacatatgaccgcagccgaccaaatcgttcaacgcgaagaaaacgcttgccatggggccgtccacata

SEQ ID NO: 6194 - DNA, 1360 bp, unidentified
  source 1..1360: mol_type = unassigned DNA; note = element_998dd1d
  misc_feature 1..3: note = core
  misc_feature 4..80: note = LE
  misc_feature 81..1127: note = CDS
  misc_feature 1128..1360: note = RE
  misc_feature 1130..1354: note = bridgeRNA
tgatggtatggacgccccctgtcacggcgttggatacgccaaaattgagatgtcgcgcactccagacagaggggacgtccatgacagagatgatgacgattggtttagacttggccaagtcggtgttccacgttcacggggcggacggaacgggccgaccggtcctgcgcaaacggcttcggcgaggtcaggttctgtcgttctttggctcactgccacggtgtctggttggcttggaagcctgcgcgagcgcccatcactgggctcgggagctacgggctctggggcatgacgtgcgtttgatcccgccgcaatacgtcaagccgtatgtaaagacgaacaagaatgatgcggcggacgccgaagccatctgcgaggcgctgatgcggccgaccatgcgctttgctgcggtgaaaagcgccgatcagcaagccgtgctgatgctgcaccggtcacgggagttgctggtgcgccaacgcacgatgttgatcaacgccctcagaggtcattgtggcgagttcggcatcgtcgccgcgcagggcccccacaaggtggcggccttgatggcggtaatcgctgatcctgacaatcaccgccttccgccgctggcccgacaagcgctgatccttctggtgtcccaattgtgcgcaacgcaggagcggatcgcagagctggagaaggagcttacgggctggcatcgttgctgtgaggcgagccggcggctggtcaccattcccggtgttggcatcatcacggcgacggctcttgtggcgacagtaggcgatgcaacggcgtttcgctcggcgcgccagttcgccgcctggctggggttggtcccccgccagcaatcgagtggcggaaaggacaggctcggccgcatttccagcgcggcgacggctacctccgacggcttctcgtccacggcgcccgggcggtattggcctggtcccggcgccgcaaacagacgctctcggactggctcacggctctccttgcgcgccggccgaccaatgttgtgctggttgccatggccaacaagactgcccgcgtcgtctgggccatgctcagccgacaccaagactatatgccggaccggttgccagccacttgaactgcctcccggctgatcacgaattgcgaaggtgacgatgatgtgatggcgagaaagggtgacaccgggatcgatcaaacccgaggcattgtccgagcgccagctcgaagatgtgatggggcctcgatcctcggattccatcagggcccgcggccaacagacgccgcaaacaaaggccggatagatgactgcaaaccttaaacccgcctcagatcaaaaatctcttggcaatcggggggcgtccataga

SEQ ID NO: 6195 - DNA, 1490 bp, unidentified
  source 1..1490: mol_type = unassigned DNA; note = element_99a5ed3
  misc_feature 1..2: note = core
  misc_feature 3..247: note = LE
  misc_feature 248..1468: note = CDS
  misc_feature 1469..1490: note = RE
tctaccatcggatttgcaggttagcggagcccccgcataataggtaagattagcttcggcgggggtgtggctcttggggtcggtggccggaatcggctcactagacttgaaatgccgcccccgccaccctgcatcatccggtgggtcgaacgggatggtgccgatcagcgctctgatgtggctctgtaagtagacgagaccggcggatgattttttctactggttctgacttacggagacacgaacaatgacaacaacctccgatattcgcgtcagcattgatgtgggctgtcacagtcacagtgtagcgatcggcttgccctgtggagaagtgctggacgaattcgacctaccccaccggccggaaggcttcgagcttttcttcgagcgaatcgaacgccaccaccatcgctacggcggagaagtgtcggtggccatggagggttacaacggttgggctcgcccgctggacaccctcgtacgctcgcgaggctatcgccttttcaacatcaacaatctgaagcttgctcgctttaaagagatttttcccgctgcggcgaaaaccgaccgaatcgatgcacgcaaaggccttgagctgtttcagcttcgggactacctcccgtcggccaaaggggtgctccaggaggtcacagcaacgccggtcgagaacgaaaaactgaagcgtttgacccgcaggcgccgttcgctcgttgatgagaaaagtcgccttctaagccgcatgcaggctgatttgcaggcggtctgccccggattgctggcaatcaccaaggatgcggaaaacctctggtttttgaactttatcacctatagtgacgaccttcgtaagcttgcccgtatccgtcagaatacggtgctttcgattaaaggcatcggacgcaaatacgccaaggttataggcgattggcagaaggccgcgagcttcagccacgatattgagtgggtcggcccgatgattgttgaagatgcccagcgaatactggacctgaggcagaagattaaggcgctcgaagtccgctgtgaagaactcatgggccagtcagagattgcacagctggtcgataccataccgggctttgcgaccgtatgttcgtcggagctggccggtgaaatcggtaccattgagcgcttcgccaaagaaggtagccttgcggtctacgtgggcatggccaacctcgataacagctccggaaaccagcgcggttcaaagaacccgaaacatgtgaacacgcgcgcgaaggcagcaatgatggtgggtgtcgatcgacaccggaagcaggttcctgagtcacagcgcttttatgagaagaagcgctcccagggcaagagccataatcaggctatccgagcgttgggacgccacctatgccgtgtgctatttcgaatgctcaaacagggaagggcgtacgagatcagggaaccttcacccgagaaaactagctcgaaatagcttgaaaataccagcgggatgt

SEQ ID NO: 6196 - DNA, 1467 bp, unidentified
  source 1..1467: mol_type = unassigned DNA; note = element_99a818f
  misc_feature 1..2: note = core
  misc_feature 3..238: note = LE
  misc_feature 239..1450: note = CDS
  misc_feature 1451..1467: note = RE
  misc_feature 13..235: note = bridgeRNA
ccgttaccttgttggtggtcccgggtggtccggggctgggccagctgctgtgggcacgggtgtcttgcccctgtccttagatgatccggggggcgaaagtcacccacggcagccgggcgctggtgaccgctgataaggggaacggcccgcagtgtgtgaggtctaacgcatacgtgggtgcgggaccggtcgtccaccggctggccccgcacccatgcagcgagaggcggcaggagagatggatatcggagacatcgaggtcttcatcggcatcgacgtcggtaagagcgagcactgggccacggccctgagccgggacgggcagaaggtcctcgacaaggccctacccaacgatgaggagcgtctgcgtgctctctacaagaagctggccgatcacgggaacctgctggtggtggtcgatcagcccgccaccatcggggccctggcggtggcggtggcccaggaggcgggcttcaccgtgggctacctgcccggactgtcgatgcgacgcatcgctgacctgacaccgggcagcgccaagaccgacgccaaggacgcggccgtcatcgccggcgcggccaggagcatgcctcacaccctgagagccgtcactacctcggacgaggaggccgcagcgctgagcatgctgactggtttcgacctggacctggcccgccaggtcaaccagaccgccaaccggatccggggcctgtacacccagatccaccccgccctcgaggccgtggtagggccctggctggagcacgacgccatcctggaggtcatcgccgcctggcccaccccagcagagctgaagcgagcgggcaagacaaggattgacgccaggctcaagaagcacgggtgcaggcggcacgccacctgggccggccagatcgtctcagccctgaagcaccagaccgtagtggtcgccggcaccgacgccgccgcagtggtgctgccacacctggccaggcagctcatcaccccacgcgcccagcgggccgatgtcgccgcccaggtcgagaccctggtgcaggcccaccctctttaccaggtcctgacctccatgcccgggatcaggggtcccggccgccgccgtccttgctggccgagaccctgggcaagacctccaggcaccggagcccagctggcctcctacgccgggctcgctcccgtcacacgccgctccggctcatcgatccgcggcgagcacgtctcccacggcggcaacaagaggctcaagcgcgccatgttcctgtccgccttcgcctccctgcgctccgaccccgtctcccgggcctactaccagcgcaaacgagaccaaggcaagcgtcataaccaggccgttctcgccctggcccaccgccgcatcctgaccccgcacgccatgatccgcaacggcgcactctacgacccccaaccagccacgaaactacccgcagccgcttgacacaccacataggggca

SEQ ID NO: 6197 - DNA, 1552 bp, unidentified
  source 1..1552: mol_type = unassigned DNA; note = element_99aa16a
  misc_feature 1..2: note = core
  misc_feature 3..275: note = LE
  misc_feature 276..1433: note = CDS
  misc_feature 1434..1552: note = RE
  misc_feature 3..254: note = bridgeRNA
cttgtatgataattacagaagcaaaattacatactttcctttcttttattttgtcaaagtatgtgactataatacattcagatgttgtggactttttattttatcctgtagttcaactactttaaggagtgtattgccgttacattatctgaattgtttatagttggatgtgccacgggctctaaccagcctacgagtactgatttcaatcaagtctacgatgataatcgttaacggatgtcacatcatcaaaaataaggaaaggggtgtatcccatgatctacgtcggcattgatattgccaagctcaatcactttgcttccgtcttatcttctgatggtaaagtcctcgttgaaccgttcaaattcacaaatgacaatgatggcttctgtatgctgctctctgtcctggattcctttgacaaagacggcctcatcattggtcttgaatctacggctcactatggcaataatcttgttgaattccttgtttccaggcattttcatgtcagtgtcctcaaccctatccagacttcttctatgcgaaagaacagaatccgtaagaccaagaccgataaggttgacactgccattattgcccaaactcttatgtcgcagccctacagacttttcacgcagtatgatattgacctgctgcacctgaaaaatcttggccgcttccgtcaaaagcttatgaagcagcgtactcgcaataaaattatgctgacttcttatctggatcaggctttccctgagctccagtactttttcaacggaatccaccataagtctgtttacgccgtcctgaaagaggcgccttcaccggaaatgataacttctatgcacatgactcatctggcacatcttctcgaatctgcttcacatggccgttttagaaaagataaggctcaagagttaagagttcttgcacagaagtctgtcggttccagcgacagttctatatctattcagataacccagaccgttgagcagatcgagttactggatagccaaataattgatgtcgaatccaaaatgcagaatattcttcttgctatggattctgtcatcctcaccattccaggcataagttatctggaagccggaatgattcttggcgaagtaggtgatgttcatcgctttgcttctccgcacaagctgctggcttttgctggccttgatccgaccatacatcagtctggaaacttcaatgccagtcacaccagaatgtccaagagaggctccagatacctccgattcgccctggtatatgctgcccacaatgcagtaaagaataactctgtattcaagcagctctacgaccaaaagcgcaacaatggcttaaatcactatggtgccctggggcactgtgcaggtaaactggttcgcattgtctacaaaatgctgacagataacgtcgcatttaatttataaaagcgaacatattttcgaaaagttccattcatgggagctttattaaggttacccttttttatggaaccgtggacaaatccattttttgtttaaaaagtgcttgacttttcatagttggt

SEQ ID NO: 6198 - DNA, 1597 bp, unidentified
  source 1..1597: mol_type = unassigned DNA; note = element_99b10d3
  misc_feature 1..2: note = core
  misc_feature 3..298: note = LE
  misc_feature 299..1474: note = CDS
  misc_feature 1475..1597: note = RE
  misc_feature 34..275: note = bridgeRNA
acgtataatccaattatcctcttttgagggtagtggattattctcctttctcccaatctcttgggtactattgaatactccattataataataaaagcactgtggatctgtacctatttatttacagctttgactgttccgaggtgactcagaccacagcttttcgtctattactggtaattagtttgttaacgcataaaaccataggttcgttagacgtttgtatttacgtgattacacagccgaattctctgtggaagacaacagtgctaaatattttatcaggaggtatttttctatgtccatgtactttgttggaattgacatttccaagtacaaacacgattgttgcatcctatctgcaaccgaccagaaagttgtttcaaagtttgccttcaaaaatgataagtctggctttgaacagctaaatcttatcttaaattcactctccactcccgaagacataagaatagggtttgaatcaactgcccattatgccctcaaccttgaactcttcctcgaaaacgcccaccacagcttcatggaaattaatccagttttcatcaaggatttcaagaaatctcagactctccggcgcacaaaaaccgactctatcgactgtgagttaatagcacgttggttaatgactgttgaatacaaaccccattcaaaaggattttaccacgcttattccttaaagtcactaactcgtttacgggacaggctggttcgtcagcgttctttttatcttgtaaagcttactaatgtgttggatcacaccttcccggaatttaaaccattctttcaggaacgcttttctaaaacagccctttatcttcttgaaacctatggttctgctgaaaagatggtacgaatgaactctgcatcctatgaaaagctccgctccatatccagaggaaagttttcgcctcagcagtttattcgtttgaaggaacttgcagccaacaccgttggtgtaaacaactctatctttgatgtggaactgggcagcctgctgtctttatacaagtcccttgtatacgaaattgaaactttggaacgtgaaatcaacaggttggtagaggaagtgcatccacactatatgtccatccctggcatcggtcctatatccgctgctattatttatgcggaatatggtgatatttcaaatttctccagcccaaaccagatgcttgcatttgccggaatagagcccagcgtacatgaatccggaaccgaagcgtataatggcagaatggtgaaacatggttcctcacagctcagatatgtgcttatcaattgctgtctgcctttaatacgttttgatgtaacatttgctacatactatgccaagaaacgtgcggagaacaaacctcacagggttgctatcacgcatgtagctaagaagcttgtcagagttatctatgcattggagagtcaggatatcgactttgacacaaagaagcttcgctaaaatcgtgtttataggtgccctcttatccatctgaaatacgctatattcagatggtctattaaggttacccttttttaacaaacagaaatatttaaaatttctcttgactatttatagtttgtc

SEQ ID NO: 6199 - DNA, 1470 bp, unidentified
  source 1..1470: mol_type = unassigned DNA; note = element_99b2931
  misc_feature 1..2: note = core
  misc_feature 3..95: note = LE
  misc_feature 96..1148: note = CDS
  misc_feature 1149..1470: note = RE
  misc_feature 1203..1469: note = bridgeRNA
ataatggtatggacctcccctatgtacagaatctataacaaatgttatcgttctagggtagaaaatgaattctaaacaacaatagagagatccatatgaaagagactagcacaataggtattgatatagcaaaaagaattttccagattcacggtgtagataaaaatggcaagacagtattaaagaaaaaactaatgagggatcaagtattaatatttatggctaacttacctaaatgtttggtaggcatggaggcttgtggaggtgctaattattgggctagagagattagcaaattagggcatgaagtaaaattaatggctcctcagtttgtcaagccatatgttaaaactaataaaaacgatcaagctgatgcggaagcgatatgtgaagctgcaagcaggcctagcatgagatttgttccgattaaaagtgtagaacaacaagatatattatcaattcatagggtaagaagcagattagtaaaaaatcgtactgcacttgccaatgaaatcagaggattgttgcatgagtttggaatcattattcctaaaggtataaataaaattacagcgaagttaactgaagttttagatagtgagaaattaagtccaataagtcagcaaacttttagtgatttaaaagatgaatttattgaaaatgataagagaataaaagacttagaaaatgggctaaaaatgctggccggtgaattagataagtatcagcaaataattgctatacctggtataggtttaattacagctactgctttgatagcatctataggtaatgccggttgttttgagaatggtaggcaattatctgcgtggcttgggttagtgccaagacaagcttctagtggtggtaaagagaagttgcttggaattagtaaaaggggagatatatatttacgaaccttattaattcaaggagcaagagccatacttaatacaaagctaagaactaccactgaatcacagaaagcaaaaaaagattatagtaaatttacacagtggatgtttaatttacgtgaccggagtgggcataacaaaacagttgttgctgtggctaataaattagccagagtagtatttgcagtactaagctcaggtaaagattatgttgagaataaagtttgtagttagggttaagtgacatggtgttacttacgcaagtagctactagaatttaaagagattccgatcaggaatatgcgagggacaaaaaatattgatggcaaaataagacaaatcttatacttataacaaaactgttttattcatgggctcaaacacgaagccgataacatgattaggttaagtttgtaagtggcgaatttccatcagggctgtagagtaaatgatttaatagaactatttacttaactataagtcggatacatgactgcattttgatttttttgctattagtgttatttatttcttgcattatcagggaggtccatac

SEQ ID NO: 6200 - DNA, 1377 bp, unidentified
  source 1..1377: mol_type = unassigned DNA; note = element_99b3aea
  misc_feature 1: note = core
  misc_feature 2..70: note = LE
  misc_feature 71..1102: note = CDS
  misc_feature 1103..1377: note = RE
  misc_feature 1130..1372: note = bridgeRNA
caatggtatggaccccgccgccgaaatacggtgatcttttgaaggtcaattgaagcaagggagaaatatcatggagatcgtccgaattggtttggatttagcgaaaaacatttttgaagtgtgcggcgttgatatgcgagatcacgttgttttgagaaagaccttacggcgtgatgcggttccgcagttctttgctgaattgccaccttgtcttataggcatggaagcttgcagtagctcgcattattgggcgaaggtgctcactgatcttggtcatcaggttcgattgatcgctccgcagtttgtgactccttatgtgaagtcgaacaagaatgataggaacgacgctgaggcaatctgcgaggcaataagtcgcccatcaatgcgctttgtgcctccgaaatcttctgaacagcttgaaatacaagcggtccatcgtatccgccaacgtttggtgtctagccgcacccggcttgttaatcagatacgcggcttgctggcggaacatggcgttgtcattggtcgagacatctcgcgacttcgccgagcgttatcgcaaatcgcggaggggtcggatcgcaatcttggcgatttgatgcaggaattggcgtgtgacattcatcatgagttaaccgctctggacgaacgcatctcttcgtacaaccgcaggatccgggaccttttccgaacaaacgagatgtgtcagcgcatcgggaagatcgaaggaattggcccgatcacggccacagcgctggtcgcggcagttggagatcagtcctgctttaagaatgggcgtcagttcgcggcatggctgggcttggttcccaaacaaagatcaagtggtggaaagtctcgattgtttgggatcagcaagcgcggtgatcggtatttgcgcacgcttttgatccacggagccagagccgttcttggaaaggctgatggaaaacaggacgcgagaagcgcctggatcaaccggatgcgtgagcggcggcacccaaatgtggttgcagtggcccttgcaaacaaaaatgcccgaattgtgtggtctgtcttatccaaaaatgaggaataccgcggacccgaaatgatacaagcagcctagaaagaactcagaccaaaaaggggcatacccgacagaattgcagcaacttggcaggagatggtgagacgacacgttccgtaacttctcaaacctgatgtgtggaccggcaaggcgaaagccgatgccttggagccaatgaggaagaagcaagcggaaatccatcggggctcgcggcgacgatacttcgggccgcattcagaagccggatatacgtcagcaaccgtgaagccaatccagctctaactaaggcgttgcaaaaaggcggggtccatata

SEQ ID NO: 6201 - DNA, 1607 bp, unidentified
  source 1..1607: mol_type = unassigned DNA; note = element_99ba0bb
  misc_feature 1..2: note = core
  misc_feature 3..273: note = LE
  misc_feature 274..1476: note = CDS
  misc_feature 1477..1607: note = RE
  misc_feature 14..293: note = bridgeRNA
ctgttacaataataatagtcggtaaaaccatgacacaccagtcatggtttacacgcactcatttctgagctacaatgaaagcagtgattggaatgacgttttcctccttgggacaaagcgcccgtaatttagacagtcatccatgctttcattgcagtgttcgtttttgcaggttgagccgccgtatcggtgcgttcgtgtcacccaacagattgaataggtaatgagaaaaagcgtggcttccgattacaaattcaaacaggagtgataaaaatgaacgcagtaggtatcgatgtttccaaaggaaaaagcacagtcgcagtgctaagaccattcggagaggtggtggcttcaccctttgatgttattcataacgacagtgacctcaagcagcttgtagacctcataaaaactctgccgggtgaatcaaaggttgttatggagtgcaccggtacatattttgaacccatagcacagttcctccataacaacggtatatttgtttccgtagtcaatgctctcttagttcatgactatggcggaaactctttaagaaaggtcaagacggacaagaaagacgctttgaaacttgcctcctatactcttgaccgctggactgaacttgaagaatatgttcctgccgatgaacagcgaaaaacattaaagatactgaacaggcagtacaatcaatccaacaaaattcagaccatgatgaaaaacaatcttatctcgctgaccgattccgtatttccgggtattaataaactctttacatcaccagaaaggcagtctgacggtcacgagaagtgggtggattttctgaatgcttttcctcataaagactgtattgccggactgtatttatctgttttcaagacaaaatacaaaagctggtgtaagaaaaacaaatacaactattctgattcaaaagcagaagaaatacatactttcgcaaagtcaattatcgctgttctaccgctgaattacagcgtgaaattgcttgttactcaggccgttatgcagcttaacaccatactggaaactgtatcttccattcgtaaagagatggataggattgcttcttcacttccggaatacaaaactgtaatggcaatgtacggtgttggcaaggtgtacggacctcagctcatggctgagatcggggatactcgccgattcagaaacagacgtgcaattacagcattcgcaggtctggacgctccaccatatcaatcgggacagcttgacatcacttcaaggcacatttccaaacgtggctcagctgctctcagaaaagttctttttcagataacccaagttttcattttgaacaagcctgaaaacgaacctgtatatcaattcattgacaaaaaacgttccgagggaaagcattactattcttacaggatcgctgctgcaaacaagtttctgcggatctattatgcgaaagtgaatcagacccttaaattactataacttccgactttttatccacagctgactgcttcaaaattttttatatgaagcggtctttttgccatatcctttttagatttatgcattatttgtaaattcactctcttggggcttgacttttatttgcaggt

SEQ ID NO: 6202 - DNA, 1401 bp, unidentified
  source 1..1401: mol_type = unassigned DNA; note = element_99bf5ea
  misc_feature 1: note = core
  misc_feature 2..89: note = LE
  misc_feature 90..1124: note = CDS
  misc_feature 1125..1401: note = RE
  misc_feature 1175..1393: note = bridgeRNA
caatgcgatggacgcccccacccgtaacggcatcaatgtgccaaagtgggagcgttgatcaaccacttgaaccgaaaggggcgaccaccatggagattactactgtcggtatcgacctggcaaagaacgtgttccagatccacggcatcgatcagcacggcaaggcagtgctgaagaagcaacttaagcgagcccagatggcgccgttcttcgtcaacctgcccccgtgcctcgtcggtatggaggcttgcggcagcgcgcaccactgggcgcgcaagctgcaggcaatgggtcacactgtgcgcttgatggccccgcagttcgtcaagccttacgtcaagacaaataagaacgacgcggccgatgccgaggcaatctgcgaagccgtcgggcgaccgaccatgcgttttgtgccaacaaagaatgtcgagcagcaggctgtgctcgcgctgcaccgggtgaggcagggattcgtgaaggcacgcacagcccagggcaaccagatccgaggccttcttgccgagttcggaatcatcatcccgcaaggtatcagcaacattgccacgcgcgcgccggagctgatcgaggatgccagcaacgagttgccgggcgcgtttcgagtgcttgtgcaacgcctgctggaccatctcaaggatcttgatcgccaagtcgatgaactcgaggtgcagattcaaacatggcatcgcaacagtgatctcagcacgaagatcgcgcaggtgcctggtatcggacccatcagcgccagcgcgttgattgcctctatcggagacgccaagaacttcgacagtggtcgccaactggcagcatggttgggcctcgtgccgaagcagcactcgaccggcggcaagtccaaactgctgagtatcagcaagcgtggggatacctatcttcgaacgctccagatacacggtgccagatcggtgatttatcacgcagcgaagaagccggaatcatgcagttgggtcaacgcagtggtgaaccggcgaaacaaaaacgtggcggcagtcgcgctcgccaacaagaacgctcggatcatttgggcgttgttggcccatgaccagcgctacgaggcaggctacacgcgaacagtcgcggtaggctgacccgtattgagacaaaggtaacgcaagaaccaagacagggagaacaaaccaccgattgctcaggcgatcatgaagtgatggcaagacaggtcagaccgtggttggcaaagcccgcagttttcgaagcacacaaagtgcgcccgaccgatagaggcgtcaaccagcgaatcccatcagggaccgcggcgcaagccgcaatcaagtccgaatgtacgggtgcaatctttaccttcgagccatcatgaattgagcgtttggcatagggggtgtccatgta

SEQ ID NO: 6203 - DNA, 1498 bp, unidentified
  source 1..1498: mol_type = unassigned DNA; note = element_99cb20d
  misc_feature 1..3: note = core
  misc_feature 4..80: note = LE
  misc_feature 81..1181: note = CDS
  misc_feature 1182..1498: note = RE
  misc_feature 1225..1485: note = bridgeRNA
tgatggggtggatggccccctcacggcatctgagtgccaaaatggtggtcgtcgaagatcaccaggaatgggagccatccatgaacgagattaccaccatcggtatcgatctcgcgaagcatgttttccagctccacggagttgacggagccgggaaggttgttgtgtgccggcgcttgcgtcgcagtcaggttgcgacgttctttgccactcttccgccgtgtcttgtcgggatggaggcatgcgggacggcgcacttctgggcgcgtgagatcgccgcgtcgggacatgacgtgcggctgatgcctcccggctacgtcaagccgtatgttaagcgcaacaagcacgatgctgccgacgccgaagcggtctgcgaggcggtgcgccggccctccatgcgcttcgtgccggtcaagaccccggagcagcaggcggcgctcgtcgcgcacagtgtccgcgatctcctggtccggcagcgtacgatgctcgtcaatgcattgcgcggccacttggccgagtttggcatcgtcgcgcagcgcggcattcacaaggtcgaggaactgacggccgtgatcggcgacgagaccgatgggcgcatccccgcgagcgccaggagcgcgctgcgggttctcgccgcggcgctcgccgcgctcgagttgcggatcgccgtggtcgagtccgagatcgtcgctcggaccaaagcggatcctactgcccggcgtcttgccacgatccccgggatcggtccgatcatcgcctcgcggatcacggccacggttccggatccttcgatcttccgatcgggtcgcgacttcgccgcatggatcgggctcgtgccgcggcaaaactcgaccggcggcaagacccgcctcggcggcatctccaaacgcggcaacggcagtctccggcgcttgctcgtcggcggcgccatggcggcgatgttccgctcgaaagccctgcagcacgatccctggctttgccggctccgcgcccgcaagccggcgatggtcgccgcggtggcgttggccaacaagaccgcccgcaccgtctgggcggtcatgcggcgcgaccaggactggcggccggctgcggcgtcatcgtcccgactgcacgagcctgccgccgtgctcgccgccgtcaagaccatgccgccttcggcggtggccttcggccagtcttgaccgcagctgcgcgcggcgacgccaaggcggtaggtcgggacggagaaacggtccctcggtcgaaccgagaaactcacgtttgcgagggcaaaacgagctgatggacgtaacggacagtcggtcgacccgacggaccgagtcacgcctgaagtgtctcaagggacctcgatcccggcaaactgatcaggcctcggtccacggattccatcaaggccagcggccatggcgccgcgccaacaggccggacacatgaccgcaagcgacctgtcctgccatcacgctccgaaagtccttgcaggccgggggccatccacaca

SEQ ID NO: 6204 - DNA, 1198 bp, unidentified
  source 1..1198: mol_type = unassigned DNA; note = element_99d206d
  misc_feature 1..3: note = core
  misc_feature 4..215: note = LE
  misc_feature 216..1190: note = CDS
  misc_feature 1191..1198: note = RE
  misc_feature 56..221: note = bridgeRNA
catcctatgtttgtaaataggatttattgagttgttaaacttttataattttatggtttaacaatagaaggagaaagagcaagacaattgctcgtcattggtcttaaagacagttcagcatgcttgtccctttctcccagtgcttaaattttgaacagttcattaggccgagagcctgcatttaggattgataaaataaaaagcacttatttaaaatgaacattatgaacaaatttattggaatcgacattagcaagcaaacctttgatgtttccttttcaaaaaagaaacaggaggttttcgacaacaaccagaaaggttttaaaaagatgttcaaggacattgatcctgaaactggggttgtaatggaagcgtcaggcccttattatttgaacctagcgacatttttgcacaataaaaaggtaagggtttttgtaataaatcctctaaaaatcaaacgcttcagccaaatgaactttaaccgtgccaagacggacaaaaaggatgcagaggtcatccgtaactatgctttgaagatgcaggaagatttgaaagaatggaagcctgagcccaagcatatcaaagatatgaaacaactccacacctctattgagttgttgaacaaacagctgcaacagacaaagaaccaattaggtgcttttgaagatagtggttctgtgtgtaaggaattgggaaaaagctttagaagtatcctaaagaagctggaaaaggaaaaggaaagattggaaggacaaatgttggctttgggaaaagaggaataccaacaaaccgtaaaatcacttacttccattcctgggatcggcgataagaccgccattatgctaattgccattagcggagattttgaaaaattcgatcattataaacagttgattgcatatgtggggtttagcccaagaatatatcaatcgggaacaagcgttaaagggaaagggcatatctgtaaaatgggcaagtcccagatcagaaaattactttacatgtgcagctggacagctaaacgatataataaggcctgtgtggaaatgtacgagcgtttggaaaaaaaaggaaagccggaaagggtaatcaaaatagcaatagccaataagcttttgaaacaagcctttgcaattgcaaaaaacaaaacaacatttgataaaaattatcaatcaaaagtttgtttttaagcacagtt

SEQ ID NO: 6205 - DNA, 1361 bp, unidentified
  source 1..1361: mol_type = unassigned DNA; note = element_99db162
  misc_feature 1..2: note = core
  misc_feature 3..76: note = LE
  misc_feature 77..1096: note = CDS
  misc_feature 1097..1361: note = RE
  misc_feature 1103..1348: note = bridgeRNA
tgatgtcgtggacgacccctgcagcagcgtagctatgcaatgatgtggtcgttgagccacgtctaggagtcgatccatgcagcaggatatcgtgaccgtcggtgtcgatctggcgaagactgtgtttcagatccatgcgatcagcgctgaagggaaggttttggtccgtcggcaactgcggcgggccgaggttctgaagtttttcgccgctttgcctccttgcttagtcgggatggaagcctgtgcatcggcccatcattggggccgggaaatacgcgccctcggccacgaagtgcggttgatgccgcccgcttatgtgaaaccatatgtgaagcgtggaaagacagatgccgctgacgcggaggcgatttgcgaagcggtaactcggcccacgatgcgctttgtggcaataaagagtgttgagcaacaggcggtgctgatgctgcacaaaacgcgcgatctgctcgtgcgacaacggactgcgctgatcaatgccttacgggcgcatctgtctgagtatggcatcgttaccagtaaggggcctggcggagtaactgcgctggtcaagcttctccatgagggacaggagaagcttccggcgcacgcgcggtcggcgctccacacgatcgcggctcagcttcgatcattagcaagcgagatagatcggctcgagtcgcagatacaggcttggcatcgtgcggatgataccagccgtcggctcgcgaccatccccggcatcggcccaatcactgcttcggcaatcgctgcagcggtgcccgatgcagcgctgttccgctcaggtcggcagttcgcggcctggttgggtcttacgccgcgcgcccatagttctggcggtaaagaacggctcggcggtatcagcaaacagggggacggatatctccgcaagctgttggtcgtcggtgctaccgcagtgatccgcatggcacgcagggatgcaacgcgccagccttgggtcgcacaactccttgagcgcaagccagtgaaaatcgcgaccgtcggactcgctaataagaccgcgcgcattgcctgggcggtaatgacgcgcaacgaagtctacgcggcagccgccgcgtgaccgatgtccttgccgtttactgaagcggcggcaggacggtgtaagggcagctgagtagtgatgacaaaccggtcagaccggggatcggacaagcccaggggagcacggcgcttcgagcgcgatgacgtgattagggatccgatccgcggacttcatcagggccagcagccatgcggtgctgcgcgaacaggccgaacacatggatgcacccgaccggtgcctatcgctccacaaaagctcttgcatcgcaggggccgtccacaca

SEQ ID NO: 6206 - DNA, 1384 bp, unidentified
  source 1..1384: mol_type = unassigned DNA; note = element_99e2ba2
  misc_feature 1: note = core
  misc_feature 2..87: note = LE
  misc_feature 88..1128: note = CDS
  misc_feature 1129..1384: note = RE
  misc_feature 1158..1379: note = bridgeRNA
caatgggatggactcctcctcaccttatcggcatcaatgtgccaaactgagattgacatttcagttagtaatgaagaggagcccacaatgaagattagtcgagttggtgtagatttggcaaaaaatattttccaattacatggcgttgaccataaaggtaaaaccgtctggaaacgacggttatcccgggataaatggctaaatgctttattcacaactgtggaacccggtgctgtgattggtatggaagcgtgtgcgggtgcgcatcactggtccagggtacttcgtgataaggggtatgcggtcaaaattatccctcctcaattcgttaagccatttgtcaaaagcaacaagaacgacgccaatgatgcacaggcgatctgtgaggccatggtgcgtcccaatatgcatccggttaaagtgaaaacggttgaacaacaagatatccaggccattcatcgtgttagaaatgagatcaagagtcatcgcacggccaaggcgaatcagatacgcgggttggttgccgaatatggtttagtcgcgcccaaagaaatgtcctcattacgcaatgcgattcccggctggttagaagatgcctccaatggcctaacatcatgtttcagacaactactgcaaggcttatgggaagatctacgttcaatggataaacgcatgaccgagcttgataagcagatcgctgtcattgcgcaacaaaatccaatcgctaatcgcctacaacaattgcgaggtgttgggccgttgattgccactgcgctggtcgccacgctgggtgatgctaagcaatatcgtaaaggtagagacatggccgccgcgatcggtttaacaccccggcaacacagttcaggtggcaaagacaagttgcttggcatcagtaaacggggtgatgcctatttgcgatgtttattggtgcatggcgcgcgtgctgcgatacgaaccgcaaaagataaggacgatcgtttaagtcgctggatatctaatttgcaagccaggcggcacaccaatattgtcgcagttgcgatggcaaacaaaatggcgaggatggcatgggccatgatgagcaaaggtgtggattatgacccatcattttgttctgtgtcagccacctaaaatgagtcgtaaagtgagaagagtcaattgacgattgcgaagtaaactgtgtaatggcaaacaggtcgaaccggcgcaaataaaacccgggaatgtctgagtgtgtaataacacgtgatagcaatagggaatctgcgcgcgaacaacccattatggcccggcatcatcgtatgccaccttgagaggccggatatacgtatgcagtcgagccaacagccattgacagattacttgcaaacgaggaggagtccatata

SEQ ID NO: 6207 - DNA, 1461 bp, unidentified
  source 1..1461: mol_type = unassigned DNA; note = element_99e4089
  misc_feature 1: note = core
  misc_feature 2..223: note = LE
  misc_feature 224..1447: note = CDS
  misc_feature 1448..1461: note = RE
  misc_feature 13..238: note = bridgeRNA
ctactagacacttctctgcaggatcggtgtctggccagactcggtccaggtgtccggcggaacgctcttctcgcggctgcccacccgcctgcgggtgtggctctctatcgggttgcggaccgtcgggcaccgtgacgaggcgtggctccagaggggactgccctgctcgtagtagcaatgcccacctcgccgtcctatcgggtcgaagagaacggagaacgctatggcgaaggtgatcatcggggtcgatccccacaagctgtcggccacgatcgaggtcgtcgaccgccgcgagaagctgctcgggtcggggcggttcagcaccgaccaggccggctacaccgcgatgcgggcctacgtgaaggcttggcctgagcgggtctgggctgtcgagggcagcaacggtgccggccgccccctcgcgcaacggctgctcgaagccggcgagtatgtcgtggacgtgccggccaagctcgccgccagggtccggttgttcgataccggccacaaccgcaagaccgacgcccgcgacgcccactccatcgcaggggtcgcggtccgcaccaaggccctgcgcgtcctgtctgcggacggtgaactcgaggcgttgcggatgctctgcgaccggcgtgaagagctcacccggttgcgggtccagaccgtgaatcggctccagcggctcctcgccgagcttatccccggacaaggcaagaaagacctcacagccctgcaggccaagacgattctcgccacggtccgtcctcgtgacatcgccgggaagacccgccgccggatcgctgtcgaggagctcgccgacctggtcgcggtcgaggcgaagatgaagaaggccaccgccgagctgaagaccattgtcctcgcccggggctcgcgactgatggacatccacggcgtcggagccgtggtgtcggcccgaatcctggccgacgtcggcgacattacccggttcgcggaccggaaccggttcgcgtcctggaccggcaccgcaccactggacgcctcctccggtgagcaggaccggcaccggctctcacgggccgggaaccggcggatgaaccacatgctccacatcgccgcggtcacccagatccgcctcgacaccgagggccggacctactaccgacgcaagcgaaccgccggcaagaagccacttgaggcgatccgctgcctgaagcgcagactgtccgacgtcgtctaccgacagctggtcgccgacgcccaacgcgcggcactggccaactcacctgaggtgacgggcacgggcccgggagggcactgcggggcgactcaagaatccagcgcggtcgacctgcccccgcacatcgacacttcggatcagccacttcccggacccgcaaaaccgacgctacaaccgtcgaggaccgtcaggaagagcccgtcgaggaagacgcctcagacgaccggttgacaacagaggggagc

SEQ ID NO: 6208 - DNA, 1719 bp, unidentified
  source 1..1719: mol_type = unassigned DNA; note = element_99e5b07
  misc_feature 1..2: note = core
  misc_feature 3..351: note = LE
  misc_feature 352..1566: note = CDS
  misc_feature 1567..1719: note = RE
  misc_feature 50..326: note = bridgeRNA
ctcgtataataagttttgcaaagattttaagtgcctgcataagcactccagattggttaacaggcttcgagatgcccgtgatataatgccggttaggtcggcagggtcaagctctaatcctcctcgttgaaccgaaaggttgcttcaagataagtccgtccccctgaaccggaagttagctgcatactcattggctgtttgccggatgtgaggccgcccttttagcagtgagggctatcgcattggtctcctccggaatgattctgatacgcgaggttgcggatgctccgggtatcatgggtatctcaaagcctgttgacctgaaaatccatcccgagggaggtgatattcgtgaacaagctttatgttggcattgatgtggggagccgtggtaacgccacatacctcatgaccccggacggcagcaaacactgtgctttcaccgtcgaaaacaacactggaggagccaggctgttgaccgataaggtcatctccgcaatggagtcgctgggacttgacgctgtgaacattggtatggaagcgactggtgtctacggaaaccatctggttcattttttgcgggaaaatggtcgcctgggccgataccagcgagaaatccatgtgctcaaccccaagcaagtcaagaaattcaaggaatcctatcctgatctaccgaagaacgacccggttgacgcatttgtggttgccgactgtctccgtttcggaagaatcaaatcggaggtctacatggatgactatcgctacgaagccttgaaaacccttaccagagctcgtttttacgctgtacagaaccttaccagagagaagaaccgctttgcgaactacctgtttctaaagtgttctggcttggctcaagactctgacactaagaacaccagcgccacagtccttgccctgatggaaaggtatgaaacagcagatgacctggcctttgctaatctggacgagttgaccgccttcattgatgaaaccggccgaaacttcgctaacccggtggacaaggcaaaggagatccagcgggctgccagagattcctaccgcttgccggtgagagtgaatggctcggtaaaccaggcaatgtctgtatccattgccaccatgcgttccatggataaacagatcaaggttttggagaaggccattgaacagcagttcaaaatcatccccaatacgcttacttccatccccggcatcggtaaaatctactccgctggcatcatcgccgaaatcggcgaaatcaatcggttccattcccaggcttctgtcgccaagtttgctggccttgtgtggaacagtaacgagtcaggagaatttgtgggtgaggacacccacatgattaagtccggcaaccggtttcttcgctattatctgctggaagctgcaaactctgtgagaagatgcgaccccgagtttcgacgctactatgacctcaagttccatgaggtcaacaagcaccagcacaaacgtgcactcgcgttaactgccagaaaattggtcaggttgatctttcgactgctgaaggacaaccgcctgtatatccgttagcgaactctactcgctgacacattcggccctgtttttgaaaacaacacgggcagggccttggttagtgcacccagttcaccttgaaatatgaccgagcaggccgcttcttgctaaaaatttctcttctcaacttattgacttagtaccattgga

SEQ ID NO: 6209 - DNA, 1245 bp, unidentified
  source 1..1245: mol_type = unassigned DNA; note = element_99ede8c
  misc_feature 1..2: note = core
  misc_feature 3..211: note = LE
  misc_feature 212..1144: note = CDS
  misc_feature 1145..1245: note = RE
  misc_feature 14..194: note = bridgeRNA
cttgtgtcttgagtcaggattagactgagggtgagagcggtgagtagcaagctgaatgccccgagtgcttaaagcacgtgtgggagcccacgctgctactcacctctccgctctggacatgagcccgaacagttgaacgagcccacctcgaacagttacaagcgtgggccaagccagagcgctctcactctaagtgtaagagggtttggcaatgttttcctactctgcaggcattgatgtttccaaagacagtcttgaggctcggattcatttacttgaagctggggtaagctgttccaacactgaaagagacataccggcgttgatcgggtggctaatgctttaccaggttagtcgcgtgttggtggaagccacgggcggttacgagcgcaaaatcgtcaaagcggctcaggctgccggccttgaggttatgtgcgttaacccccgtcgcgccaaagagttttccagagcgatgggccagaaagccaaaaccgacccgatagacgcaaagtctctggcgcactatgcagccgttctagactcgccaagtgcccgaatcacgagcccggaacaggacaagctgcgcgcgctggtccagcagcgggaacattttgttcagcaaagagatgacgacagacgacgcctgaaaacggcttcctgcgatgcggtaaagcctgcattgcagagccatatcgactatttgaacacggcagtggaggcgatagatcgactgattcgtcaaagtgcgaacgagctagatagcgaaaaggtggctcgactgtgttcagtcaaaggaattggtctggttactgccaccagtcttatggcttacctgcctgagctgggggagattggagggcgccctatcgcggcattagcgggcctcgctccgtacaacaacgacagcggaaggcataaaggtgcacgccatattagtggcggaaggttttcagctcgtcgctcactttacatggcctgttgggtggtcatccgggaccagccagaattcgggactcgatataaggcgctacgtgataaagggaaatgcgccaaagtcgcgttgatcgcctgtatgcgcgttttgttggtacgcctgaacgcgatgctgcgcgaccgtactgaatggaaagagcgtaccgcttagcgcggtagcagctatttcctccaacatcgcacgacttaaggctgtgggagctttgctgtctatgaaaaatgacttctgaattgaatccattaagacagttg

SEQ ID NO: 6210 - DNA, 1401 bp, unidentified
  source 1..1401: mol_type = unassigned DNA; note = element_99f616d
  misc_feature 1..3: note = core
  misc_feature 4..88: note = LE
  misc_feature 89..1123: note = CDS
  misc_feature 1124..1401: note = RE
  misc_feature 1088..1388: note = bridgeRNA
agatggggtggttgccgccttccccagacggcatcgcaatgtgtcaaggttgtggtgttgagaaacacgaaactgaaaggacggcaagatgcacgatacaatgatcggtgtggatctggcaaagaatgttttccagctgcacggcgcctcgatgacggggcaattgaaattccgcaagaagttggcacggccgcagttccggcagttcatgtcggaccaaccgcctgcaatggtcgtgatggaggcctgcgggagtgcgagctattgggcccgggagatgatcaagcttggtcatgaggtgcggctgattgcaccacaatacgtgcggccgttcgtgaagaggcagaaaaacgacacggccgatgccgaggcaatagtcatcgcggcgcagcgccccgagatgcgcttcgtcgagccgaagtctgaggaccaacaagctcgcgccgtgctgtttcgcgcacgtgaacgtcttgtccatcaacgtactgagatcgcaaacgcgctgcgcggggtactttacgaatacggttacaccgtcccacaggggatcaggcaactaaagcgcatagagataatcctcgacgagaataatagcagtctgcccgcgctggtccgtgaggaatgccgagacctgatggcgcagattgccgagaagaccgcgcggatcgaggtcaagacgaagaaagtgaagaggtgggccgcgcagaccgacacggcgcgtcagttgcaaactatgcccggcgtcggccccatgaccgcgcttgcgatcgaggcctttgctccggaaatgaagagcttccggcgcggacgggactttggcgcttggttgggacttgtgccgcgccaacactcctcgggcggcaaggagcggctggggcgtatatcaaaggcaggtcaggccaacattcgacgactgttgatcattggcgcaatgtcccggctaaactggatggggcgcaagtcgattccggagggttcctggctcgcacaaatgctatcaagaaagccgcgaatgttggtcgcgatcgcattggccaacaagatggcgcgcgcagtttgggccatgctgacgaaaaacgaggactatcgagatccggcctttgcaaaagccgctgcagcgtaaaaaatgctgcagcatcacaagcgcagaggtcggtaaatgggggtgtgagaagccgatgacctaaatgggcgaaatgatcgaatagatctggattgggaaaaccaggcgaacttctggagcaagaatagctcggtacacagatatggacccaatctgcggatcaccataccggccagcggcttctgaaaggccgcacatcaaggcctgacagaagaacgcgctcgatcacatgctcaaagggtcaaaaagcttcttgcatcaagggcggcaaccacaga

SEQ ID NO: 6211 - DNA, 1544 bp, unidentified
  source 1..1544: mol_type = unassigned DNA; note = element_99fec8a
  misc_feature 1..2: note = core
  misc_feature 3..240: note = LE
  misc_feature 241..1422: note = CDS
  misc_feature 1423..1544: note = RE
  misc_feature 3..218: note = bridgeRNA
cttgtattataaagtagtagtttttaaagcccctctccaagggctgtgctacactgtaagggatgctgtggattggttcgcacctcctaccgcaagacggttcttgaaaggctccaaccacagccctttacagaattgttaatcagttagataccgccagacggtttatgtggaacaaggttacaagagtaaagtgtcctgtggaaccagcatcgaaataaacataccggaggtatcatgatgatttgtgtgggtattgacgttgccaaggacaagcatgactgcttcatcctcagttcggaaggcaaagtcctggcagatgtattcaccatcccaaacaatgcggaaggctttggcaccctgctgcaaaccattctccgttgcacacgtccgacagacaaaataaaagtagggcttgaggctaccggacactacagctacaacattctcggatttctgcttgacaaaggtctacccacctacgtcattaatccgttgcacaccaacctctaccggaaaagtctgagccttcgtaaaaccaagactgaccgggtcgatgcacgaaccattgcagctatgctcatgtctgatgtggacctcaagtcctacacagacacagcatatcacaacgaagaactaaagtcactcaccagatacagatttgacaaagtccgagagcgcgcaaagctgaagcagtcagtttcccgattggtcaccattcttttccctgaactggaaaagctggtttcatcccttcacatggcttctgtttatgccgttctcggcgagtttcccggggccaaacagattgccggagcgcatctgacacacctgaagacgcttttaaatgatgcttccaaaggacactacgggcgggatatggcaacggagtttcgaaatgctgccagatgctctgtaggctctgtcatgcctgccaagtctcttgaactgcagcatacgatccgcctgatccgagagttggacactgagatcaatgacattgagactgccatccaggccataatggaagaaatgcagtcgcccatcacaacaattccgggaatcggtattcgcatgggcgctatgattttggctgagatcggcgatttctcacgtttcgactctcccgacaagatccttgcgtatgccggcatgtctccatctacttaccaatccggtcagctttcgctgtccggggcgtactcacacatggaaaagcgtggttcaaggtacttgcgctacgctctttataacgcaaccaagtatgtctgcctttgggacccgacctttgaggcatacttggctaaaaagcgggcagaaggcaagcattacaatgtcgcactctcccatgccgccaagaaattggtccggctgatctatgccatggagaaatccagacgaccatacaacagagccgcatagctttttcactcgtataagctcaagcaggcgtccaaccggacgtcagctttgctataccattttgaaccatctgaagtttcttaccaacccacacttttcagacttgacttttaatagttagt

SEQ ID NO: 6212 - DNA, 1655 bp, unidentified
  source 1..1655: mol_type = unassigned DNA; note = element_9a12096
  misc_feature 1..3: note = core
  misc_feature 4..248: note = LE
  misc_feature 249..1424: note = CDS
  misc_feature 1425..1655: note = RE
  misc_feature 3..226: note = bridgeRNA
ctcgtataataaaatagtagtatttatagaccgctctccagcggaatgctacaatagtttcagggtgctgtggattggtgaggcgttactaccgcaaagacggtttttgggaggctccaaccacagcttctttgttgaaatgttaatcagttagataccgccagacggtttatttagaacgaggttacaagagcaaagaagtctgtggtcctgaacagcatcgaaataaatataccggaggtatcaaaatggtttgtgttggaattgatgttgccaaggataagcatgactgctgtattcttgattcagacggaatggttcgtgctgactgctttaccatccccaacaacatggatggatttaagcagctgcttcaaacgattcgaaactgcaccaaaaagtcagacaaaataaaagtaggacttgaggctaccggacattacagctacaacattcttggatttcttcttgacaatgacctggccgtctatgtcatgaatcctttgcacaccaacctgtaccgaaaaagtctcagccttcgcaaaaccaaaaccgatcgtgtggatgcaagaacgattgcaactatgctattgtccgatgtagacctcaagtcctacacggatatagcataccataacgaagagctaaagtcactaacaagataccgatttgataaagttcaggaatgcgctaaactaaagcaatcggtgtccagattggctacgattctgtttcccgaattggaagggcttgtttcgtctatccatggcacttcaatctacgcacttctcagcgaatatcccggtgcaaagcaaatttcagaagtccatcttaccaagctgacaaaccttcttacaacagcgtccaaaggacgctacggaaaagagaaagccatccagattcgagaggcagccagagcttctattggctctgtcatgcctgccaaatctttggaattgaagcataccattaaactcattcaagaacttgcctccgagatcgacgaaattgaagattctattcagaaaatcatagatgagctcaatccaccaattctctcgattcccggcatgggagtaaactccgctgctgtgatccttgcagaaatcggggatttctccaatttcagttctcctgacaaaattcttgcttacgctggctgctctccatctacataccagtccggaaaactcacgaactgctatgctcacatggaaaaacgtggctcccgctacctgcgacatgccctttacaacgcaaccaagtacgtctgctactggaatcctgtctttgctgaataccttgccaaaaaacgtgccgaaggaaaacactacaatgttgccctgtcccatgccatgaagaaactcgtgcggctgatctacgctttgcagaagtctggaaaaacatatcttacagctgcatgattttctcctgagcctgagctaattccaacagaaacttagctggcgcagcgaacccttgacgaaccgaagcattcaaatgctattctgtttctgcgagggttggccgggcttgctttgctgttctctccgtcgccctcgctgttccaagaccagcatttgaatgctgtttgtcaggggcagcggtcggttggctgattttttcattttggggcttgacttttaatagttagt

SEQ ID NO: 6213 - DNA, 1567 bp, unidentified
  source 1..1567: mol_type = unassigned DNA; note = element_9a12e94
  misc_feature 1..2: note = core
  misc_feature 3..246: note = LE
  misc_feature 247..1425: note = CDS
  misc_feature 1426..1567: note = RE
  misc_feature 1..226: note = bridgeRNA
ctcgtattattaaatagtagtatttatgaatccctctccagggataactgttatactgttagagatgctgtggattggttttcctatcctaccactcgatggtttaatggaggctccaaccacagtctctttgtataattgttaatcagttagataccgcatgacggtttatttagaacgaggttacaatcacaaggagtaactgtggctctaaacagtatcaaatactttcaaaggagatttattatgatttacgtcggaattgatgttgccaaagataagcacgactgctttatcacaaactcggatggtgaggtattgtttaaatcatttaccatccctaacaatcgtgaaggttttgaaaccttatttcacagaatcgaatccgtatcagatgatttagccaaagtaaaagtaggactcgaagcaaccggacactacagttacaatcttctgggattccttcttgataaaggtctgaccacctacgttatcaatccgttacataccaatctttacagaaaaagtctaagccttagaaagacgaaaacggataaggttgatgcccatacaatcgcttctatgattatgtctgatgtgaacttaaagtcctactcagacacatcttaccacaatgaggagctaaagtcactcacccgttaccgttttgataaggtaaaagaacgggcaaagctgaaatcctctgttgcaaggcttataaacatcctgttccccgaattggaaaagcttgttcctgcgctccatatggcttccgtctatgctttgctttccgaatttccaagtgcctgtgctgtcgcatccgcacacctcacaaggctttccaatcttctttttgaaagttctaaaggcagatatggaaaagatactgctatcttgtttcgtgagactgcaagaagttctatcggctcccatatgcctgccaaatctctggaactaaaacataccatcaatcttattcaggaattaacagctgagattgatgaaatcgaaacagccatcaggcagattatggatgaagaaatccaatcgcccatccttaccattcccggcatcagttaccggatgggtgccatgattatcgctgagattggggatttcagccgtttcgattccgcagacaagatacttgcttatgctggaatgtctccgtccacctaccagtcagggcagcttgataactgttatgcccatatggaaaagcgtggttcccgttatctgcggtatgctctctacaatgccacaaagtatgtctgccattgggatgaatcctttggtgcatatcttgaaaagaaacgctctgaaggcaagcattataacgttgcattatctcacgccacaaagaaacttgtacgtctgatttttgcaatggagaaatccggacgggcatacatttcagcgtcttaacttgttctgtatatatttccttttggagtgccagaaatgacactctgtttgtcatgcagttttcaaggttcaaatatatttgaaatgccatttggcaattcattcaaaaaaattttttaggtcttgacttttaatagttagt

SEQ ID NO: 6214 - DNA, 1343 bp, unidentified
  source 1..1343: mol_type = unassigned DNA; note = element_9a15a00
  misc_feature 1: note = core
  misc_feature 2..61: note = LE
  misc_feature 62..1105: note = CDS
  misc_feature 1106..1343: note = RE
  misc_feature 1116..1334: note = bridgeRNA
taatgggatggtctgctccatctaccccgctatgctgaagccagcatcaaggaggctgatcatgacccaatctcagatttacatttatggcatcgatttaggcaaaaactggtttcacctggtagcgatggatcgcatggggcatgtattgaccaagcaaaagctcactcgttcacaactgaaacagttcatcagcacgaccccaccctgtcgggttgccttcgaggcatgtcctggttcgcaatactggggacgactgtttcaacaggcggggttcgagcccaagattattcccgctcaatttgttaagccctacctcaaatcgaacaagaatgacttcaacgatgccaccgccattgccgaggctggtagcagaggcactatgcgctgtgtcccgttgaaatctcatgaacagttggcattgcaggcgactcatcgagtccgtcaacgtttcatcatcgaacgtaccgccacggtcaatcagatgagagcgttgctgctggaatatgggctcaccgtaccggtgggcagaaaagtcttcgaacgcgccctaccggcgatccttgaagatgccgagaatggcttgcctgattttatccgcgccctggtattgcgcctgagagaacggtggcaacagctggatattcagattgatgagatgagcctcatgctcgggcaagcctcaagcgcatcgagtttgtgccaaaaagtcagcaccgtccccggcattggaccgattgtctcaaccgcgttaattgccgcgattggcaatggttcacaattcaagaaagcccgcgatctttcagcctggttggggctggttcccagacaatattcaacgggtggcaaatcctcgctcggcgggatcagtaagcgtggcaataactatttgaggcaaatggttattcagggcgccaaagcgctgaaaattcacatgaagcgtgacaaatcatcgttaggcgaatgggtcgccaggctggaggtcggccatcaccatcatgtggtccttatcgccctggccaacaagataatgcgaatttgctggaaagtactgacatccggcagggattaccgaccatatcccaacgcaagcgcagccgtttaacagatagaactcataccaggttttgcgagccaaaaacagatgacagaagcgttcaccccacgacgttgcagcctggctaaaaaagcagtctctcgtgactggtagctttattaggacgacgacgtgcggatcccatcaaggccagagccggaaaacggctcacagacaggccggatacattgacgcaaacgacttctggaaatcagttcacgcttgcagataaggagcagaccataca

SEQ ID NO: 6215 - DNA, 1450 bp, unidentified
  source 1..1450: mol_type = unassigned DNA; note = element_9a18482
  misc_feature 1: note = core
  misc_feature 2..62: note = LE
  misc_feature 63..1091: note = CDS
  misc_feature 1092..1450: note = RE
  misc_feature 1224..1444: note = bridgeRNA
tactggaatggtccgccgcttgttccacaggacgggctatcttgggtggcaggaggttcaccatggagatttcgacgattggcatcgacttgagcaagactacctttcacgttattgggctcaacacgcgaggagagattgtgctgcggaggaagttttctcgcaagcaattactccaattcacttcgaatcggcagcagatgctcattggcatggaggcctgtggaggcgcacactttcttggccgcgcgctgcgaactcaagggcatgatgccaagctcatgcctgcgcaattcgtgaaggcatatcgtaaatcgaacaagaacgactatctggatgcagaagcgattgccgaggccgtccaaagaccaacaatgcgctttgttccaatcaagacggacgatcagctggatttgcaggctttgcacagagtacgtgatcgttgggtggcaaggcgcactgcggtaatgaaccagatccgcggctttcttctggagcgcggaatcacagtgcgcaagggaccttctcacttggccacgcaatttcagcggatgatagaggatgccgacatgcccttatcaggcaggctgcgtctgttgattcttgaactgaaacatgaatgggacgaactggagacgcggatcgaagcagccaacgtcgagttgcagcgaattgcgaagcaggacgatgcatgcagccgcctcatggaaattcccggcttcgggccgctcgtttcaactgcgctggtggccgcaatcggcaacggtatcactttccgaacaggtagagatcttgctgcctggctggggctggtccctcgacagcactcaacgggcggcaagacccgattgcttggcatcagcaagcgcgggaacgaatatttgcgacgcatgcttctgcatggggcccgatcagtggtggcacaaataggacgaaccccatcggctcttgggctatggattgcggatttgtcggcacgaagtcatcgcaatgtcaccgtagtggctttggcaaacaagatggctcgaacagcatgggcaattcttagtaaggggactcggtactgcgcgcctgcgatggcagcagtataaaggtcagggttggaaaagccactccgtggaaaagtcaaaagaactgactttcccacctcgtttggaaatcctgcaaagaacgcaggattcccacttttccaaccctgcgactacgacgatcattatcattttccgggtttgcgagacgaatcaaatgcgtgggtgaacggtcacaaccggcgttgcctaagtctgcgtgggaatgagaacccttcggagttcgacccactttatagaacggcgacgcgcggactccattatggccaggagcttggctccacaaacaggccggatacatttgagcagaccaaaccacccccgatgaagattctgcttgcaatccggcggcggaccataca

SEQ ID NO: 6216 - DNA, 1359 bp, unidentified
  source 1..1359: mol_type = unassigned DNA; note = element_9a1a23b
  misc_feature 1: note = core
  misc_feature 2..77: note = LE
  misc_feature 78..1103: note = CDS
  misc_feature 1104..1359: note = RE
  misc_feature 1135..1345: note = bridgeRNA
caatggtatggactccccacctcaactgacagcgtcagctaaagttacaggtgcgaaccaaaacaggagcccataccatgaataaatttaacacaatctcaattgatttagctaaatccgtctttcaagtcgcggtatttaaccgctatggcaagcttacgttgaaccaagctatgactaaaaagaaaatgctaacggtcatcagccaacaccctggtgcgaccatttgtatagaggcctgtgcggcatctcattattgggggcgaacgtttcaaagccgtggtcataccgtcaaagtgatacctcctcaaaaagtgaagccgtatcgcaatggtaataagaacgatgctaatgatgctatcgcgatttatgaagcttccttacgctctgatattcatgctgtaccagtaaaaacactggaacagcaagatatcgctatgctgcttagtttaaggcaaagctatataaaacaacgcacggcagtaagtctacggatccgtggctatgcagcggaatgtggcattaccttcccacaaggagccaataaactgcgagaaatgctccctctcgttatcgaagatgcagagaacgaactaacccccgtagctagattcgttcttcgagaattgtatgctcaactactcagcattgatgagcctatagaaagagttgaatccgaacttattgagttcgcaaagcaaataccagcttgccagttacttatcactctgcgaggtgtacgttggattattgcgagtgctattttcgcccgtatgggtgatgcttcagcctatagaaatggtcgaggagcgagtgcaagtttaggcttagtccctacacatacaggtagtggtgggaagaacaaaaaccacggaataagcaagtccggagataaaacccttcggtctcttatagttcatggcgcaagagcagtcgtagctaatatacgagataaaaaagatcgattaagttgctggctccgaaacttattagaaagaaaaccatttaaccaagttgtcatcgcccttgcgaacaaaacgatcaggatggcttgtgccatgctaaagagtaatcaatcttataatgaggcgttaatcgcttaacgatcagttttataaggttaagagagactgcaatacccacatgtaagcaagtaagtcatggatatagcgctaacaaagcaaacaagggaaactctgtgagggacgaaggcgatagtacgccactcgctcgataagaccccttgttcagtggattaagccatataggttcggggtagctccccataaagaaaccgaatatacgtgcacttgtaaaccgctagcttaaacttcttgcattactaggggagtccatata

SEQ ID NO: 6217 - DNA, 1643 bp, unidentified
  source 1..1643: mol_type = unassigned DNA; note = element_9a1a623
  misc_feature 1..3: note = core
  misc_feature 4..264: note = LE
  misc_feature 265..1488: note = CDS
  misc_feature 1489..1643: note = RE
  misc_feature 1..213: note = bridgeRNA
cccgttaccttgatccagtccccgtaccctcggggacaggtcactggcctcggtatggcttactcgccctgttgttcgacatgatccggggggtgttgccaccggggaaccaggacgcacgccgacggctaatagggacgcggctcacggccacagttccgtgaagtctcttcgtaacgtgggtgcccgcgacgagtgtctgaccaccagtgatcttccaccacaaccacaccgacctccccaggatcaaggagggaaaacaccatggaagacaccaccggctacgacgtctacctcggactcgacgtcggcaagaccgcccaccacggctgcgccctactcgccgacggcaccaggctctacggcaaaggcctgccgcaggacgaagcccacctcaccgccctgttcaacgagctcaaagagcacggccgtgtgctgctgatcgtcgaccagcccaacaccatcggcgccctcccggtcgccgtggcccgtgccaccgggtgcggtgtcgcctatctgccaggcctggcgatgcgcaaggcagccgacctgtaccccggtcaggccaagaccgatccccgcgacgcgttcatcatcgccgacaccgcccgcaccatgccgcatactctgcgggtcgtcgaccgcaacgacgaggtcctgtcagcactcaagatgctgtccggcctggacgacgacatcgcccgcgactgcactcgcaccatcaaccggctgcgcagcatcctggtgcagatctacccgtcactggagcgcgtgttcgccggcgaagtcctgcaacgtgcattcgtactggacctgctgatccactacggcggccccaccaagctgaagaagtcgggtaaggcccgggttctggcctgggcacgaaatcacgctaagaaggacccggaagccctggtcgacgacatcttccaggccctcggagcccagaccgtcaccgtacccggcaccggggccgccgaaatcgcgataccgatgctggccaccaacatcaagtcgttgaaggctcaacgtgagtccatcgcagggcaggtcgaggagatgctggacgacttccctcttgccgaggtcttgatgtcgatgccgggagtcggcatcaagaccgccgcaaacatcctcctggccgtcggcgactgttccgacttccccgatgccgcccacctggctgcttacgccgggatcgccccggtgacgagacgctccggcacgtcaatcaggggtgagttcccggccaggtcaggtaacaagaggctcaagaatgccctgttccgatctgcgtgggtcgcatcgaactgccatgaggcgtccagggcgtactacgcgaagaaacgggccgagggtaagcggcacaatgcggcggtgatgtgtctggcccggcgacggtgcaacgtcatcttcgcgatgctgacccgcggtgagttcttccgtgagctgccggcccgcaccccgcaggaggtcccggctgcctagatagctgagctgaaccacgccgaccccacgtcaggcgttccaccgtcacgacgggtggaacgtccacgtcagcatgttcgacaaccctcgccccaggagggctacacgggtcagagaaaagacggttgcaggggttgacaatctacatagggaca

SEQ ID NO: 6218 - DNA, 1443 bp, unidentified
  source 1..1443: mol_type = unassigned DNA; note = element_9a1cabe
  misc_feature 1..2: note = core
  misc_feature 3..123: note = LE
  misc_feature 124..1158: note = CDS
  misc_feature 1159..1443: note = RE
  misc_feature 1196..1397: note = bridgeRNA
agatggggtaatcggccggcgttcttgtggatagctgaagatttggggtgctgcgcttcaggctgatggtgaaacgaggtcaccgtagttacgggcctcaagcatcagaaggagaagcgcagcatggaccattttgcgggactggacgtatcggtcaaggacacgagcgtctgcgttgtggatgagactggcaggatcatcagggaagtgaaggtggccagcgagccggaagccttgttggctgtgttgaagaaccccgcctatcacttcaagcggattggattggaagctgggccgctgtcgcaatggctgttcagctcgctcgccgaagcgggcttgccagtgatctgtgtcgagacgcggcacatgcgggcggtgctgaaggcacagatcaacaagaccgaccgcaacgatgcgcgtggcatggcacagatgatgcgggtcgggctttaccgcccggtacatgtgaagacgttacgcagtcagaaacttcggatgctgctgacccatcgccagttgctgctgtccaaggccatcgcccttgagaacgacctgcgcggtacgttgcgcaacttcggccttaaggtcggcatggttgggaaggtgaagttcgaggcgcggatcagggagcttgtcgagagcctccccgacttggcggttctggtcgaaccgatactcattgtccggcgggtgttacgggaacagatcgtcatcctgcatcgccgcctgttggccatcgtccgcgatgacgaggtgtgccagcgcttgatgacgacccccggcgttggccccgtggtatcgctgacctatcgcgccaccgtcgacattccggctcgcttccgcaaatccaagtccgtcggggcggtgtttgggctgacatgcgccaagtatcaatcaggcgaggtggattgggacggcagaatatcgcgttgtggagatgggatgatgcggacgatgctctacgaagcagctcaggccatgatgcgttccaagaagtggtcctggctcaaggcctgggcgatgcagatcgccagacgccgcgggatgaaaaaggcgattgtggcgctggcccgccgactggctgtgatcatgcaccgcatctgggttgacggcaccgagttccgctggacacgcgaaaaggccgcggtagcagcatgacaaccgcaccgcatcaaacctgatataggaggaaactcgagctccaccctgcggtggaaagatgtccctcgcgggacgatggatgaggtgagttcgcttggtcgcttgaacctgccgttcgtgagacggcaaggccgcccattagattgttccacctcgtcctcgactcccatgatggaagggccctggtgccgattccgaagagaagcacgagcccgtgagcgacattgacactgaagcggtggatagcctgaaagtgcttgaccccaaccggccgattagaga

SEQ ID NO: 6219 - DNA, 1805 bp, unidentified
  source 1..1805: mol_type = unassigned DNA; note = element_9a2377f
  misc_feature 1: note = core
  misc_feature 2..259: note = LE
  misc_feature 260..1249: note = CDS
  misc_feature 1250..1805: note = RE
  misc_feature 55..254: note = bridgeRNA
ctttagattttttttattgataaattctattatgttaatgatgttgaaaagagggggtctgggggagactcataactaagaatatttgtcaataactttcaggttaaagaaacggggtgaactttggtgacggccaggataaagaccttggtagtgtattagtccccgttttattaacccggttgccaaggaccagataggataatagcccttgctattaaaggttttagtcagtgcaaccttttaaacttttaatactatggaagtcaatgaaattatcggtatcgatgccagtaagttaacattggattgctgtatccacagtaatggaaaacaggaggtttttgataataattcggaagggattggcagactattggactgggtatccaccaaggtccctgtcaaaaaagaacagatccttttcgtatttgagaacacaggcctttataccattgaacttatagatggtttacaagagcgtagatttttaatgtacgttgcatccggacttgaaattcgacgttcacttgggatcgccagaggtaaggatgataaggcggacgcaaaacggattgctctgtatggctatcggataagggaagatattgagccttattccccaccaagtccggcgttagtaaaattaaaacgattaatgtctatccgaagaaaactggtggtacaacacgctggatatatggcaaacctcaaagaacagaaaagagttttgagtgacgaggaaatactattcaacgtgcaggagaaagtaagggaggtccttcaggtacagatagaggtagttgaaaaggaaatgcataggattatcaaagaagaacccgagcttgcaaagcttcaaaagctcataaccagtgtaaaggggataggcccggttacagcccggttcttgattatttatacaggtggttttactgcttttcagtcctggagaaaatttgcatcatatgtagggattgctccgttcccaaatagatcgggcacaagtatcaaaggcaggaataaggaaagtaaccttgccaataaggaaggtaaggcccttctccatatgtgcgccgcttctgccatacaatgcagtcctgaaataaaagtatattacgagagaaggctcgcgaaaggcaagcacaaaatgagcaccctaaacattataaggaataaattattatccagagcttttgctgtagtggccaggggtaccccatatgtcaatacgatgaaatatgcctcttgaggttattttgaataaatagtcatcaaacggaaaaatcctttgaatcttctccactgattaagttgttgttcctaagttaaataagtgggttaataaattattgcttaaatctgattaaaccatcaatctaataaggaaaccattatccattttgtacccctgccttgaatcctgcccctcttccatcgacaatctgacttacactctccatagcccctcatcatcccttttttaaaatgcgaaaaaacaacattcttccttggacagcggcataaagccgctccggcttcgcctgctctttttatacgctttaccaatcccgaatgttgtaaaaacaataagcatcaaaaaagggtaatgtgagggcactataggaagtaagtcaagatcaataaaaatgaaatcgaatcaattacaaaaaatagcaagtgcacaaaaaatcaaaaagggaaaatgctcaggatataaaaagtaaatcaatcctttattggtgagacaaaacgtacaaagcaatagaaaaaatttatctgaaaatatttgtttaagtcataggata

SEQ ID NO: 6220 - DNA, 1251 bp, unidentified
  source 1..1251: mol_type = unassigned DNA; note = element_9a24006
  misc_feature 1..2: note = core
  misc_feature 3..231: note = LE
  misc_feature 232..1236: note = CDS
  misc_feature 1237..1251: note = RE
  misc_feature 12..183: note = bridgeRNA
cttgtatgttggtttcgcctgctcagtgaaatactgactggtcgttaccggggaagccgccctttccttgaggcagcctgtctgacctcgttcgtagagtggctccccgccccagtcgcagagcacgaagagtgtcccgggccgttgagccagcgtgacaaggctgtgccgcgataatgcggggtcggggaaccgggaacgatcctaaccgacacccggaggaagttcatcatgtcctgtcccgctaacacgttgctgctcgcttttgatatcggtgccaagcgccatgcgtatgcctgggaacatcacgatcaccgggaaaccggcgagatcgccaatgacctgacactgctgcgagcgttcctggagcgtttgatcgcacgcgccggatcggttcgcgtgttggtggaagccaccgggatctactatctcgatacagccatgctggctcaagagctcggcgcacaagtgagcgtcatcaatcccaaggcgggacacaacttcgccaaggcactgagccagcgcaacaagaccgatcgtctggatgcggcgatgctgctggaatttctcaagcgcatgccgttcacggcgtggcaggcgccccgcaaggatctgctggaactgcgccactacgggcgctacctggttcaactcaccgatgaaagcaccacggcgcgcaatcgcttgcacgcgctgtccagtacccaagcggccccggcctatctgaaggcggatctcaagcgtgctattgcgtcgctggacaagcgcattgaacggatacgtagccacgcgctcgcgctcattcgcgccgatgcccccttgctggctcgcttcgaggcgctgacctccgttaccggcgtcgccgacatctctgctgtcgccttgctcagtgaactggtggtccttcctccttcgctgagcgcgcgtgcctgcgtctgccacgccggcctggaccctcgggtcttcgagtcaggcaccagcgtccacaagccgcccaggatctcccgacatggcaacaaatacctccgtcgtgccctgttctatcccgccatggctgctggtcgccacgacccgctcgccgccgcattcaagaagcgtcttctcgacaaaggcaaaaagaagatgcaggccaatgtcgccatcatgcgcaagatgctgacggttgcctgggcactcatgaaaaaccccgagccctatgacgcaacgaaactctattccgtcgaacaaatagcttgacagccaacagagtgt

SEQ ID NO: 6221 - DNA, 1351 bp, unidentified
  source 1..1351: mol_type = unassigned DNA; note = element_9a26c6b
  misc_feature 1..2: note = core
  misc_feature 3..75: note = LE
  misc_feature 76..1104: note = CDS
  misc_feature 1105..1351: note = RE
  misc_feature 1120..1349: note = bridgeRNA
atgaaatggttacccccgccgccccttgcgatagctctctaagctttcacaaggggcccatcggagaccattgtcatgaacaaagtagctattgccgccatcgacctgggtaaaaactcctttcatctgcacgctcaagatgaccgaggtcatgagctctaccgcaaaaaattcactcgaacggcacttgtccagcacttggccaatctcgagccttgcacggtcgtaatggaagcctgcggtggcgctcacttcatggcgcagcaggctgcaaagtttgggcataccgcaaagctgattgcgccgcatctggtgcgtccttatgtcaaaagcaacaaaaacgacttcgcggatgccgaggcaatctgcgaggctgcaactcgtccgacgatgcgttttgtacctgttaaaacccaggctcagcaggcgctggccatgctcaattcgacgcgtgattcgttcatcaaagaccgtaccgcgacagtcaaccggattcacgccgcgcttctggagttcggaatcagcttgcctgcggggttcaagtcgatcaacgagctcacggcgctgcttgaggcgagttcgctttccgatccgatcagaaagctgctaacacggatgcatgaccacttcgactacttgcacgaacagatcaaatcgctggacaaggagctggaaagccaagtcgctgaagatgatctggcggctcgtttgatgacaatcccgtgcgtcggcccgatcacctccagcgccttggctgccgagttgggtgatggcaaacagttcaaatgtggccgaggctactcagcctcgatcggcctggtccccaaacagcattcgacgggcgggaaaactgtacttctaggtatcagcaaacgtggcgatagaaaccagaggcgcctgctgattcagtgcgctcgggtttacctgatgcatctggatcgccagaaaggcgtgctggcgcagtgggtccgccatttgatcgcgacccaccatcactccaaccacgtggtctgcgcgctggccaataaattggcaaggatcgcttgggcaattgcggcataccacactgaattcgatgcggggccaagtgccatgagcgcctgaccccgctgtcatccgagcaccacccacctggttttgcgatgctggataactgatgacgtgaacggccaaccggcctgacgacaaccctgaactcctacacggctgaaaggccgttccactaatcaggatcgttgggcatcgattctcatcgaggcgcggagttgccaccccactcagacgccggatagatgaaagcaagccaaacacgacatcaaaaacagtattgcagaaaagggggtaaccatag

SEQ ID NO: 6222 - DNA, 1113 bp, unidentified
  source 1..1113: mol_type = unassigned DNA; note = element_9a29c5f
  misc_feature 1..2: note = core
  misc_feature 3..219: note = LE
  misc_feature 220..1104: note = CDS
  misc_feature 1105..1113: note = RE
  misc_feature 1..177: note = bridgeRNA
cctgtgtgttggttccggtgtatggtttgaagtgggaaggagaccgagaggatcctgatcgtccttttgaggacaggccgcggcatggctcggtcccttcccaccggtgaaccatcaacctgaacagttgcacggggctgttacaagcagaccccgcaccacaggaagaggcgtggacatgataatgcagaactatgtcggttgcgacatctccaagcagtggctcgactttttgatgaggcaagcgggcattcccagcgcatcgacaatcaggccgatgcgatcgctgcctatgtggcaggcctccacccagaccgtgacttcgtcgtcatggaggcgacaggcgttcatgatcggctgctgcgccatgcgctggccaaggccggcattgcgttctcgcggcacaatccggcccatacccaccactatgcgaagtcgacgagacgacgcgccaagacggatcgtctcgacgccaggatgctgagcagctatggccggcgctatcaccctgaagccgagccggtgccgcgcgaagaaggcgaacatcttcaatctcttgcccgccaccgtgaccatctggtcgagatgcgggcaaagttgaagaagcttcgcagtgaggccttcgacgcggttgtcatcgacgaccttgaagacatgatcgccagctgcgacacacgcatcaaggcgatcgagagccggcttgccgaagccattcgtcaatccgaggagactgcccgcgacaatgcgctgatggtctccgtgcccggggtctccaaggtcacggcattctccctgttggcgcacctgcccgagctcggcctgcgatcacccaagtcgatcgcggcactcgccggccttgcccccttcgacaacaagagcggcaagctcaatcgcaggagccagatccagggaggccgctcgcgtgtgcgccgtgctctctacatggcagcgctgggcgccatccgagcttgtgaacgcttcagagatttctataccgccatcgcagcccgctctgggtccaagaagctggccatcatcgccgtcgcaaggaagcttctcgtcgtactcaacgccatcatccgagacaaaaaagcattcgcatgaacacagttg

SEQ ID NO: 6223 - DNA, 1597 bp, unidentified
  source 1..1597: mol_type = unassigned DNA; note = element_9a2f331
  misc_feature 1..2: note = core
  misc_feature 3..261: note = LE
  misc_feature 262..1470: note = CDS
  misc_feature 1471..1597: note = RE
  misc_feature 12..281: note = bridgeRNA
ctattacaataattattggttggaagtccagcatccggctgggcttctttccgtctcatgcctaagctacaataaggggagcaactggctgaccaacacgtccttgggcttagatgtccgttgataagactgtcagccatcctcttattgcagcgttcgatttgagcaggttgagccatagagttcgcgtcacccaatagattgaatcggcaatgagaaaaagatggattccggttgcaaattcgtatgggaggcagatacatgaactctgttggtatcgacatctccaaaggcaggagcacgattgccgtcatgcgtccctttggagagattgtcatctcaccctttgaagtgcgccacaccgacagtgaactgagcgagctggcaaggcggctcaaaagcctaaacggtgagactcgtgtggtcatggaggccacaggaaactaccatgcgccggtggcaaagcagcttcacgacgcagggttatatgtttccgttgtcaacgcaaaactggtgcatggctacgggaacaacgatctgaggcgtgtcaagaccgaccgaaaggatgccgtaaagctggcgaactatggtcttgaccgctggcttactttgccgagatatgtcccggaggaaaatacccggctgttgctgaagaactgctatcgccagtaccgacagtattccaaggtgcagactgtgttgaagaacaatctgatttccttgctggatatgaccttcccaaatgcaaatcgcctgtttgttagtcctgcccgtgcagatggaagtgagaagtgggtggattttgtagcggagttttggcattgtgaatgcgtctctgaacgctccctaaagtcatttgtgaacaagtactggcgatggtgccgaaagcatgggtacaacttcagtgaagaaaaagcacacgccatttacgatgaagccagcggacacattggtgtcatgccgaaatctgaaaccacaaagctacttgtggagcaggctgtatctcagcttagcgctacttccgctgcgcttgctgcgctcaaacaggagatgcaatccctgtcctctcagctgccggaatatcctgttgtcatgggcatgtttggggttggcccgattcttgggccacagctcatagccgaaattggggatgttcgccgcttttactccaagaaagctctcgttgcttatgccggtattgatgccccaccgaatgactctggtgatgtgatcggtaggcacaagagcatgagcaaggtaggtgcatcatcgctacgccggacactattccttatcatgagcgcctatttgcaaaactcgccgccgaatgaacctgtctaccagttcatggacagaaagcggtctgagggaaaaccttaccgcgtctacatgatggcatccgcgaataagttcctgcggatctattacgccacagtgaaagcctatctggaaacattagagcagttctgacctcattgtgttgcatagcattggctggccgccgtttcattttgagatgcaaagcggcttgaataggtgcaccgattttcagctacttacaatgtttgctttttcttcttgacaaaacttagcaggt

SEQ ID NO: 6224 - DNA, 1222 bp, unidentified
  source 1..1222: mol_type = unassigned DNA; note = element_9a35b01
  misc_feature 1..2: note = core
  misc_feature 3..238: note = LE
  misc_feature 239..1204: note = CDS
  misc_feature 1205..1222: note = RE
  misc_feature 6..205: note = bridgeRNA
cttatgtcttggagccagtcagtatgtactggtacccttcggctgatccccggagcgaggcaagatagattgttagtaggccaaggaattgatcctgtccgacagattaatcacttgcctcaactttgccacccagttcggacggtatccgaggcctgcattgcgcatgagcctgcacagataaggatgaaccggcatggtccgtagatcgccatgatgctagtcaaggaggtttatgatgaatccagtttcctgtgttggtattgatgtagcgaaagccaaattcgatgttgccctgctgaaacccgatggtaaatatcgcagcaaggtcttttccaataattctgaggggttccggcaattccgggattggttggagaagcaggaggctctcaaggctcacctctgcatggaaaccactggcgcctatggccgaagcctggcgcgctttctggcgcaacaacagttactgatcagtgtaatgaatccagccttgattcacgcctttggtaaaaccgagctgtcacgggccaaaacagacaaagcggacgcccggctcattgcccgctattgccagatgcaccgacctgccccttgggtgccaccggcagaagccattgtgactctccaggctttggtgcagcgtctggacgaccttctgggtatgcagaatatggaaaacaatcgcctcgaaatggcagagcctgccgctcgcgcgtccattgaagcccttttgcttaccatccatcagcaaattgacgccgtccgccgacaaatccaggatcatatggatgatcacccggacctgaaatcccaaaaggcgctcctgctgagtattcccggcatcggcgaggttaccgcagctatgctgctggctttcctgagcccgctcacgcgctttcattccgctaaacaggtcgtcgcctatgcgggactcaacccgcgtattcgtgagtcgggccagtgggccggtaaaagccatattgccaaggcaggcaatgttcttctacgcaaggcgctgtacctgccagccgtagtagccaaacattacaatccagtgatcgccgccttttgcgatcggttactatcacggggtaaatgccctatgcaggtgatcattgccgccatgcgcaagctcctgcatatcgtctatggtgtcctcaaatccggtcagccgttcgaccctgaaaaagctcttgcataggcgtcatcaagacggtat

SEQ ID NO: 6225 - DNA, 1367 bp, unidentified
  source 1..1367: mol_type = unassigned DNA; note = element_9a37e99
  misc_feature 1..2: note = core
  misc_feature 3..255: note = LE
  misc_feature 256..1290: note = CDS
  misc_feature 1291..1367: note = RE
  misc_feature 33..208: note = bridgeRNA
cttgtatcttgtttgcatctcccggattcggtcgccctatgttagtggggaactggatcgggtttcggcgggaggccgatcgcagcctgaggcgcattcgttctgcagcctggattatagataggccccccgcccttctttcacacgccgtggagaatccgaggccacttgagcctgcattcacaaggtcggcgcgagagatggtacagggtcggggagccggaactcagtctaatccaaatcctgaggacggatatggcaaatagttctaagcctgaagtccaggttttcgctggcatcgatgtcagcgcacgcgagttaagcgtcgccgtgcgttgtggaaccgaggatcgggaggctgtcacaacctttcgcaacaatgccgctggacacaaagcccttctggcttacttgctacgaggaaacgggcgcgcccgcgtctgcttggaagcgagtggcaattacagcctggatctggccttaaccttgcaagcccaccgccaggtggaggtcagcgtggtgaatcctcgtcgtgcgcggcgcttcgctgaatcgttgggcgagcgcagcaagaccgatccggtcgacgccggtgtgctttgcgaatatgccgcgcgtatgccgtgggtggcctggcagccccccagttcgctagccctgcgcctgcgcgccatcacccgcgctatcgaggccctgggcgttatgcacacgcaagaaaaaaatcgcgagcacgccttggctaccagccgggctttgccagtcatggtaatccaggaaatgcgtcgtcatcagcgctatctggagcatcgcatggaacggctgcggcgcgaagctctccggctcatcgcacgggatcgcgagctggaccgccgctttcgcctcatgctgaccgttccaggcattggcgaaaccagtgccttgcagatcttgggggagttagttgtgctctccaatacgctggatgctcgccagtgggtcgccttcagcgggattgacccttcgcaatttacttccggtacctcagtgcagaagcggccgcggatcagccgagggggcagtcgccatctgcgtcgtgcactgtacatgccggcgctggtggccctgcgccgcgagcctcatctgcgggctttctatcaacgtttgctcagtcgcggcaaagcacgcctgcaggcggtcgtcgccgttatgcgtaaactcctgcacgctttgttcgcgatgtttcgctcgaatcagtcctatgacggatccaagctctgccccatcgagcttactaccaagttggcggcttaatgttgcttgaacgaaaaaagagagagggttctccgcacctctcctagagagaaaaaaattgaatttcaagagagaat

SEQ ID NO: 6226 - DNA, 1367 bp, unidentified
  source 1..1367: mol_type = unassigned DNA; note = element_9a3cb90
  misc_feature 1..3: note = core
  misc_feature 4..68: note = LE
  misc_feature 69..1109: note = CDS
  misc_feature 1110..1367: note = RE
  misc_feature 1131..1357: note = bridgeRNA
ttatggaatggcccgcccctccgaccggcgttgtagtttcgccggaggctcaactggagggaaggatcatgaagacgaagatttccgtgctcggcattgatatcggcaagaatctttgcagcctggtgggcctcgacgcatccggcgccgtggttttacgtcgtcgcgcgaagagggaaacgcttgttggtttggcggcgcagttgccgccctgtattgtcgcgatggaagcgtgttacggcgcgcatcatcttggccggctattcgcgacgcatggtcacgaggtccgcctgatgtctcccgaatatgttcgcccgtacgtcaaggcgcaaaagaacgatgaccgcgacgcggaggctatcgcagaggcggggacgcgtccgacgatgcgctttgtcgagttgaagacgcaggatcagctcgacatacaaacgctacaccgttcgcgcgaccgcttgatcggcgaacggacggcgctgatcaatcaggcgcgggcgattcttctcgagcgcgggattgttgttcccaagggcaagcgtcatctcgaggaaaggctcggcgttctgctggacgaaccggacgagcaagagctcagcggaagaatgcgccggctcatcgccgacgttcgcgtgcaatggcgagaattggacaagcggatcgccgcattcgatgcggagtttgcggcctttgcgaaagagaatgaggacgcgcgccagttgacgacgattccaggcgtcggcgcattgatcgcttcggctctgatcgcggcgattggaaaagcagagacattcaaacatgggcgcgatctcgcggcgtggctgggccttgttccaaggcaagcgacaaccggcggaaagcccaaattgctcgggatcagcaaacgtgggaacgcctatttgcgtaaacaactgatccacggggcgcgcgccgcgttgcctcatgtcgccgaacgcgatacggggctcggcaaatggctgaagggattgatcgcccgcgttcattataatgtcgcggtcgtcgcgctcgccaacaagctggcccggattgcctgggccgtgttgcggcgaggagaaaaatttgcggttggtagtttgtttgtcgcggcataagcttggacccgttacgctgaaggaagcgttgatgggccgatgatgtttgcgagtggtggaagcgagatggccaacagtcgaacacggcagcttggatgcctgacccagttaatggcccctggaggtcgataaaattatgaggaccaggctgcgcggatctccatcttggctcggagccttgctccaaagccggatacgttgaagcagactgaagaaggcaggaacgcaaaaactctcgcagacggggcgggccatacg

SEQ ID NO: 6227 - DNA, 1192 bp, unidentified
  source 1..1192: mol_type = unassigned DNA; note = element_9a49638
  misc_feature 1..3: note = core
  misc_feature 4..213: note = LE
  misc_feature 214..1176: note = CDS
  misc_feature 1177..1192: note = RE
  misc_feature 12..205: note = bridgeRNA
cttgtgttttggtttcggactacaatcggttggtatgggcgcgacagaccgatacctccttgatcggagcttcgctctaagatcgcaggaaagccggggtcgtcgcgccccttttgatctcggcggagcccgaacagttgcctgggccgccggccttctcgccggcgagcccgtacccgcaaggtagggccatgccggaaaaggaggagcgctttgagcacacgcacgcccaccctctacgtgggcatagacgtttccaaggccaccctggacgtcgcgatccttcctacggggaggcacttcgtcgtctccaacgacgaggcgggtatcgacgagctcctcggcggcttcgacgatcctaataagcccatcctcgtggtcctcgaggccagcggcggctacgagcgcgcggtcgcggcagccatagccgcttcggggatcgcggtggccgtggtcaaccccaggcagacccgcgacttcgcccgggctaccggcaagctcgccaagaccgatcgactggacgccaaagccctggccggattcgccgaagccgtccgccccaagcctagagcgctcccggaggaggaggcgcaggagtttcgggccatcctcgccagaaggaggcagctcatccagatgatgagcgcggagaaaaaccgtctcggatccgccgcctccaaggccgtcgcgaggcgcatccgggcccacgtgcgctggctcgaaaaggaactctcccgtaccgaccgggacctcgaggaggccatcgagggcagcccggtcttcaaggagaacgaagcccttctcaggagcgtgcccggggtcggaccggtcttgtgcaggacgctcttgtccgagttgcccgagctgggctcccttgctcccagggagctctcggcgctggtgggcgtggcccccctcaaccgcgactccggcaccctcagaggcaagcgtgccgtctggggcggaaggtccagggtgagagaggccctctacatgggcgccctggtcgccagccgccacaacccccacataaaggagttctacgagaggctcgtagcggccggcaagcccaagaaggtagcgctggtggcgtgcatgaggaaactcttggtgatcctcaacgcgctccttagagaccgcactccctggaggtatcctcatgccttgaacccctgatccttcacaacagttg

SEQ ID NO: 6228 - DNA, 1438 bp, unidentified
  source 1..1438: mol_type = unassigned DNA; note = element_9a4b259
  misc_feature 1..2: note = core
  misc_feature 3..226: note = LE
  misc_feature 227..1423: note = CDS
  misc_feature 1424..1438: note = RE
  misc_feature 10..222: note = bridgeRNA
gctctaccttcttgaacgggttggtcctcccgttcgtagggtgaggacacccaggggagttgggtgtggctgacaagtggctgccgttcgtggctttaggtgcttggccgcccggctccccacgacgactcggccgccgattgggaagtgcgaacaagtcgctgtgtagagcaatgccggcgaggtcgtccgtggtacgcaagggaagtacgacgactggagcacaatgagccggatatgggcggggaccgactgcggcaagacccaccaccattgcctggtcctggacagcgagggcgacacgctgctgtcgcgtcgggtggccaacgacgagccggaactgctgaagctgatcggtgatgttctggacctcgccgacggtggcaggacaacctgggcgctggacatgaccggcggagagcccggcctgctgatcgccctgctggtcaaccatggccaggagctcgtctacatccccggtatcgcggtcaaccgggccaccgacagctaccggggccagggcaagacggacgcccgtgacgcccgcgtgatcgccgatcaggccaggatgcgccgcgatctgcagccgatccgcgccggcgacgaagccacgatcgagttgcggctgctgactgaccatcgcgtcgatctggtcgccgaccggacccgcaccaccaaccggctcaaggccctgctgaacagcatgttcccggccctggaacgggatctcgacctcggtaacgtcggcccgctggtgctgctggccggataccagacaccggccgcgatccgccgcgccggcagtcggcggctgaccgcttggctgcgcaaccgcaaggtctgcaacgctgctgccctggccgagaaggtggtcgaagccgccgatcgccagcacaccgccgtcgtgggtgagaaggccatcgcgaagatggtgcacactctcgccaaggaggtgatggccctcaacgagaagatcgccgagaccgacaagctcatcgagggccggtttcgtgaccatgaactcgccgaagtgatcgagtccctgcccggcatcggcacaatcctcggtgccgagttcctcaccgccgtcggcggcagcctggacgccttcccaacggccaaccggctcgcggccttcgccggcgtggcacccgccccacgcgactccggccaggtcagcggcaacgaccaccgaccgacgagataccaccgtcgcctgcagcgcgtcttctacatctccgcgctggtcagcgttcaacgcgaccccaactcgcgaaaattttacgatcgcaagcgcgccgagggcaaacgccacgtccaggctctcctcgcgctcgcccgccgccgcgtcaacgtcctgtgggccttgatccgtgaccgacggtgctaccaggtcacacccccagccacagccgcggcttgacatcagcattgggaa

SEQ ID NO: 6229 - DNA, 1454 bp, unidentified
  source 1..1454: mol_type = unassigned DNA; note = element_9a5879c
  misc_feature 1: note = core
  misc_feature 2..109: note = LE
  misc_feature 110..1126: note = CDS
  misc_feature 1127..1454: note = RE
  misc_feature 1158..1425: note = bridgeRNA
gaatgaaagggacttccccgtcccgagctagccgcgatttgcggcaaacggcatcgagtgccacgatggggttgcgaaatctcatcgaatcactcggaaggggaagtccatgaccattattgctgtcggcattgatctcgccaagaacgtttttgctgtgcacggcgtgaatgcggggggtaaggcggtgctggtgcgaccgacggtcaagcgcgatgcgttgcttgagatggtggccaagctgccgccgtgtctcatcgggatggaggcgtgctcgggcgcgcattactgggcgcgagagtttgccaagttcggccacgatgtgcggatcatcgcggcgaagttcgttgctccgtaccggctcagtggtcggcgtggcaagaacgacgctgctgacgcccaggcaatctgcgaagcggtgcagcgaccgcacatgcgatttgtgccggtcaagagcgaagacgcgcaggcccgactggcgattcaccgtgtacgacaagggtttgtcgaacaacgcacggcgacgatcaaccgcattcgcggtttgctcagtgagtacgggcacgttctgcctcaaaaggtcgaagtggtgcgccgcgaagcggggcgatgcctggaagatctgccgggttgggcgaacacggctattggcgatctgctcagtgaagtccaccggctcgatgagcgcattgccgagtacgaccaccatattgccgtgatggcgcaggccgacgagcgctgcaggcgcttgatgggaatgcccggcattggcgagaagacggcaacggccttgatggccagcattggcaacggacacgacttcaagtgcggccgacaactggccgcctggctgggtctggtgccaggtcaatacagctcgggtggcaaacagaggctggggcgcatcaccaaagccggtgacagctacctgcgcatgctgttgatactgggggcgcgatcggtggtggttgctgccaaaaagaaaacggaccggctcagtcgctgggtgactgagctggttaacagaaggggttactggaaagctgtggtggccgtggcggcaaagaatgcgcgcatggcctgggcgatgctcagcaaaggcgaagcgttccagccgataggctgaacgacgccaaggagagcaattagcccaagactgattcatggtgtgatgccgcgttgatgtgccaaggttggacctgcgcggggagtgctcgataacttgaggaaggcgccattggcgaccttgactaacgaatggagcccccgcgtgcgtctttcatcagggcccgcagccgtaagctgcaatgaaggccgtttgtagtaccgccgtccttatcctgggtaatatctgcgcgactgacccctgattggttgttttgttttgaatgaaatgaatcaccttcggtgattcaagggggtgattttgcttgacagacggggaagcccttgta

SEQ ID NO: 6230 - DNA, 1396 bp, unidentified
  source 1..1396: mol_type = unassigned DNA; note = element_9a5b5c5
  misc_feature 1: note = core
  misc_feature 2..7: note = LE
  misc_feature 8..1123: note = CDS
  misc_feature 1124..1396: note = RE
  misc_feature 1164..1388: note = bridgeRNA
caatgggatggacgcccccacccgtcgcggcatcaacgtgccaaagtggaagtgtcaccaaccacttgaaccgaaaggggcgtccaccatgaagattacgactgttggcatcgacctggcgaagaacgtgttccaggtccacggggtcgacgagcacggcaaggctgtgctgaagaagcagcttcgacgcgaccaggtggccgcgttctttgtcaatctgccgccgtgtctcatcggcatggaagcttgcgggagcgcccaccactgggcacgcaagcttgaaggaatgggccacaccgttcgcttgatcgcgccgcagttcgtcaagccctacgtcaagacaaacaagaacgatgcggctgacgctgaggccatttgcgaggcggtggggcgccccaatatgcgcttcgtgccggtgaagaatgtcgaacagcaagcggtgctcgccctgcatcgcgtgcgccaagccttcgtcagggcgcgcacggcccaagccaaccagattcgcgggctgctcggcgagtttggcatcgtcattccgcagggcattggatacatcgctaaccgtgttcctgaactgatcgaagacggcgccaacgacctccctggcgcgtttcgactgctggtgcaacggttgctcgatcacctcaaggacctggaccgccaagtcgaagaactcgaagcaaagattcaggcatggcaccgaggcagtgacctcagtcgcaaactcgccgaagttccgggcattgggcccatcacggccagcgcgctcgtcgcctcgatcggagacgcgaagaactttgacagcggtcgtcaggtggcagcgtggcttggcctcgtgccgaagcagcactcctcgggcggcaaggctggcctgctggggatgagtaagcggggcgatacctaccttcgaacgcttctgatacacggtgcgcgctcggtaatctaccgagtcggccagaaggctgaggcatgtggctggatcgccggcgtggtcaatcggcgcaacaagaacatagcggcagtcgcgctggcgaacaagaatgctcggatcgtctgggctttgctggcgcacggccgcaacttcgacgccggttacgtccgccaggcaacgaccgtttgactatctgaacaagcaccaacgacatcagggagaacgaaccaccgattgctcaggcgatcatgaagtgatggcaagacaggttggaccgtgactggcaaagcccgcaccgcgcgtagcacctcgagtgcgtgtaagcgatggagaagccggtcagcaaatcccatcagggacagcagagcaaaaaagcgctgcaacaaagtccggatgtacgggtgcaatctttaccttcgaaccgttacgaactgagagcttggcatagggggcgtccatgta

SEQ ID NO: 6231 - DNA, 1137 bp, unidentified
  source 1..1137: mol_type = unassigned DNA; note = element_9a5f3e3
  misc_feature 1..2: note = core
  misc_feature 3..165: note = LE
  misc_feature 166..1122: note = CDS
  misc_feature 1123..1137: note = RE
  misc_feature 10..180: note = bridgeRNA
cttgtatctttatggttcggaccggctcgggtagcccgagcggcctctgggatgtttgaagcccgtacctgagccctgggcgcccgagccggaccgtccttctctgcagcccgaacggttgtaggaacttcaagttcgcatagacaaggatgggagtgagaagacgtgtccgactctgtttttatcggtattgacgtctccagccagacgctggaggtcgccagcagcgaccaggccaagacctggcaggtcgccaacgaggccagcggcatcgagcaactggtcagccaggcatcggccttggcgcccgggttggtggtgcttgaggccaccggcggctatgagttcgaggcggcctgcgcacttcaggccgcgggcctggcggtggccgtggtcaacccgcgcacggcgcgcgattttgcccgtgcgatgggtgctctggccaagaccgatgccctggatgcgcgcatgcttgcggccttcgcccgcgtgctgcaccaacaccccgagcgtgaacgcttcgtcaaaccgctggcggatgccgagctgcagcagctgcaagcgttggtgctgcgcagacgccaattggtgcagatgctgacctcggagcgacagcgtctgcgcctggcgcatgcggccgcgcgccccagcatcgagcgcgtgatcgagttcttgaagcatgaactgggtgacggtgaagccgaggtggctgcgcatgtgcagcgccatcacgccgagttggcccaggcgctggccagcgtgccggggattggcgcggccagcgtggccgtgatgctggccgagctgcccgaactcggcaaactcgaccggcgccgcatcgctgcactggtgggcgtggcacccttgaatcgcgactccggccagatgcgtggccagcgctccatctggggtggcagggccgatgtgcgcaggaccctgtacatggccaccctcacggcggtgcggcgcaacccggcgctcaaggcctgctacgagcgcctgctggctgtgggcaagcgcaagaaggtcgccctggtcgcctgcatgcgcaagctgctgaccatgctcaacgccatcgcaaagcacggctctacctgggactcgaccatgcatatggcttgactgccaagacggttg

SEQ ID NO: 6232 - DNA, 1372 bp, unidentified
  source 1..1372: mol_type = unassigned DNA; note = element_9a6d859
  misc_feature 1: note = core
  misc_feature 2..206: note = LE
  misc_feature 207..1109: note = CDS
  misc_feature 1110..1372: note = RE
  misc_feature 1140..1363: note = bridgeRNA
taatgagatggtccgccgcttgatcctccccagaggtttggaggatggtgttggcaggttcaaggaggatcatcgacatgcagattcgttcggttggtatcgatcttggcaagacgacatttcacctggtcgctctcagcgcagcgggcaacgtgctattgcggaagaagtttacccagaagtagctcatcaccttcaccgccaacatgcagacttccttgatcgggatggaggcctgttcgggtgctcacttcctcggccgcgccctgagagagcaaggccatgatgtgaagctgatcccagctcagttcgtgaagccgtttgtgaagtccaacaagaacgactttctcgatgccgaggcgatcgctgaagctgtggaccgggagaacatgcgcttcgttccaatcaagaccgacgaccagctcgacctgcaagctctccatcgcgtgcgggatcggttgatcgcacgccgaacatctgtgatcaaccagttgcggtccttcttgctggagcgaggcatgacattctcgaagacaccagccaggctgaagctggcgatgccagagatcctggagaacgccgacgtgaacctcacaccacgcatgcgcaaccttgtcagcctactgtggagcgagtggcaggatctcgagcagcagatccttgttatgaacgcggaggttgaacagattgcttcctccgatccagcctgccggcgactcaggcagatccccggcgttggcccgctggtcgcaactgcgatcgtagccgcgatcggtaacggcgcagccttccataaggggcgtgagttttcttcctggcttgggcttgtgccacgacagcactcgaccggtgataaggcccgactcttcggcatcagcaagcgcggcaacaactacctgcgcaagatcctcgtgcatggtgcccgatccgccgtattgcgcgtgaagcgagaaaagtctccgttcggaccatggctcgatgcgcttgagcaacgagcgcccatcaacgtggtcattacagccgcagccaacaagctggcccgtatcgcgtgggctgttctctccagcggacaggattatcgagcggttccggatgcaatgactgcctaagcgagcttaaccacgaccgacatcaagttctccaaccaaggtctgcactggacagctaagacgaacgaacagttcccaacggcgtgctcgcaacctgcgcctgaaaatggtcttccatgaccgtcccgtttatcaggaagagcacgcagcgcaactcatcatggccaggagactccactctccacacaaaggccgaatacatttgcccagatctgtcgatccactcttcgcttttcccttgcagtcagatggcggaccataca

SEQ ID NO: 6233 - DNA, 1483 bp, unidentified
  source 1..1483: mol_type = unassigned DNA; note = element_9a809d4
  misc_feature 1..3: note = core
  misc_feature 4..239: note = LE
  misc_feature 240..1463: note = CDS
  misc_feature 1464..1483: note = RE
  misc_feature 7..229: note = bridgeRNA
ctaatgggtatcgaccacctcgttctgtaaccggatgaggctggtcaccgagccgccatcaggtgagcactgttgcccccagggcttcgagccttagcgttagatcgtgcccctgctggtcggtgaggtctcctcggatggctggtgggatgtcgtgcctcgagcactgatccattaggaagctgcgggagccctcaggctcgttggcagtgaccgtcgatggagaggagcgagagcagatgatcttcgttggagtggactgggccgaagcccaccacgatgtgttcgtcgaagacgagcgcggcaaacgcctggccggtggccgactccccgaaggcgtcgagggcatcgcccgcttccacgaaatggtgggcgcccacgccgccgagcccgccgaggtggtgatcgggatggagaccgaccgtgggctcttcgtctcggccctccttgcagcggggtacctggtgtacgcggtcaacccgatgtcgacctcgcgctatcgggaccgccactcgacgtcgggggccaagtccgaccccggcgacgccaaggtgctggccgacatggtccgcaccgatcggcacaaccaccgacccgtggcgggcgacagcgaggtggccgaggccatcaaggtcttggctcgagcgcatcagtcgatgatctggtcgagggggcgccagagcaacttcttgcgctccaccttgcgcgagttctaccccgccaccttggtggccttcgacgacctgaccagcggtgatgcgctcgaagtattgaggatcgcaccgacccccgaactcgggaaagggctctcacgctcgaagatcgccgccgctctgcgacgtggcggtcgccagcgccgaatcgaccagcgggcaatcgagatccaagatgcgttgcgctcaccccagctcgttggctccgacgtggtggcggccgccatgggtgcctcggtcggcgccaccgtggccgttatcgcaaccatgaacgctcagatcacccagctggccacggagctcgacgcgggttttgagcagcacccagacgccgaggtggtccgatccctgccaggactagggaccatcctcagcgcccgggtgctcggcgaattcggcgatgcgccgaaccggtacgccgatgccaagtctcgcaagaactacgccggcacgtcgcccatcacccgggcctcgggcaccaagcggacggtgctggcccgttacgtccgcaacaaacgcctggccgacgctatatatcagtgggccttcgcctcgctcagcgcctcaccaggtgctcgggccttctatgaccgacgaagggcggctggggacacccatcacgctgccctccgtgcactcgggaatcgcctcgtcggcatcctccacggatgcctcgtgcaccaatgcaactacgacgagcacaccgcatgggcccatcgcctagatctcccgatcaccaaagctgcttgacagttgcacccgtgggatat

SEQ ID NO: 6234 - DNA, 1354 bp, unidentified
  source 1..1354: mol_type = unassigned DNA; note = element_9a824c0
  misc_feature 1: note = core
  misc_feature 2..72: note = LE
  misc_feature 73..1107: note = CDS
  misc_feature 1108..1354: note = RE
  misc_feature 1109..1344: note = bridgeRNA
tatggaatggcccgccctttcacccagcatcgagtaggatgctgatatcgggaaagagaaaggaacgagcgaatgtctattgctatcctcggtgttgatctgggcaagaactcttgcagcatagttggcgtcgatgcggccggtgccgtggtcgttcgtcgtacaatgcgccggcagacgctgatcgactatgtgacgaagcttccggcctgtgtggtcgcaatggaagcatgttgcggcgcgcatcatctgggacgcctgtttatggcgcaaggccaccagatccggttgatgtcgcccgaatacgttcgcccatatatcaaagcgcagaagaacgatgaccgcgatgcggaggggatcgcggaggccgcttcacggccgacaatgcgtttcgttgaactcaagagccaggagcagttagatatccagacgttgcatcgggtgcgttcgcgcctcgtagccgaacgaacgaaccttctcaaccaattgcgagcgatcttgctggaacgcggggtgatctttcctgctggcaggcgaaagttcgagcttgatttggatcgcatgcgttccgagggcaatgagaccttgtcgccccgcatgcgtcagctgattgacgggctgcgtgccgaatggaaagagctcgacgcgaagattggggcgctgaacgatgagtttgtccaactggcgcgcaacgatgccgccacacgcaggttgacctcgatccctggcattggggtgctcaacgcgacggctttggtcgcggccgtgggtaatgcaagcagctttgccaaggcccgagaccttggctcctggcttgggttggttccgagacaatacagcacgggcggcaaggcacggctgcttgggatatccaagcgtggcaacacctatctgcgcactttgctcatccatggcgcgcgtgcggcattgccatcgctttcaaaaagcgacactcctttggggcgatggctgacagcaatgatcgagagaggcgtgcatcggaacgcagtggtggtggcgttggccaacaagctggcgcgtatcgcttgggccgctttacgcaaagagacacgcttcgaacgcggttacctggtagcgacggcataattgggtcggaacatgctatcgcacgtagcccaatgaggtttgcaggaaggatcgtgaagatggcctgacagtcgatcggcgtttggaaagcccggtttaaaaaatggcacatgatgccgagaaacttatggggctctagacgcgcggatgtccatcttggccatgggggcgacccatgagaccgtatacgttgacgcagactgatcagaacaccgtaaaatcttcttgcagacgggcgggccatacg

SEQ ID NO: 6235 - DNA, 1531 bp, unidentified
  source 1..1531: mol_type = unassigned DNA; note = element_9a82df6
  misc_feature 1..3: note = core
  misc_feature 4..260: note = LE
  misc_feature 261..1427: note = CDS
  misc_feature 1428..1531: note = RE
  misc_feature 18..239: note = bridgeRNA
tcttgtatactctaaatagtaaattatagtaaatcgagtatacatttcctttcttaagattttctactataatttatatatggtactgtggatttgatgcattttaatgtagctttgactaccgaaaggagactcttaccacagtcctatttatttactagcaataagttatctagcgcctaacgctcaatcacaagaatatagtaaataggaactcgtgacagactacagtactaaataatttatgagaggtgatacctatgtatttggtcggaatagatatcgctaaatacaaacaccagtgttttatagctacaacacatggtgaggttatcaaagaattttcttttgataacaattctaatggttttaaagtattacttgagcaccttcaagccttagatcattcttatgaaataaaaatcggtcttgaagctacagggcattacggcaatactttaaaacatttcttaagtgcaaatagttatactttcgtagagtttaacccctatcttaccaaacagttttttaaatccaccacgatacgaaaaactaaaacagacaagatagatgcacgaatgttagcacgtatgttggcctctgtagactacaagaccttacatactaaatattaccatattaatgaattaaagtcattatgtcgcacaagaaattcattaatagaatcacgttctaatactttagttcaaataactaacgcattagacataatatttccagagtttaaacggcattttaataaccgtttaggcttaacagcgctatttattttagagaaatacacttctcctaagaaaatagcgaaactcaataaaaatcattttgagaaactttataaactatctagaggaaagtttacttatccaaattttcgtaaattaaaagaattagctaaagatactgtgggaattgaatctaaatctaacgaactcaaacttaaactctacaccaaactatatcattcttataatacaaagattaaaatacttgaagcagagattgaagaaataatgagttacaccacatcatacatcaaaactattccaggtgtatccttaatgtcggcagcaaatatacttggagaggttggcgactttactcttttttctaatccagcaaagttaatcgcatttgtcggatatgatatcgccgtatatcaatctggcgaatcaaaatcttatggtaaattagttaaacgcggatcttctctacttcgtaaaacggtatggaatatagttttagggtgtattagagaagttccagttattaatgattattactataagaagaaaaatgaaggtaaacatagaaacgtcatcttttcttctatagcgcgtaaattactacgaataatttactatctagaaactaatcaggttagtttcgatcaaaatattattagataatagaaagtagctattctattttcaataaacatatttaaactattagctgaatttttcggttcttttataatggagttatttattacttgacttattaatagtta

SEQ ID NO: 6236 - DNA, 1461 bp, unidentified
  source 1..1461: mol_type = unassigned DNA; note = element_9a8baf3
  misc_feature 1..3: note = core
  misc_feature 4..516: note = LE
  misc_feature 517..1446: note = CDS
  misc_feature 1447..1461: note = RE
  misc_feature 13..235: note = bridgeRNA
tccttaagttcgtagttgcagttacttcgtgttgttacgttgtgctgtgacccgggtgggtcgggtgaggctgcatggcgctagccggccttggtggtgcggcttgaagggactggccgcccgacctgcttggacttctctggccgctgattgagatctgcgatgtgatcgcttgtttaaggaaatgctggcggggttgtccgtggggatcgtgttggcagacaagcgaaaagaggtgcgatggcagcgagccaggtgtgggctggagtggatgtcggtaaggaacatcactgggtgtgcgtggtcgatgacaacggcgcggtgatgctctcgccgactggtcaacgatgagcaaccgatccgtgaactcgtagccgagattgagcaactggctgacgaggtgtcgtggacggtcgacttgaccaccgtgtatgccgctctgttgttgacggtgctggccgacgccggtaaaccggtccggtatctggcggccgtgcggtatggcaggcctcggcggtgtaccgcggtggcgagggcaaaaccgacgccaaagatgcccgggtgatcgccgaccagtcgcgcatgcggggtaccgatctgcctgtgctgcatcccgatgatgtcttgatcaccgagctgcagatgctgaccgcccatcgcgcggacctggtcgctgaccgtacccgcacgatcaaccggctgcgccaacaactcatcgcggtctgcccagcgttggaacgggccgcgcagctgacccaggaccgcggctgggtggtactgctgacgcggtatcagcgaccgaaagccattcgccaaagtggtgtttcgcgtctgacgaagatgctcggcgatgccggtgtgcgcaacgcggccacgatcgccgccgcggcggtggcggccgccaaatcccagacggtgcgcctgcccggcgaagatgtcgctgccggactcgttgccgagttggccggggaggtggttgccctcgatgaccgcatcaaatccaccgatgccgacatcgaggaccgatttcgccgccatcccgccgccgcagtgatcaccagcatgcccggcatgggtttccgtctcggtgcggaactcctcgccgccgtcggcgatcccgccctgatcggctctgccgaccaactcgccgcttgggccgggctggcgccggtatccaaagattccggaaagcgcaccggacgactgcacacccccaagcgctacagccgacgactgcgccgcgtcatgtacatgtccgcactcaccgccatccgctgcgaccccggttccaaggcctactaccagcgcaaacgagacgaaggaaaacggccgatccccgccaccatctgcctggcgcggcgccgcaccaacgtcctctacgcactcatccgtgacaaccgcacctggcaacccgattcacccccgatcaccaaatcggcggcttgacttcttcattgagag

SEQ ID NO: 6237 - DNA, 1408 bp, unidentified
  source 1..1408: mol_type = unassigned DNA; note = element_9a97b46
  misc_feature 1..2: note = core
  misc_feature 3..166: note = LE
  misc_feature 167..1129: note = CDS
  misc_feature 1130..1408: note = RE
  misc_feature 1147..1395: note = bridgeRNA
tgatgaggtggaacgcccccgctcgtgcggctccatgtgccggaggcgtggtcgttgtggtcacgcgcgaagacgggagaatttttccatgtaagcaatcagcattgttgggctcgatcttgccaagcgtgtctttcagattcatgccatcggggtcggcggcgaggtgatcgcgaagcgacagttgaagcgctcggatgttttgggcttcttttcgaagctggctccgtgcgtggtgggaatggaggcttgcggcggtgcgcacttctgggcgcgcgagatctcggccttcggtcaccaggtgcgcctcatgccgccaggctacgtgaagccgtatgtgaagcgcggcaagacggacgccggcgatgcggaggcgatttgtgaggcggtcagccggccgacgatgcgcttcgtcccgagcaagacggccgagcagcaggcggaggcgatggtgctgaagacgcgcgagcttctcgtgcgacagcgcagccaggcgatcaatgcaattcgtgcgcacttggcggaactcggaatcgtggctggcattggcgtcgccaaggtgtcgacgctgatcgagatcctgcgcgacaaggacgacctccggctgccaggagcggcacgacgggcactcggcgaactcggcactcaaatcgaggcgctgaccttgcggatcgacgcgctcgagcgtgaggtcgtcgccaaggcacgccttgatggggatatgcggcggttcatgacaatcccaggcgtgggaccaatctcggcatcggcgatcaaagccttcgtccctgatcccaaaggattcatctccgagcgccacttcgcggcttggctcgggctgacgccgaagtcacattcaagcggaggaaaggagcggcttggaaggatatcgaagatgggcaatccgatgctgcggacacttctgatcctcggcgcgacgacggttctacgacatgcgcgcaacggtgcgaatgtgccggcgtggatcacggcgctgttggcgcggcgcccgttcaacgtcgttgccgtagcacgcgccaacaagatggccaggatcgtctgggccctcctcgtaaagggtggagaatgtcgcaaacacggtctgactgacggaatggtgcgcacctaatccgccgctcgaccagcaagagctgatcggcagagccgccgccggcaggggcaaggtgcaaccgacgacgatgaacccacgggacgaaaccccgatgcgagagaggcggtctgactcaccgcaccaacgagcgcgcaaaactgatcagccccacgcatcgcgaacttcatcgaggccagcggtcgatgaccgcgccgaaaggccgtacatatgaccgcaccgttcccgttgcgtcatccgtcgccaaagagcacttggcccgcgggggcgttccacata

SEQ ID NO: 6238 - DNA, 1358 bp, unidentified
  source 1..1358: mol_type = unassigned DNA; note = element_9a9e9b2
  misc_feature 1..3: note = core
  misc_feature 4..7: note = LE
  misc_feature 8..1093: note = CDS
  misc_feature 1094..1358: note = RE
  misc_feature 1129..1352: note = bridgeRNA
tgatggaatggatgccccctgcaccggcgtcgaatgcgccaaaatggaggtgttgttaactccacagcaggggacacccatgagcgagattacggttatcgggttggatttggcaaagcatgtcttccaggttcacggagccgatcctgacggtcggccggtattgcgcaagcggcttcggcgcggccaggtgctggagttctttgccagtctgtcaccgtgtttgatcggcatggaggcttgtgccggatcgcactactggggacgcgagctgcaggctctgggccacgaggtgcggctgatcccgccgcaatacgtcaagccctatgtcaagacgaacaagaatgacgcgacagacgccgaagcgatctctgaggcgctgacccgtccgacgatgcgctttaccgcggtgaagagcgccgagcagcaatccgttctgatgctgcatcgaacgcgcgagcttctggttcggcaacgcacgatgctggtcaatgcgctgcgcgggcattgcggcgagttcggcatcgttgctgcgcaaggattgtcccgcgccggcgacctgatcaagcggatcgaggatcctgccgacactgctctgcccgatctggcgcgccaggcgctgcagtgcctgacctctcagatccgagcgatccaggaacagatcgccctgatcgagaagaagctcctcgcctggcattcctcctgtgaagcaagccggcgactggccgagatccccggggtcggcctgattaccgcgaccgccgtcgtggcgagcgtcggcaatgccactcagttccgctcggcgcgccagttcgccgcctggcttggtctggtaccgcagcagcactcgagcggcggcaaggagcggctcgggcatatttccaagcgcggagacggctacatcaggcgcctgctggtgcatggtgcgcgcgcccatctcagctggtcgagacgcaagaagcagatccgctcggcctggctcaccggcctgctcgcgcgccggccgaccaacgtcgcgctgctcgcgatggctaacaagaccgcgcgcatcgcctgggccacgctgagccgggcgaaagatatcaggaaatgattgccgctgctgcttgaaccggcagcagccgccaacgggattgcgagggtgatgatgcagtgatggcgaaacagggcaaccgggatcggccaaacccgaggctttgtccgagcgacaagctcgttaagttgatggggcgccgatcctcggattccaccagggccagcggtcaccgaccgcgccacaaggccggatagatgactgcaagcccaacatttcgaccgagctcgtcagaaccgcttgcaatgcagggggcatccataga

SEQ ID NO: 6239 - DNA, 1544 bp, unidentified
  source 1..1544: mol_type = unassigned DNA; note = element_9a9e9fc
  misc_feature 1..2: note = core
  misc_feature 3..241: note = LE
  misc_feature 242..1423: note = CDS
  misc_feature 1424..1544: note = RE
  misc_feature 3..219: note = bridgeRNA
cttgtattatagagtagtagttattagagcccctctccaagggcttgtgctacactgtaagggatgctgtggatcggtttggttttcctaccgcaagacggttcaagaaaggctccaaccacagccctttacagtattgttaatcagttagataccgccagacggtttatgtagaacaaggttacaagagtaaagagtcctgtggaaccagcatcaaataaacataccggaggtatttatcatgatttgcgttggtatcgacgtagctaaggacaagcacgattgtttcatcctcaactcggaaagtgaagtccaagcagatgtattcaccatccagaacaatgcagaaggttttgacacgcttctgcaaaccattcgccgcagtactcgcccggaagacaaaataaaagtaggacttgaggctaccggacactactgctacaacattctcggattcttactcaacaaaggtctgcctacctatgttatcaatccgctgcacaccaacctctaccgaaaaagtctgagtcttcgcaaaacgaagacagaccgtgtcgatgcgcgaaccatcgcagctatgcttatgtctgatgtggacctcaagtcctacacggacacagcataccacaacgaggagctaaagtcactcacaagataccggtttaacaaagtctgtgaacgagcaaagctgaggcagtctgtttcccgcctggtcacgatcctgttccctgagctggaaaagttagtccctacacttcacatggtgtccgtgtacgcacttctcagcgaatttcctggtgctaagcaggttgccaaagcgcacttgacgcatctgaaagcagtcctatacgatgcttccaagggccgctacggtcgagagatggcaacaacgcttcgggatgccgccagatgctctgtcggctctgttatgccagccaagtctcttgaattgcagcatacgatccgcttgattcgcgaactggatgccgaaattgaagacattgagaccgcgattcagtccatgatggatgaaatacagtcgcccattacaacgattccgggtattggtgttcgtatgggcgctatgatccttgccgagattggtgacttctcccgcttcgactcgccggataaaatcctcgcatatgccggaatgtcgccctctacttaccagtctgggcaactttcgctggctggaacatattcgcatatggaaaagcgaggctcccggtattcgcgttacgcgctttataatgccactaaatacgtctgcctttgggatccaacctttgctgcttaccttgccaagaaacgggctgaggggaagcactacaatgttgcaatctctcatgctacgaaaaagttagtacgtctgatttacgctatggaaaaatcccaacagccatacaactgcgccgcataacagtttttctctcatatgcttaggttggcatccgaccggatgtctgctttgttatgccttttttgaaccgcttatattttctcaactcctcacatttctgacttgacttttaatagttagt

SEQ ID NO: 6240 - DNA, 1299 bp, unidentified
  source 1..1299: mol_type = unassigned DNA; note = element_9aa53c9
  misc_feature 1: note = core
  misc_feature 2..64: note = LE
  misc_feature 65..1078: note = CDS
  misc_feature 1079..1299: note = RE
  misc_feature 1086..1293: note = bridgeRNA
taatgaaatggacacccctcccctaagttggctaacttagtattttaaaatgggagggcaggatatgagtgatatagcaattattggaattgatttagctaagtcggttattcaactgcatggaagtgataaatctgggcgatgtatttatcgtaaaaagctccgacgacatcaggttcttccatttttagcaaagtcaccacaatgtttaattggcatggaggcctgtagtgggtctcattattgggcgagagaaatccaaaaattggggcataacgttaagttaattcccccacaatttgttaagccttatgttaaaacgaataagacagatgctgccgatgcagaagcgatatgtgaagctgtcactcgacctaatatgagatttgtacctataaaaagcccagatcagcagggcatattattggtccatcgagaaagagacggtttgataaaagaacgaacagccgttattaatagaatacgagctgtgttctctgagtttggaatagctatccctgcagggccaaaaaaactcaaggaatggatgcttaagtcatacggagatcatgaaactgagttatccaaagtaatgactaggctgatcgagagaatgacagagcgattgtccttaattgaagcagagatagcgattctggataaagaaatcgataaccagaataaagtcgatacaagatgtaagcggttattagagatcctaggagtaggtcgacttgcggcatcagcgatcgtcgcaagtgttggaaatgccaaagagtttaaatcaggtcggcagttttcggcgtggttaggtttagttcctcgacagcactccagtggaggtaaacaaaaccttcagggaatcagtaaacgtggagatgcctacatccgaaagatgttgattcatggtgcgagagcagtagttcgacatatgaacaagaacaatgctcccgttgaatggatagagcaattaagtatgcgtaggcataacaatgtcgttatcgttgcggtagcgaataaattagcacgtatcgtttgggctttattaagcaaggaacaacgatacgccataagttaaggaactctgtagttgcgcaggtaagtaaatgatgtcgaaacaggtaggaccgtaatccggaaaccctgtccctaacagcgttctacgagaacgataaactgattagaaccggattagcgaagttcatccaggatggagctaaggctcaacaatccgaatagatggctgcactacaccaaacgacatgatgatttgcttgcacaatgaggggtgtccataga

SEQ ID NO: 6241 - DNA, 1401 bp, unidentified
  source 1..1401: mol_type = unassigned DNA; note = element_9aa5639
  misc_feature 1: note = core
  misc_feature 2..75: note = LE
  misc_feature 76..1131: note = CDS
  misc_feature 1132..1401: note = RE
  misc_feature 1167..1391: note = bridgeRNA
taatggcatggaccggccgtgctcccgggtggagcatgggagggcgggattgtcccgcaggcaaggagccatgccatgtcacaccagaccacaaccgaggccatcgccacgatcggcatcgacctgggcaagaacaccttccacctcattggcatggatgcccgcggcaagatcctgctgcgccgcaagatcgcgcgcgggcagctgcaatcctgcctggctaacgtgccggtctgtctcatcggaatggaggcctgcgccggggctcatcatgttgggcgtcagctcgcagcttttggccatgacgtgcgcctgctgccggcccagtacgtcaaaccgtttctcaagggtcacaagaatgactaccgcgatgccgaagccattgccgaggcggtccagcgcccgaccatgcgtccggtgccgctgaagtcggccgaacaacttgatctccaagcgcttcatcgggtgcgccgccgccggatcggccagcgcacggcggtgatcaaccagatccgcgccttcctcctcgaatgcggccttccggtgcgtcaggggcttgcgggcttgcgcgaggctctgcccacgctcctgtctcaacgcacggacgtgctctcgccgcggatgatccacctgatcgaggatctatcagacgattggcggcagttggacgaacgcatcgagacgctgacccgggacatcacggccctggcgcgagaggacgcgggctgccggcggttgatggatgtcccgggtgtcggggtgatcaccgccagcgctatggtggcagcgattggaaccggagcagccttcagcaaaggccgtgacttcgccgcctggctcgggctggtgcccaagcagatctcgaccggcaatcgcaccatcctgggcggcctctccaagcgtggaaaccgctacttgcgcaccctgttcgtaggcggcgcgcaggctattctgcagcacccccaaaactggcaaagacaccgctttggacactggttgacagccgcgttgactaggctgcatcggaatgtgctggctgccgcgttggccaacaagctggcgcgcatcgcctggagcgtgttgtaccgcgaaagaggctatgacgcggggattgccgcccaggtgccgtaagaccgcttgagcagcaggcgtttcggctatcgagttcccaccgaggtttgcgggaaggatgtgacaggatggatgaacggttgcccggcgcacgggaagcctgagcgaaaaaatggcccgttgaggtctcaccgctaaaaaggcccagtgcgcgcggatttccatgatggcccggagcaggtgctccacccagaggccggatagattgatgcaaaccgtctctcatccaatctgaagcaccctcttgcaacgcacggccggtccatagat

SEQ ID NO: 6242 - DNA, 1206 bp, unidentified
  source 1..1206: mol_type = unassigned DNA; note = element_9aa7c6d
  misc_feature 1..2: note = core
  misc_feature 3..197: note = LE
  misc_feature 198..1172: note = CDS
  misc_feature 1173..1206: note = RE
  misc_feature 19..205: note = bridgeRNA
cttgtatctctccaagacaatgatatattgcctagctagcagtatatcacggtgcatgatcagagtttgtatgcgggctgagacaaaaagtctgtaacgtagataaaacccatgcgctgattttcttaagactgaatggtatccaagtgcttcccgatggggaaagatgctgtatgaacaagcggagtaaaagaaagatgaatattattggtatcgatgtaagcaaagccaagctggattgtgcatggtttaaagaagacaacaaagtcaaaactaaagtatttaccaatcagcttgaaggctggaaagagctggtcagttgggcaaagacccagacaggcaatgaactcagtgagttgcattttgtgatggaagcaacgggtatttatcatgaaaacgtggcgacgtggttgcatgatagtggcgcgaccgtgtctatcgccaatcctgcccacgttaactattacgcccaaagtttaggcggacggacgaaaaacgataagaaagacagtattgtgttagcgcggtatggcataaaagaacatcccatgctctggcatcctgcaccacaggagatgagagcattaaaagccttactgacgcgcttggatgccgttgaaaaagacctgcaacgcgaaaaaaatcgccatgaaaagatcatcgtcagcgatacgcctacggctgttttggcttctatcaaacaaatgattgaacaccttgagacagaacagaagacgctagaaaaactcattgacgaccacattaaagcgcacaaaaacctgaaagaaaataaagccttactggaaaccatcccaggtattggcaaggtcatgtcacaacggatgctcatgatactgggtacgcatcaattcaaagatgcccaccaatgtgcagcttatctgggtcttgttcccgtacaaaaacaatcaggcagtagtatcaaaggacgatctcaactggctaaaaacggtaataaaacagttcgcgcaaaactgtacatggcaaccgtgaccgcaactcgctataaccctgacattaaagcccaatatgaaaggctaaccaaaaaaggtaaaagtaaaatgtccgcactcggcgcggcaatgcgaaaactggtacaaatttgttttggtgtctttaaacaccaactaccctatcaaccacaatcggcttaattttccgcttgtgtttgatttggagagatggtat

SEQ ID NO: 6243 - DNA, 1416 bp, unidentified
  source 1..1416: mol_type = unassigned DNA; note = element_9ab5f1b
  misc_feature 1..2: note = core
  misc_feature 3..89: note = LE
  misc_feature 90..1151: note = CDS
  misc_feature 1152..1416: note = RE
  misc_feature 1125..1403: note = bridgeRNA
agatgggatggttgccgccctccccagacggcatcgcgatgtgccaagatcgtggtgatgtaagccacggaagcggagaggacggcgaaatgaaggatacgatgatcggcgtggatctggcaaagagcgttttccaggttcacggaacttcgatgaccgggcacgtgaagttccgcaggaagctgacgcggccccagttccggaagttcatggcggagcagccaccggctctcgtcgtgttcgaggcctgcggcagcgccagctactgggcgcgcgaggtggagacgatgggacatgaggcgaagctgatcgcgccgcaatacgtgcggcctttcgtgaagcggcaaaagaacgatgcagccgacgccgaggcaatcgtgattgcggcacgccagcccgagatgcgatttgtcagccccaagacggaggagcagcaggccagggccgtgatgttccgcagccgcgagcgactggtccgccagcgcaccgaactggtgaacgcgctgcgggcggtcctctacgagcaaggccacgtgtttcctctcggccttgttcacttgaagcggatcgaggccctggtcgaagagccggagaatggactgccagagctgatcgtctcggaatgccgggacctgctggagcaaattgcagagagtgaggggcgtgctgccaccggtccgaagccgccccgaacagagcggattaccgaaaggaccgcaaagttgagaactctggccgcgcagacggagatggcgcggcgactgcagacgatgccgggagtgggcccgctgacctcgctggcagtcgaggcctttgcgccggacatggcccagttcaggtgcggccgggacttcgcggcctggctgggtctcgtgccgcgccagcattcctcgggcggcaaggacaggctcggccgggtgtcgaaagccgggcagactgacatccggcggctcctgatcatcggcgcgatgacgcggatcatggggcgcgcgggggccaaggtgcccgcggagagctggctcggccggatgctggccaggaagccgaagatgctggccggcattgcgctggcaaaccggatggcgcggcagatctgggccatgctgacgaagggcgaagactacagggatccggcgctggccacggcatgaccctcatgtcgtgaacggccagaaccggtgcgaaggggggtgtgagaaggcgatgacctgaatgatcgaacagatctggatcgggagaaccatggtcgaacttcgagctgcgagctcggccccgagatttggacctgatccgctgatcaccatgctagcccgcggcttccggaaagcgccgcacatcgaggcctgaaagaagaccgcattcgatcacacaccggtagggacggaaacttcttgcatcacgggcggcaaccaaaga

SEQ ID NO: 6244 - DNA, 1165 bp, unidentified
  source 1..1165: mol_type = unassigned DNA; note = element_9ab8861
  misc_feature 1..2: note = core
  misc_feature 3..205: note = LE
  misc_feature 206..1153: note = CDS
  misc_feature 1154..1165: note = RE
  misc_feature 34..211: note = bridgeRNA
cttgtcttatgacgtccgtggccactgcggccaagatggggcagccggcgagtggccactcgccggctgcgggagggggcgggtcggggaattgctggccggcaggggccgagcgagagtgcgaccgctccctctcttttcctggtggcctgaacggatacccgggcgttcgcggcccggatgacaagcaaaggacccggaaaagatggcaggcagcatagcgccatcggtcggcgtggacatcgccaaagacacgctcgaggttcatctccacccggccggggagggccgccggttcgccaatagcgccaagggctgtgccgccctgatcgcctggctcggcggcttcgcaatcgcccgcgtcgcgttcgaacccaccggcgccgatcaccacgccttcgagcgccgtctggcggaggcgggtctgccgctggtcaaggtcaatccgcgccaggcccggcgcttcgccgcggcgatcggccggcatgccaaaaccgacgccgtcgacgcggcgatgctcgcccgcttcgcggccctgctcgaaccgccggtgcgcccggtcgtcagcgcgacccttgacgccatgaaggagctgcacgtcgcccgccgcgccctggtcaaggaccgcgtcgccgcccacaaccgcaaccacgtgcaccgcgcgccgctgctcaagcgtcaggcccgagctcgtcttcgccagatcgagcgccagatcgccgcggtcgacgccgccttgcgtgccgagctcaccgccgatcccgccttgcaggcccgcttcgacatcctcatgagcatccccggcgtgggcgaggcgaccgcgctcgccatgctggtcgagatgcccgagctcggcgccctcgcgcacacaggcgccgcgagcctcgccggcctcgcccccatggcccgggattccggccagcaccgcggcaagcgcttcatccgcggcggccgtgcccatctgcgcaaggccctctatatgccagccctggtcgccgtccgcttcgatgccgtgatgaaggccaggtaccaggctctgctggccgccggcaaaccgcccaaagtggccctcgtcgcgatcatgcgaaagctcctcatcctcgccaacgctctcctccgcgacggccgcacctggaccccaagacccgcttgaccatcacggata

SEQ ID NO: 6245 - DNA, 1386 bp, unidentified
  source 1..1386: mol_type = unassigned DNA; note = element_9abdce6
  misc_feature 1: note = core
  misc_feature 2..65: note = LE
  misc_feature 66..983: note = CDS
  misc_feature 984..1386: note = RE
  misc_feature 1153..1377: note = bridgeRNA
taatgagatggtccgccgccgagtagatttgagggctcggcaacttacatcaggaggatcatctcatgcgtatcgcatctatcggcatcgatctgggcaagaccacctttcacctagttgcattgggcgaacgtagcaaggtgctggttcgcaagaagttctcacgtgcccagctgttggcctataccgccaagctgccttcctcactgatcggtctggaagcctgtgcgggagcgcacttcctgggggccgccctgcgcgagcaggggcaccaggtgcgactcatcgcgggacagtttgtgaagccttatcgcaagtccaacaagaacgacttcctcgatgccgaggccatcgccgaagccgtgagcaaacagaacatgcgctttgtgccgatcaagaccgaggagcagctcgatgtgcaagccacgcaccgggttcgtgatcgactggtgcaacgtcgcaccgcgctgatcaacgagatccgcggattcctcctggaacgcggcattatttttgcggctaaacccatccatctccgcaagcacctccccgcggtcatggaagatgccgagcagagcctcagcccgcgcctgcgttggctgctggagcgcatgtggcaggagtggaagcagttggagatggacatccaggcgatcaccgacgagctcgagcgcatcagccatgacaacgcactctgccggcgcctacggcagattcctggcttcggccctctggtctctaccgcaactgtggccgccattggcaacggggccgcctttcgccgggggcgcgacttcgctgcctgggtgggcgtcgtgccacggcagtactccaccggggggaagcagaggctgttcggcatcagcaagcgtggcaatgtctatttgcgtcgcatgctgatccacggggctcgcgcggtactgcttcgtgtcaagtacgacaccggaggattcgggcagtgggtgcatcggcatcgccaataaactggctcgtatcgcctgggccgtgttgtccagcggcagagactatcgacatcagcccctgctgccagtagcggcctaatcctggcggtggaaaagatgctgacgcttggaaagcacagaacgctttccacttttccaccgccaccacgacgagtctctgagatggcttttccaccaaggtctgcggaggagagaagaagacgaaacaacagtctaacggcgtgccggaaaacctgctggtgtgaatgggtctttgtgaccgagcgatttataaggaccggcacgcgcggatcatcatcgagtgcccggagagcgattctccactaagaggccggatacatttacgcagactgttgcctcgctccaacttcaaacctcttgcagtccggcggcggaccataca

SEQ ID NO: 6246 - DNA, 1520 bp, unidentified
  source 1..1520: mol_type = unassigned DNA; note = element_9acd098
  misc_feature 1..4: note = core
  misc_feature 5..259: note = LE
  misc_feature 260..1510: note = CDS
  misc_feature 1511..1520: note = RE
ctcactggtgcaccatccttaggtcactgatcttggatggattggtgatgcgcccgaggtgccgccaggtcatcgccctgctcgcttgatgcggtggatgtccagcatgagatctgcgagatctggcggttacccgggacgtgccgaccgtcgacagggctgagcgcctgcgagcgccgatcagtgagcgaaccggcagccgcgtcccggcaccgcacgaaggcgcctccccactgggactagcagcaaggaggctgaggtgacgtctgccatgaacaccctgcccgacgaacccctcaacggtgtgagtggtggcctggactgggcccgtgacgatcacgcggtgtcggtcgtggacaatcgcggccgcgagctcgtccggcacaccgtcgagcacagcgctgccggcctgcgcgagctgatcgccgtgctgggggatgccggctgcttcgaggtggggatccaacgccccgacgggccggtagtcgaggccctgctcgccgccggcatgacggtggtggtgatcaacccgaaccaggtgaagaacttgcgcagccgctacggctcggcaggcaacaaggacgatcggttcgaggtgttcgtgctcgccgacacactgcgcaccgaccgggcccggctgcgtccactcaccccggacagcccccagaccgcgaccctgcgccaggcctgccgggcacgcaaagacctcatcacccaccgggtcggcgtcgccaaccagctgcgcgcccacctgcgcaccgtctcccccggcgccgtcggcttgttcgccgagatcgacagcgtgatcagcctggcattcctggcccgcttcaccacccaagaccaggccgactggctcaccccaacccctctgggcgcctggctgtccaagctcggctactccgggaaagtggaccccgccgtgctgcacacccgactcagagccccgccccagaacgtggttggcgaccagaccatcactagcgcggcgatcacccgatccttcaccgccgtgctcaccaccctcctcgagcagatcaagaccctcaccagccagatcgagacggctctggccgcgcacgccgacgcgcacatcttcaccagcctgccccgcgccggaggcgtccgcgccgctcgactgctcgccgagatcggcgactgccgcgccaagttccccacaccggagtcgctggcctgcctggccggcgtcgcaccctccacccgcccctccggcaagatccgcgccgtcgggttccgctgggcctggaacaaacaactccgcgacgccgtcaccgacttcgccggcgactccccacgcgccaacccctgcgccgaagacctctaccaacgtgcccgcggccgaggccacgaccacccgcacacagtgcgcatcctcgcccgcgcctggctccacatcatctggcactgctggcagaacaacaccgcctacgaccccaccagacacggcgccctccaacgcctccagcaagatcaacaagcaacggcttgacacagggctt

SEQ ID NO: 6247 - DNA, 1207 bp, unidentified
  source 1..1207: mol_type = unassigned DNA; note = element_9ae8896
  misc_feature 1..2: note = core
  misc_feature 3..193: note = LE
  misc_feature 194..1174: note = CDS
  misc_feature 1175..1207: note = RE
  misc_feature 12..199: note = bridgeRNA
cttgtatctctctggataagctgattagctatcagcgtatcaggaggaatggcgatcttgggcccacccttaggcagaaagcctgttacgtagagcaaggcccattcctccattttctcaaacatactgaatggtatccaagtcccttccggtgggaagtgaggctgcatgtacaaggcaagtggagagaattatgaatgtgatcggtattgatgtcagcaaagacaaactggattgcctgtggttgcgggatcttgccacgggcaaggccaaaagcaaggtggtccccaaccagccctgcgggtatcaggcgctgctggcctgggcggagaagtccgtcggctgcccggtcgcggagctctggtttgtgatggaagcgaccggtgtgtatcacgaggcactggctgccgcgcttacccgtgctggcgcccaggtggcggtggtgaatccggcccggattcgggattatgccaaggccctggggcagcgctccaagaacgaccagcgggacagttatgtcattacccattatgggctcacgcaaccgctggtgcgctggcaacccgagccaccggaggtccgcgaactgaaggcgctgctggccaggctggaagcggtagcgaaggatgcgcagcgggaggcgaaccggctggagaaggccaccatcagtcaggcctccaaggtcgtcattgattcgatccgcggcatgctggtcgcgttgaccgcggagaaagcgcggctggagaaactgatcgatgaacatatcgagggacatccaatcctcaaacgagacagcgcattactgaagagcatcccgggcgtcggcgcggttctgtcccgctacctgatgatgacctatcacagccgggagtttcaaagcgccgcccagatggccgcctatctgggcgtggtaccggtggagtatgaatccggcagcagtgtgcgcaaacgcccacgcctgtccaaggccggcagtggcgtgatccgcgccaagctctatatgccagcggtggtggctgcgcggtgcaatccccaggcgcgcgcgctctatcaacgattactccagaagggcaaaacgaaaatggcggccctcggtgcagtcatgcgcaagctggtgcacatgtgttttggcgtgttgaaacatcaacagacttattctccattggtggcataaatgccgcttgtggtgataggagagagatggtat

SEQ ID NO: 6248 - DNA, 1455 bp, unidentified
  source 1..1455: mol_type = unassigned DNA; note = element_9af9f86
  misc_feature 1..3: note = core
  misc_feature 4..120: note = LE
  misc_feature 121..1158: note = CDS
  misc_feature 1159..1455: note = RE
  misc_feature 1206..1404: note = bridgeRNA
agatggggtattcggctggctggcgtgccctgcggcgaaggcgggggcgcagcacttcaggctgatggtaaacgtggtctgctttgtggcagccacacgcatcagatggagaagtgcattatgaaacattatgccggtctagacgtctcggtcaaagagagtgccatatgcatcatggatgagacgggcaaggtctgccgcgaggtgaaagtcgttagccatccggaggatcttatcgaggtgctcaaggacccggcttggcggctcgtttgcgtcgggctcgaagccggtccgctctcacaatggctgttcagcggtctagtggaggcagatttgccggttgtctgcatcgagactcggcacacgaaggctttcctcaaagctcaggtgaataagagcgatcgcaatgacgcccgcggcatcgcacaaatgatgcgcgtcaacctgttccggcccgtgcatgtaaagacgttggtgagccagaagaggcgcgccttattgacggcccgcaagctgctgcaggagaaagccatcgccgtcgagaatgacatccgcggcttgctgcgcaactttgggctcaaggtcggcgtcgtcggcgtgattaaattcgaggaacggatcttcgaacttgtcgatggcatgacggaccttgccgagatcatgacgtctttgcttgaggcccgtcgaacgctccgcgagcaggtcggaaagctgcatcaaagactattgtcgatcgtccgcgaaaatgacgcgtgccggcgattgatgacgatcccgggcgttggcccgatcgtctccttggctttcaccgcgaccatcgatattccggcgcggttcaagagttccaaggccgtcggtccggccttgggattgacgccgatcctcaatcaatcgggcgagagcaatcgcgttggccggatctcgcagtgtggcgacggaatgatgcgaacgctactgtatgaagcagctcaagtcatgctgacccgcacaatcaaatggtcgtggctgaaggcctgggcgatgaacatcgccaaaagacgaggcaagcaaaaggccatcgtcgccctggcccgacgcttggcagtgatcatgcaccgcatgtggtgcgatggaacggaattccgctggacgaaggaaactgtaccggctgctgcttaatcaatcggcgggctggaacactgcatcgccagaacaggagagtgatccgagttccgccagctggcggaagggtgtccctcgcgggacgatggacgaggtgagttcgcgttgggtcttgtgtcgatcgcgtcatgcgcaatcagaacgcgagtcagattgagccgcctcatccttctgatcccatgctgggagagccgaagagctgatcccgaagagaagagagggcccgcgagtgacagaaaaaatcaacggtatcgagggcctgaaagtgcttgaccgcaacccgccgaacagaga

SEQ ID NO: 6249 - DNA, 1139 bp, unidentified
  source 1..1139: mol_type = unassigned DNA; note = element_9afdd14
  misc_feature 1..2: note = core
  misc_feature 3..177: note = LE
  misc_feature 178..1131: note = CDS
  misc_feature 1132..1139: note = RE
  misc_feature 3..185: note = bridgeRNA
cttgtatgtcgcatcattgtctccggacgccacagatcgacaaccccatgctctggacgttagtccaagttcgagggagagctaggatcgtggtgtccatttcttggtagcgtttagcctaagcccgaacggttgtaaggcagcacgccggattgacacaaggatgggacaagccaaatggatatcaagctagcaatcggcatcgatgtcagcaagaggaccctggatatcgatgttgtgccgcaaggcggcccgcgccagttcagcaacgacgagaagggtatcgccttgctcgtggagcacctgacggagctcaacgtcaatggcgaggtggatcgggttgtcatggaggccacaggcggttatgagacccctgtgagcatggcactggctgccgctggattgccggtggtggtgatcaatgccaggcagatccgcgactttgccaaagcgtgtggcatcctggccaagacggacaggctggatgcgcgggtaattgcgcgctttgcccagcaaattcggccgccggtgcgaccgctgcccgacgagatgcagcgtgaattcgctgatttgctggatcgtcgcagtcagttggtcgtcatgcgtgcgcaggaaaagacccgcctggacaaggcgccggctgtcgcgcagaagagcttgaaggagcatatcgcgtggctggatgcgcggatcaagtccaccgacctcgacatgacgcaccggctacgcaccagcgaagcctggaagaacaaggtggatttgctcgatagcatgccgggggtgggcaaggtgacaatcttcacgctgctcggacggctgccggaacttggcacgctaaaccgccagcagatcgccgcgctggtcggccttgcgcccttcaatgacgatagcggcaggcggcgtggtcagcgttacataaggggcgggcgtgccgatgttcgcaaggcgctgtttatggctgctgtcacagcgatgcagcacaacccggcgatcaccgagttctatgaacgcatgagagcggctggcaagccgttcaaagtcgccatcgtcgggtgcatgaggaagcttctgacgattctcaatgtcatggtcaagacgggtcggccttggcagaacaaccgacctgcttgacacggttg

SEQ ID NO: 6250 - DNA, 1390 bp, unidentified
  source 1..1390: mol_type = unassigned DNA; note = element_9b0348f
  misc_feature 1..2: note = core
  misc_feature 3..81: note = LE
  misc_feature 82..1107: note = CDS
  misc_feature 1108..1390: note = RE
  misc_feature 1158..1378: note = bridgeRNA
tgatggtgtggacggccccaccctaacggcatcaagtgccaagacgtggccgccggagcgccaccaacggggagaccgtccgtgagaaagtttatcagaatcggcgtcgatttggcgaagaatgtctttcaacttcatgggatcgagcgcgaggacggatcgccgtttcagcgcaagttgactcgggttaagtttcgagagttcttttctcggctgacgccctgtcgcgtgggcatggaggcttgcggatcggcgcattattgggcgcgcgtcctcggagcgatggggcacgaggtcgtcctgatcgcgccggcctacaccaagccctacgtcaaacgcggcaagaacgacgcggccgatgcggcggcgatctgcgaggcgatgtcgcggcccgagatgcgcttcgtgccggtcaagagcgcggaccagcaagccgtgctgatgttgcataagacgcgggatctgctggtcaagcagcgaaccatggcggtcaacgcgttgcgcggccatctccacgagttcggcctgatcgcggccaagggcattcatcgcgttcaggagctggtcgccctggcgctggcggacgaggggcttcccgaagaggccaaggaggcggtgactctgttggccgggcagagcgagcaactcgacatgaagatcgacgcgttggagaagcaaatcgccaaggccagcggcaagaatccgatgagccgcctgctgaaggaaattcccgcgatcggaccccttatcagctccgcgatggccgcgagccatcccgatccgaacgtgttcaaatcgggaagcgatttcgccgcgtccctgggcctcacccctagccagcactccagcggggggaaggaacggctcggctccatcaccaagaaaggcaaccgatacctgcgcaagatgcttgtcgtcggctgcacctcggtgctgcgcgtggcccacaaatacaagggcgcattggccgagtggatcatcgcgatcaaggccaggaagcccgagcgcgtcgccgcggtggccctggccaacaagctggccagaatttgttgggcggtcctatcgaccggcgaaagtttccgtcaggaactctataccagggcctgacgaacaaaaggcccgaaaaaagaggttgtcagggaggcgttccatcgttcaaagtttggcaagcgctacgacgtgatgatccaaaacggtcgcaaccgaaaaccgaggacaacccgccagccgtcacgaacctcgagttcgccgcgatgatagggaccaaggttgtcggatatcatcagggccagcggccatgcgccgcgccaaaaggccggacatatgaccgcagccgaccaagacgatcaaaatgtcaaaatgcatcttgccaatcggggccgtccacata

SEQ ID NO: 6251 - DNA, 1383 bp, unidentified
  source 1..1383: mol_type = unassigned DNA; note = element_9b05ab8
  misc_feature 1: note = core
  misc_feature 2..82: note = LE
  misc_feature 83..1111: note = CDS
  misc_feature 1112..1383: note = RE
  misc_feature 1136..1369: note = bridgeRNA
tgatgtggtggacggcgcccgttcccggcatcgaagtgcgataggatgatcgtcacagacgaatcacatgggagccgtccacatgcaaattaccacgatcgggttggatatcgccaagaacgtgtttcaagtccacggcatcgacggcaacgagacggtggttgttagaaagcaacttcggcgcgggaagttgatcgcgttttttgaaagtctggcgccgtgccttgtcggcatagaagcctgtgccacggcgcaccattgggcacgcgaactgacgaggctcggccaccaggtccgattgatgccagcgaaggacgtcaaggcttacgtcaagcgcaacaagaacgacgccgctgacgcggccgcgatctgtgaggcggttcggcggccgaccatgcggttcgttcggatcaaatcgaccgatcagcagtgtcaattgatgcagcatcgaactcgcgatctgatgatgcgccagcgcacgcaactgatcaatgcattgcgagctcatctggctgagcttggcattgtggctgcgatgggcgacaaaggggtcacggaattgcttatgatcgtggcggatgaggacgatggccgattgcccgtcgaggcacgagcaagccttgccttgctggcggcgcaactcaatgcactgcagatgctgatcggatcactcgagaagcaaatcaaaatgcagcatcgcgccaacccggcgagccaacggctcgagaccatcccgggcatcggcatcatcggggcgaccgcgattgcggcaacggttgcagacccgacggtttttcgatcgggacgcgattttgcggcgtggatcggactggtgccgcggcaagaatcgagcggaggcaagcataagcttggatcgatctccaagcgaggcgaccgctatttgcgtcgcattctcgtcgtcggcgcgcactccgtcttgcgacgggccatggagaagcctgggaaatatccctggctcacccagctcatggcgcggcgccccttcaaggtggtcgcggtagcacttgccaacaagatggcgcgcatggcttgggccttgttaacctatgggggcacatatcgggcgcctcggctttcgattgttccatagggtgctggccgatggagggatgtgtgtaagtacatgcgttcacgaactgcaagggtgatgacgacattgatgcgaaacggtcgagaccgtcgatcggaaaacccgggaaaacttacgcgcagaaagagcgcgtgaatctgattgggaacgatcagcggatcacatcagggccagcggtcaagcggccgcattcaaaggccgaatacatgaccgcacccgaacgcttcgctgatagtcaatttctctcttgcaccgcgggcgccgtccataca

SEQ ID NO: 6252 - DNA, 1538 bp, unidentified
  source 1..1538: mol_type = unassigned DNA; note = element_9b24117
  misc_feature 1..3: note = core
  misc_feature 4..246: note = LE
  misc_feature 247..1425: note = CDS
  misc_feature 1426..1538: note = RE
  misc_feature 8..214: note = bridgeRNA
tttcgtattatcaggttagccagttattactggttggcctattttttttgctgttttacgatggggggagccgggaaaacgtgagggtcttaggggcatgaccccgtcaaaaaaactgttttcccacgacctccaaaagaccatgtttgagctggtaggggcggtagacctcgtataacaagcgaagctatgggtttggaaccatcgtggaaaaggccggtgaaaccaaagacaaggagtgaggagatggaaccagttgttggtgtggatgttgcgaaaggttcaagtgtggtacaggcgttccggaaacgaaacgaaccgtatggtaaagctgtagacattgaacatgaaacgagtggattcgaaaaattcgtggaaatgctgggcatgcttcaagccgaaacaggtttggccccggtggtggttctagaagcgacgggacattaccaccgtgcattggtttcttatttggatcgaagtggctacacctgttacattgtgaatccgttgcaatcaaaacgggccaaaggaacgcaattacgcaaagttaaaacggacgcattagatgcctggcatctggctgagatgtactaccgcggcgatgtgaagccacaccgaacctgggatgagacgtttacggagttacagcattggacaaggcagcatgagttcgtcacgggaatctttgtgcaggcgaagctgaacagtagagccttactcgagcaagtgtttccggagtatgagcaggtattctacaatgtgttttcggcaacgtcattgactgtactggcccattgtttagagggagatgcagaagagtggaacgaagttattcagggaagtgcagggagatcccattccaaacgttgggcaaatgaaaaagccagaaaactggagaaagtgttgggtcactggagagagtctcggcatagtccatctcaaagcaaggcgctactcgggatggtgtctttattgctgacgatgatccggcagctggacgagttggaaaagcaaatggaggacatggcggcaagcctgcccgaagtggaactcgtgaagagcatcccgggaattgggacgaaactggccgcagccattatagctgaagtgggtgatgtcaggcagtttagcgatgcaaagcaactcgtagcgtttgcgggccttgaccctgggattttcagttcggggaagtttacagcgacgagtacacgaatcacgaaacgaggctctaaaaggcttagacgttcgctatatttggccgtgcaatgcggtatgcggaaaaacgcgaatgcaagaatccgttcgtactatgagaaaaaaagaaaagagggcaagccctacaaggtggtagtgatcgcttgcgcaaaaaagctgttgcatcacattttcgccatcttgcagaaggggcagtcctaccaagcttaaaccatatttaaccaaaacctccatagtggtggaggttatttgggttggtcggaaaaagtatatcacgaaaagagaactcatccaacctcaaatgcttgacaaacattagctgg

SEQ ID NO: 6253 - DNA, 1234 bp, unidentified
  source 1..1234: mol_type = unassigned DNA; note = element_9b2bb49
  misc_feature 1..2: note = core
  misc_feature 3..222: note = LE
  misc_feature 223..1131: note = CDS
  misc_feature 1132..1234: note = RE
cctatataggttttattagctctagagagtaaagagtaatactcctagggttgggagtatggtcggtagtatttctgaagctaagtcttcggtttccggcgtgaccgacccctactgtcggactgaacattgtggaaaaatccacgcatataggtgtgataaagaggtaggggtaattggaatgatatatcaaaagattatttaataactagtagggggagggtgagaaggtacgagaataacaaggagggttatgaggaaatcctcaagatgaaaccttgcgcaatagttttagagcccactggagtttacgcaataaggccttgccaatacttcaaggagaaaggaataaaagtactacaagttagcccaaacgtgttatcaagggaaaaggagtttaggggaaagaaaacagatttttacgacgctgaaaaattagaaaacatggttgataaggctaaggagtacgagtataaccccttaagggaattggtaacactctacctcttcctaaaggacatagagacgaagtacaagaataggttgaagagggcattattcctagtaagtgataacgataagataagcaaggataggttagaaagacttgcaaagggagattttacacaagaagagctctaccaacttgaatacacaccaatagtgcttgaagaaatcaaagtcctagcaaagacactcctagaaacgcaagagaaattggaggaggttaggaggatgattgaggaacaagttcctcaagatcacgttttattatcaataccgggtgttgggaagcttgcagctggtattattattggtattgttggtgatgttaagcgttttcctaggccggaatcatttgttgcttattgtggtcttgatcctcttgttgaaaggagtggaaaggctgtgataagtaagggtatttctaagaggggtaataagtacttgcgtagtttgttttactttttgacagggaggaattattctaggaatcctactttgctgaagttttatgagtctcataaggataggcttcaaggtaagaagttgtatactgccttggctaggaagttggcaaggactgtttggagtgtttggtataataataagccttatgagcctaaataggtgaatccctccccccgaatcgccacgtgggttgaaaggacccacgtggtaatgttagctaatactatgtttgaagtttgaccgaaaggtttattactgaacg

SEQ ID NO: 6254 - DNA, 1455 bp, unidentified
  source 1..1455: mol_type = unassigned DNA; note = element_9b2def4
  misc_feature 1: note = core
  misc_feature 2..229: note = LE
  misc_feature 230..1441: note = CDS
  misc_feature 1442..1455: note = RE
  misc_feature 13..256: note = bridgeRNA
ctactagacgattgtcggtagggccggtgtctggccagactcggtccaggtgcccggcgggaagctctcctcgcggctgcccaccagcgtgactggtgtggctcttaaccggtttgctctcccgtcgggcaccgcccgtgaggtgtggctccagaggggtctgcccagctctcagtagcactgcccgcctcgcaatccctacaggtccatcacgaggcgaggtagtggaatggcgaaggtgttcatcggggtcgatccccacaagctgtccgcgaccatcgaagtcgtcgacgaacacgagagcgtcctgggcaagggccggttcgccacggacaaggctggctatgcggcgatgcgcaaacacgtcgcggcctaccgggagcgggtctgggcggtcgagggcagcaacggcgccggccgtccgctggcgcagcggctcctcgccgacggcgagcccgtcgtggacgtgccggccaagctcagcgcgcgagcccgagcgctcgacaccggccacaaccgcaagaccgatgcccacgacgcgcacgccgtcgccgtcgtcgcggtccgcaccaaggacctacgagtccttgcctacgacgagcagctcgaggccctgcggatgctggtcgaccgccgccaagaactgacccgccaaagggtccagaccatcaaccggctgcagcggctgctctccgagctgaccccgggcaagcgcaagaaggacctgactcccttgcaggccaagcggatcctcgcctcggtacgtccccgcgacatcgcgggcaaggtccgaaagaggctcgcgctcgagcagctgaccgacctcgtggcgctcgaccagaagatcaaggccctgagcaaggagctcaaggcgatggtcaaggcttctggctcgagcctgatggacctgtccggtgtcggcccgatcgtcgctgcccgggtcctggccgacgtcggggacgtggcccggttcgccgaccggaaccggttcgcgtcctggaccggcaccgcaccgatcgcggcctcctccggcgagatcgtccggcaccggctctcccgagccgggaaccggcggatgaaccacatgatccacatcgccgcgaccacccagatccgcctccacacccccggccgggcctactacctgcgcaagctcgccgccggtaagacccgggccgaggcgatgcggtgcctgaagcgcaggatctccgacgccctttaccgacagctgatcgccgacgccaacgccgccacccgagcggcggccgagacgggtccgggagggcaccgcggggcgtcacatgaatccagcgcggccggctcgcacccgcacaccggcacttcggatcagccacttcccggacccgcacaggtgacgctacccgcaccgatcccagcgaggaagaccagcgccgacaggcctctcgaacctgcctcttgacgacagaggggtgc

SEQ ID NO: 6255 - DNA, 1385 bp, unidentified
  source 1..1385: mol_type = unassigned DNA; note = element_9b2e5ac
  misc_feature 1..2: note = core
  misc_feature 3..128: note = LE
  misc_feature 129..1151: note = CDS
  misc_feature 1152..1385: note = RE
  misc_feature 1171..1353: note = bridgeRNA
acatggggtaatcgcgggagcggtactccgggctgtcacgagatggatgctggtggctgttccccgataagatggaagaacgggctcacgacgagaagccgggcccaggcatctgatggagaacagccatggacgagtatatcgggctcgacgtttcgctgaaagagaccgcggtatcgattcggcgcgacggcaagcgggtttggcgcggcaagtgcctgtcggttccgcaggcgattgcagcgctgatccgcgagcgtgcgccgagggccaaacgggtggtgttcgaaacgggaccgctatccgtctggttctatcatgcgctcactgcggaaggagtgccggcgatctgcatcgacgcgcgccatgccaaggcggcgctcgacatggcggcgaacaagaccgatgccaacgacgccgacggcctggcccatcttgccgaggtcgggttctacaaggtggtccgcgtcaagagcttcgacagcatgctggcgcgcacgctggtggcggcacgaacgcggctggtgcggatcgggacggagttgtcgaaccagatccggggcctgatgaagacgttcggcctcgtcgtgccattggtcaccggcggcaagttcgagcgccaggtcgaagcgctgctggccgacaataccggcctgggccggatcatccgcccgctgatggaagcctggcgcgccgtttgcctgcgcaccgcggagctgagccgtacgctgctggcggacgcccggcgcagcgatgcctgccagctcctcatgtccattcccggcgtcggtgtcgtgaccgcgacctccttcatcgccgcgatcgaggaaccgggcaccttcaagcgctcgcgatccgtgggggcctgggtcggattgacgacccgacgctatcagtccggcgaggtcgatcatgacgggcatatctcgaggcggggtgacacccatctgcgcgggctgctctacgaagccgcgacatcgctgcttacccgcagccgagcacaatccgacctgcgcacctggggcctgaagctgcgagagcggctcggtttcaagcgtgccgcggtcgccgtcgcccgcaagctcgccgtcatcatgcacaccatgctgaccaccggcgaaccgttccgccgttcacccgctacagcctgatccaccagctcgccagcgtcgcaaggcgccaacgagacgtcctgccgggacgtaggctgacccattccgcgacgttcgttgcaccaagccccctttggcggtcgagtgcgtcgcaaacataggaagggtcacccgcgaagccccatcatgcggcggctgatgccgaccgcgaagacgaccatgcttccggcagcgatatctcgagaaatgtcttgcaacgcccgcgattagacg

SEQ ID NO: 6256 - DNA, 1374 bp, unidentified
  source 1..1374: mol_type = unassigned DNA; note = element_9b3e68e
  misc_feature 1: note = core
  misc_feature 2..231: note = LE
  misc_feature 232..1359: note = CDS
  misc_feature 1360..1374: note = RE
  misc_feature 4..236: note = bridgeRNA
cagtgataattggagtgtggtcctgcagccgtcgggtttgaccctctgcttgactgacgctttggttgacttcaatttgatttgtcgactcgatagctgcagaaccacttccgggcacgccctgtcgagacgaatcgtgacctaataggagcctgcgctatcaggcgcccatcactgtcttgtccgcccgtcgagaacgtgcgtgccgccccgacaactgaaagggacgacatgagcatcgtcacagaccagacccgatctgacaaccccatcgctggaggtgtcgacacccacgctgaggtccacgtcgccgcggcgatcgaccggatcgggcgtgagcttggtcatgccagtttctcaacaacagctaaaggaaaccggcaactcctcgactggctcgacactcacggcactgtgacaatcatcgggatcgaaggcaccggcgcttacggggctggattaacccgaacagccgcagcatctggagtcacagtcgtagaggtcgacagaccggaccgcaaatcccgccgtttcgagggcaagtccgacccgatcgacgcctacgccgctgcacgcgctgcactgtcagggcgggcgtcggggacaccgaaatctcgtgacggcaacgtcgagatgattcgggtccttcgagtcgctcgaaatagtgcgatcaaggcctcgatagcagccaaaacccagctcaaagcgatcatcaaaaccgctcctgaagaactccgtgacgatctgcggtccctcgacagggccgcactgattgacagatgcgcccgctttcgaccggcacgaggtagcactccagcagcgtcgcctcacgcgaaacgcaaaccccatcatggtcgcctcgcggacccaacagcagcaaccaaacatgccctgagagttctcgctcaccgagtacaggcactggcccaagagatcaaccagatcgacgatgacctcaccatgctggtcacagaaaccgcaccagcactggtcgcccttttcggtgttggacccgacgtcgctagccagatcctcaccaccgttggtgacaacccagaccggctccacagctcagccgccttcgctcacctatgtggcgtagcgccgatcccggcatccacaggcagaaccaaccggcaccgactcaatcgcggtggcgaccgtagtgccaacgctgccctctaccgggtcgccatggtccggctccgctacgacacccgaacccagcgataccgggatcgactcgccgccaaccagaaaaccaacaaagacatcatccgatgcctcaaacgagccatcgcccgagagatctaccaagccataaagaccgacttcggaatctcccacgacatctcttgacgtcaataggagcat

SEQ ID NO: 6257 - DNA, 1380 bp, unidentified
  source 1..1380: mol_type = unassigned DNA; note = element_9b4068e
  misc_feature 1..3: note = core
  misc_feature 4..88: note = LE
  misc_feature 89..1120: note = CDS
  misc_feature 1121..1380: note = RE
  misc_feature 1150..1369: note = bridgeRNA
atgatgctgtggacggctcctccacccggcacgcgagtgccatggatgtgggggcccttaaggctcccacgattcagaggagctacccatgcatacgatcacgacaatcggtctcgacattgccaagtcggtcttccaagtgcacggcactgatgctgccggccaggtggtcatccgccgccagttaaagcgtcgcgccgtcctggcgttctttcagaagctgccgccatgcttggttggcattgaggcttgcgcctcgtcgcaccattggtcgcgcgaactgcaggcgctcggtcatgctgtgcgattaatgccaccggcctacgtgaagccttacgtcaaacggcagaagaacgacatggctgacgctgaggcgatttgcgaagccgtcaccagagctaacatgcggttcgtgccgaccaagacgcccgagcagcagggttgcctgatgcttcaccgcacgcggcatctgttcatccgccagcagaccgcagtgatcaattcgatccgtgcacaccttgccgagttcggcattgttgcgccggtcgggcgcaagggggtgatggagctgctccaggttgttgccgacccgagcgacaaacgagtgtctgagatcacccgcgcttgtcttactgcgctcggcaatcaattgctcagcctcaaagagcaaattttggaattcgatcggatgatcatggcgtggcaccgatccaacgaaccgagcaagcgccttcgttacattcccggggtcggtccgatgctggcgaccgctctggtcgcgagtgttgctgatcctaagaccttccgatcaggccgcaacttctcggcttgggttggactcgttccgaagcagcactctagcggcggcaaggacaggctcggcagtatcagcaagcagggtgaccgctatctgcgcagcctgtttgtggccggcgccctgtccgtcatccgctacgccaagatccacggcaccaaacatcggccttggctcacggcattactggctcgaaagccgaccaaggtcgcggccatcgcgcttgccaacaagctagccagaatggcctgggccatgatggcgaggggcgagcggtacaggaatcccgtcgcgcttgcggcgtaacgagatcacgccgggcatccggcgtgatgtgaaggttgggagggcgaacagcacgtaatgcagagccggtcgatccggcggtcaggacaacccacttgtgccatcgcattcttgaatgcgagctaatgaccgggacctgatccgcggagggcattatggccagcggtcatgtgaaccgcatctaaaggccgaacacatggctgcaccgaccaatgctgcttacgtgaagaaagtccttgccaactcggagccgtccacac

SEQ ID NO: 6258 - DNA, 1362 bp, unidentified
  source 1..1362: mol_type = unassigned DNA; note = element_9b423bc
  misc_feature 1..2: note = core
  misc_feature 3..76: note = LE
  misc_feature 77..1102: note = CDS
  misc_feature 1103..1362: note = RE
  misc_feature 1078..1349: note = bridgeRNA
tgatggggtggacgccccctgacggcatcgctgtgccaaagtggtgtcgttgatcatcacttgaacggaggcgtccatgtcggaagttagcatagtcggattggatctggcgaagaacgtgttccaagcgcacgggtcggatgcgttaggagccgtgctgttcaggaagaagcttcgccgcgatcacgtacttcggttcctcgccgctcagccggcctgcacggttgccatggaggcatgtgcgggcagccactattgggcacgggagattgcgaagctgggacatgacgttcggctgatcgcccctggctacgtcaagcctttcgtgaagcggcagaagaacgatgccgccgacgccgaagcaatctgcgaagcagcccagaggcccaccatgcggttcgtagcggcaaagagcgaggagcagcaggctgcggcgattgtgtttcgtgttcgcgatctcgtggttcgccagcggacccagacgatcaatgcgatacgaggccatcttgccgaattcgggctggtggctgcgcagggcctcttccatgtcgccaagcttgtcgcggcgattgaggacacagattctgccatccccgaagccgcccgcccgatcctgtctctgctcgtcgaacaactccgctccctggatgagaaggtagctgtgcttgaccgcgagattgcccggcgcgccagggatgatgcggacaccaggcgattgatgaccatcccgggcgtaggaccgatcaccgcgacggctgttgccgcgttggctccgtcggcccagaccttcaagagaggccgcgacttcgctgcatggctcggcctcacgccgctgcaacgttcctcgggcggcaagcagaagctcggcgagacgtcccgaatgggcgagcggactttgcgccggctgctgatcatcggggccagcgccaccgtgcgctgggcgatgcgcaaaggcgcggcagcagatccttggctctcccagatgctgagccgcaaaccgcccatgctggtgatcatcgccctggccaacaagacggcgcgcatcgtgtgggcgttgatggccaagggcgggacctaccgggcaccggctttggcagggtagtccgctccccaggcgggccgccaaagtgtgagaaggtcgaacggagagtatggcgctacggtcaatgagacgggatcgggaaaaccagatcatggatacgcgccttgagcgcgccagattgttttggacccgctccgcgaactcccatacaggcccgcggcatgtgacagccgcaacagaggccggacacatgtcagcacccgaccacgctccgcgctcttcaaaaagattcttcttgcaccaacgggggcgtccacaca

SEQ ID NO: 6259 - DNA, 1204 bp, unidentified
  source 1..1204: mol_type = unassigned DNA; note = element_9b4b954
  misc_feature 1..2: note = core
  misc_feature 3..319: note = LE
  misc_feature 320..1171: note = CDS
  misc_feature 1172..1204: note = RE
  misc_feature 12..200: note = bridgeRNA
cttgtatctcttcttgatgagtgtttagctagcacttgtcacatcgggaagacagtgagctcgtacccaaccagagtgtgaaaatgctgtgacgtagattgagccctgacttcctaacctcaattaaactgaatggtatcctagcgccccaactaagggtgacgctgcatgtacaaggggagtagatagagatgaaagcttttattggcattgatgtgggtaaagaaaagttagatatttcctggctacgcgatgtagtaaaaagaaaacgaagatttttaaaaataacccgcagggctatcaagagttagttgcctggttgataaagaatacaaatttaaaagcacaagacattgttattacaacagagcccacaggtgtttatagcgagccgctgatgtatttcctatacgagcaaggatttattttattacatgtaaatcctggtaaagcaaaacagtacgcaagttcattagggcttgtccataagacagacaagtcagacgccacaatgcttgctcgttatggtcatgaccaacagcactcacttttaagttggcagcctgagcctgttgaagcgagagagttaaaagtaatgacgcgtagacttgaagcacttgagcaagacttacgtcgcgaagaaaatcgttatgaagctgttggtttctcaggtgcatctactcgagttactcagtcaattgaagatatgatagctgtactaaaaactgagataggcaagctaaaaaatgacattgatgagcatattgatagacacccgcaattaaaaaagaaccgcaaattgcttcaaagtatcaaaggtgttggagaggtaatatcacgtatgatggtgtccttgctggcatgtaaacagtttaaaaatgccaagcaattagcttgttacttaggcttaatacctaagcttaatgagtcaggcaaacgggctggaaaaacaaccttaagcaaagaagggcctgggtatataagggctaaattgtatatggctgctgtagtcgctgtacaacataatccagatataaaagcccaaaataagcgattagtggggcaaggtaaaacaaaaatgcaggcaattggtgctgcaatgagaaagctgacacatatctgttttggtgttgtgaagaatcaaactgaataccagcctcaagctatttaaagaaagcttgaggctgattagaagagatggtat

SEQ ID NO: 6260 - DNA, 1170 bp, unidentified
  source 1..1170: mol_type = unassigned DNA; note = element_9b550c9
  misc_feature 1..2: note = core
  misc_feature 3..210: note = LE
  misc_feature 211..1164: note = CDS
  misc_feature 1165..1170: note = RE
  misc_feature 19..216: note = bridgeRNA
cttgtaataacaaaaacgattatggtgggtgcgttccgaaaggaatggcctgccgcggaccgcaatccgcgacaggccgctggcgatcggatcgtatcccgccctgagccgcttttggctgccctgtagcgagatcgcgccagcaccttcatcggacccggatggttgccggaacacttggttcgcttcacaaggcaggggtcgaagaagatgacacagcctagcataacgacagctggaatcgatacgtcgaaagccaaactcgatattgccgttcatggtcgaaccgagcgctggcagctcgccaatactttgtctggatggcgcagactagcggccagtctggccgagatcggcgtggcgcgggttggcatcgagccgaccggcggctacgaacgcggcgtggtggaggtcttgcgtgcggcgggcttcaccgtgctggtgctgcagcccattcaggtcaaggcttttgcgcgagtgcatttgcgccgagccaagaacgacgcgctggatgcagttttgatcgccgcatgtgctgcagccatggatccaccgaggatcgcgcctgatccaagaatgtcagatctggctggatatctgacttttcttgaacagatcgaggaggacatcgcacgcttcaagacccgactagagcacatcgacgagcctgggctgcgccgcatcgtcaatagcgacattgcaagactgaaagcccggcgtgtggcgcaaattcgtgacattgccaatcgtctgcgcggccaccacgatctcgcggtgcggcttgatctcgtgttgagcattcccggcattggcgagcgcaccgcgttggctctgatcattcgcatgccggaactcggacaaatcagtcgggaagaggcttcagctctcgcgggtcttgcgccgttcgacgatgacagcggcaagcacaaaggccagcggcacattgccggcggacgaggacggttgcgacgctcgctttacgccgccgcattgcccgcggcctttcgctggaacaaggcattgatctcgctgtacgcccgcctgatagcgtgcggaaaagctcacaaagcagccctcatcgcctgtgctagaaagctcctgatttatgccaataccgtcgtccagcgggggacaccctggatcgaaaaggccgccgcgctctaatggttg

SEQ ID NO: 6261 - DNA, 1435 bp, unidentified
  source 1..1435: mol_type = unassigned DNA; note = element_9b5abad
  misc_feature 1..2: note = core
  misc_feature 3..230: note = LE
  misc_feature 231..1367: note = CDS
  misc_feature 1368..1435: note = RE
  misc_feature 11..225: note = bridgeRNA
gtcctacctttcaagggtggttgctctggtcattcgtaagatcggagggcccgggggctttgggtatggctgcatggtgggcgccttttggatggctcaaaggacttggccgcccggagccccgcgacgactcgaccgccaattgggagacgcgacccgatcgctgctgtaggacaacgtcggcgaggtcgtctgcgggagtgaagtgacgacgagctggtggagggaacgtgcccgagatctgggccggagtggacatcggcaaggaacatcaccactgcgtggtgatcaacgcggacggcgaacggttgctttcccgccgggtcctcaacgacgaaaccgagctgctccagctcatcggcgatgtcctggagatatctacggatgtgctgtgggccgtcgacctcaaccacggcgccgccgccctgctgatcggcctgctcctcggccacggccagcccatggcctatctcaccggcctggccgtccaccgcgcctcggtcacctacaagggcgagggcaagaccgacgcgaaggacgccttcgtcatcgccgaccaggcccgcgtccgccgcgacctcggcctcctgcggcccggtgacgagatcgctgtcgacctgcgcaccctgaccgcccgacgcttggacgtggtcttcgaccgcacccggcagatcaaccggctccgtgcccaactgctggaggtgttccctgcgttggagcggtcgctggacctggtcaacaagggcccggtgatgctgctgaccggctaccagaccccggccgcgatccgccgcgccggcgtcaagcggatcgagacctggctgaaaaaccgcaaggtccgcggtgccgccgcgctggcgaagacggctgtggaggccgcccaggcgcagatgaccgcgctgcccggcgaaaagctggcggccgccatggtggtccgcctcgcgaagggggtgatggcccttgatgaggagatcgtcgagcttgacgccctgatcgaggccacgtttcgcgagcatccgcacgccgaggtgatccgcagcctgcccggcatgggccccaagctcggcgccgaattcatcgccgcgaccggcggtgacatggacgccttcggcagcgccgaccgcctggctggcttcgccggccttgcccccaggccccgtgactccggccgcgtcagcggcaacctgcgccgcccccggcgctaccaccgcggactgctgcgctcgatgtacctctcggcgatggtcagcatcacgacatgcccgcgtccaaggcgtactaccagcggaagagaagcgaggggaagggccacaagcaggccctgctcgcgctcgcccgccgcaggctcaacgtcctgtgggcgatgatccgtgacggacagtgctaccaaggttcacctcccgccacgactgcggcttgacatcacgattgggaa

SEQ ID NO: 6262 - DNA, 1619 bp, unidentified
  source 1..1619: mol_type = unassigned DNA; note = element_9b5cf91
  misc_feature 1: note = core
  misc_feature 2..274: note = LE
  misc_feature 275..1513: note = CDS
  misc_feature 1514..1619: note = RE
  misc_feature 12..294: note = bridgeRNA
cctgttactatatatttggttgaggacatggccgccagccatgtctttatccatcttgttgcctaagctgttagaataagaggacaatcggcctgacggacatctccaagggctacgcgtccgtttctaagtcagtcagccatcctcttattcgcagcgttcgatttgtgcaggtagagccgccgtccggtgcgtttgtgtcatcaaacagatagaatcggcaatgagaaaaggatggttcgccaattgtaaatctgtgataggagcgtgggttatgaatgcggttggaattgatgtttccaaagggaaaagtatggtgtcggttattcgtccctttggagaactggtagcaaagccctttgaggtacgccacacctccagcgaactcagcgagctggcaaagcacctgaaaagtctggagggtgaaacgagggtggtgctggagcacacggggcgatattatgagccgattgcccaaatgctccacgatttcggaatttttgtaagcgcggtcaatccgctgctcattaaagaatacgggaacaactctctgcgtaaggtgaaaaccgataaggcagatgctctcaagattgcccggtatggtcttgataattggacggagctgcgtcaacatactcctatggatacgattcgttaccaactgaaaagcatgaaccggcaatacggtctgtacaccaagaacaagacggcgatgaagaacaacctaattgctctgctcgaccaaacctatcccggtgtaaacgccctctttgacagcccagtccgcgcggatggaagccagaagtgggtggatttcgccgcatccttttggcatgtggactgcgtgcggggcatagaacagaccgcttttgtggagctttaccacaagtggtgcaggcggcacggatacaatttcaacgtcggcaaggctgcccagattcatgcggaatcgaaagaactgattgctatgctgcctaaaaattcgctgtccaaggtgatggtacaggaagcaattacacagctcaatgccgtctcaaaaacagtcgaggtgtttcggaaggagatgaaccggctggctcggcagttgcctgagtacgatgttgtgatgtcgctatacggtacaggcccttctcttggccctcagctcatggccgagattggcgacgtacgccgctttgctcacaaaggctctctgacggcgtttgcaggggtggatccgggagccaaccagtccggaacctatgaagcgaaaagcacgcgatcttcaaagcggggttctccggagttgcggaagacgctctttgtgctcatgaccatactgctccaaaaagctccgtcggatgaccccgtgtttcagttcctggataaaaaacgagctgagggcaagccctatcatgtctacatgaccgccgcatgtaacaagttcttgcgcgtttactacggcagggtaaaggagtttatgaatatggtggacacccctgtagatatggatcccaccggcctttctcgctaaactcattctgcatagttttggtcggtgctttggcggcggcctttttatgttgctcatttctgcgctgcaaattttctcatttccctattgactttttatttgcagg

SEQ ID NO: 6263 - DNA, 1667 bp, unidentified
  source 1..1667: mol_type = unassigned DNA; note = element_9b60091
  misc_feature 1..2: note = core
  misc_feature 3..361: note = LE
  misc_feature 362..1270: note = CDS
  misc_feature 1271..1667: note = RE
  misc_feature 108..336: note = bridgeRNA
cttgtataatataataaagtttaaaatttaatatattatacttacctttctccattaattattttatttttatttctaaaaattttggtttaatggtaccgttattttatattttaattttaaataattaacataattttactttgaattaaattcattgtataattaatttattaacactgtggacttttataaactcccttatagctagactatttaaaggagactattgccacagtttcgctttattggttattagttagatagggctttgactctttatatccagcaaggttacaaggctaaaactaagtggaatcgtcacaagtgttaaaatataaattcaaggagttgatcttttatgatctttatcggcattgatattgccaaatctactcactttgcttctggtgttaactcagatggtgaagtgcttattaacccatttaaatttactaatgataatcaaggtttcaatttattcattaatacttttaaggattttgatttgtctaattgtttagtaggcttagaatctactggtatttatggcgacaatctcactacttttctttttgaaaaaggtttcaagattggtcgtattaatccaattcaaactgattctcttcgttcttctaatattagaaaaactaagaatgataagattgatacttttttaatagctcaatgtcttatgttaggacattatactttaattactgaaaaagatattcagcttatcaaattaaaaactatttgcagatttaaatttgatgttaaaaagtctcaatctaaatccaaagttcaattagttacatgcttagatattgcctttcctgaattagccaatttctttaataataatttgcatattaagtcatcttatgcattactttctaaatatccaacagctagaattattgctaatactagaattgacgctttaacaaatttattatattctgcatcaagaggacattttaagcaagataaagcaatcgctcttaaagaactggccagaaactctattgcaatggacaaccctgcaatcggtattcaaattaaaatgttaatcgagcaaatccaaatgcttgaaaaacaaatagatttgctcgatattgaaataaccaatattatggaaagtctaaattccccaatttcttctattccaggtattggtaattggttaggttccatcattattagtgaaattggcgatattactcgcttcagcacatctacaaaattacttttttttttgctggtttagatccatctgttagacaatctggaaattttaatgctactaataccaaaatatctaaaagaggctctaaatacttgcgttatgcaattaatcgtgcagcacaactaattatttggaatgatgataccttctaccaatattataccacgaaattggctcagggcaaatcatatttaaatgtaattggacatgtttctcataaattaacaagggtaatatttaaattgcttacaacaaacactacatttaaaaaaatagttaacaattttcaaagtgcatatttccaattattaccagttttaaaaattaccttaaaactgttattaatcatggaaatttttatttataaaaaatattaaaaatttttttttaatatttctattgacaattaatagttagt

SEQ ID NO: 6264 - DNA, 1677 bp, unidentified
  source 1..1677: mol_type = unassigned DNA; note = element_9b61760
  misc_feature 1..2: note = core
  misc_feature 3..272: note = LE
  misc_feature 273..1454: note = CDS
  misc_feature 1455..1677: note = RE
  misc_feature 5..249: note = bridgeRNA
ctcgtataatataagagtagtagtttttaaagttcctctccaagaactgtataaaaatgctatactgtaacggatgctgtggattggtgtgatcacctaccgcgagacggtttcaaggaggctccgaccacagccctttacgagtttgttaattagttagataccgcaggcaagtggagatgcaagacggttaatttagaacgaggttacaagacgtaaagtgccctgtggattcgtacagcatcaaataaacaaactgcgaggtatctattatggtttatgtcggaatcgatgttgcaaaggacaagcatgactgctttatcgcaaactccgacggtgaggttctgtacgatgtgtttaccatacagaacaacatggatggctttgaagatctgttcttcaaaataaagaccgcgtcaagggatctgagtaaagtgaaagtaggacttgaagccacgggacactactcctgcaacattctcgaatttcttcataacaaaggtctgaccaccatcgttatcaatccattacacacaaacgcttaccgaaaaagtctcagccttcgtaaaacaaagacggacaaggcagacgcacgtgccattgcaagtatgatcatgtctgacgtgagcttaaagccctactcagacacagtataccacaatgaagacctaaagtcactatccagatacagatttgataaagtttctgacagatcaaagctgaaacaatctgtttcccgccttgtaaacatcctgttcccggaactcgaaaagcttgtatcaacacttcacacaaaagctgtgtatgagcttctttccgagtttcccggcgctcatcaggtcgcatctgccaatctgaagcatctgacggctttgctttccactgcatccaaaggacatttcggcagagagaaagcaaacgaaatccgtgaagccgcgagacgctccatcagtacatatcttccggcaaagtcattggagctcaggcataccatcaagctgatccgtgagcttaatgcagaaattgctgagattgagacagagatcaaaaagatcatggattctattgattctccgattctttcaattccgggtatcagttacggcattggttcaatgatcgtatcggaaatcggggatttttcccgatttgacagcccggacaaaatacttgcttatgccgggtgctctcctacaacatatcaatccgggcagctttattcatctcatgcagtgatggaaaaacgaggttcaaggtatttacgttgggcgctcatcaatgctgccagatacgtttgcaactgggagccaacttttgcttcctaccttgagaaaaagcgttccgaaggcaagcactattatgttgcattatcccatgctgccaagaagcttgttcgcttgctttatcaccttgaaactacgggcgaaaagtatattccacaaactctctcttgaacccgagctaacaaatacatactgtaccagccggcgcagcgtacccttgacaaaccgaagcattcagatgctacaatttttcaaaacgagggcgcattccggctttgttgtcttactctctccgtcgccctcgctgccttttctcagcatctgaatgctgtttgtcaagggcggcgcattttttaacttttttcattttggggcttgacatttaatagttagt

SEQ ID NO: 6265 - DNA, 1595 bp, unidentified
  source 1..1595: mol_type = unassigned DNA; note = element_9b78c6b
  misc_feature 1..3: note = core
  misc_feature 4..288: note = LE
  misc_feature 289..1470: note = CDS
  misc_feature 1471..1595: note = RE
  misc_feature 13..265: note = bridgeRNA
cttgtataatgtatttaggtttttataaaggatttacctataaacctattgcctcaatagttatatttctatataattattgaaattagatagagtgtcgctcacagctccttgaagtttgtcttcgtgattagaaagactagcgcctctttcttataggctgtttatgaatgagttggatgttggttactttttaaagtttctctccgtatatataacaaggttgtaacgcgtataagagtagaggatttacactatctaaaatatttatttttgaggtgttcttttatgttttatttaggtattgatattgctaaaaatactcatgtagcttctttaattgatgaaaaaggtaaaaacattttcaaaggtttttctttttctaattctactgatggtggaaaatctttacttgatattatcaagaaacatgttgacttttccgacgttactgttggtatggaagctactggtcattactggctttctatttattctttcctttacgactataactttcattctatccatgtcatcaatcctattcaaactgatggctggcgtaaaggtactgaaatccgtaaacgtaaaaatgatattattgattctgtcttaatcgctgatcttattcgctacggggattttgtggaaacttctctttctaatgaggatttattttctcttagaaatatttgtcgtatgcgtaattatcttgttcagtccactggcgatttaaaacgtaaaattatttgcgttcttgaccaagtatttcctgagtatcaatctattttttctaatacttttggaactacctctaagcagttacttttagacttttcttctcctgctgattttgaagaactttctgttgattttctatctgaaactcttcaaagtcttagtagaaaaaaggttggtcaatctactgctgaaaaacttattaattctgccaaaaattcttttggcattactttttcaagagaaagttttacttttcaattaaaattattaattgaacaaattaaatttattgaaggtcaaatcaaagattgcgaaaccaaaatcaaggaattaatgaaaaaaattaattctcctattactacaattcctggtattggtactgttcttggtgctgtaattcttagtgaatttggcgatattaatcgttttgataaaccttctcaattagttgcctatgctggtattgatgcaacagtttctcagtctggtgaatatgaaggttctcacaatgtgatgtctaaacgtggttcaccatatttgcgtaaatccttatttcaagctgctttggttgcttctaactctgatccagttttaaaagcatattatcaaaagaaacgagctgaaggcaaacaccacaaaacctgtattggtgctgttgcaagaaaattgtgcaatattatttatgctgttttaaagaatgacaaaccctatcaagtgcctaagcaatagttgtttttaatttacatatattaccagcaaattttattttttaatttgcttatttgtgatgtcattttttgtattaaaaatttttttaaatttttttaaaaaactattgactttttatagttggt

SEQ ID NO: 6266 - DNA, 1385 bp, unidentified
  source 1..1385: mol_type = unassigned DNA; note = element_9b7ba16
  misc_feature 1: note = core
  misc_feature 2..70: note = LE
  misc_feature 71..1102: note = CDS
  misc_feature 1103..1385: note = RE
  misc_feature 1138..1380: note = bridgeRNA
caatggtatggacctcgccaccctcacacggtgatcttatgaaggtcaattgaagcaaaggaggaataccatggagatcatccgaattggtttggatttagcgaagagcgtttttgaagtgtgcggcgttgatatgcgagatcacgttgttttgagaaagaccctgcggcgcgaagcggttccgcagttctttgcggaattgccgccttgtctaatcggcatggaagcctgcagtagctcgcactattgggcgaaggtgctcactgatcttggtcatcaggttcgcttgatcgctccgcagtttgtaactccgtatgtgaagtcgaacaagaatgatcggaacgacgctgaggcaatctgtgaggcaattagtcgaccatcaatgcgctttgtgccgcctaaatcttctgaacaacttgagatacaggcggtccaccgtatccgccaacgtttggtgtctagccgaacccgacttgtgaaccagatacgcggcctgctggcggaacatggcgttgtcattggccgagacatctcgcgacttcgccgagcgttatcgcaaatcgtggagggggcggatcgcaatcttggcgatttgatccaagaactggcgtctgacattcatcaggaattagccgctctcgacgaacgcatctcttcctacgaccgcagaatccggaaccttttccgaacaaacgagatgtgtcagcgcatcgggaagatcgagggtattggcccgatcaccgccacagcactggtcgctgcagttggagaccagtcctgctttgagaatgggcgccagtttgcggcatggctggggctggttcccaaacaaaaatcaagtggggggaagtctcgattgtttgggatcagcaagcgcggtgatcggtacttgcgtacgcttttgatccacggagccagagctgttcttggcaaagctggtggaaaacaggacgccagaagcgtctggatcaaccggatgcgtgagcggcgacacccaaatgtagttgcagtggcccttgccaacaaaaatgcccgaattgtgtggtctatcttgtccaaaaacgaggattaccgcggacccgaaacgccacaagcagcctgagaagagctcagacaaaacgaataaaggaggacactcccgacagaattgcagcaacttggcaagggatggtgagacaacacgtttcgtagcttcttaaacctgatgtgtggaccggcacggcgaaagcctatgccttggagccaatgaggaagaagcgagcggaaatccatcggggctcgcggcgacgatacttcgggccgcattcagaagccggatatacgtcagcaaccgtgaaacctatccagctctaactaaggcgttgcaaaaaggcggggtccatata

SEQ ID NO: 6267 - DNA, 1735 bp, unidentified
  source 1..1735: mol_type = unassigned DNA; note = element_9b826a5
  misc_feature 1..2: note = core
  misc_feature 3..71: note = LE
  misc_feature 72..1238: note = CDS
  misc_feature 1239..1735: note = RE
  misc_feature 1288..1504: note = bridgeRNA
agattctatggggcgagcggcgaggagattgtatccatcggcgcgaatgtaaacccagcgatggagcccccatgccacagcagcgcaagccgaatgaccttagtcgatccctgaccgccctcgacatggatacgacgttgattgccgttgtcgagttgagcctgtcgagttggctggttgccggtatcgtgcccggcgtcgagcgccagccgctcaagaagttgaagacggatgagagtgccctcctggcgctgcttaatcgctggcgcgatgaagcggtgaggtcgggatacaagatctcgcgcatcgccgtggccttcgaagccggccgcgacggcttctggctagcgcgctggctcaatgctcggggcatcgaggcccatgtgatccacgcgtcgagcgtggccgtgtcgcgcgagcatcggcgggccaagacggatcggctcgacaccgagcacttgaagcgagcttttgtgggctggctgcggggcgagcgtgatcactgcaagatggctgccattccgagctttcgggaggaagatgccaagcgaccgagccgggagcgcgagagcctggtcggcgagcagagccggctcgtcaatcgtatgaaagcaacactgatccggctcgggatccggggcttcaatccgaagctgcggcatgcggagcagcagctcgaggcgctgcgcacgcccgagggtgagccgatcccgcccaacactctggccgagctcaagcgggacatgcaacgccggcggttcatctgcgaccagatccggagcattgagcaggagcgccttgagcgtttggagcggacacccgacaccaagccgcatgccatggtgcgcctgctggcacgcgtcaccggcatcggcatcgagaccgccgacttgcttgtgcacgagctgctcctgcggaacatgcgcgatcgccgggcggtcgcgcgctacggagggctgacaggctcgcccgaacggagcggcgccacgagccgcgagaaaggtatggcccgatcgggcaatgcccgtgtgcggcgtggcatggtccaactggcgtggcggttcctgttgttccagaaggatagcgcgctggcgcaatggtatcgccaacgcacggaaaaggctccgaaagctcgcaagaccatgatcgtggctctggctcgcaagctgctgatcgctctgtggcggctagtgcgggaaggcgtgataccggagggtgtcgtcatgcgcccggcctgaaaaacgcgacctgtgctccagttcgccaatcgccttacagtttcggctcgatccgcactgtggtgacgggttgccgatgacggttcgaggtggcggggtcccgcgaaaaccatggctttcatgccgttgtgcagaatgggtccgccgcctcggagcttcgctgccgatgcgcacgagtgcatcatggttcgggtcttcgggacccgccgaatacaaggttgcggcgcgaatgatcgcgcccgaaagcgggcttccctctgatcgtcatcccgaccgcatcgagagtgccgtcgtgctcgaagccgtcaagatgtggcctggtggcgcatgctgcaaggttggtgtgacggcgaaccttgacagctcctgcgcgcgccgacgtgagcgaagcgcgggtcggaacgaggaaacgggcttccagatcgaacaaagaaactgaagaaggaaagcagatgagccgccctcccgaaactccttgacaaaaaaagccccataca

SEQ ID NO: 6268 - DNA, 1219 bp, unidentified
  source 1..1219: mol_type = unassigned DNA; note = element_9b82d14
  misc_feature 1..2: note = core
  misc_feature 3..247: note = LE
  misc_feature 248..1204: note = CDS
  misc_feature 1205..1219: note = RE
  misc_feature 31..239: note = bridgeRNA
cttgtatggtttagctcccatcaaccaacctgtaagaaagggcgaggagccgggatgcagggacatcgacaggcatcggcagttgcttcagacccaaccgaccgacacactgagtcattaccccatccctgcgccgagcgtcgataaggaacctgacgagggcaagctgcgcttggcagcaccgatcgtcaattcttgcaagctcacgccgacagcaggacacatcccggcgctcgtattttgagcgatgaaccctcaacaagctactgagtttgtcggcgtggatgtcgccagcgcccatctggacgtggccgtgcagggccaggccagcgtgcgccggtttgctaatacaccccagggcattgccctgctgctgcgcacgttgcgccctgcaagcgtactggcgctggagtccaccggccgctaccacgtgccgcttgcgctggcagcgcacgccgcaggcctgcatgtctatgtcctcaatccgctggatgcacgccgctacgcccagtccgttggccagcgcggtaagaccgatcggatggatgcgctcgtgctggcacgctatatttgccgtgaacacgcgcaactgcgccaatggcagccacccaccgcttgccaagccgtgttgcgcgagctcctggcccaccgggcaactctggtgcgccagcgcagtgcattggcgcaggcgggcaaccacagcaaagacctggcgcgcctggacgagccggtgctggcagctctgcagcaagccatcgaacatatcgacgagcaactcgccagcaccgttcaggccgatcccgcaagccaagaaacgttcaaatgcatcacgtctgtgcccggcctaggcctgatctgtgggtcgctgctggtaatgctgtttgggcgtttgcaaacacgcagtgcggatgctgtgatcgcattcaccgggcttgacccgcgccccaatgactctggcaagaagacggggcaaaggcgcttgtccaagaggggctggccggagacaaggcgtttgatgtacgcagcggccatgtcggcggcgcgcacaaagacctggaacggctattactgtgctcagcgtgacaaaggcttgagcacgactgctgcgcttgtcgtgcttgcccgtaagctcttgcgtgtggctttctcactgttcaagcagcaagctctgttcgatcccgcgctggtcgccggcagaacttgacgggaaccatagaac

SEQ ID NO: 6269 - DNA, 1360 bp, unidentified
  source 1..1360: mol_type = unassigned DNA; note = element_9b91672
  misc_feature 1..2: note = core
  misc_feature 3..296: note = LE
  misc_feature 297..1100: note = CDS
  misc_feature 1101..1360: note = RE
  misc_feature 1079..1347: note = bridgeRNA
cgatggggtggacgcccctccgacggcatcgatgtgccagactggtggtgtgatcaccatgttgaggaggagacgtccatggaagagattagcgtagtcggcgtagatctggcaaaaaactattccaagttcacggagctacagccgatggcaggcccgtattcagcaagaaggtacggcggtcaaagctgctgtctctactgactggcattccgacttgcaccgtggccatggaggcgtgtgccagttctcatctttgggggcgcgagatcggatagcttgggcataccgttaagatgatcccaccgatctacgtgaagccttacgtcaaacgacagaagaacgatgccaatgatgcggaagcgatcgctgaggcggcatctcgtcccaccatgcgttttgtcgccgtgaagagcgcggagaaacaggcatcaggcttggcgctgcgaacccgtgacctgctcgtaaggcagaagacccaaacgattaatgcgctgcgtgggcatctggcagaatacgggctggtagctccttctggcacagttcatctcaaccggttacaggccgcgatcagtcatccagaaacagaactgccagccgccgtcattaaccatgcccaagtgcttttggatcatatcgagatgcttgcaggcaagatcgacaaattgggtgctgagctacgcgctggtgcccggcaggatccagcagcaaagcgcttgatgacgatcccaggtatcgggccgatcacggccatggcccttaccgctctctctccagacccaagcactttcagcaaagggcgggacttcgccgcctggaccgggctcacgcccaagcaattctcatcgggcggcaaagaacggatcggacgcaggtcgaagatgggccagcgcgacctgcgccgccttcttgtcatcagtgcggcatctgtcgtgcggtgggccattcgacggggtgcggatcagagtggttggctcgggcagatgctggcacgtaaaccaaggatgctcgtgaccgtcgcactggccaacaagttggcacgcattgcctgggctctgatgacgaagaatgagaattacaagaacccggctttcgcctaacccagtagggtggcttttgccggtcatgtgagaaggtcggaggtgaagtaaggacaaacggtcaatgagacgggatcagggaaaccaggcaccaggccgtgcgccttagagcgcgcgtatccgagttggacctgatccgcgcatctccatacgggcccgtggcgtgtcaaagctacattcagaggccgaacacacgacagcacctgaccacatgttcatacctgccaaaaacttcttgcattcaccggggcgtccacaca

SEQ ID NO: 6270 - DNA, 1354 bp, unidentified
  source 1..1354: mol_type = unassigned DNA; note = element_9ba5de8
  misc_feature 1: note = core
  misc_feature 2..69: note = LE
  misc_feature 70..831: note = CDS
  misc_feature 832..1354: note = RE
  misc_feature 1120..1352: note = bridgeRNA
taatgagatggtcacccccaccctgtgagcggtacgctgacagggtggattattttagagggcaccatcatgcaaaacgttgcgcttattggtatcgatctcggtaaacattcttttcatattcattgtcaggataaatctggcaatgcgcttttgcgtaagaagtttacgcgtacgaagctgatgcagtttctggtaacatgtccatcctcagtagttgttatggaagcctgcgctggtgcgcattttatggcccggcgtatcagcgacatcggtcatgacgtaaaacttatctctccgcaattcgtgcgtccatttgtcaaaagcaataagaatgattttattgatgcagaagccatatgcgaagcggcttcacgaccatcaatgcgttttgtccagcccagaacagaaacccaacaggcaatgagggcattacaccgggtcagagaatcgctcatcagggataaggtgaaaacaaccaaccagatccacggtttcctgctggaatttggaatcagcctgccgacaggggatgccgtaataaaacggttgtctctggtgttggctgaacacgaaatacctgaatatctgagtcgcttgctgatgaaattacatgctcactatctttatcttattgagcaaataacagaactggaatcagagttaaaccagtcaatcaaagctgacgctactgcgcaacgcattatgacaatacccggtgttgggccgattacggccagcctgctctcatcccagcttggtgatggtaaacaattttcatgcagcagggattttgcagcatccacaggacttgttcccccgacaatatagtaccggtggtaaatcaacgctgctggggatcagcaaacgaggcgacaaaaatttgcgtcggttacttgttcagtgcgcccgctcgttcatgatgcggctggagcatcaacagggcagactcgctgaatgggttcgaaaacaactcgacaacaagcattcgaatattgtcgcctgcgctctggcaaataaactggcccgaatagcctgggcaatcactgttctgcaaaaagaatatcaggcttgatatatactgacaaaactcaattagcttattttaaacaataagatacaagttacctgtctggttttgcgaagactgattattgatgacatgaacggcaaatcgacctgattaaaaacctaacagagaaaatggctcactgaagccgagggcctttttaggattatcaggtgcggaactcatcgaggcgcgggcctccttgcccacagagacgccggatagatttaagcaagcccaccattaatcaaaaatcagtgttgcaaaaacgggggtgaccataga

SEQ ID NO: 6271 - DNA, 1392 bp, unidentified
  source 1..1392: mol_type = unassigned DNA; note = element_9ba7660
  misc_feature 1..2: note = core
  misc_feature 3..130: note = LE
  misc_feature 131..1156: note = CDS
  misc_feature 1157..1392: note = RE
  misc_feature 1175..1354: note = bridgeRNA
acatggggtaatcgcgggagcgagtcgccctgaagaccaaccaacgccttggagggtggctgttccccgataggatggaaatacgggctcacgactggcgccgggcccaaacatcgaatggagaacagccatggaagaatatatcggtcttgacgtgtcgatgaaagagacggcggtatcgatccgccgtgaaggcaagcgcgtctggcgcggcaagtgcgcctccgatccaaggggcattgccgagcttatccgcaagcgggcgccgggggcaaaacgggtggtgtttgaaactggcccgctatcggtgtggttctatcatgcgttgcgcgccgagggggtgccggcgatctgcatcgatgctcgccatgccaaagctgctctcgatatggcgccgaacaagaccgacgcgaacgacgccgatggtttggcgcatcttgcagaagtagggttctttcgtgaggtgcgggtgaaagggttcgacagcatgctgacccgcacgctcgtggcggcgcgcaaccggctggtccggatcaccaccgagctttcgaaccagatccgaggcttcatgaagacattcgggctgctcgttcctgcaggcaagggaagcacgttcgagaagaatgtccgcaaactccttgtcgatcaggaggggctcgcaactatcgtgctgccgatgctggaggcttggcgcagcatgcgcatccgtgccgccgaacttgggcgccagcttgtcgcggctgcgcgacaaagccaagcctgccaaatactgatgtcgatccccggcgtcgggacgatcaccgcgaccgctttcgccaccgccatcgaggatcccgataacttcaggaagtcccgctcagttggcgcctggcttggattgacgacccggcgctaccaatcgggagaagtcgactatgatggccacatatctcgacgcggcgatcaccatctgcgcggccttctctacgaggcggcgacagtcatcctgacccgcagctcgatcgatagtgccctacggagatggggtctgaagcttcgcgagcgggtcggcttcaaacgatctgccgttgccgtggcacgaaaactagccgtgaccatgcacgcgatgctcaagtccggcgcactctttgacaggaacgcaggagccacggcgtgaccaccagcggatagcgttcaagacctgagcgcttgagacgtccctgccgggacgtgggctgaactattccgattttgcggctgcgcaaagcctcgctgagagcgcgttggacacattggaaagtcacccgcgaagctccatcatgcggcgactgatgtcgaccgcgaagacgaccctgcacccggcaaatgcatctcaagagcaaagacgcttgacaaagccgacgcgattagacg

SEQ ID NO: 6272 - DNA, 1569 bp, unidentified
  source 1..1569: mol_type = unassigned DNA; note = element_9bac376
  misc_feature 1..2: note = core
  misc_feature 3..248: note = LE
  misc_feature 249..1424: note = CDS
  misc_feature 1425..1569: note = RE
  misc_feature 3..225: note = bridgeRNA
ctcgtataatatagtcatagcttaggttgcttttaataaaaatttaagctatgctgttttagatactgtggattagttttcaactcctaccactagatggttttttgaaggctctaaccacagtctctttgttaatttgttaatcagttagataccgcatgacggtttatgtagaacgaggctacaattgcaaggagtacccgtggttctaaaacagtatcaaatatttattcaagaggtgttttcaattgactattttagttggtattgacgttgctaaagataagcacgactgcttctttatgaactccgaaggtgaagttcttgccaaaccttttactattttcaataacaaagaaggtttcgattttctttacgaaaaaatccaatctgtctcttcttctgacaatataaaagtaggacttgaagctaccggtcattacagctataacatcattggattcttgttgaacaaaggtctagccacctttattcttaacccactccacacaaatctttacagaaaaagtcttagccttagaaagacgaaaacggataagattgattctaaaaccattgctatgatgttattgtccgatgtaagcttaaaatcctactcggatatatcttaccataacgaagatttaaagtcactaacccgttacaggttttctaaagttgaagaacgcgctaagcttaaaacatctctttcccgcttagcacaaatccttttcccagaacttgaaaaactcgttccaactcttcatatgacctctatttaccaattgctggaagaatttcctagcgcatcagctatagcttctgtacatctgacaaggcttactaatctactctccaaagcctcaaaaggtcactatgaccgtgaaactgctattaagattagagatgctgccaaaaattctatcggctctaatatgccagctaaatctcttgagctaaagcatactattaagcttattcgtgcactgactattgatattggagaaatagaagcagagatttctaaaatgatggataagattgcttctcctatcactacaatacctggaatcggacgtaatatgggagctatgattatctcggaaattggcgatttcagccgcttttcttctccagataagattttagcttatgcaggcttttctccctctatctaccaatccggtaaacttgataactgctatgctcatatggaaaaacgtggttcacgctatttgcgttacgcattgtttcatgctacgaaacttgtatgccattgggacaaaacttttgcagattacttagcgaaaaaacgtgctgaaggtaagcattactatgttgctatatctcatgccgtaaagaaattggttagggtgatcttccacattgagaaaacaaagcaggcttttctgaaagcttcttgactttacttaatttgatactgtctttgaaagcaccgtaaacgatgctttatttgtcatgcgttttttcaactaacctaataaaaattcaatgtatctatttggtttaagttttttatctttacccccttgactttttatagttagt

SEQ ID NO: 6273 - DNA, 1142 bp, unidentified
  source 1..1142: mol_type = unassigned DNA; note = element_9bad4d8
  misc_feature 1..2: note = core
  misc_feature 3..208: note = LE
  misc_feature 209..1129: note = CDS
  misc_feature 1130..1142: note = RE
  misc_feature 12..191: note = bridgeRNA
cttatctcttgacgatctgccagattagttgtcgagagccggcgtggtcgggcgtcacaccttgggtgctacgaccgcgggagagcaagctcgccacgccggaatctccctgcacacgcccgaacagttgctcgagtaggcgctcgtaacgataaggctgggccgcaagggagggctctcgaccctggcagcttaccggagatgggcaatgggatacggcgtaggacttgatgtgtgcaaggcatggatcgacgctcacgtgtacggcatggatcgtcgggctcgattccccaacacggctaccgggcttgaggccttgcgtcactggttagccgatgtgccggtgcgccaatgcgtgctggaagccaccggaggctacgagcagcaggcactggatcacctgcatgcggcaggcgtgccgatggtgcgggtcaatccccgacagggccgcgactttgccaaggccaccggccaactggccaagaccgatgcgctcgatgcccaggtcctggcacacatggcggcggtgctggagttgacgccgtatcgcccctcaccggcctggcagcgccgtctggcgcagtaccaccagcgtcgcctggatctgcagcaaagcgtgcagcaggaacgccagcgactggagcagcttaccgacccttggctgcgtcggcagaccttgctcgccctgcgtcgtagccaggccatgctcaagacgctggatgcccgcatcgcccagcaggtggccgagcagcccggcctggccgtgctgggccagatcaagggcgtggggccggtgttgcgctcggccctggctacgcagttgcccgagttgggtcgcctcagtggcaaggccatcgccaagctggtgggcgttgcacccttggcctgcgacagtggcaccttgcgcggcacacgccgcatctggggcggccgggcgggccttcgggccacgctgtacatgggtacgttgaccgcagtgcgctacgaaccgactctgcggtccttctaccaatcgctccgcgatcgcggcaaaccggccaaggtcgccttggtggcatccatgcgcaaactgctggtcatcctcaacgcccgcatgcgggaccatctgaacgcttcccactgcgcctgaatcaagacagttg

SEQ ID NO: 6274 - DNA, 1510 bp, unidentified
  source 1..1510: mol_type = unassigned DNA; note = element_9bb44ca
  misc_feature 1: note = core
  misc_feature 2..123: note = LE
  misc_feature 124..1140: note = CDS
  misc_feature 1141..1510: note = RE
  misc_feature 1206..1479: note = bridgeRNA
gaatgaaagggacatccccatcctgagtcgggcggccgccggttgagcgcggccatgcccggcaagcggtggcacgatggggttgcgcattctcaacgtgctgagccttggaaggagatgtccatgaacattgtctttctcggtatagatctggccaagaacttgtttgctctgcatggcgtggatgccagcgggcacgcctgcttggttcggccttccgtgcggcgcgaccagttgctggagatggtggccaagctgccgccttgcaccattggcatggaagcctgctcaggcgcacatcactgggcacggcagttcgttcgctttggacacgtcgccaagctcatggcgccgaagttcgtggcgccgtaccgcatgggcggacgccgcggcaagaacgacgctgccgacgctgctgcaatctgtgaagcgctgcagcgcccgaagatgcgctttgtgccggtgaagagcgagcttgcgcagtcacgcttggcggtacacacactgcgccagagctggatcgtggcgcgcacggcagccatcaaccggctgcgtgggctgctcagcgagttcggaatcgtgctgcctctgaaggctgccacggtacgcgcgaacgcggcccagcacctcgaggctctaccggactggatgaagactgtctgccttgacctattgcaggagctgcggcaccttgatgagcgagtaaacgaatacgacgctcatgtacgggcgattgcgcgggccgacgagcgtgcacggcgtttgatggaagtaccaggtatcggcgctaccactgccagcgcgttactggcaagcattggatatggacacgatttcaagaatggccgccagcttgctgcctggcttgggttggtacccgggcagcacagctcgggcggcaagcaccgactcgggcacatcaccaaggccggcgacagctacctgcggtcactgttcatcctgggcggcagagcggtaatggcagccgctgcaaacaagcgcgaccggctcagtcgctgggcaacgagcttggcagagcggcgcggctactggatagcagtggttgctatcgcatcaaagaacgctcgcatggcgtgggcaatgcttgccaaggatgaggctttcaagcctgtagggtgagcatactggccacaaagcgaaacccacgcagtccaggagagaaccttaccgcatctgcttttgaatctgccaccgcgagatgcctgcattgatgagtaaagggtaggacccgcgcggggagtgctcgttgaccatccggatggcgccattggcgacctcggctaatgaatggagccttcgcgcgcgtctttcatcagggcccgcagcaataaagctgcattgaaggccgtttgtagacattcagtccgcatccctactcacttgaaatgcaggtgacgttgatggcaattcgatagacgagcttccatgacaaatcgcgatgcgatctgtcatggcctgctttcgcttgacggcgggggatgcccttgta

SEQ ID NO: 6275 - DNA, 1362 bp, unidentified
  source 1..1362: mol_type = unassigned DNA; note = element_9bb92be
  misc_feature 1..2: note = core
  misc_feature 3..73: note = LE
  misc_feature 74..1108: note = CDS
  misc_feature 1109..1362: note = RE
  misc_feature 1081..1350: note = bridgeRNA
tgatggggtggacgcccccgacggcatcgctgtgccagaatggcggtgttgcaaccattggagggaggcgtccgtgcctgaggttaccacgatcggtctggatatcgcgaagtatgttttccatgcacacggtgccgacgagcgcggccacgcgcttttcagcaagaagctgagcagggggaaggtgttggactttttcgccgcccagcctgcctgcaccgtcgctctggaagcttgcggcggtgcccatcactggggtcgcgagctgatggacatgggccatacagtccggctgatcccgccggcctacgtcaagcccttcgttaagcggaacaagaacgatgccgtcgatgctgaggcgatctgcgaggcggcgcaacgcccgaacatgcggtttgtcgccgtgaagagcgaggagcagcaagcagcggcgctcgtgttccggacccgcgatctcttggttcgccagcggacccaactgatcaacgcgatccgcggtcacctgacggaatatggctgggtcgcgccgaagggaccgtcctatgtggcgatgctggccgacctgctcgaggaagaggagatggcctcctcgttgccgccagccgccctagcgatgatcaggctgatgctggaccttctgcccgaactggacgggaggatcgccgaactcgaccgggaaatcgcgcggcgcgcccgcgaggacgcggtatcgcggcggttgatgacgattccgggcgtcggcccgatcaccgcgaccgcaatcgccgcgctcgcaccgccggccgagaccttcgcgaaggggcgcgacttcgccgcttggctcgggcttgccccgctgcagaagtcgacgggcggcaagcagaagctcggcgccatctcaaaaatgggcgagcgcacgctcaggcgtctgctcatcatcggcagcatggcggtcataaaacaggcagcaaggcgcggcgcaccgaagggctcttggctggaacagatgctggcgcgcaaaccgcgcatgctggtggcggtcgcgctcgccaacaagatggcacggatcgtttgggcgctgctcatgaagcaggagagttacaaggctccggccgcggtcacggcgtaagccggacgggcctgaggtcgtcggagacgtggtcggtcgaaggagggtatggcacagcagtcggcgagacggggccggaagaaccagggctcaccaccgtgtcagcgagcacgcttagggtgatatggttccggtccgcgcactcccatacgggcccgcagcctttgcgctgcatcaagaggccggacagatggcagcatccgacaacgtgccaaccgccgaaaaccgcttgcgtcttacggggcgtccacaga

SEQ ID NO: 6276 - DNA, 1572 bp, unidentified
  source 1..1572: mol_type = unassigned DNA; note = element_9bbaf6f
  misc_feature 1..2: note = core
  misc_feature 3..277: note = LE
  misc_feature 278..1462: note = CDS
  misc_feature 1463..1572: note = RE
ctaatatatatatgtagtcctcagatatacattagatctccttctttttagatttttatagacggactattttataattgaattatagatcacatcacagactagtttatttcatccttacagcgtttgactggttcggaaaggatatagctgtgactttaattaaatatggtaatgagttggatacagcacattgactggttatttcttattaggttacatcgattaaagattcatagcgataagcatgtgttgatctatagaaaggattggttttatgatttatgtaggcattgatgtcgcctcaaccaaacatgacatcgtcattttaaatgagtcgggtgaaatctttaaaaaagctttctcaattaaaaatgatttggatggatataaaaaactccttagtgaaataagtttcgctaaagagttcttcaatgatcaaaatgttcgtatagggcttgaatcaactggacattacagtagaaatattctacactttctcatccttgcagggtttgaggtgatgttcattaatccattattaaccaatatggaccgtaaggctaactctgttcgtaaaacgaagacagatgctattgacgccaaggccatttgtatgtttcttattagaaatcaaaatgatttcaaaccctatacactttcatcttatcacattgatgaactcaaaacactcgtaagacagagaaaatctctgaaaacccaaatcaataaagaaatgaatcttcttcacgcttatgtgattcaggcttttcctgaatactataagatcttcaagaaaatcaattctaaagcctccatggaggtgttaagtcgttatgcttctttatcagaatttaaacgcgttagattggaaacactcaaggaattgatcaggaaatcatcgaaaggacatcacgggatcagagaagctcaaatgcttaaagatcttaactcatcctcgattggtattgatagctcagcgctttctttttccattaaacagaccattaaacgtattttaatgatcaaggaacagatttgtgatatcgaacatgaaatcaaacatcatgtcgatgaatctcatacgacacttttatctgttccaggtattggttatacaactggagcgattattctcgctgaaattggtgatattcatcgtttcaaaaccaatgatcaacttctagcttatgctggcctagatccttctgtttatcagtcaggtaattttgaaggtagttataagatttcaaaacgcggatcttctattttaaggttcgccatttatcatgtcgcgcaagctgcagttaagtttgatcctgtttttaaggcttactatctcaaaaagaaagctgaagggaaacgtcatcgtgtgattattggtcatgtcaccaaaaaaatccttagggtgattcgttccattttaaagaacaattcaacttattcaataaatactcattaacatatttaaatttcaaagatctagatgtgtcatcaggcattctttttagtatgcctttatatcataaccactatttgtttattttatcttgacttatattaaatagttgg

SEQ ID NO: 6277 - DNA, 1337 bp, unidentified
  source 1..1337: mol_type = unassigned DNA; note = element_9bbbe31
  misc_feature 1: note = core
  misc_feature 2..66: note = LE
  misc_feature 67..1071: note = CDS
  misc_feature 1072..1337: note = RE
  misc_feature 1102..1336: note = bridgeRNA
aatgagatggtcacccccaccctgtagcggtaagctgacagggtgttttattttgggagaatcatcatgaacagcgtatctcttatcggtatcgatcttggcaaaaattccttccatgttcactgccaggataacacaggcaaagccctcacccgtaaaaaattcactagaccgaagttatttgagtttcttgtaaattgccctccagcgattgtcgttatggaggcttgtgcaggtgctcactatatggcccgtaaaatttcagacatgggccatgagccaaaattgatttcacctcagtttgtccgccccttcgttaaaagtaataaaaatgattttgttgatgctgaagcaatatgtgaagcggcatcacgaccatcaatgagatttgttgcaccaagaacagagtctcagcagtcggttctcgcgttacatcgagttcgagagtctcttgtcagagataaagttaaaacaactaatcaaatgcatgcttttttacttgaattcgggattagcatgccaaaagggctcgcggtgatcagaaggctttcagacgtgcttgctgacaatgaattaccgccatacctgactaagttactgatgcgattgcacgatcattacctatacctggttgagcaaataaaggatattgagaacgagcttgagcaagcggctaagcaagacgaaacaactcagaggcttatgacaatccccgctgtgggcccaataaccgccagtgtactaatggtacatcttggtaacggatcgcagtataagcaaagcagggattttgccgcagcaacaggcctcgttccgcggcaatacagcactggcggaaaaccaactctgctggggatcagtaagcgaggcgacaagaatttacgcaggctactggtgcaatgcgcaagagtgttcattcttcaccttgaacatcagtcggggtacttggctgaatgggtgaagagccagctaaccagaaagcattcatgtattgttgcttgtgcgttagcgaataagctggcacgtatcgcttgggcgataacaacgaaaaagacagtatttcagagttagcgtttagctggcactaaaatttgctgaaaccgcagttactatctggttttgcgaagactggatattgatgatatgaacggcataccggccagatgaaaaacctttaaagacgaatggctctatgaagccgagggcctttttatggttcatctggcgcagacctcatcatggcgcaggtgaagagttcacctaatatgacgccggatagattcaagcaggccatcatccatcgaaaaactgtcttgcaaaaaagggggtgaccatag

SEQ ID NO: 6278 - DNA, 1433 bp, unidentified
  source 1..1433: mol_type = unassigned DNA; note = element_9bcab93
  misc_feature 1: note = core
  misc_feature 2..41: note = LE
  misc_feature 42..1151: note = CDS
  misc_feature 1152..1433: note = RE
  misc_feature 1192..1432: note = bridgeRNA
atgatatgaacgcctcccacccgtgagcggcaggagcgaagatgaaggtggactctcacgggccgacggcatcagagtgcccaaggtggaagatcatgacgattcttcacaggcaaaccggagggtccgaaatgaagcttacgacagtgggtgtggacattgcaaagaacgtgatgcagctccattacatcgacgcggagaccggcgagatcgtgaacaaacccgtgaaacgggcagcgtttctcgaacattttgcgaaccggtcgccgtgcctgatcggaatggaggcgtgcggtggttcacaacactgggctcgcaagctgatcgcgatgggtcatcaggtgaagttgatgccggggaagttcgtcaaggcgttcgtgatgggcaacaagaacgacgcgactgatgcgcgagcaatctggatggcggcgcaacaagcgggcaagtcggtcgcggtgaagacggaaactcagcaggcggtactggggttgcaccggatgcgcgagcaactggtgaaattccgcacgatgcagatcaacagcctgcgtggcttgctaactgaatacggtgaagtgatgggcaaggggcgggctgcactcgataaagcgatgccggatgtcttggaacggctggtggaccgtttgccgagaattctactcgacacactgcgggagcaatggaacggtttgacggaactggataagcagattgccgaaatcgaacggcgtctacaggcgtggctgagagaggacaaggcgtgcaaggcaattgctgcgataccgggcgtcggcctgctgacggcaaccgcggcagtcgcaacgatgggagatgcgaagacgttcaaatcggggcgtgagttcgcggcctggattggattggtcccgcggcagacgggcacgggcggcagggtccagttactggggatcagtaagcgaggcgatatgtatctacgcaaggtattggtccacggtgcccgcagcgtgctgtgtctcgcgaaggagcctgggccatgggtcgaagggatcaaaaagcggcgcccgctaaatgtagctgtcgtggcgcaagcgaacagaatggcccggaccatctgggcaatcctggcgcatgacagggtgtatgagaaggactacgtgagtgtgaaaccggtttgaccggtgagcgttgcgtagaaggaagatcaatttttacaggatgacacgtcgaaaggttgcgctggcaatcgtatgtaatgacaagacaggtcggaccgggactcgccaagcctgaatcagtggcagagcttcgagctcgctagggaaatgaggcgcgagtcagcggatttcatagtgggccgcagcgaatcgggctgcaacaagcccggatataaagctgcaacccatcctgtcgcagtcagaacacacgaaaaaccgtcgcaaacgggaggcgttcatata

SEQ ID NO: 6279 - DNA, 1398 bp, unidentified
  source 1..1398: mol_type = unassigned DNA; note = element_9bdcb75
  misc_feature 1: note = core
  misc_feature 2..90: note = LE
  misc_feature 91..1119: note = CDS
  misc_feature 1120..1398: note = RE
  misc_feature 1168..1390: note = bridgeRNA
caatggaatggacgcccctactcgtaacggcatcaatgtgccaaagtggaggtgttgtttcgaccacttgaaccgagaggagcgtctaccatgaagattacaaccattggcatcgacttggcaaagaatgtatttcaagttcacggcgttgatgcgcacggcaagaccgtgcttaagaaacagctcaagcgcgaccacgtcgcgaacttctttatccagctggagccgtgcttgatcgggatggaggcttgcggcggcgcccaccattggggccgcaaactgcaggccatggggcacacggtacgcttgatggcgcctcagttcgtcaagccctatgtcaagaccaataagaacgacgtggccgatgccgaggcgatctgcgaagctgtagcacgacccaacatgcgattcgtggcgatcaagacggtcgatcagcaatcggttctggccctgcaccgggcatgtcaagggtttgtccgggcgcgcaccacgcaagccaatcagattcggggattgctggccgaatttggcctggtcctgcctcaaggcatccaccacgtggccaagcgggtgccccaactcatggaagacgcgtcggatgaattaaccggcacatttcgcctcttaatggaacgtttgctggatcagttaaaggcgctggatcaacatgtgcatgaactagaagtccagatcacggcctggcaccgtgccaatccgatgagccgtaagttagagaaggtccctggcattggaccgatcaccgccagcgcgttggtcgcctcgatcggcgatgccaagaatttccacaatggcaggcaggttgcagcttggttgggcttggtgcctaaacagcactccagcggtggcaagccggtcctgctgggcataagtaaacgcggtgactcctatttgcgatcgctactgatccatggggcacgggccgtggttgcccatgcccaacggaaaacccgggctgatgggtggctgaacacgctgctacagcggcgcaatacaaatgttgcggttgtggcgctggccaacaagaatgcccgggttatttgggccttgctggcccacggccgtgagttccgagtggattacgagccgaacgtctcataatccactcggccgattgttgttagcaactgaaaagttaggagcccttccagcgattgctcaggcgatcatgaattgatgacaaaacaggtcagaccgtggttggccaagcccgccgagttctcggcaccttcagtgcgcggggccgattgggcgccaaccagcaaaatccatcagggacagcagcacaaaggctgcaaccaaagtccggatgtacgggtgcaatcattaccttcgagtcatcaagaattgaatgcttggcaaacaaggggcgtccatgta

SEQ ID NO: 6280 - DNA, 1421 bp, unidentified
  source 1..1421: mol_type = unassigned DNA; note = element_9bdcc32
  misc_feature 1: note = core
  misc_feature 2..91: note = LE
  misc_feature 92..1129: note = CDS
  misc_feature 1130..1421: note = RE
  misc_feature 1189..1413: note = bridgeRNA
caatgggatggacacccccacccaaacggcaccaaatgtgccaaagtggaagtgttgtaactaaccacttaattcgataggggcatccatcatgaagattaaaacaattggcattgatttggcaaaagatgttttccagttacatggtgtagatgagtttggcaatatggtcttacgtaaacaagttaagcgtgcacagttagcaatatttttttcaaatttacccgtttgtcttgtaggtatggaagcttgttctggtgctcattactgggcgcgcaaactccaaagcatgggtcatacagtccgtctcatggcacctcagtttgttaaaccttacgtgaagacaaataagagtgatgcggcagatccggaggcaatttgtgaagctgtaacgcggccaaatatgcggtatgtgccagttaaaaatatcgaacagcaggctgtattagctttacacactgttaggcaggggtttatcaaagcacgcaccgcacaagccaatcaaattcggggactgctttctgagtttggtttaatcatacctaaaggaattggttatatcgtatctcgtgtgccggatattttagaagatgcaaccaacgagttgctgggggtatttcgaaacttgatgcagcgtttatttgatcatttcaaagaagttagtatgaaagttaaggcgctaaatatggaaatacagcaatggcatcgaaacaatgaggctagtacccgattggcccaaattccaggtattgggccaatttcggctactgcacttgtagcctcgcttagtaacgcaaaaaatttcgataacggccgccaagtagcggcatggcttggtctcgtccctaggcagcactccacggggggcaaaacaaacctactaggaatgagcaagcggggggactcttatctacgtacattgttaattcatggcgcgcgttcggttatatatcgagcaagcctaaaaaaagataatataaacagttgggtaaacatcttggtgagtagacgaaacaaaaatattgctgctgtggcacttgccaataaaaatattcgtattgtgtgggccttgctggctcacgaccgagagttccgacccgactatgtgagtattaattcatgcgcatagtcgggtcggcctgaagttgttcatgttcactctttaatgagtttcagtatcaaataaccaacgattgcgcaggcaatcatgaagtgatggcaaaacaggtcagaccgtgagtggcaaaacccgagtcggatgcagcacctagagtgcgcgtaagcaattgaggagccaatcagcgtagcccatcagggacagcgggaaaaaaaaccgcaattaaagtccgaatgtacgggtgcaatctttacctactcgctatcatgagttgaacgcttgcccaaaaggcggtgtccatgta

SEQ ID NO: 6281 - DNA, 1169 bp, unidentified
  source 1..1169: mol_type = unassigned DNA; note = element_9be9245
  misc_feature 1..2: note = core
  misc_feature 3..208: note = LE
  misc_feature 209..1156: note = CDS
  misc_feature 1157..1169: note = RE
  misc_feature 20..214: note = bridgeRNA
cttgtaatagcgaaatcgaatatcttcgacttattccgtgaggaatggcctgccgcggcgtgcattccgcggcaggccgctggcgatcggatcgagcccaccctgagcagtttgtggctgccatgtagcgtgatcgcgccagcacttcatcggacccggatggttgccggaacaacttggttcgctttacaaggcagggtcgaagaagatgacacagactatcacaacgacggctggaatcgatacctccaaggccaaactggatatcgcagttcacggtcggaccgaacgctggcaggtcgccaatgctctgcctggctggcgcgctttggcagcgaacttggccaaggccggtgtcacgcgggtcggtattgaggcgaccgggggttacgaacgaggtgtggtggagcacttgcgcgcggcgggcttcatcatgctggtgctgcagccggtccgggtcaaggcgttcggccaggtacacttgcggcgcgccaagaacgatgcactcgatgccgagctgattgctgcatgtaccgctgcgatcgatgatccaaggatcgcgccggatccacgactggccgaactagcgggatatctgaccttcctcgagcaaatcgaggaagacatcgcgcgcctcaagacccggctagaacatgttgaagaaccggccctgcggcgcattgttaacagcgacatcgcccggctgaaggcacgcaagaccgcgcagatacgttcccttgccaagcgccttcgtgcccacagcgatctggaaaggcggctcgatctggtgctgagcattcccggcatcggcgagcgaacggcgctggcgctgatcattcgaatgccagaactcggtcagatcagccgcgaggaagctgccgccctggccggtcttgcacccttcgacgacgatagcggcaagtgtcgggggcaacgccacatcgccggcggtcgcggacgcttgcgccgctccctcttcgctgcagcgctaccagcagcattccgctggaacaaggctctggtcgccctctatgctcgtctcgtcgccgccggcaaagcccataaatcagcactcatcgcctgcgctcgaaagctcctgatctacgccaacaccgtggtccaacgcggaaccccgtggaccgaaaaagccgcctagcttttaatggttg

SEQ ID NO: 6282 - DNA, 1176 bp, unidentified
  source 1..1176: mol_type = unassigned DNA; note = element_9bec00c
  misc_feature 1..2: note = core
  misc_feature 3..218: note = LE
  misc_feature 219..1055: note = CDS
  misc_feature 1056..1176: note = RE
  misc_feature 36..224: note = bridgeRNA
cttgtcttataaacttcttgcttcttcgtgagataaagaagcgccggagaggacggccatcctcttccggcgatgggggacgggtcgtgaaatgcgaggccgccattctgacgaatgccgggccgaactagagtttgatcgcccccatcttttccaatcgtcctgaacggatacccgagttttaaggctcggatgacaagcatgggagatgagaaaagatgacggatattaccatcggcgcggacatctcgaaagaccatatcgatctgcacagcctgcctgatggaagaagcttgacggttgccaatgaccgcaagggatttgccgcaattgtccgatggatcggcacaaagggcgtggagcggattgtctatgaacccacaggcgcctgtcacaaggccttcgagcgcttcatgatggtccaaaggctgcggctctccaaggtcaatccgcgccttgcccgacgttttgctgaagccacgggcagactggccaagaccgacaggatcgatgccggactgctggcccgttacggcgcacttctggcaccgcgcatcctgcgagccaacacgcaaatccacaacgacttgaaggaattacatgtcgcgcgcctggccctgatcaaggacaggactgccgcaaagaacagggcgaagaacgtctccaacctgctattgaagagacaaaatgtcgataggctcaggcagatcgagcggcagatgaaggctgtggacgaggccatcatgtcgctgatcggcgctgatgtctccctcaaagccaggttcgatatactcgtttcgattcctggcgtctcgcagatcacggcctttacgctcctaatcgagatgcccgaactgggcgagctggatgagaaggctgtagccgcattatccggactggcgcccatgagccgccagtccggacgatggaccggacgcgctttcattgctggcggaagggccatcgtccgccacgcgctctatatgccagctcttgtcgcatgccgcttcaacccgcaactcaagacgaagtacgaagtacgaagaactcactaaagccggaaagccaccaaaagtcgccataacagccgtcatgcgaacgctcattgtgctcgcaaacgcattgctgcggaaaaatcaaaaatggcagccaaaacccgcttgatcaaaacggata

SEQ ID NO: 6283 - DNA, 1437 bp, unidentified
  source 1..1437: mol_type = unassigned DNA; note = element_9bf4076
  misc_feature 1..2: note = core
  misc_feature 3..33: note = LE
  misc_feature 34..1185: note = CDS
  misc_feature 1186..1437: note = RE
  misc_feature 1255..1376: note = bridgeRNA
taattaaatggactcgcccaagccgaggcgtctgtgcgccgcggtggcattcttatagaagccaacgacagcgagggcgaggccatgaaaaagcatacgatgttcaatcagtctttgtcagccgacgagtcggcgtgcacgaccgttgcggtagatcttgcaaaaaaggtctttcaggtcgccggggaggatgctctcggccaggtaaaattcgaggatcgaatcaagtcccgcgaggccttccaggtatttctgcacaagcttcccgagagtgtgacggtcttggtggaaaccgggccaggcgctcaggcgtgggcccggttactgcaaatacagggcaatccggtccgcatcctgccggcccagcttgttgccaaacatcgctgtggcccgaaaaatgatcacaacgatgcgttcgctatcctgcgtgcaggccgcgatagcacgatttcagccgttccggtcaagagcccggcggcgctcgcgatgcaggcactgcaccgagctcgacagggatatatacggcgacgcacggcggtgggcaatcagatgcgcggtttgctgctggaacatggcgtggctctggcgcagggcgaaatggcgatcagccagctcgtgcctcggatattggaagatgttacccagccattgcccgatctactgcgcgagctgatcgccgaactgctgggtgaatggagtcaactgggtgaacgcgtcaacgtactgaccggccgactggaaacggcggcgaaagagagtgagatagcgaggcggctgatgactgtgcgcggtgttggtccaatcatcgccacggcgctgctggccaagcagaccgagcctgaacgcttcgccaacgcccggcagtttgccgcgtacttcgggttggtgcccaaccagcacagcagcggcgataaaatccggctgggcaagatgtgcaaacatggcgatgcctacttgcgcagtctgacgatccaaggagcccatgctgttttaaggcagatacgatctgactcacagcagccggacgaccaacgtctacagcgttggatttcccgcctggggcgcaaggaggcggcagtgcgattggccaaccgcaacctgcgcattctctgggtactactacaaaacgatcagacttatcatcgccggccgggaaatggccccgaggtggcgatgagtcactgatcaatagcgttctgccaccggggcgttaagccgctccaacccatgctaaaaaacattgaccccaggtcagaccgtcgcggattgatgcctgggctcctaccggcccttgaggcctcactgtaatcggcataccgcgcgcttatccaatgttggccagaagccgttcaaggcttcctcaaacaggcctgatacatagatgcaaccgggcagcagtgtttagaagcaggttgaaagtgggggcgagtccataca

SEQ ID NO: 6284 - DNA, 1388 bp, unidentified
  source 1..1388: mol_type = unassigned DNA; note = element_9bf4a67
  misc_feature 1: note = core
  misc_feature 2..90: note = LE
  misc_feature 91..1122: note = CDS
  misc_feature 1123..1388: note = RE
  misc_feature 1154..1383: note = bridgeRNA
taatggaatggtcgcccctctcctaaacggcatcgatgtgccagagtggacgtgtgagacacaccactcaacagaaaaggggcgaccgctatgaagattagaacagtcgggctggatttggcaaagacgcaatttcaggtgcatggtgtcgatgagacggggacgaaggtggtcaacaaggcgctcaagcgcagccagatgctgtccttcttcgccaacctgccgccgtgcttggtgggaatggaagcgtgcgggagcgcccactactgggcgcgaaaactgtcggagttgggccacacggtgaagttgatggcaccgcagttcgtgaagccgtacgtaaagagtaacaagaacgatgcggcggatgccgaggccatctgcgaggcagtgacacggccgaatatgcgtttcgtgccggtgaaggacgaagagcagcaggcggtgctggctttgcaccgggcgcggcaggggttcgtcaagacgcggacggcgcaggccaatcagatacgaggattgctggcggagtatggcgtcgtcatcccgcaggggattggccacatcgccaagcgcctgccggatattctggaggacggtgagaacgacctgccgttcctgtttcgccagttacttgagcgattgggcgagcacctgaaggaacttgatcggcaagtgggcgaattggatgcagccatccagacatggcatcggcagagcgccgccagccgccgattggctgagattccgggtatcgggccgatcacggcgagcgcgctggtggcttcggtcggcgacgcgaagaacttcgccaacggccgtcagctcgcggcctggctgggcctggtgccgcggcagcattcgagcggcggcaaaccgacgctgctggggatcagcaaacggggcgacacctatctgcgaacgctgctgatccacggcgcccgtgcagtggtccgggtggccgaagggaaggagaacgccgaccccaggctcaagcgactacttgagcggcgccacaagaacatcgccactgtggcctgggcgaaccgcaatgcgcgcatcgtctgggcgctgttggcccatgatcgcacgtatcaaacggactacgcgccggcccacagcgcatgagcgacttggccggcgaggtgagtagagtacggtaacacaccgattgcacaggcaatcatgaagtgatggcaggacaggtaagaccgtgaatggctgaaccttcgtaaagtcacgcacttcgagtgcgacacaatgattaggcgccattcagcaaattccatcagggaccgaggcgacggcctcatctaaagtccggatgtatggctgcaatcgttaccttcttggcttcatgaaatgagcgcttggcaaaccggggcgaccatgta

SEQ ID NO: 6285 - DNA, 1537 bp, unidentified
  source 1..1537: mol_type = unassigned DNA; note = element_9bf5724
  misc_feature 1: note = core
  misc_feature 2..240: note = LE
  misc_feature 241..1419: note = CDS
  misc_feature 1420..1537: note = RE
  misc_feature 1..217: note = bridgeRNA
tgtattatagagtagtagtttttagagcccctctccaagggctggtgctacactgtaagggatgctgtggattggtgctgacctcctaccacatgatggttcaagaaaggttccaaccacagccccttacaattttgttaatcagttaaataccgccagacggtttatgtggaacaaggctacaaaagtaaggtgtactgtggatgcagcatcacaaatctaaccgctggaggaattgtaatgacagtttctgttggtatcgatgtctcaaaggataaacacgattgctttatccaaagtgcagagggtgaagtgcttatggatgtgtttatgatttctaataatatggatggattccgtactcttctggagaagatccgagtctgcgtctctcaccaggacaaaataaaggtagggcttgaggcaaccggacattacagctacaacctacttgggtttcttcttgacaatggtctaaccacctatgtcctgaaccccttgcgtacaaacctttaccgaaagagccccagtctgagaaagaccaaaactgaccgagtggatgcacgcacgattgcatctatgctgttatccgatgtaggtctcaaaccctacacagatacagcataccgtaatgaggagctgaagtcacttaccagataccgttttgataaggtaaaagagcgtgctaagctaaaaagttctattgcccggctggtctgcatcctgtttccagaactggaaacgctcgtttcttctctgcatattgcttccgtttactctttgctggaggagttccccggtgccaatcaagttgccgcagcccatttaacaaggctgaaagcacttcttgaaaccgcctccaaaggccgctacaagcgaaatatggctcttgaaatccgagatgccgccagaaactctattggctcctggatgcctgccaagtcccttgaattgcagcacaccattcggctcatccgtgaactggacaacgaaattgctgaaattgaagaacagattcagtccttgatgatagaactggattctcccattactacgatccctggattgggctttcgtatggcggccatgattcttgctgaagttggcgacttcacccgttttgcttccccagacaaattattggcttatgccgggatgtctccctcaacttaccagtccggacagctcaagaattgttacccgcacattgaaaagcgtggttcacgttatctgcgctatgccctttacaacgcaaccaagtatgtttgccactgggatccgacttttgccgcatatctcgcaaagaaacgggcggagggcaagcactacaacattgcactttcccatgctgccaagaaattggtgcgacttgttttcgctatggagaaatccagacagccttattgctcagcgacttgagtgcaactacttgaatagcctgcaggggtctggcaagacctcagctttgctataccttttttgtgccatcttttttcaccaccaccattcatttttgagcttgacttttaatagttaa

SEQ ID NO: 6286 - DNA, 1521 bp, unidentified
  source 1..1521: mol_type = unassigned DNA; note = element_9c0020d
  misc_feature 1..2: note = core
  misc_feature 3..265: note = LE
  misc_feature 266..1432: note = CDS
  misc_feature 1433..1521: note = RE
  misc_feature 3..250: note = bridgeRNA
cttgtatgatgattacgtcctgagtaggacataatctcatactctcctttctgccctttataatgaagctgatctgaggaagtgtttatagtccttacagctcagtttcggctgggactgtttaaaggagacaatgctccacagtctgcttcatggttgattagttggatgttccaatacgacgagtattgagttcttatgtcacgcaaggatacggaagtagatcacccgtggagactcaggtctagaaaggtggtctatttttatgaccgtttacgttggcgtcgatatcgccaaagaacttcattacgctgccatcatggattctgatggtgtcgttgccaatcctttttcttttgagaataacaacaagggcttctgtctgttactctctcacctctctccttacttgaaggagtccgtcctgatcggctttgaatctaccgcacattatcaggacaatctggctttttttctcaggtctcatggttatcgaattgctgtaatcaatcctttgcaaacctccgccctgagaaaagccaatatacgtaacactaagaccgatagtgttgacgccaggttaatctgtctcgctttgatgcaacacaatatccatggcgatcagcgagactcctcccgcctggatgatctttatcaactctgtaaaatgcgtatggatctcataaagaaacgtacttcctgtaagattcagctcgtttcttttatggatcgcatcttccctgaattggcttcatttttcagcaataacctgcacattaatactgcgtaccgtttgattgagagctaccctcttccttctgtgataaagaaaactcgaattgatgttcttacccgtcttttccacaaagcttccaaaggtcatttcggaaaagagaaggctcaggcgctgaagaatctcgccaagatttctgtaggcatcccttcggtcacatatgctttccaggctcagcaactcatccatcaaatcgagttctattcagaacagattcaagctgtcgatgagaaaattgactctgatccggaagttatgagctctcccctcatgacaataccgggtgtcagttctttctgtgcagcctgtattctgtctgttataaagaatattaacgattttgatgcgccttgtaaaatacttgcctacgccggccttgatcctgtcatccgacaatccggaaagttcaatgcccgccaaaccagaatgtctaagcggggcaacagcctgcttcgttacgcattggtttggacggcaggaaacgcagtaaagaataatgctacattcaatgaatactatcggcataagactcaggatcagggaaagtctcattatcaggcacttggacactgtgccaagaaactgaccaaatctatctatcatatgctcaagtacaacgaatcatttaacctcgcttaatatgtttttttaatgtttctcctctccatggctgttttcatcatgccttgttatatttctttttttatccttgacagttcatagttggt

SEQ ID NO: 6287 - DNA, 1416 bp, unidentified
  source 1..1416: mol_type = unassigned DNA; note = element_9c007da
  misc_feature 1..4: note = core
  misc_feature 5..84: note = LE
  misc_feature 85..1143: note = CDS
  misc_feature 1144..1416: note = RE
  misc_feature 1157..1403: note = bridgeRNA
atgatgaggtggacggccccctcgcggcatcgctgtgccaagctggccgctgatgtgaccagaaccagcagagggcgaccgtccatgggcgaggctatcacataccggatcggattcgatgtggcgaagaacgttttccaggtgcatggcgtgaagaccgaggcgggcgagaggatagcgttcgtgcggcgtctcaagcgcgcccaggtggagccgttctttgccaagctgccgcgctcgctgatcggcatggaggcgtgcggctcggcgcactactgggcgcggctggcgcggagccacgggcacgcggtgcggttgatgccaccggcgtacgtgaaggcctacgtcaagcgcaacaagacggacgcgcacgatgcggcggcgatctgcgaggcggtggcacggcctcacatgcgcttcgttgcggtcaagagcgagcaggatcaggcgatggtgatgctgcaccgggtgcgcgcctcgttcgtcgagaagcgcacggcggcggccaaccagctgcgtgcggtgtttgccgagatgggcattgtggcgccggtcggggggcggggcttgagcgagctgctggcgctggtggagacgcaggcggagccgttcgtgcgcctgccggcagcgttgcgcctggtgctggcggagctggctcggcaatggcggagcgtggatgcgacggtgcgcaaaatggaggtggagatcgcggccagcgtgaagaggagcgcgcgggcgatgcggttgaccgcggtgcccggcatcgggccgatgggggcgagcgcgatcgattgcctgctgcccgacccgcaggcgttcaagagcggtcgcgactttgcggcgtggaacggtctgaccccgcgcgaggacagctcgggcaagagcgtgcggcgcggacccatcaccaagaagggcgacggctatctgcgtcgcatcctggtgctgggtgcgacggcgcatctggcgcgggtgcgacgcgggcagatcaaaggcgcctcgccgtgggtgttgaagatggcggcacaccccaagcgcaagctggcggcggtggcgctcgccaacagaaccgcgcgcatcgcctgggcgatgctggccaggaaccaggattatcgtgcgccggcggcggtgctgcaggcggcctgaacagggctgtcgatcagaccacgaccggcgccgatgagatgggcaaggagcacaatggtgtgatgacggacggtcgaggcgaccgggctcgagacactccgcaccgtcatcgtgacacagatcacgtcgggatgattggaactcgggctgcgcgaacttcatcagggccagcggtccatgcaacgaccgcacaaacaggccgtatacatgaccgctcccaacacccaagtcgtcacaacatgaaaccccttgccaaccgggggccgtccatac

SEQ ID NO: 6288 - DNA, 1225 bp, unidentified
  source 1..1225: mol_type = unassigned DNA; note = element_9c00d2f
  misc_feature 1..2: note = core
  misc_feature 3..238: note = LE
  misc_feature 239..1210: note = CDS
  misc_feature 1211..1225: note = RE
  misc_feature 6..210: note = bridgeRNA
cttgtatctcgactttcccttccaaagaagcgaaagttctcgactgatcatcgagggaaggtcatgaagcggagctgctccgagggcatcgagcccgtattgtagatagcgctctggccttccaaccccactcgacaagtccgaacggtatctagtgcccgcccccggcgtgagcacgcattaacaaggttgcacagagtgaagggtgatcgactttcgtagtttgaaggagaggatcatgtccatttttgttggcgttgatgtcgccaaaagatctttcgacattgccactacgctgcctaacgggaagaagcgtaccaaggcaaaactgcccaatgattccggcgggttcgcgcagttcagcgactggcttgaacgccatgcggagccgggaacctggattgtcatggaagccacaggcacctatcacgaggcgctggccgagcactgccacgctcaaggctatcgggtgtgcattctgaacccggctgtgatctcaaaattcgctgatgttgagcttcgccgcgtcaaaaccgacaaggctgacgccaaagtcattgctgcctatagccaacagaacgctgcctcgcttcgccagtgggagcctgagcccccagcacagcgccgcttgcgtgctctggtgcgacgcctggacgacctcaaggaaatgcgccagatggagcagaatcgcttggatgtcgcacgggacgcggtacagcaatcgattcgagacataatcgggcacatcaccgaagagctggaaaagaccaagaaggccatcgagcagacgatcgatgatgatccagatctgcgtaaccgacgtgacctgattacttcgattgacggtttgggcgagaccactgctgcgttgctgctggccgaactgggcgatccactgaaataccaaagcccttctgcgattgtcgcgttttcaggcctgaatcccgtggtgcaacagtcgggagagttcacaggccagagcaccatttcgcgtacaggcagctcacggctgcgtgcgggcttgtggatgtcaggcgctgtctcaatcaagcacaacccagtcgtaaaggcgctggcagagcggttgagcagccggcacaaggcgtataagcagatcgtatgcgcggcaatgcgcaagctgctgcatctggtttacggggtagtgaagtcgggcaaaccgtttgacccccaaattgctcttgcgaggtgagggtcaagacggtat

SEQ ID NO: 6289 - DNA, 1370 bp, unidentified
  source 1..1370: mol_type = unassigned DNA; note = element_9c05ca6
  misc_feature 1..2: note = core
  misc_feature 3..306: note = LE
  misc_feature 307..1125: note = CDS
  misc_feature 1126..1370: note = RE
  misc_feature 1159..1358: note = bridgeRNA
agatgtatggactcctccccttaacgggagttttgcggtataaagtgaaaagcattcactcaaatcaacttttaccaggagtccacacaatgacacaatgtagcgtaattgctatcgatttagcaaaagatatttttcaagtttgtattatgacacccaatggtaaaatcactttcaataaagcaatgagccgagcaaaattaaaagaatggctcgttaaacaaaaactttctcttgttgctatggaaagttctggcgggggctcattattgggcaaggtttgctaaatctctaggtcataaagttatgcctataccacctaaacaagtaaaaccgtttagaacgggtcaaaaaacagatgctaatgatgccattgctattgccgttgcatctcgtgcggccaatataaaaccagctagagtgttaaccactgaagagcaaggcctacagtcggtggggaaaatgagagatttacttgataaacaaaagcttcagttatcaaaccaagtacgtgggttactactcgaatttggcattatcatcaataaaagtataaaaagctttaaagctcgaatacctgaaattttagaagatgctgaaaatcagttacctatgccaatgcgtaaaagcctctttcaaatgtgggagttatattaccgtctagcacatgattttcaagtgatgaataaggggttaatacagttaacagaacaagatgatgattgtaaaagattcatgaaacttgaaggtgttgggcctataacgtctatgaggttgaaaatacaattaggcagtggcgagcatttcaaaagtagtaaacaagtatctgcttgtattgggcttacccccaagcaacgtagtggaggaaaagtacaactcggctcggtaggaaaaatctcatgcgataaacccttacgaagttgtctttttttgggggcaagagctgtggtgtcaaaacttaaaaacagacctgcaaaaactgaaaaagagcgctggcttaaagccttaatagagcgaagaggtgctaactgtgcgtcaatggcgttagcgaataaaaacgcaagaacggcctatgcattattgaaaaataatgcagattacaacctagtattaatagcggcttaataattactagaaattaattacacatttacaaatgaaattgctacaaaaaagatcttaaaaaaggttagaccaaccttcaacagcctgagttttgctctgaacatatagaatgtcgtgaaggagaataggcatgaaggtgcgaatacatcaaagtggccgggatagcttcccattatgagcccgaatataagcacgcatctaaagttttaaaagttttttcttgtacaatacgaggagtccatata

SEQ ID NO: 6290 - DNA, 1973 bp, unidentified
  source 1..1973: mol_type = unassigned DNA; note = element_9c0a39b
  misc_feature 1..2: note = core
  misc_feature 3..131: note = LE
  misc_feature 132..1424: note = CDS
  misc_feature 1425..1973: note = RE
  misc_feature 1637..1910: note = bridgeRNA
agcttcctgtataattcaaatatagggaatcccatgaaaggtggttgagaaaaaaggatacctcagagtaaaataagatttgctgactttgcgggttagtaaaaatcttattaaacagagaggtatctgaaatgaagtataacacacaaaacgcaaaaattgcatctattacggaagaaactttagtccttgggattgatgtcggaagtgcaacccattatgtaagggcattcgactggcgtaattatgaattttccgataagccactggcgttcagtaacgatgaagcagggttcctgacattcatggcatgggttgaggatatcaaggagaaagctggcaaaaccgctgtgatccccggaatggaaccaacgggacattactggttcaatttggggaagttcctgcaggacagtgggatgaggccagtccatgtaaatccgcaccatgtaaaaaaatcgaaggagatggatgacaataatccggacaagaatgaccgtaaagatccaaagactatcgctgcattggtaaatgaaggacgcttttcctatccctatattccaacagggggttatgcagagatccggagcctttcaaatctgcgttttcagacgcaggaagagatcacaaggatccggaaccggattgcacgatggatcagtatctattttcccgaatataaagacgtttatgggaaactggatgcagtaagcgggatgatggtgcttaaggaggcaccacttccggtgcagataaaagaactgggagcgggagggatcaatcagatctggcgggacgcaaagctgaggggcgccgggatgaagagggcaaagaccctgttatcggcagcggagcacagcgttgggagccaggaagcaccagaagcggcaagcatggagatctggaacctgttggaagactatgagaagtacagcagccgcatggatgacctgatggctaggatagaagaaaagatcaaagaagtcccctatgtagataaacttcttgagatcaaagggatcgggctgaaaacggtatatggatttatcgcagaggtcggcgacctgagcaggtttgatgacccaaagcagctgcagaagctggcgggatatgcgattgtaaagaacagctccgggaaacatgcaggtgaaagtcatatcagttaccggggacggaagagactgagatatgtgctgtacgaagcagcgatatccgtgataggaaaaaatggtgaattcagggagatccatcggtattatcaaaccagagagaaaaatcccctgaagaagatgcagtcggtggtagcgatagcatgtaaagtccttcgagtcttctatgccatactaacaaaaggtgtagattatgatggagaaaagatgctgggagatatcaggagacccgcaatgagtgtccaggctgcataagaagctcagtagtccgagggaagactgacgtggttgaagtgagcagtcagatacaaagcgttctgtctgctgacctcagccacgccgggaagaaaacggaagactgaaagaactgctgtgaagcagaggaaaaggcagaacgtggaaggggaacgtccgctgggaacagcgctgtcacgggaagccgatcagcaaatgttatgaatacaaagaatgagccagtagtcggcaggaatattttccatagggcaagaccctggcaaggagctaagctgacaccctggttatgggcaggtggaacgaaggaagtgaggactagtacagaaatgtgcagagatcctggtagacacgggaggtgcgccgccatagatggatgggtatatacaaggcctgtaaaacggaaaaatagagacgttttatttcgtatacctataaccacctattttcgtaccagatacagaaaaatgctcatgatcgaggctcattcatctgagatagaaacttagaaattccttgattttaagagaaaaaacacttgactaaataggg

SEQ ID NO: 6291 - DNA, 1483 bp, unidentified
  source 1..1483: mol_type = unassigned DNA; note = element_9c0a8b0
  misc_feature 1..3: note = core
  misc_feature 4..124: note = LE
  misc_feature 125..1156: note = CDS
  misc_feature 1157..1483: note = RE
  misc_feature 1191..1365: note = bridgeRNA
aacatggagtaatcgcggcgcgatctcgccctggctttttgggctagcgggggtggttgcccccgataagatggaaaaagggctctcgattggaaccgggcccaaacatcggatggaggcaaccatgaaccagtatattgggcttgatgtttcattgaaagataccgcgatatcgatccgggagaacggcaagcggatctggcgggggaagtgcccttcggatccaaaacttctgacggagatgatccgcaagcatgctccgcgcgctcggcgcgtcgtattcgaaacgggaccgctgtcgacgtggttctatcatgcgctgacgagtgagggagtgccggcgatctgcattgaagcacggcacgcacaaaaggtattgaacgagacgctcaacaagaccgataccaatgatgcggacggcttggcgcaactcgcagaagcgggtttttacaaagcggttcgcgtcaagtcgtttgacgccatgatggcccgcacgttggtggctgcccgcgcacagcttttgaacatctcaacacaactcggcaatcaaatccgcggcctgatgaagaccttcggcctgatcatcccgaaagcgaagggtcgagtatttgatggcgatgtgcggaagcttttggatgggaacaacgagcttgcaaaagttatcttgcctcttttggaggcgtggcacgatatccgaaagcgcgcagccgatctcagtcgccagttgctgatggtggcgcgtgagagccaagctacgaagctactgatgacaatcccaggcatcggggctgtcacggcggtatcctacgttacggcaattgaagatccaggaaactttcgaacgtcgcgctcggtgggcgcttggctcgggttgacaacccggcgctaccaatcaggcgaggtcgattatgacggccatatctcgcggaggggtgacaatcgcttacgtggattgctttacgaagcggcgacaacgctgctgacgagaaccagtgccaggaccgagagcagtctcaagcgttggggacttaagctgcgcgagcgactcggcttcaagcgggccgctgtggccgtggcccggaaactcgcggtcatcatgcacagcatgctcaagacgggagaggtgttcaacgcatcggccggcgccaccgtataggagacgcccagccgtcgtccctcagcgcgccatctaactctgggcgctgagcgtccctgctgcggacgtgggcaggatcattccgcttctagtggctgcagctcgttgagactgcgtctcgaacataggaagatcccacctgcgaagaccattgtgcggcggcatttgccgaccgcggagacaaccctgcgcccagcactggatagcccagaacgacatggccggaagggcagatccactcaatcggttcagccgcgttgcctgtcccgcaagccggcaaggtcgttgaatgccaaaaccagcttgacggatggaatgcgattagac

SEQ ID NO: 6292 - DNA, 1396 bp, unidentified
  source 1..1396: mol_type = unassigned DNA; note = element_9c0d823
  misc_feature 1..2: note = core
  misc_feature 3..76: note = LE
  misc_feature 77..1129: note = CDS
  misc_feature 1130..1396: note = RE
  misc_feature 1133..1383: note = bridgeRNA
tgatggtgtggacggccccctacggcatcagtgtgccagaatgaggttgtcagaaactcattcacaggagccgtccgtgagccagattatccgcattgggatggatacgtcgaagtatattttccagctccatggcgtcgatgcgtcggagcaagtcgtgctgcgcaagcggcttagccgcaaagcgatgctggagttttttgcgaagctgccgcccacggtggtcgtgatcgaggcttgtggggcggctcaccacttggcacgggagctcggcaagctgggacacacggtcaagctgattgcgccgcaactggtgaagccctacgtgccgcggaacaagaacgacggacgcgatgcggaggggctttgcgaggcgtcgagccggccgcggatgcgatatgtgcctgtaaagacggcggagcagcaggccgcactgatgctgcttggcgtccgcgagcaattggtcgggcgtcgcacgcaactctccaacacgatccggggtcatgcggcggagttcggtctgaccgcagcccaagggctggacaagcttgctgcgttcctggccgcgatcgagcgggacgaacgtgtgcccgtgctgagccgcgagctttttgtgatgcttgctcggcaatacgaccaggtgcagaccgagctgaaggcgatcgaggccaaattgctggcttggcaccgtgccaacgccacaagccggcgcttggcgcaggtccctgggatcgggccagttacggcggccgcgctggtgatgaaggcgcctgatccgcacgccttccgttcgggacgattgttcgcagcctggctcggcctgacgcccaaagaccattccaccgctggaaagaccaggctcggcaagataacccgagccggcgacgagagattacgtcaacttcttgtggtcggggcgaccgtggtagtcaagcaagcgaccgggaagcaccgtcgtggatcgcgctggctgctcgacctgctccagcgcaagacgccgaagcaggcagccgtggcgctggccaacaagactgcacgcatcgcctggaagctgatgacgacgggagaggattatgacagcgcgcggttcgatgccaaaagcgatgccgaagtggccgccgccgcgtagttgagagattcggcagaccggcgggttcgcccaccggccgaaccggagctgcaagagcagaggagatggtgcgatcgatcgttccgagatgcgagcaaatccgtgggacccagtggccgaacaaggtcgcctttctgattggaactcgcgtcgcgaaaaccatcttggcccgcggttcaacacgccgcatcaacaggccggacatatggatgcaagcgatccggtcaaacctcacaaagctcttgtgccacgggggccgtccacata

SEQ ID NO: 6293 - DNA, 1314 bp, unidentified
  source 1..1314: mol_type = unassigned DNA; note = element_9c0ed67
  misc_feature 1..2: note = core
  misc_feature 3..63: note = LE
  misc_feature 64..1083: note = CDS
  misc_feature 1084..1314: note = RE
  misc_feature 1094..1300: note = bridgeRNA
taatgggatggactgttcccccaccccgcagtcaaactggtcgcgccaacgaaggaggttgtcatggcaaacgttgcggttctgggaattgatatcgccaagaatgtgttccagcttcatggcgtgggcgccgatggtcaggttgtcctgagacgacgtgtgatgcgcgatcaactgcttcaggtgaccgaggctatgccgccttgcttgatcgggatcgaagcttgcacgggtgcctttcactggcagcggcattttgagtctcaggggcatactgtgaagatcattgcaccgcagtatgtgaagccttttttgaagggccagaaaaatgacggcaacgatgcccaggcaatatgcattgccgttcaacagccacacatgcgcttcgtaccgaagaaatcgatcatccagcaggacatccaaggcctccaccgtgctcggcagagattggtcaatcatcgtgtcgccctgatctcgcagatgcgaggtttgcttctcgagcgtggtgtagcgatcgcaaagtcggcttcgatcgcccagcgaacgataccggagatcatcaataatccaaggatcgacatcaccgagctgacccgcgatatcatcggcacgctccatgcattccttttgcagctcaacgaaaagatcaaatacttcgacaagcagatcgaagccgtcttccgcgagagcgatgtttgtcagcgtatcgccaaaatacgtggcgtcggcccgaagactgcgacggcagtggtcgcggctgttggtgatggagcagactttaagaatggccgacatctggccgcctggatgggcttggtgccgcgacagcattccagcggcgatcgacgcgtactgcttggcatcagcaaacgaggcagtcagcatctgcgaacacttctggtccacggcggaaggtcagtggtgcgaacggcgcaacgaaaatctgaccctgcgagcgaatgggtcaacgagcttagggaaaggcgtggttacaaccgcgcagcggttgctgtcgccaataagaacgcaagggtgatctgggccttgcttcagcacggtggcgagtaccgagccaatccctgagagcaggcatgcgaattgcaggctgaaggttgaaatggaatgaacggtcggaccggcacatacggaacctgtcttttataatggccgacaaggtctcccatttgttgaggcgtatgtgtgcggataccccatttgggcgcttcgaaaatgatgacgccgtatagatgtttgcaatcgacccgcgtcaaaccgcttcaacatcaagcttgcaacgggggaacagtccataga

SEQ ID NO: 6294 - DNA, 1761 bp, unidentified
  source 1..1761: mol_type = unassigned DNA; note = element_9c16011
  misc_feature 1: note = core
  misc_feature 2..148: note = LE
  misc_feature 149..1186: note = CDS
  misc_feature 1187..1761: note = RE
ttagatgacatgcatcgggcccgggctgaggtcgcgtggtggccctgggtgagagacctcctcagctcaggcgcgtgacgattgccgtgcaggcatccgcgccggaggggggcgactggcgtcccccgcggagcttgaggaggtcccgatgccgatcgtaggcggactcgacattcaccggaagcagatcaccttcgactacctggacaccgtgaccggcgaggtgcggcgcggccagatcagcccgggcgaccgggagcacctgcgtgcctggctggcacggttcggcggccgtgatgacgtggagttcgcggctgaggggtgcaccgggtggcgctatgtcaccgaggagctggccgcggccggtgtcgcggcgcacctggccgagccggccgacaccgccttcgcccgcggccgcaagcggcacgccaagaccgacaagaccgactgccggcacctgcggatgctgctggccgagggacggctgccggagtgctggatcccgcccggccacatcctggaatgccgcgccttgctggagacctatcacgatctgcgggccgagcacaccgcctgggtgcagcgcatccacgcggtcttgttccaccagggcgccccggccctgggcgacggcgcgctgcgcagcgagcagggcctggacgcgctgcgggcgtccgcggcggctcacctgtccccggccgggcagctgcagatcgccaccgccctggagatgaccgccgccctggagacccggctgcacgagctgcggcaccagctgaccgacgccgcccggcacctggccggcgccaaggtgctggccgcgcggctgtacggggtcgggccggtcaccgcgctggcgatgacctgctggctgggcggggcgggccggttctcctcctcccgcaaggcggtccggttcgccgggctggacgtcaccgtctactcctccgaccgcaaggggccgcccgggcggctgtcccggcagggaccaccggtgctgcgctgggcggtctacgaggccggcaagacccacgcccgcacctcggccccggaccacgcctactacgcccaggtcaaagaccgctgcaacggcaagcgcgccgccctgtccgaagcccgcaagatcctccggcaggcctgccacatcctggccgagctcggcgacgacgcgctatcggccgcctgagccccctcgccccatgtcacggtgaccagcccatgaccgccggcccggccggaccacgtatgcagccgaactcacccgatggggaccaccgcggccagctcccgacgaaccgctgtcagccgctgccggccatggccaggcgggcggcctgattagactgagcggccgcatccccgcaggccggggacacccgatcaatcatcatgtcgccggggcagcacccacgccccgcggacctaggtaaggctggctgctcctgcccccccgcccccggtcgccacggctgatcaccccgcgcaggaaggccaccagcctgaaacactgaaccgcaaccgcaccatccccccaccagggctccctgcccctgccgcctggcatgatccgctcccgggcgatcgcgtcaagggcgcctgcggcgccgctgcgcgggcgctacgcgccccttgacccgcccgcccactcgcagaacccggcagctatcagggacagggaccagactcagctatgccccagaccagggcatccatgaccggtacaagccccacccaacccttgcggtcaccggcggatgcagg

SEQ ID NO: 6295 - DNA, 1452 bp, unidentified
  source 1..1452: mol_type = unassigned DNA; note = element_9c1bae7
  misc_feature 1..2: note = core
  misc_feature 3..258: note = LE
  misc_feature 259..1431: note = CDS
  misc_feature 1432..1452: note = RE
  misc_feature 44..241: note = bridgeRNA
ctcatatctttgttaagatttaaaaatatgaattatttatctttgaaatagtaataattgataaacaaaaccaagttgcaaaatactatcggggcgaaatacatcatagatgatattgcatacactagggtaatctacttggttttaattacattatagtcacaatagtacttgagcacttgctttaatagaaagatgctgtataaaaaatgagcaaagtctactgtaattttttgtttatctaaaaatcaaagagttatgaatttaaagtattctgtaggacttgatgtatcaagtaaaaaaattgacgcttgtatgagtattattgatgagaaacaaagagttgttgttaaatctagtactcaaattactaatacaagaaaaggttttgaaaatttagcgcagtggattattaaacacaagaaagaagatataccagtggttatttgtatggaagcaactggtatttattatgaaaattgtgcgtattatttgtttgagaagggatttgatacttctattattttacccaataaggcaaaaaagtatttagaagcaatagggttaaagtcaaagaatgatagcattgatgctaaaggactatctcgaatgggagctgagcaattcttagaaagatggcagcctatgggcacctttttttatgagttacgtttgttgacaagacagtatcaaaatattacggaattaaagactgtgattaaaaatcaattggatgcattgagttttgctatgcataaattggattctgttacggatcaattgaaacaaaccatacaattgtttgaatcacaacttaaagagttggataaagcaattttacaacatattaaatcaaatcaagaagtagcagaaagagttaaaaatatttgtacaatgaagggtttaggtgttttgtctgtagcaacagttttggcagaaacaaatggatttaatctgttcaaaaactacaaacaagttgtatcttacgcaggatatgatgttgtagaagcgcaatcaggaacacgagtaggtaaaaccaaaatttctaaaaagggaaattcaagaatacgaagaatgttacatatgccatcactggtagttatacaatgtgaggttaaacagttcaaagatttatttgacagaacctataaaaaacatggtataaaaatgaaaagttatgtagctgttcaaaagaaaatattaacaatgatttattatttatggaacaaaaatgaaccttatgatgataactataaaataaatatccaagaagaggagcaaaagttatcctctcgggcatgtggcttcgtagaagacaaaatagaaaaaaatagccccaaacaagttgaggctacacaaggtaaacatccagtgaataatcgcaagaagcttcctctcggtgtaacaaagttaaaaaaaataacaacataaatttgcaattaaagatagtac

SEQ ID NO: 6296 - DNA, 1369 bp, unidentified
  source 1..1369: mol_type = unassigned DNA; note = element_9c1f2ad
  misc_feature 1..3: note = core
  misc_feature 4..78: note = LE
  misc_feature 79..1107: note = CDS
  misc_feature 1108..1369: note = RE
  misc_feature 1080..1357: note = bridgeRNA
tgatggggtggacgccccccgacggcatcgaagtgccagagtggagttgtcgaacaaccacttcaaggagaggcgtccgtggaacaggctaccatagtcgggatggatatcgccaagcaggtcttccagattcacggtgcggatgccgcaggggtcgtcgtgtttcgcaggaaaatcgcgcgcgccaaggtgctggcgttcttcgcgtcgcaaccgccgtgcgtcgtcgccatggaagcctgcagcggcgcgcactattgggctcgggagatcgccacactgggccatgtggtcaagttgatcgcgccgaagtacgtaaagccgttcgtaaagcggcagaagaacgatacggccggcgctgaagcaatctgcgaggccgcacaacggccgaccatgcggtttgtggctgtgaagagcgaggtggcgcaggcgaatagtctggtgttccgcgcacgcgatttactggtgcgtcagcggacccagatcatcaacgctctgcgcggccacctggcggagcatggctgggtggccgccaaaggctcagctcacgttgccaagctcgtcgatcatctcgaggatccaacctgtcaattcccggaaggagttcgcgccactctcggggtgatgatcggctctttgagggcgctggatatgcagattggtcagctggatcgagagatcaacaagcgcgccaaagaagatccgaccgcccgtcgattgaccagcattccaggcgtcggtccgatcatcgctacggcgatcgtcgctttagcgccgccgccggatagcttttcaaaggggcgcgacttcgccgcctgggtcgggctgatcccgctgcagcgatcgacgggtgggaagcaaagactgggcgcaacatcgaagatgggcgaacggaccatacgccgcttgctgatcatcggagccagcgccgtggtgcgacaggcggctgcccggggcgcacccaagggatcgtggctcgcgcagatgctggcgcgcaaaccccgcatgttggtgaccgtcgccttggcgaacaaaatggcccgcgtcgcttgggcgctattgacgagaggcgaggtctacaaggctccgatcggcgcggcggcgtaatccgtccgaccgatccgaggctgtcggcggagtaggagagttcaacaggaaagtatggcgcaacagtcgattgatgagatcggaagagccaggtgattttcatgggcttacagcccgcctacgtgatttggctccgatcttcacactcccatacgggcccgcggcactgtacggccgcaatcgaggccggacagatgaagggactcgaccgcgcgcacacgatcctcgagattctccttgcaccgttaggggcgtccacaga

SEQ ID NO: 6297 - DNA, 1388 bp, unidentified
  source 1..1388: mol_type = unassigned DNA; note = element_9c24fac
  misc_feature 1..2: note = core
  misc_feature 3..248: note = LE
  misc_feature 249..1283: note = CDS
  misc_feature 1284..1388: note = RE
  misc_feature 23..226: note = bridgeRNA
ctcctatgtttgttatcaaatataaaagtaacaaatttacaatacttaagtgaagaagaatgggagctgaatcgcgtctaaacaacttgtagagtatgttcttgtagagatatagcctcattcttttttaccttttagagtctgaacagaatgtaaggaatgcagcatgtctgcatatccagaatatccaaccaggagacaagacggagaaaggttattcacttgagttaatttaacgtaaaagaatgatgacaaacattgtaaaacaagtggtgggcattgatgtagctcaaaatgaattagtagtgtcacttgggcgaatgaaccatgataccggtacggacattttcgcatttaaaacatttcctaataacgcagtaggctttaagtatcttttggcttgggtaagcaaattgtcggcaaaagaaatcagcgtgagatatgtaatggaagccacaggtgtataccatgaaaaattagcttattatctttcagatcaagggcaagaagtaagtattgttttgccaaacaagatcagcaattacttcaggacattggaggttaagactattactgataagaccgcctcacaagccatttgccagtttgggctggaaaggaaactggaagcatggaaaaagccaaagaaaatattcaaagaccttaaacaactaacccgtgaaagggaccaactgattgctgaaagaacagcattaaaaaaccaactgcatgcagaaaaagcagaagcgtttccaaatgacagtagtatcaaaagagtaattaaacgtattcaactgaatgacaaacaggaactggaaatcaaagccgagatagccgcaattgtgaaacaggatttggaattggttgaaaagataaataccattaccacaattcccggtgtaggtaaactgacagcggtaattgtactggcagaaacaaatgggtttgaactgattaaaaataaaaagcaactggtcagttacagcggcttggatgtcaggctgaaagattccggcacgtcggtaaagagtaaacctaaaatatcgaaaaagggaaataggcatttgagaaaagccatgtatatgcctgctttagcagctatgaggtttaatgaccagcataaagctttatttgtgcgtctggtatcaaagcatggaataaaaatgaaagcagccgtagcggtgcaaagaaaaatactggagctgatttacactatttataaaacagatgaagcatttgataagaattataccattacgaatattcagactgaaacagcataaaatagttagagcagccattacgaaaatgtgctgccctaatgaggctggcttaaagccgccttgaataaaacaaaattataaaatatttggaattcaacacagaat

SEQ ID NO: 6298 - DNA, 1289 bp, unidentified
  source 1..1289: mol_type = unassigned DNA; note = element_9c306c3
  misc_feature 1..2: note = core
  misc_feature 3..186: note = LE
  misc_feature 187..1275: note = CDS
  misc_feature 1276..1289: note = RE
tccattagactatttaagtgtagaaaacattgtataatgggacacagatctttgagatagaaccgaatagagagtcgatcaagtctaatgctcctcaaaagaaaaacttatattgcgaataagacccgactctctatgatgattaaagctatatagtgttaccatcgcttataaaagcgattattaatggaggaagctcatatcatcactcattcggttctaaaatctaattatgaaaggagtcccattatgacaaagaacgtttattttgtagggcttgatattgcggctgacgattttgtagcaagcatatatcaatccccaaaacaatcagtaatcacaaaagaaggcattaaaaatacctttgacggatttgatgtgtttattccatggctcaaagaacatggtttaagtaaaacaaattgcattatctgtatggaagcaactggtgtctataatgaagccatcgctcactatttagtaactcaaggttttagagtaagcgttgagccgccacttaaggttaaacgtgcctttgatccagttggtcataaaacagatcctgttgacagcaaacaaattgctgaatacgcatacagatacagcgatgaacttagattttggcaacccaaagatgaaatcatcgagaaaataaaacatcttttgaccgctagagaacaatttactaaacaaagtacagctataaaaaatgctatgaaatcttatgaaaaacatattgttcaagtgcccttgatagtgaaagctcatcgccaaactctaagagaaattaaaaaacacattactgaaattgacaaagaactagatagaattatacgccaaaacccaagtatttctaacatgagtaatcaactaaaaagcataccaggatttggcttgcttttatcagcaagcttaataactcttaccggtgcattcagtgatatatctcattataaaactttagctgccttcttgggtatatgtccttatcaacatcaaagtggaaaatctatatacagacagcctcatatgcgatcattcggtccagcatacccgcgtaaattgcttactcttgctgctcgctctgttgcaactcacaatgatgtttttaaaaagtactatgcgcgcaaacttgctgaaggcaaggctaaacagcttgtgcttaataatatttcaaataaattaatcaagttagcttgtgcattgataaagaacaattctcgatatacagttacctatcgttctataaatcccatgttcttaaatatatcttgacaaagtcatagtgt

SEQ ID NO: 6299 - DNA, 1379 bp, unidentified
  source 1..1379: mol_type = unassigned DNA; note = element_9c321f4
  misc_feature 1..3: note = core
  misc_feature 4..91: note = LE
  misc_feature 92..1111: note = CDS
  misc_feature 1112..1379: note = RE
  misc_feature 1175..1335: note = bridgeRNA
tgatggggtggatgccccctgcttggcggcatcgatgtgccagagcgtggtaaagccgaggcattccacaaggagacagggagcatccgtcatggagattacgacaattgggctggatctggcaaagaacgtgtttcaggtccacggcgtcgacaccgaaggaacggtcgtcttgcgaaggaagctgaggcgttccgatctaatcacattcttcgggagcattcctccggtcctgatcggtatggaggcttgcggaggcgcgcacttctgggcccgggaactggccgcgcttggccatgaagttcggctgatgcctccggcttatgtcaagccatacgtcaagaggggcaaaactgacgcggccgatgccgaggcgatctgcgaggcagtgacgcgaccgaccatgcgctttgcatcgatcaagacggtgccccagcaatcggcaggcgtggaactgaaggtccgacagctgctgatccggcagcgcacacgcacggtcaacgcgctgcgcggccatctcgcggagttcggcatcgtcgcggcgaaaggcatcggccggctggatgagctcgtcgtgatcgtccgcgatgcgtcggatcggcgcctgccggacgccgtgcgcgacgtgttgcaggatctgacccaagagatcgatgggctgaatgaccggatcaggcggatcgaccgtcgcctggtcaagcattgcagggaggatgagacagctcggcgtctggcaacgatcccgggagttggcccgatcaccgcctgcgcgttgcaggccatggtgactgccccgaaatccttccggtccagccgtcacttcgcggccaggatcggtctgacgccgagggcgaactcgagtggcggcaaggaacggcttggccctatttccaagcagggcaacaccatgctgcgatcgttcctcgtgctgggcgcgatcgccagattgcgcaatgtccgctcctcgcccgagcgcgatggatggatgtcggcactcctcgcgcgacgcccctacaaggtggcagccgtcgcggttgccaacaagctcgcccggatcgcgtgggcgctcatggtcaggggaggcatctacagggaaaccgccacgtcctgatccgaagaccgcgtttcgccggaaccgccaccggcgaaggccaaggtgcaccacgatgatgaacgcgaagaaccggtagcccgacagcgagaaagcccgtgtccgtcaacgcgccccgagagcgccactttgatccggcactcgtttccgcgcatctcatcaaggcccgcagccaaggtgctgcaagtcgaggccggacacatgaccgcaccgttcgatcgctgtcatcaccaaaatcgcgccttgacccgcagggggcatccacaca

SEQ ID NO: 6300 - DNA, 1386 bp, unidentified
  source 1..1386: mol_type = unassigned DNA; note = element_9c3cf0c
  misc_feature 1..2: note = core
  misc_feature 3..80: note = LE
  misc_feature 81..1115: note = CDS
  misc_feature 1116..1386: note = RE
  misc_feature 1156..1372: note = bridgeRNA
gatggagtggatggctcccgctctcggcgtagcagcgccaaggtggtgctgtcgcgcagcacgagcttggagccgccacgatggagatcacgaccgtcggcctcgacctggccaagaacgtctttcaggtgcacgccatcggccgcacgggcgaggtcctcgtccggcgagcgctgaggcgggcgcaggtgatggccttcttcagcaagctgccgccgtgcctgatcggcatggaagcttgtggcacgagccatcattgggcgcgcgaacttacggccctcggtcacgcggtgcggctgatgccgccagcctccgtcaagccctacgtgaagcgcggcaagaccgatgcggcggacgctgaggcgatctgtgaggcggtcacgcgcccgaccatgcgatttgtgcccatcaagtccgtcgagcagcaggcggcgctcgcgctgcaccgaacgcgcgatctcctggtccgtcagcgcacgcaactggtcaacatgatccgcggcctcctggccgagttcggcatcaacctccgcaagggcattacccatgccctcgcattcgtgcggcgcgccgtggccggtgcggcgcgcgaggttcccgacctcgctgccaaggtaatcgccgtcttagccgcgcaggcgagcgaggtgcaagaccgcatccggcagctcgaacgcgatctcctggcttggtaccgcgccagcgaactggcccggcgcatcgcgactgtgcccggcgtcggcctgctcggggcgaccgcgttggccgccaccgtcaccgatccgacccacttccggtccggacgtcagttcgcggcctggctcggactgacgccgctcaacaactccagtggcggcaaggagcggctcggccgcatctcgaagatgggcgatcagtacctgcgccgtctcctggtcaccgggatgacctcgctcgtccggcgcaacaagcatcatcccagcgccgccgatccgctgatgaacgcgttgctcgcccgcaagccggtgcgggtcgtcacggtcgcgatggccaatcgggcggcgcgggcgatctgggccatcatggtgcgtggcgaggtttaccggatgccggtgaccagcgtggccacggcctgatggcgaaatccctgatccgttcaagcgcggtaccgcgcgaaggaggttgcgaggaccctgtgaagtgatggcgtaccggtcagaccggggacgaggacaacccgccagatgtcgagggcgtcgtagcccgcgaagcagaatgggacctcgtccgcggaaaccatcagggccagcggtcgatgaccgcgcgaacaggccggacacaagacggcacccgaccagcccgccagccttcagagacccccttgcaacgcgggagccatccacacag

SEQ ID NO: 6301 - DNA, 1384 bp, unidentified
  source 1..1384: mol_type = unassigned DNA; note = element_9c3ec10
  misc_feature 1..2: note = core
  misc_feature 3..84: note = LE
  misc_feature 85..1113: note = CDS
  misc_feature 1114..1384: note = RE
  misc_feature 1087..1371: note = bridgeRNA
tgatggagtggatgccccctcccgacggcatcgcaatgtgccagggtggcaatgttcgagcatcccacagaggagaaggcatccatggatcaggttaccattattggactcgatttggcaaagcgggctttccaggttcacggtgcgcgtggcgacggtggcgtggtgtatcgtcagaagttttcacgcgacaagattctgacgttcttggcccagcaaccgcgctgcgtcattgccatggaggcctgtggaagcgcgcatcactggggtcgggctatccgtgaccttgggcacgaggttcgtctcatcccaccgatctacgttaaaccgttcgtaaagcggcaaaagaacgacgcggccgatgcggaagcgatcgccgaagcggcggttcggccgacgatgcgcttcgtcgccgtgaagagcgaagatcagcaggcacgcgcgatgctgtttcggacgcgcgaccttctggtgcgccagcggacacagacgatcaatgcgctgcgcggccatctagctgaacacgggatcgtggcgccgcaggggccagcaaatgtgaaggttctcgggcaggcgatcgaagatggagaaacgtcgctgccgttgctcgttgtcgaactagcacggatttatctcgatcaaatcgaaggactatcaaagaagatcgccaagcttcagatggtcacagttcaagaagccaagcgcgagccactaacccgacggctccagacgatgcctggggtcgggccgatcacagccatggcgatcgagacctttgcgccaccgatggagttattcaaacgcggtcgcgatttcgccgcctgggtcgggctggttccccgacagcattcgacaggggggaagcaatttctcggcaggacttcaaaaatgggacagcgcgacatccggaggttgctaattactggcgccatggccgttgtgcgcttggccggccggaagggggtgccggaaggaacatggctcaaccgtatgctcgtgcgcaagccgcgcatgctcacagcaattgcgcttgctaacaaaatggcgcgcacgatgtgggccatgttgacgaagggcgaggattatcgagttcctgcggcggtgacgacctgattgctaaatcagtcccagcagccgggggagcgtcgggcgtgtgaggaggtcgccgaacggtaaggtcaattgatcggttagatccggatctagaaacgcatggattcccaaagagctgagagctcgatgatttgatctgcgcaagatccgcgcatctccataccggcccgcggccagatcaggtcgcacgaaaaggcctgacacatgaccgcacccgatcacacgatcgaaccgctcaaaaacttcttgcacgaacgggggcatccacaca

SEQ ID NO: 6302 - DNA, 1552 bp, unidentified
  source 1..1552: mol_type = unassigned DNA; note = element_9c43de5
  misc_feature 1: note = core
  misc_feature 2..281: note = LE
  misc_feature 282..1445: note = CDS
  misc_feature 1446..1552: note = RE
  misc_feature 48..262: note = bridgeRNA
acgtataataaaaccatctcgaaaggggtggttttattaattctcctttcctcgaaaattggttatacagcaggagtagctacctgcagtataatcaggtctagcactgtggatctgtacctatattcttacagcaagactgttttgaggtgactcagaccacagtggcttgcctgtattggtgattagttggttaacgcttgacgtttttatttgcgtgaatacatggacaagccatctgtggagaccagcagtgctaatctaaacaaaggaggaaatccatgtactttgtaggaatcgacatctctaagttcaaacacgactgcgccatcattgatgaactctgtgataccgttatgccctcatggtctttttccaatgaccgggagggcttttcgcatttcaaggcgctgctggacagtctggaaggggaaaagaagatagggcttgaatctaccggccactatgggcaaaatctgaagcagttccttgaatccaacggcttcacctttatggagttcaatccgcttctggtttccagattcgttcgcagcaaatccctcagaaatacgaaaaccgactccattgatgcgctcagcatcgcccagtatgtgatgacggtagagtacaagccctatccgtcctcattctaccacttggataagctaaagtcactcacaagatttcgcaatagtttggttcgtcagcgcagcagacaactggtggagcttaccaacgtcttggataaactgtttcctgagttcaaacccttctttaaagacaagttttctgtcacagccctgtacatccttgcgcactaccagacaccggaacggatcgccaacatgaacgcacgctcttatgaagccctgcgcaaactttcccgtggcagattcactctgagtaatttcacccagctcaaagccttggcaaaaaacactgttggaactcaaagcgattatctcctggatcagatgaatatccttctggagctttactcccagttggactccaaggtggatgaattggacgctcaaattaaagagtgtgttcggggaatcgatccaccctgtttatccattcccggcgttggagagctctctgccgccatgattctctctgagtttggagacttcagcaaatttcagaatccttccaaaatgcttgcctttgcaggtctggaaccaggttattttcaatccgggcaatctgagtataccggacatatggtcaaacacggctcatccaggcttcggtacgccctcatgaactgttgcttgcctctcatctccaatgaaccagtttttgccgcgtattacgccaagaaaagatcagagggcaaacctcatcgtgtggcattgacccatgttgccaaaaaacttctgcgggtcatttacacattgcaaactaaaaatatccgttatgatccgaccatgatccactaagatgcttcttttctttttccgtcctcctttggagggcttggtttcctgcgcccttttttcgtcactaaaaatttcttcgcaaatgacttgacttcctatagttggtc

SEQ ID NO: 6303 - DNA, 1587 bp, unidentified
  source 1..1587: mol_type = unassigned DNA; note = element_9c46ec1
  misc_feature 1..2: note = core
  misc_feature 3..261: note = LE
  misc_feature 262..1497: note = CDS
  misc_feature 1498..1587: note = RE
  misc_feature 73..261: note = bridgeRNA
aaacccccatgcctctgatgcggcaccaccataaatgaaactgcgagggcggcaggtgattgaaattgctgttgattgagcttatactgacattaacggcaaaaatcggcactaatttgggcctgtagcccgttcgctaaactgattttaggtactctcatttgcaccaccatctgtccagccgcttgcggcagaaggacgtacagtaaaataataatagacagagtaccgtgccgtaaattttattttggaggtaaccatatggataaagtttacgacaaatgttgtggtattgacgtgcacaaaaagctcatcgtcgcctgctttagaaaaggcagcaagcaggagttacggaactttggtgcaacaaccagagagcttcttgaattagctaactggcttcagaacggtggctgtgaaatggtcgcaatggaaagcacagcgtcctattggaagcctctgtataacatcctcgagtcttctgaactaaaggctatggtggtgaatgccagccatatgaaagcagtcccggggcggaaaaccgatacaaaggatgcggaatggattgcggagcttcttcagcacggattattaaaagccagttatatcccggataaacagcagagggagttaagggaactggtccgctaccggaaaagcctcgtgagtgaacgcacccgggaattgaaccgactccaaaagatgctggagggtgccaacataaagctgtccggtactgtatctgacatcaactgcatgagtgcgcgcaacattctggaataccttctcaccggagaattcttcgacgaagcaaagtatgatgaaatgtataaacagaaaatcattgcccacaatctcaaagccagcaaggaacagcttatcgatgatttaaatggtgtcatgaccccattacaacgtcgaatgatgaaagagctgctgtcccatctggatgaactcaatgttcatatcaacaatctggaagatgagattgataactttatgaaaccggaagaaaaaaaagcgacacaagcaatccaggatgtaactggtatcggaaaaaacagttcccaggccattatttcggtgattggtacagacatgagtcgttttccaacggccggtcatcttgctgcatgggcaggactatgtcccggcaataacgagagtgcccaaaagaggaagaccggaaaaatgcgaaaagggaatgctcttttacgttcaaccctggtagtctgtgcgcattccgctacaagaaataaaaattcgtacttttatgcgcagttcatgagaatcagttcccaccgtggaaaaaaacgggcttatgttgcagttgcccattccatgcttatagccatctatcacatactcaaggatggagttgttttcaaagatctgggtgctgattattacaaccaattcaacaaggaacgtaaaattaatgcgtacctaaagaagttaaaagcgcttgggtgggaggttccggtagttgccgcctgaacctgttagctgagttcaaaataaacgtcaaaaaggttgatgggggaagtctgcgcttttttggcttcccagaagttaaagtttcacagt

SEQ ID NO: 6304 - DNA, 1617 bp, unidentified
  source 1..1617: mol_type = unassigned DNA; note = element_9c4949a
  misc_feature 1..2: note = core
  misc_feature 3..287: note = LE
  misc_feature 288..1493: note = CDS
  misc_feature 1494..1617: note = RE
  misc_feature 15..307: note = bridgeRNA
ctactacaatatatttatggtttaatgtgcctgacatccagccaggtctttttccattttgttgcttaagctgttagaatagaaggagcaataggtataacggtatcctccttggacttcgcgtccgtagttaagactgctaaccagctcctcattcgcagcgttcgttttatgcaggttgaactgctgtcctacagtacgttcgagtcacaccacagtagatagaataggcaatgagtaaaactggtacttatccattgcaataatatttaaggagtgacgaatttatgaatgctgtaggtattgatgtttctaagggcaaaagtatggttgctatccttcgcccatatggtgaaattgtttcttcaccttttgaaatccaccacacatccagtgatatccattcattaatcaaacagattacatcgattgatggtgattctcgcattgttatggagcacactggtcattattatgaaccactggctcacgagctttctcaagcacatctttttgtaagcgctattaatccaaagctcattaaagattttggtaataattctctccgtaaagtcaagtctgataaagctgatgcaataaaaatagctcgctacgcacttgacaattggacggatttgaaacagtattgtcttatggataaattacgtaatcaacttaaaacaatgaaccggcagtttagtttctacatgaaacacaaaactgctatgaaaaacaacttcataaagattcttgatcaaacttatcccggtgttaatacttactttgatagtcctacacgtactgatggcagtcaaaaatgggttgattttgctactacatactggcatgtggattgtgttcgtaaattgtctctaaacactttcattgaccattatcagaaatggtgcaagcgaaagaagtacaactttagtaggttaaaagctgttgaaatttatgaaatagctaaggaacttgttcctgtacttcctaaagacaatctaaccaagctcattgttaaacaagctgtggagcaacttaatagtacttctaaaaccgtagaagaacttcgcgtcctaatgaatgaaactgcatcgaaacttccagagtatcctatcgtcatggaaatgtcgggtgttggtccatctcttggacctcagttaatggctgaaatcggagatgttactcgattcactcacaaaggtgcactttcggcttttgctggtgtggatccgggcgtcaatgaatctggcacttactcacaaaaaagtgttcctgcttctaaaaggggatcttccaacttgaggaagacattatttcaagtcatggatgcacttatcaaaaacatgccacaagatgatgctgtgtataagtttatggacaagaaacgctcccaaggcaaaccttattatgtgtatatgacagcaggtgcaaataagttcctgcgtatttactatggaagattgaaagaatatttcgcttctcttccacagtaataaacatttaatgtagtatttttttaggtcagcgatacccgatggcctacttataatgctttatttctcaatctgaaactttttcagaaaatttctattttactattgactttttatttgcagg

SEQ ID NO: 6305 - DNA, 1566 bp, unidentified
  source 1..1566: mol_type = unassigned DNA; note = element_9c4cd35
  misc_feature 1..2: note = core
  misc_feature 3..261: note = LE
  misc_feature 262..1458: note = CDS
  misc_feature 1459..1566: note = RE
  misc_feature 35..281: note = bridgeRNA
ttggtactgtataagtgtagataaaaatcatagaaatatgatttgaatatctgcacttattttaatttataataaagggagtaattggtctggcgagaggtcttttggattttaacatccgttataaaaactgccagccatcccttattataaagattcgattaagcaggttgaaaccgtacggatttcgtgtaactaaccaaaatgaattgtaataagtgtaggtggatcaaaattacaatattatataggaggaaacgaatgattagtgttggtattgatatttcaaaggaaaagagcatggtatgcattttaaagccatatggtgaaattattgctgaaccatatgaaataaaacatacagatgcagagttaaagctattagtagaaactattttaaattctaaggaagatgctagggttgtaatggaagcgaccggtgtataccatttacctgttcttagctatcttaaagagcataatatatttgtagccgtaataaatccattagttatgaaacgatattcctacggaggattacgaaaaggaaaaactgataaaatggatgctgtgaaaatagctaattacggaattgataattggtttaaattgattaattacaatgtatcagataaagtttattcagaattgaaattattaggaagacagtattctcattatataactatgagaattgaaagcaaacttgtactcagtaatctcttggaccgaacaatgccaggaataaaaaaattattacagaacagatctgataaaccacaaaaagataaattaaatgactttgttaaggaatactggcattacgataatattactaagaaaagcgaaaaacaattcataataagctatttaaaatgggcaaaaaagaaaggataccatcagaacgagactaaagcaaaacagatatatgctttagcccaagaaggcatcccaacattatcatctaataccccatcaaccaaaatgttagtattagaagctgtacgggttctttcagaaatagatagaactctacatataattttatcacaaatgcaagaactagcaagaaacttaaaagaatatgatgttgttagagatatgcctggagtaggtgataccttggctccacgtttaattgctgaaattggtgatgtaagacgtttttataataaaaaggctttgatagcttatgcaggtattgattctccaccatttgaatcgggacagtttgttgcaaacaaacgtcggatttctaagaggggttcttcattattacgaaaaactggatatgaaattatgaaatgcataaaaagtaataaacctgatgatccagtatttttatatatgataaaaaaagaaacagaaggtaaagctaaaaaagttgctaaaattgctgcactaaataaatttttaaggatatattatgctaaggtaaaagaagtttacaatacttaaatttattaatacttgtacctagattaaacagaatatctgtttagtctatttgttatgcaaaaaaatagataaaaacctgataaaaaacacttgatttttattagcagg

SEQ ID NO: 6306 - DNA, 1394 bp, unidentified
  source 1..1394: mol_type = unassigned DNA; note = element_9c4d79d
  misc_feature 1: note = core
  misc_feature 2..80: note = LE
  misc_feature 81..1109: note = CDS
  misc_feature 1110..1394: note = RE
  misc_feature 1132..1384: note = bridgeRNA
tgatgaggtggaacgaccccgcttccgaacgctagctggtggtacgttgaagagcgaccacgagttaagggagccggtccatgctagagattgctattgttggcctcgatctggcgaagaacgtgtttcaggttcacggtgctgatacggagggggccccagtcctccgaaagaagctgaggcgaaccgaagttctgccgttcttcgcgaagctgccaccgtgcctggttggaatggaagcctgcggcggcgcgcaccactgggcacgggaagtttctgcgcttggtcatcaggttcggctgatcccgcccgcttacgtcaagccgttcgtgaagcgtggcaagaccgatgccgccgatgcggaggcgatctgcgaagcggtcagccgcaagaccatgcggttcgttccggtcaagtccgccgagcagcaggctgacgcgatggtgctcaaagcccgcgagctgctcgtgcgccagcaaacacaggcgatcaacgccttgcgggctcacctgcatgaactcggcatcattgccggtgcgggcgtcgccaaggtgtcgcagctcatcgatatcgcgcgcgatcccgacgacccacgcatcccggctacagcgcgtgtggctctcgccgcaatcgtggggcagattgatgccttgggtcaggaactcaggcggctcgagcgcacgattgtggcgatgggcaagcgcgatcccgacacgcaacgcctgaccacgatccccggcgtcggcgctatcacggctgcatcgatcaaggcactggtgccggacatcggtgggttcaggtcggcccgccattttgcggcctggttgggcctaacgcccaaacctcattccagcggcggcaaggagcggctgggtcacatatccaagatgggcaatcccaccttgcgtaagcttctcgtcctcggggcgttggccatgttgcgcagggccaagaatgccgagcctggactggaatgggttgcccggctgctggcgcggcggcccggcaaggtcgtcgccgtggctctcgccaacaagacggcacggatcgtcttcgccctgctcagtaagggcgaagtctataggaaacctgcgctcgcgactgcctgatcggcaagcgcgcagcaggggaagcgggcgtcagcgagctggcgaccaaggaagcaaggtgcacaggaaggcgatgaactgacgggacgacatcccgaagcgaggcaggctaatacgccaacgcgcgatccatgattagcacggaatgttgatcagccacccgcttcgcggatctcatcgaggccagcggtcatacggccgcacagcaaaggccggacatatgaccgcaccgttcccgatcagaaacgcgccggacaaatgccttgctccaagggccgttccaca

SEQ ID NO: 6307 - DNA, 1396 bp, unidentified
  source 1..1396: mol_type = unassigned DNA; note = element_9c52f60
  misc_feature 1..2: note = core
  misc_feature 3..83: note = LE
  misc_feature 84..1112: note = CDS
  misc_feature 1113..1396: note = RE
  misc_feature 1128..1383: note = bridgeRNA
tgatgtggtggacggcgcccgctcccggcaacgaattgccgtagggtgatcgttgcgaagaatcacatgagggagccgtccacatgcaaattaccacgattgggttggatatagccaagaacgtgttccaagttcacggcatcgatggcgacgagaaggtcgttgtccgcaagcagctccggcgcagccaggtcatgcgctttttccaggagctcgcgccatgccttgttggcctcgaggcgtgtgccacagcccaccattgggcgcgcgagctgcaggcgcttggccatacagtgcggctgatgccggcgaaggacgtaaaggcctacgtcaagcgcaacaagaacgatgctgccgatgccgcggcgatctgcgaggcggtgcgtcgcccgagcatgcgttttgtgccggtgaagtcggccgaacagcaggcgcagttgatgcagcatcgggcgcgcgatcttttgatgcgtcaacgcacgcagctgatcaatgccatacgcgcccatatggccgagctcggcattaccgcgccacaaggacgcgaggggatcaagcagttgctggcgattgttgcagatgacgaggatctgcgcctgccggtcgatgcacgggcgagccttatcgtgttggcggcgcagcttcaggctatgcagacgacgatcggatcgcttgagaggcggatcgtggcgcggcatcgcgcgaacgccgacagcaagcgacttcagaccatccccggggtcggggttattggcgcgaccgccattgcggccaccgtttccgatcccgccgcattccggtcgggacgcgattttgcggcctgggttgggctggtgccacgcgaagcctcgaccggaggcaaacagaagttggggccaatctccaagcagggcgaccgttacctgcggcgcatccttgttggcggtgcagtttctattctgcgccgtgccaagctcaatccactgagatatccctgggtcacacaactgctagcgcggcgaccgttcaaagtggtcgccattgcgctagctaacaagatggcccgtgtcgcctgggcgttgttggccaagggtgggacctatcgaagacttcggcttgcagcggcagtctgagtcagcaagcggcttgccgacggaagcagaaggttgcgtccgtgcgttcacgaactgcaggggtgatgacgacattgatgcgaaacggtcgagaccgtcgatcgggaaaacccgctttgtgccacgcgaggaaagaacgcgtgcttttgattgggacccgatcagcggatcacatcagggccagcggccacagcggccgcatcataggccgtatacatggctgcacccgaacgtttcgctgagatgtccgatttttcccttgcaccgcgggcgccgtccataca

SEQ ID NO: 6308 - DNA, 1362 bp, unidentified
  source 1..1362: mol_type = unassigned DNA; note = element_9c54bba
  misc_feature 1..3: note = core
  misc_feature 4..79: note = LE
  misc_feature 80..1102: note = CDS
  misc_feature 1103..1362: note = RE
  misc_feature 1098..1348: note = bridgeRNA
tgatggggtggacggcccccgcaccgaggtaggtgtgcgatgatgcggctgtcggaagccacgtctagaggagtcgtccatgccccaggagatcgctgtaattggcctcgatctggccaagaatgtgttccaagttcacgccatcacccatgatggcagtccggttgtgcgccggcagcttcgacgagctgaggtgctgaagttcttcgcgaagctgaagcagccatgccttgtcgggatggaagcttgtgcatcagcccattactggggccgggagatcggcgcgctcggccatgaagtccggctcatgccgccagcgtatgtgaagccgtacgtgaagcgcggcaagaccgacgcggccgacgccgaggcgatctgcgaggccgtgaccaggccgaccatgcgctttgtcgcggtgaagtcggaagaacagcaggcggcgctgatgctgcacaagacccgcgatcttctggttcggcagcggaccatgctgatcaacgcactgcgcgcccacctcggtgagtatggcattgtgaaggcccaaggtcctgcgggagtgaccgcgttgctcgctctggttcaggaggcccaagccgtgatcccggcccacgcaagatcagcgctatccagcatcgtcacccagttccgcgcgctcgtgcgcgaaatcgacctactcgagaagcagatcctcgactggcaccgccacgatgaggtcagccagcggcttgcgacggtgccgggcatcgggccgatcacggcatcggcgattgcagcgaccgtacccgatgcctcaattttccgatccggacgacagttcgccgcatggctgggcctgacgccaagaccgcacagctctggcgggaaggagcgcctgggcggcatcacaaaacagggtgacggctacttgcggcgcctgttggtcgtcggggcgacggcggtcatgcggatgacgcgcaaggatcacgcgaggcagccgtggctagccaagcttttagcgaaaaagccagccaagctcgccagcgttgctctggcgaacaaaacggcgcggatcgcttgggtcattatgagccgtggggaaatttaccgcccagctgcggcctgatcgacgcagatagcaggtgcgcttacgagatggtgcagggtgaatgagtggtgatgacagaccggtctgaccggggatcgtggaaacccaaggggagcaggcgctaccaagcgcgttgacgtgatcagggaaacgatccgcggacttcatcagggccagcagccatgcggtgctgcacgaacaggccgaacacatggatgcacccgaccggtgctaatcgaccctcaaaaacctgttgcaccgcgggggccgtccacaca

SEQ ID NO: 6309 - DNA, 1517 bp, unidentified
  source 1..1517: mol_type = unassigned DNA; note = element_9c58b94
  misc_feature 1..2: note = core
  misc_feature 3..244: note = LE
  misc_feature 245..1417: note = CDS
  misc_feature 1418..1517: note = RE
  misc_feature 3..224: note = bridgeRNA
ctcgtattattagatttgtagtttttatagaccctcatcaaggtcttataatgctcacagacgctgtggattagtctatggcctcctaacgctttgacgttttaagaaaggcaataaccacagccgtttgtttaagcggtaattagttagataacgcataacgtttcatttagcacgaggttacgtgggaacaaacatgtctgtggatcaaagcagtgtcaaatctttatttggaggttctgctatgttttacgcaggaattgatgtggcaatggataaacacgattgtgttgtcctggattcgggaggtaattgtgttgttgaagtttttaccttcgagaacagtggtaacggatttaagactttgcacaaggttcttaaatcctgttccaagaaacccgagaatataaaagtaggactggaagcaaccggtcactacagcgataatctcctagctttcttgaacagtatcggttactcccccgtgctgttcaatccgttacatactaatcttttcagaaaaggtcagagccttagaaagacgaaaacggatcacgtcgatgcgcacaccattgcgactatgctgagaactgaagatctcaagtcctactcgcaaccatcttaccacctgaatgaattgaaatcactaacgcgttaccgttcaacacttgtatctgactgtagccgacgtaagatttctcttgtcagactctgtcagattttgttcccggaacttaagaatcttgttccttcgctgcacatgagttccgtttataccttgctttcagaattgccatccgctgataaggttgctaagtgtaatcttatgcatctgacatctctgctttcttctgcttctaaaggccactatggacgcgataaagccattgagatcagagaacaagcccgatcttcaattggcattagaagcgttgtcaaggaattagaacttcagcaaaccatagaactcatcaggattcttcaacaacagattgaagccgttgaagaagagattaacagccttatggatgacatcgacagtccgataacttcaattcctggtatcgctaaccgtatggccgccgtaattatcgctgaaacaaacaatttcaatgacttcgagcgtgcggaacaagtcctcgcattcgccggtttggatccttccgtctatcagtcgggtcaacttacatctacgcattccaagatggttaaacgcggttcaaaatatcttcgctttgccatcttcaatgctacgaagtatgtttgtcactgggatccaacattcagagcctatctggctaagaaacgagctgaaggcaagccgtacaatgtagccgtatctcatgccgccaagaagctgaccagggttatgttccatctcgtaaaaacaaacaaggagttcgttccacaagcataaaccacagcaattcataccacttgtttcgttatgcaattatcaaggttcgatgcatgtagcgtttacgctacatttttcatattgacttttaatagttagt

SEQ ID NO: 6310 - DNA, 1378 bp, unidentified
  source 1..1378: mol_type = unassigned DNA; note = element_9c616c2
  misc_feature 1: note = core
  misc_feature 2..86: note = LE
  misc_feature 87..1112: note = CDS
  misc_feature 1113..1378: note = RE
  misc_feature 1142..1370: note = bridgeRNA
caatgggatggactcctcctccccctgagggcacgtaagtgccaaactggagtttccacactaccggtttgaagaaggagtccgtcatgaagcttatccgcgttggggtcgacttggcaaagaatgtctttcaactgcacggcgtagtccactcagaaaagacggtctggcggcgcaagctggtccgtggtgactggatagaggcactgctcaagaggatcgagccgggctgcgagatcgggatggaagcgtgtagcggcgcgcaccactgggcccggttgctacaggcaaagggatacacggtgaagctgatcgctccgcagttcgtcaagccctacgtcaagagcaataagaacgacgcgaacgatgccgaagcgatctgtgaagcgatgagccggccgagcatgcgttttgtcgctgttaaaaccgtcgagcagcaggatatccaggccgtacaccgggtgcgctccggtctgatggatcagcgcaaggcgaaggccaatcaactgcggggtctgacgtccgaatatggattggtggcaccgaaagaactgctgcacttgaggtcggcaatcccgcgctggcttgaggatcaggaaaacgggctaagcgaacgctttcgccggctgttgcgtgggctgtggcgggatctgctggctttcgacgagcgtatcgaagagctcgaccgggaaatcgaacagattgcccggcaagacccagtggctgtacggttgcagcaagtgcgtggcatcgggccgcttaccgcgacggcattgctggcaacggttggagacgcgagtcagttttccaacggtcgagagatggctgcttcgtttgggctaacgcccaaacaaaacagctcgggaggaaaggagcgattgctcggcattagcaagcgaggtgatgcttatcttcgcagtttgctggtccatggcgcccgagctgtcatccgaacggcgcaagcgaaaacggaccgattgagtatctgggtgatgcgcatcgcaatgacgcgacacccgaatatcgccgcggtagcgttggcgaacaaaacggcccgtgtagcttgggcaatgctaaccagaggaactgattaccaaccacaagccgcgtagcgcagctgtagaagtacctgaagaagtatccgaaccacgattgcatgacaagccgcatgatggccaacaggtcgaaccggcgctgatgaaacccgataacgtctgaggccttcgagcccgtcaaagcgatagggagtcagcgcgcgaatagcccatcagggtccagcacctggaacaggtgtagtagtacgagaccggatatacgtgagcagtcgtacctcacggcctgacgacggattgtttgcaaacgaggaggagtccatata

SEQ ID NO: 6311 - DNA, 1360 bp, unidentified
  source 1..1360: mol_type = unassigned DNA; note = element_9c65090
  misc_feature 1: note = core
  misc_feature 2..77: note = LE
  misc_feature 78..1109: note = CDS
  misc_feature 1110..1360: note = RE
  misc_feature 1132..1351: note = bridgeRNA
taatgagatggtccgccgctgtatccctccgctgaggtggagcatggaggcagcggtttcacaggaggatcatcggcatgcagattcgttcggtaggcatcgacttgggcaagacgacgtttcacctcgttgcgttgggcgcatcgggcaaggttttggtgaagaagaggttcacgcagaagcagctgctggcgttcacggcgaacatgcagacctcgctgatcggcctcgaagcctgttctggtgcccactttcttggtcgagccttgaagcaacaaggccatgacgtacggctgatcgcagcgcagttcgtgaagccgtttgtgaagtccaacaagaacgacttcgtcgatgcagaggcgatcgctgaggccgttgagcggaagaacatgcgcttcgttccgatcaagacggatgaccagctcgacctccaggcgatacatcgggttcgggatcggctggtgtcccgacggactgcggtcatcaaccagataagagcgtttctgttggagcgcggcatggtctttgcgcagaagccagccaagctcaaggccgccatgccagatgttcttgagaacgcagagaacgatttgacacctatgatgcgcaccctgatggataagctgtgggccgagtggaagcttgttgaagagcagcttaaagaactcggcgatgagctggagcggatttctgctgccgacgccggctgcacccgcatacgtcagatcccaggcatcggccctgtcgtcgccacggcgatcgtcgcggccatcgggaacggagcggccttccgtaaggggcgggagttctcagcgtggctcggcatcgtgccacgtcagtactcaacgggaggcaaggccaagttgctgggcatcagcaagcgaggcaacgtctaccttcgcaagatcctgattcatggcgctcgagctgccgtactgcgtatcaagcgagatagagtgccgatcggagcttggttagatcgactcgacagtagggctccgaagaacgtcgtcgtggttgccatggcgaacaagctggcacggatcgcttgggctgttctatcgagcggtgaagagtacaagccagctaacgtcgccatcgcagcataagcaccagcacgacagctcaagttcccaccgaggtctgcacaggagtagcaaggacgaaagaacagtcacaacggcgtgtccgaagcctggtactgagaatggtcctcgacgaccgaccgacttagaaggacagacacgcgcgcaactcatcatggccaggagagacgatctccacccgaaggccgaatacatttgcgcagacttgtcttctcgaccaaaataccccttgcagtcgcgcggcggaccataca

SEQ ID NO: 6312 - DNA, 1499 bp, unidentified
  source 1..1499: mol_type = unassigned DNA; note = element_9c7edf9
  misc_feature 1..2: note = core
  misc_feature 3..303: note = LE
  misc_feature 304..1479: note = CDS
  misc_feature 1480..1499: note = RE
  misc_feature 6..239: note = bridgeRNA
ctaataagagctaccgggtagacgagagtcatactcggctccggtaagccgccggtaggaaagcactcgcgggaccaggacgcttgcagtcctattgacagatcgtgcccctgccggtggtcgggagaccagaccgctgatgggatgtcgtgtccgctgatcctggcgtgagcacttgtttattaggtcgctggcccatctcccgcaggctcaccggaacccgcaacgtctactgtggattggggttcagagttgttgttcgttggggatgactgggcggaggaacaccacgacattgaactgatggaccaggccggccgggtgctggcccgagcgaagctgcccgaaggtgtcgcgggcatcgcccggctgcacgcgatgatcggcgagcacctcggcgaggacgaggacgagccgacggtcgtggtcgggatcgagaccgagcgcggcccgtgggtacaggcgctgatcgcggccggctaccaggtccacgcggtcaacccgctgcaggcggcccgctaccgggagaggcacagcgtatccggggccaaaagcgacaccggtgacgcgcacgtcctggctgacatggtgcgcaccgaccgccaccagctacgcccagtcgccggcgacagcgccgaggccgaagcggtcaaggtcctgtcccgggcgcacaagacgctgatctgggaacgcacccggcacctgctgcggctgcgccacgcactgcgggagttcttccccgccgcgctgctcgccttcgacgacctgaccgccgtcgacgccctggagctgctcgccgtcgccccggaaccgaccgccgcggccgcgctgagcctcgacaccatcagcgccgcgctcaagatggcccgccggcacaaccgcgccgccaaggccgaggcgatcgccgccgtgctacgcgccgagcacctcggccagccgccggtcgtggccgccgcgtacgcggtcaccgtccgcgcgcaggtcgcgatcctgtcggtcctcaacacccagatcgccgaactggaggaacaggtagaggcaaatttttccgagcacccggacgctgacatctacctcagccagcccggcctcggcgctgtgctcagcgcccgggtgctcggtgagttcggcgacgacaagaaccgctacgccgacgccaaggcccgccgcaactacgccggcaccagccccatcacccgccagtccggcaagaagaaagtcgtcatggcccggtacgtgcacaacgaccggctcctcgacgccctcggcaggcaagccttctccgcactgcgcacctcacccggcgcccgcgcctactacgaccgcatccgcgcccgcggcaccggccaccaggccgcgctacgtcagctgggcaaccgcctcgtcggcatcctgcacggctgcctcaagaccggcacgaagtacgacgaggccaaagcctgggcaccaacccaacaagatcaacaacttgccgcttgacaaaattcaacatgggatgt

SEQ ID NO: 6313 - DNA, 1497 bp, unidentified
  source 1..1497: mol_type = unassigned DNA; note = element_9c8d333
  misc_feature 1..2: note = core
  misc_feature 3..103: note = LE
  misc_feature 104..1219: note = CDS
  misc_feature 1220..1497: note = RE
  misc_feature 1237..1431: note = bridgeRNA
agtccgtatgtccttcttcgtggctgaggtggctcgccctactctggtcttccgagggttgcacggataggccgagccgatcctcacgacaggaggacgagccgtggcagattatagagaagcttttgtcggaatcgatgttgccaagctgaagaacgcgattgcgattgctgaatgtggccggaacggagagatccgttatgtcggcgaggttgaggcatcggatgccagcatgcgccgcattatccagcgtatagccgcaaagtttgatcacgtgcatttctgctacgaggccggccccaccggttacggcctccaccggctcatcaagtcgctgggccatgactgcatggttgtcgctccgtcgctaatcccgaaaaagcctggtgaccgcgtcaagacgaaccgtcgagacgcgcttgcgctcgcccggctattgagggccggcgagctcacggcagtctgggttcccgacgagggtcacgaagctatgcgagatctcgttcgcgcccgctctgccgctgtcgagacgttgcgggttcatcggcaacaggtaagtgccttcatgctcaaacacgggcgcgtctatccgcgcaagaaaggctggacgatgcggtatctgcactggctgcaagagcagtggttcgatcatccggcacatcagatagcgctgcaagaaatggtcgaggcagttcgcatctcgaaggagcgtgtcgaacgactggagaaagtgatcgaggagttcgtcccgaactggtctctcggcccggttgttcgagccctgcaaacgctgcgcggggtcgatctgattgtcgccgtcaccttcgccacggaagtcggtgacgtgacccgctttgaaagcccacgccaattgatgggctatctcggtctcgttcctggcgagcgatccacgggggagaccgtaagacgaggcgcaataacgaaggctggcaatggacgagtccgacacatgcttgttgagagtgcgtggacgtatcggcatccaccgaagctgggcgttaggaagctgtaccacctgcaggcagccccgccggcagtcagagagatcgcgtggaaagctcagagcagattgacggctcgatatcgtttgcttgccgtacggggaaaacgaacgacagtagtttgcactgcaattgcccgagaactggccggcttcatgtgggctgttgcaagggaggcgcaggcgatcagaacataggtcactgcagcaaacttgcacctcgcgcatgggcggaggcgggacaacggcaggggaatatccgtcagccgctttgtggccggcactgaccgacgcccgcagtaagataggaacagccccggacgcattatcgggaatgcggtatccaatccgcgcatcagagcttgatcaccgacgtccttgagtcccgcctccacccatacgcgatcatcatcatgaacagccgttcgtttggacggtcggttcctcgtgcccaaagcattgacaacggacatcag

SEQ ID NO: 6314 - DNA, 1556 bp, unidentified
  source 1..1556: mol_type = unassigned DNA; note = element_9c9ffe6
  misc_feature 1..4: note = core
  misc_feature 5..619: note = LE
  misc_feature 620..1417: note = CDS
  misc_feature 1418..1556: note = RE
tcacgtataataaaaccatctcgaaaggggtggttttattaattctcctttcctcgaaaattggttatacagcaggagtagctacctgcagtataatcaggtcaggcactgtagatctgtccctatattctcacagcaagactgttttgaggtgactcagaccacagtggcttgcctgtattggtgattagttggttaacgcttgacgtttttatttgcgtgaatacatggacaagccatctgtggagaccagcagtgctaatctaaacaaaggaggaaatccatgtactttgtaggaatcgacatctctaagttcaaacacgactgcgccatcattgatgaactctgtgataccgttatgccctcatggtcttttttccaatgaccgggagggcttttcgcattcaaggcgccgctggacagtctggaaggtgaaaagaagataggggcttgaatctaccggccactatgggcaaaatctgaagcagttccttgaatccaacggcttcaccttttatggagttcaatccgcttctggtttccagattcgttcgcaaagaaatccctcagaaatacgaaaaccgactccattgacgcgctcagcatcgcccagtatgtgatgacggtagagtacaagccctatccgtcctcattctaccacttggataagctaaagtcactcacaagatttcgcaatagtttggttcgtcagcgcagcagacaactggtggagcttaccaacgtcttggataaactgtttcctgagttcaaacccttctttaaagacaagttttctgtcacagccctgtacatccttgcacactaccagacaccggaacggatcgccaacatgaacgcacgctcttatgaagccctgcgcaaactttcccgtggcagattcactctgagtaatttcacccagctcaaagccttggcaaaaaacactgttggaactcaaagcgattatctcctggatcagatgaatatccttctggagctttactcccagttggactccaaggtggatgaattggacgctcaaattaaagagtgtgttcggggaatcgatccaccctgtttatccattcccggtgttggagagctctctgccgccatgattctctctgagtttggagacttcagcaaatttcagaatccttccaaaatgcttgcctttgcaggtctggaaccaggttattttcaatccgggcaatctgagtataccggacatatggtcaaacacggctcatccaggcttcggtacgccctcatgaactgttgcttgcctctcatctccaatgaaccagtttttgccgcgtattacgccaagaaaagatcagagggcaaacctcatcgtgtggcattgacccatgttgccaaaaaaacttctgcgggtcatttacacattgcaaactaaaaatatccgttatgatccgaccatgatccactaagatgcttcttttctttttccgtcctcctttggagggcttggtttcctgcgcccttttttcgtcactaaaaatttcttcgcaaatgacttgacttcctatagttgg

SEQ ID NO: 6315 - DNA, 1502 bp, unidentified
  source 1..1502: mol_type = unassigned DNA; note = element_9caa4d5
  misc_feature 1..3: note = core
  misc_feature 4..277: note = LE
  misc_feature 278..1426: note = CDS
  misc_feature 1427..1502: note = RE
  misc_feature 41..260: note = bridgeRNA
ctcgtatgtttacattagattacaaaaagaccaaaataggtaaaaaataattcataatttgagagcatccaaaagtgagagggattctaaccaaagcaactttattaagtatgcagaccaagagatctcgccccgcttttggagttctttagagacagaatagcatttaaggcggttttgctaagtgcaacaaaatgtatttagttatttctagccagcataattgtacgagaaaagtcgaaggagaacacattttacatttattaaattttctattatgaattattttaaacagaacttagggcttgatgttgattcagctgaattaaaagcatcctttcaaaaaatgagcgacgaacaagaaatgaaaattgttgctagtcgaacatttaaaaatacggttaaaggattcgaggatatgcaagtctgggtagaaaaaaagaggattaaagatcttcctattcatgtgacaatggaagcgactggagtgtattatgaaaatgtagcctatttttttcatgagcagaaaaattacgtggtgcatgtagtgttacctaatatgagttcggcttatatgaaaagcttaaattctaaatctaagacagataaaatagatgcaaagaatttggcgcaaatgggtttagaacggaagctttcgatttggaatccaggtagtgatcagatgcgttctatcaaaaaactagttcgtgaaagattacgttttcagaagcttaagacgatggtttccaatcaattacatgcagaaaatagctctcatcagcctaatttaagagttgttattcgatccgagcaaaccatcacttttatagctgatcagatagtggaaatagaaaaagagttaaaagcaactgtcaaagcagatgagcaattagaacagcgaataagtaatgtttgtacagctccaggattagcctttattacggttataggcttagtggctgaaacagatggatttgctctttttaagaatcgaaagcaattagttagttacgctggatatgatgttattcaaaatgaaagtggcaaatcaatattgggaaaaaccagaatatctaaaaaggggaattcctatatcaggcaaatgttgttcatgccaggtatgtctgcaacaacttataatgaacagtataaaaaacttcatgcccgaattaccgatagaacaaaaataaagatgaaagggaatgtagctgtccaaagaaaattgctattactagtatatacgctttataaaaataatacgactttcgatgcattataccaacaaaaagttgaagatgagttggcaaaacggcgtaatcaaaagaagcaacttgcagaacaaaaaagaatcaaggagttgaatgaactattaaataacccaaataaagttgtagaccatgtacaagacatggcctactctggatagatcaactaattgatcttccttgagtcgctaatttatgaaattattttcaaagaacgcttggtttttatcatagcat

SEQ ID NO: 6316 - DNA, 1323 bp, unidentified
  source 1..1323: mol_type = unassigned DNA; note = element_9cbe8fa
  misc_feature 1..3: note = core
  misc_feature 4..69: note = LE
  misc_feature 70..1107: note = CDS
  misc_feature 1108..1323: note = RE
  misc_feature 1082..1308: note = bridgeRNA
agatgtatggactcccttccctgaaaggggtacggtcttaattgtcaaattagccaaaggggtccatacatgattaagaatacaattattgcaattgaccttgcaaagcattcctttcaggtttgcaagttcaacagtgacggaaaaattgattataacaaagcaatgagtcgtaaagcattgatagcacttctgggaaaccatgtgtcagcgttagtggcaatggaagcctgtggtggctcgaattactgggcgcgtttagcgaggcggcatggtcatcaagtaaaaatcattcatcctcgcgcagtaaaagggctgcaattaaagcaaaaaacagataaaaatgacgcctacgctatcggtattgcggctcaattacctcatataaactcttgtggcatcatggaggaagatgaacagggtcttcaggccctggagcgggtgcgaatgctgcagttggagcaaaggacggcgttggcaaaccagatacgaggactgttgacggaattcgggattgtgatagcaaaggggttaaatcatttagtcactgcgctgcctgacattttagaagatgcagaaaacggcttgccgatgaattatcgtcaggctttggctgcgcagtcacaaatgttacaactctatacgactcaaatagaaagttatgacaggctcatagcagaacacacgcggcataatcctgtttgccagaaattaagtaaactcgaaggcgtaggccctttgattgctttggggttaaccgttcgattgggaaatgcgacagagttcaatacaggccgggatgcatcagcatgcataggtttgacaccgaagcagcattcgaccggcggtaaagagcgattgggacatatttctaaaaactgtgcagataaaagattgcgaagtttgctctatcagggagcaatgtcggtagtgaataaagcagtatccagagagcctaagactgtgaaagagcagtggctgaaggcgttagttgaccgaaggggaaagaaggttgctgccatcgcgttagcaaataaaacggtgagaaccgctgttgctctaataaagaataatgacgattacaatccgatactgttagcagcctaagagttagtaaatcaacaaattgcgaaaataaatggtaagaccaaccagcagaattcagccagtcctctcaagtgactaaacactgtgtgtgagaattgaactgttggtgcgtatacatcgaagggcaggagtagctctccatttaaagcccgtatataagagcgcatctactactaatttttcaaaagatgttgattacttcagggagtccatata

SEQ ID NO: 6317 - DNA, 1840 bp, unidentified
  source 1..1840: mol_type = unassigned DNA; note = element_9cc0790
  misc_feature 1..3: note = core
  misc_feature 4..239: note = LE
  misc_feature 240..1454: note = CDS
  misc_feature 1455..1840: note = RE
cttatatgttaatatgttttcaagccctcttgaccaagggctagcagggtcgctccctgctcgattcgtcctgctggggaaaggctaatgactccacacggcttgaccggcaacgaaagatcgctctttcccagcagtttttcctgggccaatcgatgattggagggtagttgcttcgagcacccgttatataaggacccgaccgctcccaggaagtgttggcgaaaggaagttcgaagatgtggtatgttggattggattggagcgatacccatcatgatgtggttgtcctcgatgaagccggacatcgggtgggaacgcagcgttttgcccacagccatcaaggtttgcaccacttgaaagactttttgctgggcatagcctctaggccggaggatctggcctgtatcgtcgaaacgaatcacggcctgctcattaccttcctgttggaagcaggcattccggtgtatccggtcaacccgaagaccgcgaatacactgcgtaaaacagcaggcgcgaagacaggccgcattgatgcctatctgctggcgaaaaccggacgcttcgacctagccgatctgcgtcgcctctctcctgatagcccgatcattgctgaattgaagacgctcacacgcgatcaggatgctttgattcaaagtcaaacgcgactggtcaaccaactcaccgcctgcctcaaagagtattacccggtcagcttgaagctgtttggaaaactgcatcagccctcgacgctgctgtttttgcaggcgtatccgactccaaccgcagcggccgccgcttcccttgaagagattgaggcactgctcaaaagctgcaagtatcccaatgcgcggcgggcagcccttgagatggtagagcaactgcatcaccaagagttgacggccaatgaggtcatcgtgcgtgccaaatcgcgcctgatgctctcgctggtcagacagttgctgccactgcttgaggacatcaaaggctacgataaggagattgcgaccctttttttgaagcatcccgaccatgacctgtggcaatctctgcctcgggctgctcagcgtctggctccgcgactgcttgccgaatggggtgatgaccgagcgcgttaccgagatgcccaaagcgtgcaggaactggcgggtacggctcctgtgccgttccaaagcggcaatttttccaaagcccataaacgctttgcctgcctcaagccgctgcgtaatgtgctctatcagtttgcctggcagacgacacgacaagatggctgggcacgagcgtattaccagcgcaagcggatggaaggcaagacccatagtatggccgtccgctgcctggcaaatgtctgggtacgcatcatctatcgcatgtgggtgaggaaggacctctatcaggccgcaacgtttgaagcggcgaagctggctcacgcgcctcgtcaacgtgtcgcctaaacccaggctgtcccttggcgtcatggctggttgggtccactgagcattgcaacgtctgttgtcagtgctgagactgtgtgctccaacggagccgcccaaacggttcccgccgcgctctttctgccgagcgtgagccattccttcatcattgcccctcgctccaacgtctgccgcagcccaccaccgcgttcccgactcccggtgtgggttactcgcagcagaccacctcgagtcaaggccgcgcaggaggggaaagagtcggaggtgggcgcgctcgtcttggccttgaccgaggtgggagacttgtaaccccacacgggaggcagtttcacctctgctcaccttgctttttcctttctcgtttttttgctcttgacatagagggt

SEQ ID NO: 6318 - DNA, 1331 bp, unidentified
  source 1..1331: mol_type = unassigned DNA; note = element_9cc164a
  misc_feature 1..3: note = core
  misc_feature 4..70: note = LE
  misc_feature 71..1102: note = CDS
  misc_feature 1103..1331: note = RE
  misc_feature 1114..1311: note = bridgeRNA
cgatgtatggaatccactcattctctgcaaaacttaagcataggcaggaacatgaaaacgaggtgtcatcatgctaagaacgaacgtcatcggtatagatttagcaaaaaacgtgttacaggtttgccatattagccgccaaggagaactgctcagtaacaaagcagtaagcaggcagaaacttaaggagttactcgctaaatccaagccatctcttgttgctctagaaggctgcgctagttgccactactggggcagatacgctgagtctttcggacacgaagtacggataatcaatccgaaaaaggtaaaggcatatgttgatggccataaaactgatgccaatgatgctcttgccatcgctaatgcggcgctccagataggaataaaatacagcaagcccaaatcaatggagcaacaaaccttgatgtctcttgaagcaaatcgtcagtttctatcaaaaaccatagtgtcattggggctgcacatccgaggcattattaacgagtacggtatcgtcaaagccaaaggtactaaagggctggctgaattggtcacttcaacactctatgaaagtgatgttttgccagcaagcttggtcacaaccttgtcgatgctatggcagcaataccttaacctgaaagatgaactgagcaagctccagaaatccatgaactcgacaactcatcagatagaaccttgcaaaagactcatggcactggaaggtgtcggtgaaacaacagcttccatgctctacgctactttaggtaacggaacgcaatttaccaatggacggcaagcttcagcgtttgttgggctaacaccgaaacaatacagttcaggcggtaaagtaacaatgctgggcatagataaatttggcggtgtcaaagatctccgttcaatgctataccttggtgccatggcatatatttaccgattgcccgaatcgccaaaaaaccagaagcaggcatggcttatcaagttggtcgatagggttgggttcaaaagagcctgtatcgctttggcaaacaagacggtcaggacagcttgggcaatgctccactatgaaacggcttatcagccaaagccattatctatttagctatatgaattaacagattacaaataatgatgttcaatggttagaccagcctactgagaccctgactacttcgcaatgcttttaaaagcttctttcgcgacaaggacagtaggtgcgtacacatcaaaggttagaaggtagctccttcaataagaaaccgaatatacgaccgcatcttatccttatccattgcacatttttatcttgtaaaacccgtggattccatata

SEQ ID NO: 6319 - DNA, 1609 bp, unidentified
  source 1..1609: mol_type = unassigned DNA; note = element_9cc45dd
  misc_feature 1..3: note = core
  misc_feature 4..214: note = LE
  misc_feature 215..1477: note = CDS
  misc_feature 1478..1609: note = RE
tttgctactatttatttggaagcagatttacatctcctccatgtgttgcctaagctacaataaaaaggtattgagaaactaacgtttccttctttggactatccacgtccgtaaaagaaactgttaaccctcctttttattgtagcgttcgttttaagcaggttgaaccactggtttccagggcgttcgtgtcaccaagcaaattgaatcggcaatgatagtaggttggaacctcattacacaatttttgattggaggactttttatgaacgctgtaggaatcgatatctctaaagggaaaagtatgatctcaatcatgcgccctttaggagaaatagtcagtaaaccctttgaaatttctcacacccctagtgaactagataatctggcgaactatcttaaaagcctagagggtgaaacaaaaataatcatggagtacactggaaaatattatcagcccattgctcaatttttaattgaaaaagggttctttgtttctattattcatgcgaaacttatccatgattttggaaataactctattcggaaagttaagaccgataaagctgatgctattaaaattgctaactatggattaaccaattggcaagagctacgtgctcaaacaaacgaggataaatcacgtattcttctaaaaagctataaccgtcagtataatcagtacatgaaaaccaaaacagctttaaaaaataatttaatcgccattcttgaccaaacattcacgcattgtaacaacttattttctagtcctagaaagcccgacgggcatgaaaaatgggtagattttaccaacagattttggcacgctgagtgtgtaacgaaacagtcattaaacgcctttactaaaacctataattcttggtgtagaaaaaatggttattatcaaaactctaaaaaagcagccgagatctataaactagcacaggattgtttacctactttgccgtacaataattttacaaaacaacttgttaagcttgctgttaaacaagtaaacgaagtggctataaccatctcaacattgcaaaaagaaatgaatcaattagcttctactttacctgagtaccccatcgttttgagcctggggggagtcgcagaaactcttggaccgcaattgatagctgaaattggtgatattcggcgatttaacaaaaagcaatccttagttgctttttctggagtagacgcacccccttttcaatctggaacctttgaatctaaaagtcgcaaaatttcaaaacgtggttcgagtaatttgagaaaaacactttttcaagtaatgatctgccttcttcaaacaactttagtcaatgatcctgtttatcaatttcttgatcgaaagcggcaagaaggaaagaactattatgtgtatatggttgctgggtgtaataaattcttacgaatttactatgcccgagtaaaagaatacttaatttctacagaagaatttctttagttgatactctaatatcacataaatgattccttgaagccgttaaaaaaaaatgaactacttcggcttttatttgctatgccctgatcattgctcaaactttgtttatatttcttattgacttttattagcagg

SEQ ID NO: 6320 - DNA, 1195 bp, unidentified
  source 1..1195: mol_type = unassigned DNA; note = element_9cce376
  misc_feature 1..4: note = core
  misc_feature 5..213: note = LE
  misc_feature 214..1173: note = CDS
  misc_feature 1174..1195: note = RE
  misc_feature 35..201: note = bridgeRNA
tcatcctatgtttgcaaaatattagatttaacaaacaaaaaggaaaagagagtaaagaataaggttatcaattgtcattagtctcacagaccgttcggaatgctaatccctttactcttttactaccaaacctgaacagatcattaggtaacaagcctgtatttaggatagataggtaatagtagtattctcttttcctgtaaaattataggtatgggtaaaattataggaattgacattagtaagcaagtttttgatgtaagctttttggaagggaatctttggaagcataaggtcttaagcaataaattattaggttttgaaaaactgataaccttcattgaaaaagaagatatagtagtgatggaagcttcaggtacttattatcttcctttagcagaatatctttattcacaggggattaatgtagtgatagaaaatcctctttccatcaaacgttatgctcaatcaagactcaaacgagccaaaacggataaagcagattcgaaggttattgctgaatatggcaaaaagaatttggatgagctgagtttgtggaatcctgagagtaaaacgtgcatcagaattcgtcaaatgcatacaagaatccaaatgattcagaaacaaaccagtcagacttataatcagttagaagctttcagaagcagtggttttctggatgaaaagttagaaatagaaatgaacaattccatagaacaacttcgactaggaaaagaaatattggaatcggagatagaaaggctggccttggaagaatttgaacaaaccattgaatgtcttaccagtattcccggaatcggaataaaaacagctattatgctcattgtgattacagataattttaaaaagttcgaacatcataagcaactcattgcttttgtaggattcagtcctcggatttatgaaagcggaagcagtgtgagaggacgctcaagtatttgtaagatgggtaaatctcagatcagaaagctattgtatctatgcagctggtcagccaaacgctggaataaaaaatgtaaagaaatgtatgaaagacttatcacaaaaggaaaagcagaaagagtggcaaagatagctcttgccaataaactcttaaaacaagcatttgctatcggaaagaataaagaaaaatatagagaagatttttgttaaataatttgctttttaacacaga

SEQ ID NO: 6321 - DNA, 1472 bp, unidentified
  source 1..1472: mol_type = unassigned DNA; note = element_9cd228c
  misc_feature 1..2: note = core
  misc_feature 3..246: note = LE
  misc_feature 247..1455: note = CDS
  misc_feature 1456..1472: note = RE
tctaccttcgaattttgcggggaggcgaggttcggtaaagtcgactaggctcatgctggtggcaggggtgtggctcgtggggtccgccacctgacccaggtttgctcgactctgaaatgccgcctctgccacctcgcatcatccggagcgtctgacgtggatgatgccggccttttggggctgtggctttcgaggtagacgagacgccggatgaacccgtgcgttgcgtcgtgcccggaggccccgatggatacgtccctgctcgtggcggtcgatgtcggcagccgatttcaccaagtcgcagtcgatgacacgttcgggcgcctgctcgacgagttccgtatcgaccacgatcccgccggttttcacacgttctttgagcgagtcgagcgtcatcgggcgggcccggagcagccagtgcgcgtcgcgatggaaggctacaacggctgggcacggccgctcgatcgccaggcccaggagcggggctggcaactctacaacgtcaacaacctgaagcttgcgcgctacaaggagatcttcccggcaccggcgaagaccgatgcgatcgacgcgcggcggatgcttgagctgttcgcgtttgatggccgccagggcgtggcgcgcgacgtgctccagcgggtcgctgccgtccctgtggaacatcgccgcctgcagtacctgacgcgccgacggcgcgggctggtcgaggagcgtgcgggccgtctcacgcgcctgcgctgcgacctgcaggcctacgccccgggactgcttgcgatcactggctcggttggcaatcgctggttcctcaacctgctcacctgccgcgagcggctcacggcgctggtgcgtctgcgtgcgaagacgctcgccggcctgcgcggcgtggggcgctgctatctggccaggatccgccaatggcagcgcacggcgtgcttctcgcccgacatcgccttcgccgaagtcgatgtcgtcgacgatgcccgggcgatcctggcactcgacgcacgcatcggcgtgctcgacgccgagatcgcgcaggtctcggcggcgtgtgaacccgctcgaatcctgcgctccatcccgggcttcggcgccacgggagccgccgagctcatcggcgagatcgggaccctggaccgcttccgcagcgaagccgggctcgcgctctacctggggatggccccgctcgatcacagctccggcctgcacgtgcgcggcagacgaccgcgttgcgtgaacgcgcgatgtcaggctgcactgatgacctgtgtcgttcgccacatggcttgcgttgccgactcgcggacttactatgatcgaaagcgggcacagggaaagcgacacaatcaggccgtgcgcgcgctcggtcgccagctcgtgcgtgtgatctggcacatgctgcgcgacggacgtgagtaccaactaacgaccacacacgaaccgaccgcgacttgaaaatccaagagggatgt

SEQ ID NO: 6322 - DNA, 1348 bp, unidentified
  source 1..1348: mol_type = unassigned DNA; note = element_9ce3ee9
  misc_feature 1..2: note = core
  misc_feature 3..147: note = LE
  misc_feature 148..1113: note = CDS
  misc_feature 1114..1348: note = RE
  misc_feature 1146..1343: note = bridgeRNA
tgatgtaatggacgccccttactaacgtagccagtaccatacttttactgactgcattaatctgggagtaacatcacatgagcaagattagagttgttggtatcgatattgcaaaatctgtttttcaagtatgtgtctggatggttgatggctccgttgcctggaacaggaaaaatatcgcgtcaaaaattactggatactctccgtcagtttgaaccgggtacgttaattgcgctggaagcctgttcaacctctcatttctgggggaggaccctcagctctatgggatatagcgtgaggcttatccctacccagcacgtgaaagcgtttgcccgaaaccagaagaacgatgcaaacgatgccctggcaatctgtgaaacagcatgccgtccaggtattcactttgttccggtcaagaccacggaacagcaggatatcaaagcgctgcgcaatacccgtcaacttatggttgagcagagaaccgcgctggctaaccaacttcgttctttgctcgctgaatatggtctcattattcctgccgggatccagcgtctccagcagcagctacctgaacttattgaagatgcatccaatggtctgacattcacgcttcgccgtttactttattcattgcgggaagatattcagtcattgaatgaacggattgtctgcctggataaagaaattgctgcattgtcttcacaacaggccgcatatcgccatttattaacgatccctggtatcggtccgcttatcgcagccgcatttatcagtgaagtggatgccgtacagttctccaacggcagagagttatccgcctggtgcggtctggtcccccggcagcacagttcgggaggaaagcaaagattgtcctctgtgacaaaaaacggtaatcgcagcctgagaacattaatcatccatggcgtgcggtcagtaatacgctgcgtgaaaaaacgcgatgacaacctgggcctgtggctgaaaaggcttgaggctcggcgaggattcctaaaaacgaccgtagctctggcgaataaactgacccgaatcatctggcgcatactgaccgatggtgttgattttaatatgaacaaggcttttgctgtgagttaacgcaatacagcgttaaagaaaacacgtttcactgagtttgcaggcactgatgagaaaacggctaccgcccctgtaacagcctgaattagacctaggtaatcgcataccggtgtattgataaggaaacagggttcggataacatcatggcgcaggtaactttacctactatgacgccggatatagggtcgtaaaccgtatcgaaccagtacttgtaacacccggggcgtccatata

SEQ ID NO: 6323 - DNA, 1175 bp, unidentified
  source 1..1175: mol_type = unassigned DNA; note = element_9ce432c
  misc_feature 1..2: note = core
  misc_feature 3..210: note = LE
  misc_feature 211..1152: note = CDS
  misc_feature 1153..1175: note = RE
  misc_feature 3..180: note = bridgeRNA
cttgtatggtaggacttgaagggaggaggagggacaaggctcgattctgactgttgacgcagtacagaccgtgggagatttcgcccctcctcctttcacccaagcgccgataaagaatgcatctggctagaccgacgataggaacaagcctgcgcctctgggtgagcccttcaagtgctcaaaccttatctcggaggaaatcctgtggcaatgccggtctctctatcaaaaccgatcgtaggtgtggatgtcgccaagaatgaactggtgatttatcaggctgatggggatttgcttgaagagattcccaacaccaaaacatccatcaagcagtggctgaaggcgttgtcggggacggtggcgattgccattgaggcgaccaacatttaccacctggacttcgctgatctggcctatgaggccggttgcacgatttacatggtgggaggctatgaactcaaacattatcgcgaaggcgtgaagatccgcgccaaaaccgacgcactggatgccaagctgctggctcgttacctgaagaacgaagccgaggagttgcgtccctggaccccgccctcaccgctgtaccgccagctcctgagccttttccgccgtcgcgcagccttggtccaggccagggtcggcctggtgcagagctggtcgaatgagccgctgctcaaggcggcttttgccgagcaagtgaagtccatgcagcagcttgagacgctgatcgaaaagacgatcaacgatcagctcaaagaagccggtttgctcggtcaattgaagcgctgcctgaaagttgagggtattggatttttgactggggcccgcttgataacggcatttcagcgaggagattttagaaacgcggatgcctttatcgccttcctgggcatggatttacgggtggcgaaatcagggcagaaggacgctcgccgcagtttgaccaagcgcggcgaccccgaggcccgccgacttctgcacaatgcagcgatgtcggctagccgtacgaaagcctggaaagggtattacgaagaacaaagagcgcggggtttcagcaccactcaggcgctggtgatgctggctcgcaagcttgctcgggtggtattcgccttgctgaaagggcaaagcgaatatcagccaaaagccagttgagggctttccctcaaccatagaat

SEQ ID NO: 6324 - DNA, 1383 bp, unidentified
  source 1..1383: mol_type = unassigned DNA; note = element_9ce66df
  misc_feature 1: note = core
  misc_feature 2..80: note = LE
  misc_feature 81..1103: note = CDS
  misc_feature 1104..1383: note = RE
  misc_feature 1148..1376: note = bridgeRNA
gatgtgatggacacctcccgccttacggcatcaatgtgccagactgaggtgtactcagttcccgggtggaggtgtccgtcatgaatattaagcgtattggtctcgatcttgcaaaaaatgttttccagatccacggcgtcgatcaccatgaaaaagtggtactgcgaaaaaccctgcgccgtgcccacatgatgacgtttttctccggcctttctccctgtcttattggtattgaggcctgtggctcttcccattactgggcccgcgagctcacccgcatgggccataccgtgcgtattattccgccgaaactcgtcaaaccttatctcaaaggcaacaaaaacgacgccaatgatgcagcagccatctgcgaggccatcagcaggcctggtatgcgttttgtcgctctcaaatcggaagctcagcagacgctgcaggcagagcaccgggtccgggccaggatcatccgcgagcggacggcactgtgcaatgaaatccgggggctgttgagtgaatttggtctggtgctgccagtggggataaatcacgtgcgtaaagccctgccggaaatcctgtcgcagcaggagcagtggaatgaccgcttcatccgtctgttgtgcgagctgtcggaggaaatgcagatgctggatgagcgcatatcgcgtcatgaccggcgccttcagcaggcggcacgggacgatatccgcataaaacggctgatggaaatagagggttttggcccgatagtggcgagtgctctggtggctgccgtgggcgatgcgaagcaatttaaaagcggtcgggaaatgtcagcctttattggactggttccgcgacagcattcaagcggcggaaaagagcggctgggccatatcagcaaacggggtgacagttacctgagaacgctgataatccatggtgcccgtgcagtcctgaggttcagcgccggaaaaacagacagacgcagcctctggctacagtcggtggcagaaagacgtaataacaatatcgccgtggtggcgctggcaaataaaaacatccggatagcgtgggcaatattaagccgcagtgaagaatatagaggggtggagaatgcggcgtaagcagcactgacgtccctgtaagtaaacgagcaacaaacctgccgtaagcgtgcaaagttataaagaactgatgcgtaacaggtaagaccgacatctggcaaatccgaccttatccatggctccctgcaaagcaaagccggcaggccgaaaggaaacagatgtgcagataacatcatgaccgggtacgacggtaccgtaagagaggccggatatacgaatgcaacttactcccgtcacacagatgaaaaataacttgcacaacgggaggtgtccatatacg

SEQ ID NO: 6325 - DNA, 1652 bp, unidentified
  source 1..1652: mol_type = unassigned DNA; note = element_9cf122c
  misc_feature 1..2: note = core
  misc_feature 3..259: note = LE
  misc_feature 260..1462: note = CDS
  misc_feature 1463..1652: note = RE
ctcactggtgcaccttcgtgcggtcgggcagtgggccgtgcattggcgtagtgttcgacagcccgagcacctggcgtgacggcccgcgtcgcgcgccgctggacggccagcatgagaccagccgcacgccaggcgccgggagatcgggacggaccacagggtgatgcgccagagccggccagccagagcgccaatcagtgagcgatccgcacgacctcccagcccgggtgagcctaccccgaaccgaggaggtcagcccatgccaatgttcgccggtctcgactggggcggcgccgcgcacgccgtttgcgtcgtcgacaccgccggtgcagtgctcgcccgtatcgaggtgcagcacgacgccaccggtctcgccgacctgctcgcccgcttggcgcgcatcgcgccgccgcccgaactgccggtcgccatcgagcgcccctccggcctgatcgtcgacgccctggtcgaggccggccatccggtgatcccgatccatcccaacgtcgttaaggcctgccggccgcgctatcgcgcctccagcggcaagtccgaccccgccgatgccttcatgctcgctgacatcctgcgcaccgatgggcaccgcttccgccctctcacgccggcctccgacgacatcaaggcgctgcgtgccctggtgcgcggccgcgacgacctcgtcgcccagcgtgtcgccctcgccaacacgctgcgcagcacgctggagagcttctggccaggtgctgccatcgtcttcgccgacatcgacagcccgatcgcgctggccttcatccggcgctatccaaccccggatagcgccgcgcgtctcggacccaagcgcctcgccggctttctcgccagccacgcctatcccggccggcgcaccgccaccgaactcctcgaccgcctccgtgccgcgcccaccggccacgccagcgaagcagaggccgacgccaagggcgagctcgtccgcgccctggcgagcgcgctcgacaccatcgtcaacgagatcgcccgcctctccacccgcatcgaacacgacatcgcagaattgcccgacgggcagatcgtcatgtccttcccgcgatcgggacgcatctgcgccgcaggcatcctcgccgaacttggcgacgtccgcgagcgcttcccgaccgaagcgcagctcgccgccgaagccggcgtctgtcccgtgacccacgcttccggcaaggcacgcggcgtcaccttccgatgggcatgcaaccagcgccttcgaaaggccatcacgaccttcgccggcaactcgcgtcacgcatccgcctgggccgcccgtatctacaaccaagcccgccagcgcggatgccgccatcagcacgccatccgcattctcgcccgcgcctggtgccgtgtcctctggcgtgcctggcaagatcgcaccgcctacgatcctggccgtcacaacgccgccgcacgcctcgcctgaactcaacccggttccttggttcggccgaaacgcccgttccttcgtcccggccacatcccaacgcgccgcggcgacgcagcccgggtcaaggatcgccgaaggcgaccggcgcagccggcgcgaagcgtccttgaggccggttgcgacgacgcggcacgcttcaacgcacgagaacgttgacacagggtgt

SEQ ID NO: 6326 - DNA, 1337 bp, unidentified
  source 1..1337: mol_type = unassigned DNA; note = element_9cf7a27
  misc_feature 1..2: note = core
  misc_feature 3..74: note = LE
  misc_feature 75..1004: note = CDS
  misc_feature 1005..1337: note = RE
  misc_feature 1103..1334: note = bridgeRNA
ttaatgagatggtcaccctcaccctaccagcagtatattaatagggtgattatctttgataagaggccatcatcatgaacaccatcacactcattggtatcgatctcggcaaacatacctttcatatccactgtcaggataaatcagggaaagcactgctacgtaaaaagtttacacgaaacaaattgatggcgtttcttgccggatgcccttctgcaaccgttgtgatggaagcctgtgctggcgctcatttcatggcaaggcggatagctgatttggggcatgaggctaaactcatttcgcctcagtttgtccggcctttcgttaaaagtaacaagaatgattttgttgatgccgaagcaatctgcaaagcagcatcacgtccttccatgcgttttgttccgcccagaactgaaactcaacaagccatgcgtgcattacatcgggtcagggagtcacttgtcagggataaggtcaaaacgaccaatcagatacatggcttcttactcgagtttggcattagcttaccgaggggagacgctgttattaagcgcttatcgttagtgttggccgaacacgaactccctgattatctggctcgattattgatgcaattacacgcccattatcactatattgttgaacaaatagccgggctggaagctgaactcaaacacaccatcacaacggatgacaccgcccagcgtcttatgaccatcccgggtgtgggtccaatcacagccagcttactttcttcacagttgggagacggccaacaatatgccaaaagtcgtgattttgccgcctcaacgggattagtccccaggcaatacagcacgggaggaaaaaataccctgctgggtatcagcaaacgaggcaataagaacttgcgtagattactggtgcaatgtgcacgagtatttatgcagcgattggaaattattcaggaaaactggctgactgggtcaggcagcagcttgaacgaaaacactccaatgtcgtgacttgtgcactggcgaataaattagcccggatagcttgggcaatcacgacacagcacacggtatttgacgcctgattctgcgtcattatgaataaatttaaacgttacctcactggttttgcgaagactgataattgatgacatgaacggcctatcggcctgatgagaaacctaaaggttaagatggcttattaaagccgagtggttttttaggaacatcaggcgcggaactcatcgaggcgcgggcatccttgcctatagtgacgccggatagatttaagcaagcccaaaattcatcaaaatgagtgttgcaaaaacgagggtgaccatagat

SEQ ID NO: 6327 - DNA, 1450 bp, unidentified
  source 1..1450: mol_type = unassigned DNA; note = element_9cf9a85
  misc_feature 1..2: note = core
  misc_feature 3..162: note = LE
  misc_feature 163..1197: note = CDS
  misc_feature 1198..1450: note = RE
  misc_feature 1212..1445: note = bridgeRNA
agatggggtaacgggccgaccacccgagcggcacgctcactcctgcgctatttgggagcgcgttcgcgtgccgcccggttggcggaaaggtggtcgtccctcaaattgatggtgttcaacggagtcgggcaagcccgctcctcgcatcattaggggacgaccatgaaccactatgccggaattgacgtgtctttgaaatcctcggcggtctgcattgtcgatggggcgggcaagatcgttcgggaagcggcagtcgagagtgagccggcagtcttgatcggctggttcaagcagttcggcatcgaggttgagcggatcggtctggaggcagggccgctgtcgcaatggctgtatgcggcgatgcaggaggcgggtcagcgggtcgaactgctggagacgcggcacgtgcgtgacgccttcagggcgatgtcggtgaagtccgaccgcaacgatgcaaggggtattgcccagctgatgcggcttggctggttccgtccggttcattgcaaatcgatcgaggcgcaggagatgcgtgcggttcttacggcacgcaagctgctgcaatcgaagctgcacgacgtcgagaactgtttgcgcggcgtgctacggggcttcggcttgaaggtcggcaagaccaccgatcgcagcttcgcgacgcgaatcgaggcgctggtggctggccattcgggactgacgctggtcgtgcaggcgctgctcgaggctcatacggtgctgctgcgcgagttcaagaagctggacaagcaggtgcaacagctcgcgaaggcccatccgcaggccaagctgttgatgaccacgccggccgtcggcccgatcgtcgcgctgacctacatgttcgcaatcgacgaccccaagcgcttccgatcctccaaggcgacaggcgcgcattttggcctcacgccgagacggtaccagtccggcgagaccgactatagcggccgcatcacgaaggtcggcgatgcgtcggtgcgcgaggcgctctatcaggcggcgcacatcatgctgaccaagccggtcaagaactgctcacagctgaagagctgggcgatgcgggtcgccaggcgcgccggcccgcgcaaagccaaggtggctctgccgcgcaagcttgccgtgatccttcaccgcatgctcgccgacaacatgccgttcaaccccgcggccaaggctgccgcgacctaggggagcatcgatcgagttctgggcgggccacgacaccaggctctccccgagcagggtcccttcgccgggacgatggatccggtcaggccgccatccgggcagtcggttcaaaaccacgctctccgtagattggccggccggttcctcttacgcagcccaacaggtggcggccatgcgccgaccccgtacagaagcaagggcccggcgagaggacatgcagaattgggattgacaaaccaaggcccgttacaga

SEQ ID NO: 6328 - DNA, 1334 bp, unidentified
  source 1..1334: mol_type = unassigned DNA; note = element_9d00fc4
  misc_feature 1..2: note = core
  misc_feature 3..258: note = LE
  misc_feature 259..1320: note = CDS
  misc_feature 1321..1334: note = RE
ccgacttatgttcggaagagcggtccgtggtcgggttagctgcccgtaacgtgccgtagcagaccggaaggtttgactcctgatcttcctgtcaccccatccaacgggggttgactttgcgggggtatgtcgccccttccggtctgcgttcgcggagtgactggagagaggcgtgaccccaagctgctgtgagaggtacttgaagtcggactgtcctccgcggatcccccatcccggcagagaagggaaccgtcgtccatgatcgtcatcggtatcgatccccacaagtccacccacaccgccaccgcggtcaacccggtcaccaacaccgatctcggctcgatccgcatcgacgccaccctcgccgactacaagaagctgatcgcgtgggccaaggcctggcccacgcgcgagtgggcggtcgagaacgccgaggggctcggccatcacctggcacagtggctgctggttctcggggagatcgtgctcgacgttccggccaccgccaccgcccgggtccggcaactctcccgcggcgggcggcgcaagaacgaccgcatcgacgccgccgcggccgcatgcgtcgccgccctgcagggcgacgcccgcccggtcgcccccgagggcccgaccgatgtcctggccttgctcgacgaacgtcgaactaacatgtgtaacagtcgcactcgcatcgtcaatcagctgcacgcgttgctgcggcagctgctggccggcggtgcaccgacatcgctgaccgcgaccgcggccaccgcactgttgcggggcttccgcgcccgcagcgaggtggaccggattcgcgtcggcctgtgccgggacctgatcgccgacatccggcgcctcgatggtcaactcgccgagaacgagaagcagatgacccgtgcgctcgacgcgcagggcaccggtctgcgtgaggtcgacgggatcggtccggtgaccgcggcccgcctgatcgggcgaacgggacgagtcagccggttcccgaccgcggcggcctacgcgaactacaacggctcggcgccggtgcagatcgccagcgccgacaccgaccgccaccgcctgtcccggtacggggaccggcaactcaacagcgcgctctacacgatcgcgatggtccagattcggatgcccgccagcgccgggcgcgcgtactacgacaagaagatcgccgagggcaagagcccccgcgccgcgacccgcagcctcaagcggcacctgtccgatcacgtctggcgcatcatgctcgccgacgaaaaacacagccaccgacaacacgagaaagaatccgacagggcggcttgacaaatagagaggca

SEQ ID NO: 6329 - DNA, 1438 bp, unidentified
  source 1..1438: mol_type = unassigned DNA; note = element_9d01ac2
  misc_feature 1..4: note = core
  misc_feature 5..491: note = LE
  misc_feature 492..1424: note = CDS
  misc_feature 1425..1438: note = RE
  misc_feature 1..192: note = bridgeRNA
ctccgtaagttgttaagcggcccgggagggccggatgtggctgatgggttcttgcctgtagtggctcccgaggagtggccgtacggttctccggggcgccctggctgctgattgagatgcgcgttctggtcgctgtttacggagatgacggcggggtgttcctcgggccgatctgtagtacgacagaacgaggaggtagagagggtgagcatcatcagcaaacccaccgtccgcctgtgggtgggcatcgatgctggcaagggacaccactgggtctgcgtgatcgacgacagagggcagacggtgtggtcgtccaaagtcacctacgacgagacggcgatcttggacaccgtggccgcgatcctgcagctgggcgaccagatcacctgggggtctcgacatcaccggtgccacgtcgggattgttgttggcgttgctggccgcggcacggtcagaacgtctactacgtgccgggccggacggtgaaccggatggctggcgcctatcggggcgaggcgaagaccgacgccagagacgcgtacgtgatctccgagaccgtccgtcaccgccgtgacctgtccgtcgtggacgccccggtcacggtggtcgccgaactgagcctgctggtcggacaccgcaccgacctcgtcgccgaccgggtgcggctggtgaatcggctccgcgacaccctcaccgggtacttccccgggatggagcgcgcgttcgacatcagcaaccacaagggcgccctggtgctgttgaccggataccagacccccgccgtgctgcgccgaatcggatcgtcccggctgacgtcctggctgtccaaacgcaaggtccgctccgccgccgatgtcgcggccaccgcgatcgcggccgccgacgggcagcacaccaccgtcccgggcgagaagatcaccgcgacaatcgtcgccgaactggcccaggcgctgctcgacctggacgagcggatcacacgtatcgacgcgcaggtcaccgagaccttccgcacccacccgcaggcgcagatcatcgaatccatgcccggcatcggcccgatcctcggcgcggaactcatcgccgccgccggagacctcggctcctacgctgacgccggccgactcgcctccgccgccggcctggtccctgtcccaaaagactccggccgccgcaccggaaacatgcaccgtccccagcgttacagtcgtcgactgagacgcgtgttctacctgtccgcgcagtcctcgatcatccgccccgaccccaaccgcgacttctacttcaagaagcgatccgaaggctgcaagcacgtccaagcgctcctcgctctcgcccgccgccgcgtcgacgtcctctgggcactcctgcgggacggccgcgtcttcagcatcgacagcccaacgaagccggctatcgccgcttgacttcttcattgaga

SEQ ID NO: 6330 - DNA, 1159 bp, unidentified
  source 1..1159: mol_type = unassigned DNA; note = element_9d034ca
  misc_feature 1..3: note = core
  misc_feature 4..217: note = LE
  misc_feature 218..1144: note = CDS
  misc_feature 1145..1159: note = RE
  misc_feature 36..196: note = bridgeRNA
cttgtatagtttggaggcgtgcctgccgttgaggttgaaagagcaggcacggggtggaggggcagatcgtgcaatctgctttgacagacagccgaagacatcccccaccgcacatgcaagcgtcaatcggaatccagcgccttcactgagcgccaatcgtagcaagcaaactcgcatgtgcccaccccgcacctgaaacaagcgaggagattataccatggagcacagcctgcccatcggcgcagacatcagcaaaggttggatcgacatctggagcggaaacgagcacatccgcatcgacaacacgcagcgggcaatcttgaagttcctgaggaaactccctgaaggaaccgtggtcgcgatggaagcgaccaacgactaccatatgcggctggcggacctggcgtatgaaaagggactcagagtctatgtgatcaatccccgggtcacccgccactacatggaagcgctgggtctgcgtggttcaacagaccctctggcagcccgcgcgatcgcttcgttcatcgagcaccaccaggcggaccagcggccctatgtgcccgcggatccacagacgaagagggcaaggacgctcctgcggcgcagagcaaagctcgtggagtcgcgcgtgcaactgcaacagagcgtcgcggaggttccggagatcagccgcgacgtaagagcggtgatccagaagctggaagccgctgtgcggaagatcgatgggatcgtcgaggaactcctgggcggcaacgagctgcgcgagcggctgcagacaattgtgggcgtggggccagtcaccagcgcagtgataacgactgagctcgaagccaacgagttcgctacctccgatgcctttgtcgcgttctgtggtcttgatccgcgtcccagggactcaggcaaacacaagggcaaacgggttgtcagcaagcgcggcagccggagcttgaggagtgccttcttccttgctgccttctctgcctccagttccaagctgtggcggccgtattacgagagcctggttgcgcgcggtctggccaagattcaggcgctgatcgttcttgcccgaaagctggcgcgcatcgcctggtccatccagcggcacaacacaatatttgacccagcccgagtccctacgggttgacaaaaagcatagaat

SEQ ID NO: 6331 - DNA, 1499 bp, unidentified
  source 1..1499: mol_type = unassigned DNA; note = element_9d03810
  misc_feature 1..2: note = core
  misc_feature 3..240: note = LE
  misc_feature 241..1479: note = CDS
  misc_feature 1480..1499: note = RE
  misc_feature 6..237: note = bridgeRNA
ctaatggcatttaccgggtctgtttggcaggctcggttccggtagcggccggcgggtcagcactctcctcttctgaccttggaggtcttgcggcagaccgtgcgcccgctggtcgtgaggaggcgaaaccgctactgggatgtcgtgccccgtctcgtttgcggtgagcacttgaccattagatcgctggctgtctcctccacgctgctgaccgtgtccgacccgagggcaggaggggcgatgttgttcgttggagacgactgggccgaggaccatcacgatgtggagattgtcgatgacaccggccggctgctggcacgcaaacggctacccgaaggcctggacggggtcacccggttgcacgccctgatctgggagcaggcgccggtcgagtgggccgacctggaaccgggcgttgctgcggccatggtcaaggttgggatcgagaccgaccggggaccgtgggtggctgcgctggccacgtccggttatgaggtgttcgcgatcaacccgatgtcggtggcccgctatcgggagcgtcactccacctcgggtgcgaagtctgatgccgccgacgcgcacctgctggccgagatcgtgcgggtggacagggcccatcatcggcctttggccggcgacactgccgagggtgaggcgatcaaggtgaccgcccgggcccatcagagtctggtctgggaccggacccggcatgtgttgcgtctgcgttcagcgttgcgtgacttctttcccgctgccctaaaggctttcagcgacctcgacgccccggacgccctcgagctgctcaaatcggcgcccggacccgaccagggcgcgcggctgcccaagtccaagattgtcgccgcgctgactcgggcccaccaccgtgacgtcgcagccaaagccgcccagatcaccgcgatcctgcgcgaagaccaactacgacaaccaccggcaatccagtctgcctatgcggccgtggtgaccagcgaggtcaccatcatcgaaaccctgaacacccaggtcaaccagctgggcgcggtggtggccgcacattttggccgacacccggacgctgagatctacgccagccaacccggcctgggtacgatcctcgccgcccgggtcctgggagagttcggcgacgaccctcaccgataccgcgacgccaaagcacgcaagaactacgccggcacctcacccatcacccgcgcctccggcagcaagaaagtcgttctcgcccgttacgtacgcaaccgacgactggccgacgcactccaacaatgggccttctgcgcgatgcgcggatcaccgggcgccaaggcgtactaccaccaactgcgggacaggaagatcggccaccaggcagcgctgcgacaactcgccaaccggctcgtcggcatcctgcacggttgcctgaaaacccacaccaactacgacgaacgaacagcctgggtccaacagaaaaccgccgccgcttgacttctaagaacctgggatgt

SEQ ID NO: 6332 - DNA, 1371 bp, unidentified
  source 1..1371: mol_type = unassigned DNA; note = element_9d04899
  misc_feature 1..3: note = core
  misc_feature 4..92: note = LE
  misc_feature 93..1124: note = CDS
  misc_feature 1125..1371: note = RE
  misc_feature 1120..1358: note = bridgeRNA
tgatggcgtggacggcgcccgcaacggcatcaccctcgtgagaggtgtgccaagatggctgctgtcgagcactcatctgaaggagcaccgccatgggcaagactaccaccgatctcgatactgtagccgccaccggccttgatctggccaagcatgttttccaagtcgacgccgccggccgtgtcgtcgtgacccgggtgctgcggcgcaaacatgtgctggcatttttcgagcgtctgccgtcgtgcctggtcggcatggaagcatgcggctcggcccaccattgggcccgcgagttgatgaaacttggccatgacgtccggctgatgccgccggcctatgtaaaggcctatgtccgtcgccagaagaatgacgccgcggatgcagctgccatttgcgaggctgtgacacgaccctccatgcgttttgtgccggtgcgatcggtcgagaaccaggcagcgcttatgcaccacaaggtgcgcgaacttctggtggcacagcgtacgcaactgctcaatgccctgcgcagtcatctcgccgagatcgggaccatcgcggcgcagggaccgaacaacgcacgcgctttggcagttcttatcgtggaaggtaacgacatgatcccggcgatcgtgcgctcggcgctgttgcctctggtgcgtcggatgaatgaactcgatcaggagatcgcgcaaagcgatcggaccattctggttctagccaaagccgatgagacagcgcgccgcctgataagcgttcccggcatcggtcccgtcaccgcctctgcccttgccgcaagcatccaggatgtctcggcgttctcgggcccgcgtgagttcgctgccttcctcgggctcaccccgcggcagagttcatctggcggcgaggagcggctgggccgcgtatccaacatgggcaaccgatatctgcgcaagctactcgtcgtcggcgcccacgcggttctcttccaccgcacacgctgcagcgatacattgagacaatgggccgatcgcttgatggagaccaagcgcttcaagcttgtcgctgtagcaaccgccaacaagctcgcccgcatcgtcttcgcactcatgcgcgacgagacacactatgccggcacgccggcgtaacagcatcagcggctgaggctgcggagcggaaaatcgagggtgacagtgacgtgatgggaacagacggagacagatccccaaagcctgcagcatagtcggagcttcgagctcgttctcttgatcaggccaaaggatcagcggacaccatcagggccagcggtcacagcaacaggccggagacatgagcgcatccgcgatcgtcccaacaccgaaaagaagcccttgatcggcgggcgccgtccagaca

SEQ ID NO: 6333 - DNA, 1490 bp, unidentified
  source 1..1490: mol_type = unassigned DNA; note = element_9d0c679
  misc_feature 1..4: note = core
  misc_feature 5..244: note = LE
  misc_feature 245..1474: note = CDS
  misc_feature 1475..1490: note = RE
  misc_feature 19..213: note = bridgeRNA
gtcactagggcaccatcctttcaacggatgtctgtgaggcgttcgttgtagggactcggcgagggccgaggtgacggccagctgtggtcgccttttgagggcctccatgacaccgccgccctcggtcctcccggggtcgcagaccggcatcagggagacgcgccgcagagcgccagttagtgaccgtccggtagccgattccgggggccttgtcgggtcgtcgctgccaatctgaggagctctgttgactgaagagacccctgacgtcgtctacgtcggccttgactgggccgcggtcgttcatgccgtgtgcgtgatgtccgcggcggggaaggtgctggcccaattcaccatcgagcacaccgccgacgggatcgcgtccttggtccgccggctcgccaaatacggcaatcctgaggtcgtgcagatcgggatcgaacgtcccaacggacgcctggtcgacctgcttctcgaggcaggacacccggtcattccggtgtcgcctaacgcgatcaagacctggcgcgagggcgaggtcatctcgggtgcgaagtccgatgccggtgacgcgatggtgatcgcggagtacctgcgactgcggcaccaccgactccacccggtccagccctactcgagcgagaccaaagcgctgcgcaccgtggtccgcacccgcgacgacatcgtcgagatgcgcgtggccgcgaccaaccagctcagcgccttgctggacgacttctggcccggcgccaaagcgatcttcgccgacgtggagtccccgatcagtctggccttcctgcgccgctaccccaccgcagtcacagctgcacacctgggcgagaaacgcctggcagcgttcctgaccaagcacggctactccggccgccgccctgcgagcgaactgctcagccgactccgcggcgcgcccaccggcaccacagaccccgttctggctgaggcactccacgatgccgtgctcgccctggtcaccgtgctcgaagcgctcaacagcgccggaaagaacctcgaccgctccgtggtcgcccacctcggggagcacccggacgccgccatcttcacgtcgctgccaaggtcgggtcagatcaacgccgcccaggtgctcgccgagtggggcgattcccgcgcagcatacgacggacccgacgctgtcgctgccctcgctggcgtcacacccgtgaccaaggcctcgggcaagcaacgcgccgtgcacttccgctgggcctgcaacaaacgcttccgcaaggcactcacgaccttcgccgacaacagccggcacgagagcccctgggccgcccacatctacacccaggcccgagcccgtggacatgaccacccccacgccatccgcatcctggcccgagcctggacccgcgtcatctaccgctgctggcacaccgaacagccctacgacgccaacctgcacggcggagcgcagaggttgccgatcgcggcctgaggttgactcaggaagt

SEQ ID NO: 6334 - DNA, 1429 bp, unidentified
  source 1..1429: mol_type = unassigned DNA; note = element_9d0fd01
  misc_feature 1..4: note = core
  misc_feature 5..207: note = LE
  misc_feature 208..1425: note = CDS
  misc_feature 1426..1429: note = RE
ctcctacataaaattatgttataaatattttagttaaaagacaggcagggcaggacaacttatttttccttggctttcaagccatgaatggagtctgttgcctgcctttaaccatgataagttggttgggtttacagcccttgtcaacccggaggtttggttcagcaggctcctgccctcgcctttcaatccaaaggaggttataatatggattgtaaagctttttctgtctttgttggtattgatgtgtccaaagacaagttcaatgtctgtgctatctccaccccaaattccatcatttttgagcatgtttttgagatgtctaagcaaggcttttcctcctttgtcgacaatctttcttctttctccaaaaattccatcatattagccatggagtctaccggttgttatcatcttaatcttctttcttttctttctctcaataatttctcttgcgttgtcttcaatccattgactatcaaggattctccttctatttctcttagaaaaactaaaaccgacaaaatagatgctcgctctatcgctcgtactttgttttacctacaacaagaactaccttcttctccattcctcaacactgagtttcgtgatgttgtaagagaacgtgaaagtctcatctctcgcatttcaaaaatcaaaaacaatattgaaaagcttcttaatcttcttttccctgagcttgagagttttactaatatttacaatgattctattctaaaccttctttcttctttcccttctgctaaagctattcaaaatgctcctattgattctctgcgtgctttcttttcaaagtccgttggaagaaaaccaatcctttctcctgagtccctcaaagaacttgcaaataactctatcgctcaatactggccaatgaaagagaaaatcctcattcaaaatatcaaagaactcagatttcttaaagaacttctcaaagaatatgatgagatgcttaatcaatactgtcagtatgcttcattcaatgtagatattggactactcacatcgattaaaggtattggtcaaaatagtgcaatgcatttcttagctgaagttggcaacgtatcaagatttagttcttacaaaaagctcattgcgtattgtgagctcgatcctagtatttaccaatctggtaaacgcaaaactgaaagtcatatttcaaaaaggggcaatgcccacttaagacgaatagtctggctaatgtcagtaagtgtagtgagacacaacgaatactttagagattactttgaacgaaaaagagctcatggattaccttacaagaaagcgatgattgcagtatcacacaaactgttgagaacaatgtatgcgatgttgaaaaaacaagaaaaattcaatgttgattatgcattgtcatcttccaagctaaatcttaattttacatagttga

SEQ ID NO: 6335 - DNA, 1393 bp, unidentified
  source 1..1393: mol_type = unassigned DNA; note = element_9d13bf5
  misc_feature 1: note = core
  misc_feature 2..106: note = LE
  misc_feature 107..1147: note = CDS
  misc_feature 1148..1393: note = RE
  misc_feature 1160..1385: note = bridgeRNA
caatgggatggactcctcctcaccttacggcatcgcaatgtgccagactggattgtgtattcgttgaagcgaaaaatctcagtcacaggaagagaaggagtccgttatgaagcttagtagaattggagttgatttggcaaaaaatgtgtatcagttgcacggtgttgatcgtcacggaaagacgctctggaagcgccgtttgcggcgaggtcagtggttgcaggcgttattggacgagacagcttccggttgtgagattggtatggaagcctgcaccggcgcccaccattgggcccgggagcttcagtctcgaggctacatcgtgcgcttgatagcgccgcagttcgtaaagccctacgtgaaaagcaacaaaaacgacgccaacgatgccgaggcaatctgcgaagcgatgagccgaccgaacatgcgctttgtcacggtgaagagtgttgagcagcaggatatccaggcaacacaccgagtgcgctcagagataaaagatcaacgcaacgccaaggcgaaccagatccgtggcctggtggccgagtacggtctggtggccccgttaacgttgctggccctgcgaaaagcgatcccttgttggttagaagatgccgagaacggcctgaccgatcacttccggtctttgctgcacgggctgtggggtgatctgcttgctctggaggatcgtatgacagagcttaataaggcgatccagaaaatcgcagacagcaatgaagtaacccaacgactgcagcagctgcgtggcgtcgggccgctggtcgcgacggcattggtcgcgacggttggcactggcgaacaattcaagaaaggccggcagatggcggcagcgctgggactgacacccagacaatacagctctggcgacaagcaacgtctgctgggtatcagcaagcgcggcgatgtttacttgagaacgatactgatacacggtgcccgagccgtggtctcgcaagcgaaacaccgagaggatcgtctcagtcagtgggtgacgagtatctcgaaacgaagccaccctaatgttgccgctgtcgcactggcgaataaaacggcgcgtatggcctgggccatgctgcgcaacgacacagattacaaccctgacttcgccattggctcagtcgggtaaacgaaggagatactcaacagcgattgcttaagcaaactgcttgatggcaaacaggtcgaaccggcgtcggccaaacccgtgaatggctgtgtactcaaagtacgaacaagcgattgggagctgacgcgcgaatagcccattatggcccggcatcaacgtatgccaactacagaggccgaatatacgtacgcagtcgtgccatggctgtcatcaacagagtgcttgcaatgaggaggagtccatata

SEQ ID NO: 6336 - DNA, 1663 bp, unidentified
  source 1..1663: mol_type = unassigned DNA; note = element_9d15cb0
  misc_feature 1..2: note = core
  misc_feature 3..242: note = LE
  misc_feature 243..1559: note = CDS
  misc_feature 1560..1663: note = RE
ttatatccattcctttcgcttcgctcaaggcacaaaacgtaatgaaatagcttgcctttgggcgaattttttattattgttatgccatagggataccagtcaactacaaatcacggggaggtgagtgggctacttcatttgtggagtaaccgtatttttatatgtgtggattgtcttttcaagcacaaataagtgtgcctcgagcacgtaaccttatctttgtttaaacaattctcgtttaaatgctaggcaatcagtcaatgctgtctatccctataattctcttgaactttactgttcagaaaggagtccctatgactttaaaaatcgtatatcaaatctgttgtggcattgatgtccacaaaacgtttgtggttgcatgtattgcttccactgattctaaaggtgtcaccacctacaggcgccatcgcttttctacctatacgaagggtttaaaagagctgttacagtggctgcttgatcataattgcaaggatgtttgtatggaatcaaccgggaaatactggattcccgtgttcaatgtactggagaaatcctgtaccatttgtcttgcccatcctaaatatgttaaggctatccgtggtaaaaaaactgacaagaaagatgccaaatggattgccggcctttttaagcatgaccttgtagccggaagcttcatgcctcctttagatatcaggcagcttcgtgacttaatgcgctaccggtataaactcacatgctttatgtccagcgagaagaaccgttttcaaaattgtctcacagtttctaacattcagttgggaaatgttgtttcggacacttttggtaaaagttcgcaaaagattattgataagattctcgaaaatcctcttgatacttcttttgatattgaacctttaattcatggttccatgaaatctaagcttcctgacttggaactcgccgtcgatggttatattacaccggaacaggctggaaaattgaaggttatcaaacatcattttgaggatttagaaacccggaaagccgagttagaagaacttatccttgcgcccgctatgccttatcagcaagaacttgacctaatcctaaccgctccatcctttaaaaacatcttctctgccattaccgtgatatcagaaataggtgtcaacatggaggcttttcctacagcgaaacacctttgctcctgggcgggtcttacacctaccaacaacgaaagtgcaggcaagaaaaaaacagtccgggtttctaaagcaggatgctacataaagccattgctggtgcaattagccaactctgtcgtaaagagtgaaaaacatcctgaaatacgcaaccgctatctccggctaagaaaacgccgcggtcacaagaaggcaatcattgcaatagcaagaatgcttctaacagcattatacaacatgttaaagaacaaggaaccctataatgctgaactttatcgaaaatctgatgttcttccagtgaatcgtgaaatcacggtggaacaagcgattttattagctcaatttcaaggttatcgtatcaaaccagtatcataaccttagcactttagcctatattcaattttaaaaagtcgtcataagatggcttgtttgctatgccctcttatgtgattggctaattttagtttatatttcaacct

SEQ ID NO: 6337 - DNA, 1525 bp, unidentified
  source 1..1525: mol_type = unassigned DNA; note = element_9d1655e
  misc_feature 1..5: note = core
  misc_feature 6..177: note = LE
  misc_feature 178..1362: note = CDS
  misc_feature 1363..1525: note = RE
ttgctacaatatgcttgacccaaaaaagcagcatgttaaagaatgtgctgttcagcggttcttaccaaagctacaatgagagggtaatcggcctttcgaagcattgcttgagctaaccacgctcgatggtgcaaactgtcagccggccctttcattgcagcgttcgattgatgcaggttgagttatcggagtgatccgtacattcgtgtaacaaaaattgttcttctgccgtttgatgttgagcatactgcagaaggccttaaaaagctgagcacgaagctcagacagcttgacggagagatcaggatcgttatggaacacaccggaatgttctggcggaccattgcgatgactctgaaagaagccgggttctatgtaagtgttgtgaacgcaattctaatccacaattttagcgacaactctattcgtaaggtcaaaacagaccgtgctgacgcgatgaaaattgcgaactacggtcttaccttctggattgacttacaggaatacgctggcgaggacgagacccgtcagctgttaaaaatccagagccaactctatgaaaggaccgcaacaactgcatggatactgcgaaacggattgatctcacttctggaccagacctttcccggagccaacaaactgtttcgggatgaaagccgtaactccaagggccatgtgaagtggatagattttgttcttcgcttctggcataaagaatgcgtggcagctttgtctctggcagcttttacagacaccttccaaaaatgttgtaaaagaaccggctacaagttcagcgcttccgacgctgaacgaatccatgccatcgtaaggaatgcagtttccacgcttcccaaaaatgatagtacaaagcttctcataacgcaagcgacaaatagcctgaatgcgatctatgactccctccaagcgattagaacagagatggatcgcctcgcttcaatgctgcctgaatatgaactggtaatgggcatggagggcatcggaaaggttacaggccctcagcttatggcagaggtcggtgatgtgcgtcgattctcgcacaaaggggcgctggttgcatacgcaggcgttgacgcttcgccataccagtcaggaagcttcgattcgaaaagccgtcatgtgcccaaacgcgggtctccacatcttagaagagtgttgtttgtaatcatgtcaatgacgctcattcgtgcgaatactgctaatccggtgttttgttttatggataagaagcgagccgaaggaaagcacttttacgtttatactgttgccggctccgccaaatttctgcgcatctattatgcaaaggtcaaagaatacctgaacgctttagaagagaccgcctgatacagaacaacgatggccatgctgcaccgcagcacagccatcattatatgtgacggggcatatcctcccaggcctgcagccggaatatgttgcaggtcctttagctatgcctatttcttatcctgtacttttcttcttttgtgcttgacacacattagcaggt

SEQ ID NO: 6338 - DNA, 1430 bp, unidentified
  source 1..1430: mol_type = unassigned DNA; note = element_9d16a96
  misc_feature 1: note = core
  misc_feature 2..90: note = LE
  misc_feature 91..1131: note = CDS
  misc_feature 1132..1430: note = RE
  misc_feature 1193..1425: note = bridgeRNA
taatggaatggacgcccactaccctaaacggcatcgaagtgccaaagtagtggtgcaataaagcccacccaatagagaggagcgtccgacatgaagattacaacgataggcattgatttggcaaaagaagtatttcagattcacggagtggatatacacggcaaggctatgctacgtaagcaactgcgccgtagcgagatggcgaggttctttgccaatctcactccctgcctgattggcatggaagcctgcggtagctcacaccattgggcgagaaagctgggcgaatttgatcatattgtcaaactcatgtcaccccagttcgtcaaaccttatgtgaagaccaacaaacatgacatggcggatgcagaagcggtttgtgaagcagtgagccgacccaacatgcgttttgtaccgatcaaaaacgttgagcaacaggccattctgtcgatacaccgtgccagacaaggcttcgtcaaggctagaactgcgcaggcaaatcagatgcgcggtttactctctgaatttggtattgtgatgtctcagggtattcgatccatcaataaacgtatgccggatattctggaagatgccgagaatggtttgccaggaactatgtgtcggttgcttgaaagactaaacaatcatttcaaggaattagatcccccagtggaagagttagcgttgcagatcaagctgtggcataagaaaaaccaagtcagccagaaactggaagccattccgggtattggcccgatcacagcaagcgccattgtggcaactgtggggaatgcgacggagttcaagaacggcaggcaactttcggcatggatcggattggtcccaaagcaacgctccagtggtagtaagcagatattgcttggcatcagtaagcgtggcgacacttacttacgcactttattgatccacggagtaccagcggtcatccgatttaccgggaataaagttgagcctgagagctggctacacaggctaatggcgcggcgcaacaagaatgttgccgccgttgctctggcgaacaagaacgcacgcatcatttgggcgttgctcgctaaagacactaaattccaccccaatcacacttcggcagcatccgctgccaaagcctgatcagggtggccgaataaaagcgtattggtaatgtcccatcgaaaacgagtttaaggagatagactaccgccgattgcacaggcaatcatgacatgatggcaagacaggtcagaccggggttgggaaagttcgtagtggtacaagcacaccaagtgcgtaaaaatgatagaaccccaaccagcgtattccatcagggacagaagcaatatgcttcacataaagtccggatgtatggcagcaatcttcatccttcttaaaatcatagactgaaagcttggcataccgtgggcgtccatgta

SEQ ID NO: 6339 - DNA, 1416 bp, unidentified
  source 1..1416: mol_type = unassigned DNA; note = element_9d1dadc
  misc_feature 1: note = core
  misc_feature 2..83: note = LE
  misc_feature 84..1103: note = CDS
  misc_feature 1104..1416: note = RE
  misc_feature 1172..1408: note = bridgeRNA
caatgaaatggactcctccctcctgcggcgtccaagcgccagactggaggtgttaccaaccggtcccagagggaggagtcgagatgaaacttaaacgaattggcgtcgatctggcaaagcaggttttccaacttcatggtgtagacagccatgagcaggttgtctgccgtaagcaaatcaagcgcgcaggactgcttgatttcttcaggcaactggagccttgcctggtcgtcatggaggcctgcggcagtgctcactactgggctcgagagttccgtgcgcaaggtcacgaggtacgcttgatcgccccgcagttcgtcaaaccctatgtcaagggtggcaagaacgacgccaacgatgccgaggcgatttgcgaggcaggtagccgcccgacgatgcgttatgtagaggtgaagactgaggagcagcaggcagccttgtcagtgcatcggatcaggagtcgtgtcatcagggcgagaacggccctgagcaacgagattcgcggtttgctgagcgagtttggcttgatcgagcctcggcagggttttgcggccactcgtgccctgctgacacgctcattggaaccggacagcagcctaccggccgccatgcgcgaattggtgggcgagctacgcgacgaactgcaggaaacggacaatcgggtcgcccatttggatagcctgattcaacaacaggcacgccaggatgagcgagtgcaacgcttgctgcagatcgagggtattggcccgatcagcgccacggccatggtggcgtcggtaggtgatgcccgtcaattcaagtcggggcgccagctcgccgcctggctggggctggtgcccaatcaacactccagcggcggcaaggagcgcctgggtcgcatcagcaagcgaggcgataggtatctgcgaaccttgctgatccatggtgcccggtccgccctcagaacgagtgcgaaaaagaccgatccacgcagcgtctggctcaatgagttgaagtgtaggcgcaacatgaacatcgccacggtagccctggcgaacaagaatgcccggatcatctgggcgctactcagcaagggcgagagctatcactccatgaggagctgaacccggtggccgagcaatacgatacgtaacaccgcagcaagcgcaacaccgtagggagtagagcaagatccacacgattgcacagtgacagacagtgatgacgaaccggtcgaaccggcatgtgtgaagccttcgcaacccaaaggccctctgaaccttcaaggccgctagggcgattagccacacatgagcgactacttcatcaaggctcgaagtgacgaatcacttcattgggaagccggatatacggtagcagtcgtaccttggttcaaaagcactgttttttgctggcaaaccgggaggagtccatata

SEQ ID NO: 6340 - DNA, 1566 bp, unidentified
  source 1..1566: mol_type = unassigned DNA; note = element_9d25e58
  misc_feature 1..2: note = core
  misc_feature 3..268: note = LE
  misc_feature 269..1435: note = CDS
  misc_feature 1436..1566: note = RE
  misc_feature 3..244: note = bridgeRNA
cttgtatgatgttgttagaagcaaacacaacatacttcctttctttttctgtttcgtggtttaatacattcagatactgtgacttttgatgtttttttgtagcctcgactactcgacaggagtgtattgccatctcttttatctgaattgtttattagctggatgttgccggagcgtttgctctgagtacttatttcaatcaagtctacgatgataactgctggtggatatcacggtatcagactttatgaaagggaggtacaacctcatgatttacgtaggcattgatattgccaaactcaaccatttcgccgccgcgatttcttccgacggcgaaatactcatcgagccgttcaaattttctaataactatgatggcttctatctactactttctcatctggcaccacttgaccagaacagtatcatcataggtcttgaatcaacggcacactacggtgacaaccttgttcgttttctcatcagcaagggctttaaagtgtgtgttctcaaccctatccagacttcgttcatgcgtaaaaataatgtacgcaaaacgaagactgataaagtcgacacgtttgtgattgctaaaacccttatgatgcaggattcccttcggtttatggccttagaggatctggattacattgagctcaaagagctcggtagattccgccagaaacttgtgaagcagcgtacacgcttaaaaattcagctgacttcctatgtagaccaggcattcccggaactacaatacttctttaagtctggcttgcatcaaaactctgtctatgccgtccttaaggaggctccgacacccaacgctattgcttctatgcatttgacccatcttgctcacaccctcgaagttgcttcccacggccatttcggtaaggataaagccagagaattaagagttctcacacagaagtctgtcggtgtcgatgacagttctctatctattcaaataactcataccattgaacagatcgagttactggatagccaacttttttctacagagcttgaaatggcaaatcttgtcacctgcctgcactctgtaattatgaccattcccggaattggtgtcgtgaatggcggaatgattcttggtgagattggtgatatacaccgattctctaatccaaagaaactgcttgcatttgctggactggatccgaccgtttatcagtctggaaacttccaggctcacagaaccaggatgtccaaaagaggatctaaaatgctacgctatgccctcatgaatgcagctcacaatgtcgtaaaaaacaatgctactttcaaagcttattatgatgccaagagagcagaaggccggactcattacaatgcccttgggcgctgtgccggcaaacttgtcagagtcatctggaagatgctcactgacgaagtagcatttaacctcgaataagaggtctgtataccataatcgataaattttgaaaaagggcttttagggagctttgttaaagttacccttctttctgcgaaacacggaattgaaatttccacctaatttatacttgacttttcatagctggt

SEQ ID NO: 6341 - DNA, 1432 bp, unidentified
  source 1..1432: mol_type = unassigned DNA; note = element_9d31ef8
  misc_feature 1: note = core
  misc_feature 2..225: note = LE
  misc_feature 226..1419: note = CDS
  misc_feature 1420..1432: note = RE
  misc_feature 14..240: note = bridgeRNA
ctgcttgttccattgacccaggaccggtgcctggcgaggctcggtccaggcgcccgggtcgtcgctctcatttcggctgcccacgctggtcgtgtggctctcacttggcctgcgtgacccgggcgtcgccagggccaggagaggctcaagaggggtttgcccagctcgaagcagcgttgccctcccggctcgacaaccgaaaaggttcgagcatcggaggaagacgtgagcacaccagcagcggggcgggtcgtcatcgggatggacccgcacaagcgctcggcgacgatcgaggtgatgaccgccgacgagaccatcgtcggcggcggccggttccccaccgaccgcgatggctacgaccagatgcggcgctacgccggccagtggccggaccggatctgggcgatcgaaggctgtgccgggatcggcaagcacatcgcggtccggctgctgagcgacggcgaagaggtcgtcgacgtcccacccaagctgtccgcccgggcccgggtgttcgccagcggacagggccgcaagaccgacgccaccgacgcgcactccgtcgcactcatcgggacccggatggccggactgcgtccggtcgtcaacgacgagcagctcgcagtgctgcggctcctggtcgaccggcgccgctcgctcggtgaggagcacacccgcaagacctcccagttgcaccagctgctgctcgagctcattcccggtggggccaagcggaacctgtccgcggcccaggccaaggcgctgctgggcaagatccggccacgcgatgtcgtcggcaagacccgccgccgagtagccgccgagctggtcgcagacctcgagcggatctacgcccggaagaaggaagcgaacaaagaactcaccgacctcgtgaagcagaccggaaccaccttgttggacctgcacggcatcggacccaccggcgctgcccggctgctggtcgaggtcggcgacatcacccggttcccgaacaaggcccacttcgcgtcctggaacggcaccgcacccctcgatgcgtcctccggtgaccaggtccgacaccggctgtcccgcaagggcaaccggcagatcaaccgggtcctgcacaccatggcccgcgtgcagctgcgcaacccgaccgaaggccgggcctactacgaccgcaagaaggccgacgggaaagcacccatggaagccatgaggtgcgtgaagcgtcgactgtccgacatcgtcttccagaccatgctcaacgacgccgtccgcaccaacgagcccactgcgaggacgggcccgggaggacaacggggaaacgactctgactccagcgcggctggctcacatccccacaccagctcttcggacaagtcacttcccggacccgccagacaacaccctagaactccactccctgctgcgtcttgacacagaggggtgc

SEQ ID NO: 6342 - DNA, 1291 bp, unidentified
  source 1..1291: mol_type = unassigned DNA; note = element_9d3887d
  misc_feature 1: note = core
  misc_feature 2..146: note = LE
  misc_feature 147..1175: note = CDS
  misc_feature 1176..1291: note = RE
tgtatgattactccgtcagaaagaaccggccagttctctctgatggcggtccggatgccgtgtccgggcttaggctttcgcgcctgttccgtagatcctttgcaccggaccgccgttctttctcatgtgataaaccggacagtatcatggaccggctttcaccggtaacccgtatttgcaaggttggtttcactatggaaaatgaactccacttcatcggtattgatgtcgccaaagctaaactggatgtcgatattcttcgccctgatggccggcatcgttgtaaaaaatttgataataccctctccggacacgaagcgctggtccgctggcttcgcggccatgacgtgaaccgtgcccatgtctgcatagagtccaccagcacctacatggaagacgcggccgcgcatctgagtgatgccgggtataccgtgtccatcatcaaccccgccctcagtaaagctttcgcacagagtgagggattgcgcagtaaaactgacaaagtggacgcccgtatgctggctcacttctgccgggaaaaacgcccgtcagcctgggaggcccctcatccgacagagcgggcactgaaagccctggtgttaaggcatcaggcgctgacagagatgcagacgcaggagaaaaaccggcgagaaaccgcgccggaggttcagctggccagcattgatatcctgctgggatgtctgagcgcggagctggcgcgtatcgaaaaacagataaaagacctgacggataacgacccggatatgaaacgacggcggaagctgctgaacagtatcccgggcatcggggagaaaacagcggctgttctgctggcgtatacgggcctgaggctgaagttcggtacagcgcggcagttcgcggcgtatgcaggactgacgccggtgcagcatgagtcgggaagcagcgtgatgcgggcgagccggatgagcaaagcggggccggttcaactgcgcaaggcgttatacatgccagcgttatcggcgctgtaccatacggcgtggggaaaagcgttcaggaaaaggctggaagagagcggaaagcgggcaaaagtcatcataggggcgatgatgcgaaagctggcgcaggtggcttatggagtactgaagtcaggaaaggcgttcgatgcgtcacagcatgagctgttgatagcgtaacaacgttccctgagaaaaaacgacagcaccagagagtgctgtctttggtgtgcctgtcatccgggagccggagaaagtatcggcaactaaaaatggttgcaggcgttcacagtatc

SEQ ID NO: 6343 - DNA, 1427 bp, unidentified
  source 1..1427: mol_type = unassigned DNA; note = element_9d3932d
  misc_feature 1..3: note = core
  misc_feature 4..218: note = LE
  misc_feature 219..1103: note = CDS
  misc_feature 1104..1427: note = RE
  misc_feature 1195..1427: note = bridgeRNA
agaatgtaatgaacgcatctcaactatttgagtatgaagccggggttggcaggaaaagtgtggagcctcgcagatttccggcatcatagtacccaatacgggatgcataaagctccctcagactggagactccacaaatgaaatatacaccggttggcgttgatatcgcaaaacatgtcatttaggttcacttcatcaatgagcacacaggggaagtggtggataagcaggttcgtcgtcaggattttctggcatatttcagtaaccgcgaaccctgcctgattggcatggaagcttgtggaggctcccagtactgggagcgtgaattaacaaagcagggacacaaagtccggttgttgcaggctcgcttcgttaaagcattcgtcatgggcaataagaatgacgtgatggatgcgcgggctatctggatggcggtacagcagccaggcaaagaaatcgccgtcaaaacagaagaacaacagtcaatactggttctgcaccgttcccgcagacaactggtgaagttccgtaccatgcagattaactccctgcacggtacgctcctggaatttggtgaaacaattcacaaaggtcgggcagcaatggagcgggagttccctgaagcactggagcggatgaaagagagactgccaccgtacctcattacagtgctggaaaatcagtacaacaggctgaatgaactggactcactgatagatgatatagaaaaacagcttatcagtgtggcgagacagaatgagacctgtagacggttgctggatattcctgccgttgggccatttattgcaacggcagcgttggccatcatggggaaagcatcagtgtttaaatcagggcgagagttcgcggcttatgttggtctggtgcccagacagacaggctcaggaggaaaaatccgcctgctgggaataagcaaacgtggtgataaatatctgcgaaccctgtttattcatggtgcaagggcggcagcattactgaccaaagaacctgggccgaggataaccgaactgaaaaacgtcgtccggccatcgtggcaattgtcacaatggcaaacaagctggcgcgaacggtgtgggcaatagccgctcacggacgtaaatacgacaaaaatcatgtcagtatcaggccttattaatcgctgataccgataaacataaactctttacaaaagggtgaatgctgaaaggttgcgtgggcagccgtagtgatgacaacgacaggtaagaccgggactcgctaaacctgaatctgttctagagattaaagctcgctgggagaataaggcgcgagtcagcgtattacataggggcccgcagcttcacggctgcaacaaggccggatatagagctgcaacctaccgtcaatgtcaaaactacgaaagccttgcaaacgggatgcgttcatat

SEQ ID NO: 6344 - DNA, 1484 bp, unidentified
  source 1..1484: mol_type = unassigned DNA; note = element_9d3cda6
  misc_feature 1..2: note = core
  misc_feature 3..211: note = LE
  misc_feature 212..1078: note = CDS
  misc_feature 1079..1484: note = RE
  misc_feature 13..193: note = bridgeRNA
cttgtatgtaatagagatgtgctggttagctaccatcacatgaagcggggagagcctgaccttcgccctaaggcagtgaccttcgtttggcagcataggccctccgcttcacctttcacgccagcattaacattgaacggttgccaggagcaatgactctgcatgtacaagggtaataggcgtgatggttcagtgaaaggagaaaacgtctatgtttcagttaggtatcgatgtcagcaagaacaccctggatttatgcctgctgcgggaaggtgtaaaaggcagggtcaaaacccgcaggcttaaaaacgatgtcaatgcagccagttcagtgatcacctggctcggtaaacaacaatgtgcccctgctgatgttcatatcatcatggaagccactggagtttatcatgaaccgcttgcatacggcctttacaaggccggagctaaagtttcgctcgccaatccacaccgcagcagagaatttgcacgtggcatggatattctgacaaaaaacgaccaaattgatgcttatatgctcgcctgctatggcgcacttaaagagccggaaccgtgggttcctccgcctgaaagcattcgttatctcagcgcccttctgcgtcgacgggatgcgcttgtcactgaccgcagccgcgaaaaaaacagactggaaaaatgccgggcaactgacattccgccagtgattgctgagtctatcgaaaatgtgcttcgaaacctgagtgcagagattgaacgcctggacgaattgctcctgactcacctcaaccagcatcctgagttaaaaaaggattttgacctgctgacatcgataaaatccgtgggttttcagttaggtctgaacatgctggttatcctgcggggtcatcgtttcgacacagccgggcagcttgcggcgtttctgggcgtggtacccgttgaaaaatcctccggcacctcaatcagaggtaaacctaaattatccaaaaacggcccaccggaaatacgggcgaaactgtatctggcttcaatgtgtggccttagatttaacccggtcatgaaggcgatgtatgagcggttatgactgagtggcaaggcaaagatgtgtgccataggcgcactgatgcgaaagctcgttcacttgtgctatggcgtactaaaaacacaaaagccgtttgatgctgagcatctgtcttcagatgcgcgtagcgcatgtaaggcggcataatggtgttatatatggctctgtagtcaaaccgccgaagcccggcgtaagccggtagaggatcatcagagatcctaatcacccttccgtcctgtagagccatacagactaacagcaagtggttgtgatgagttaagcccttttaaccccgttagcgcggcgtagccgcgatgtatcggggacttagtgctggcagcttgctgacagcgcttagggggctgtatttccaaacgtgaaataatgttttcttgacggaacacggtag

SEQ ID NO: 6345 - DNA, 1236 bp, unidentified
  source 1..1236: mol_type = unassigned DNA; note = element_9d412a0
  misc_feature 1..2: note = core
  misc_feature 3..270: note = LE
  misc_feature 271..1233: note = CDS
  misc_feature 1234..1236: note = RE
  misc_feature 39..238: note = bridgeRNA
cttgtatgttcctcaggcactctaaagtgaaagggcaagccatgaagagtgccgaggcggagggactatccgggctatctgtcgcctacgcgaacagactccagtagcgaatccctgcttcgtcagcctcagtgtcgattgaggatgcagcggcgaggtccgaacctgcacagggcgacgaccccgaccgccgatagctcgcaagctcacacttcagctggcgccgccccggcctcgacagtgtaaccctagacaacgagggtcgccgacatgaaccaggtaccgcatgaaattggggtggatgtcagcaaggacgagctggtggtagcgacttatggtgtggggccggtggtgcgcctggccaatcgtcgtgccgccatccgtcgctggctcaggcaattgccgacggggtgtcgaatcgggctggaggccaccagcatctatcatctgcccctggccgagctggcccatgcggcaggccactgcgtctatgtgctcaaccctcggcaggtcgcccgttacctcgggagcctgcgtcagcggggcaagactgatctgctggatgcccaggggattgctcgtttcgtccgtaatgaaaccgatcaggttcatccattcaccccgtcttcacccgcccagcgtggcatcgccagtctgatccatcggcgtcatttgttggtgaagcagcgtacagccctgcggcaaagctgccgcggcgagccctggctgcggcaagcggttcagccactgctggcggagtaccgccagttgctggccaagctcgatgcggaactggaggtactgctggcacaggtccccggtctcgccgggcagaggcagcgcttgcaaagcatcgcgggcattggcccgctggtcagcctcgccttgagcaatcgcctgagccaaaccgattaccgccgcagcgatgcgctcgtggccgctttcggcctggatccacgtcctcgcgaatccggtacctatcaggggcggcgcaagctatccaaacaggggcatccggaagatcgccggctgatctacctggctgcccagggggcatgccggaccggtctctggcaggccgagcgcacccagtgggcagcacgcggcctgagcaagactgccatgaactgcatcatcgcccgcaagctcctgcgcatcgcgttcgctgtctggcgctcgggaaaaccattcgacccaagcttgattggcaaacagacttgcgcaggaacataggat

SEQ ID NO: 6346 - DNA, 1379 bp, unidentified
  source 1..1379: mol_type = unassigned DNA; note = element_9d43e6b
  misc_feature 1..2: note = core
  misc_feature 3..86: note = LE
  misc_feature 87..1118: note = CDS
  misc_feature 1119..1379: note = RE
  misc_feature 1122..1366: note = bridgeRNA
tgatgaggtggaacggcccttctcaaacggcatcaagtgcctaacgtggtcgtgttgaaacgccacaaaacaagaaggaccgctccatggagaagattaccacagtcgggctcgatctggccaaatccgtttttcaggtccatggcatagccgaagacggagccgtgatcgtacgtcgggcactgcgtcggtcgcaggtgttggacttctttcacaagttgcagccttgccttgtcgggatggaagcctgtggcagcgcgcattattgggctcgagaaattcaggccctggggcatacggttcggttgatgccacccgcatacgtgaaggcctacctcaaacgcaacaaaactgacgccgcagacgccgaagctatttgtgaggcagtcacccggctgaccatgcgctatgtaccggcaaaaacacaagacgagcaggctgccggaatggtgctcaaagcacgagatttgctcatccgtcagcgcactcaggcaatcaacgctttgagagctcatctcgccgaactgggcattgtcagggcgaccggtctggttggaattatcagccttgccgccgtagtacgcgaccatagcgacccgagattgccagatgaagcgcgaatggctttggaagagttcgtcgagcagatcgaggccgtgacgacacgcgttgaaaggctcgatcggaaaattcttgaggcggtgaggaaagatgacagcgctcgacgcctgacagcgattcccgacgtcggaccgatcatcgccgcgactgttcgagcagttgtaccggaccccgctggcttcctaaccggtcgagacttcgctgcctggattgggttgacgccacgcgcgcattccagcggaggaaaagaacggataggatcgatctcaaagcgcggaaaccagcaactgcgaacgctgcttgtcgctggagcgacgtcgatcctcaagctcgctcgtcgaggcctccagccatccccatggatcgcggccacgatgttacgccgcccgttcaaggttatcgcagtcgcactcgcaaacaaggtcgcgcgcatcatctgggcgcttctcgttcatggcgatacttatcggggtgcgaagaggatcgaacaggcttagacataagagctttccggccgaccagtcggagaggcaggcaaggtgccaattgtgatgacccaacgggacgacatcccgaagcaattcagaccgtaaaatcgcaggcgcgttacagcgcgagaagctgattaggcgatttgctccgcggacctcatcgtggccatggctgaaaggccagaaaacaggccggacatatgaccgcaccgtccttatttgggaaatgcacgaggaaagatcttgccaagcgggccgttccacata

SEQ ID NO: 6347 - DNA, 1255 bp, unidentified
  source 1..1255: mol_type = unassigned DNA; note = element_9d486ee
  misc_feature 1..2: note = core
  misc_feature 3..191: note = LE
  misc_feature 192..1154: note = CDS
  misc_feature 1155..1255: note = RE
  misc_feature 28..201: note = bridgeRNA
cttgtgtgctggaaatttgagagtgtatgcgaacgggcggccgtgaacagcagccgcccgtcgctggacctgagcccgtcaccaccagaggcagaccctgagggagagcgagggacaggtccggtgcttccttcaacccgcacagttgcatgggcgtgagagcccgcacgagcaaggaagggaatgggaggatggcacaacagggcaggattgtcggtatcgatgttgccaagctgaaggctgatgcgtgcatccgctcgctgcagttgcggctgtcgcagccgagcacggcgcaaggtcagcaagacatgattacctggctgcgccgcaatgaggtcgggttggcggtgatggaagccagcggcggttacgagcgcgtctgggcggaagcgctgcgcgcggccgctattgcggtgcggatcgtcgaccccaagcgggtacgctatttcgccaaatcggccgggcgcttggccaagaacgacccgatcgacgccgagatgatcgcctggtttgccgagacctttgccgtcgcggcggagccggcccacgatgccgatcgcgacgcgctcaaccggctggtgacggcgcgtagcctgctggtcaggctggcgaccccgatccgacaactcggtgagcacgggcagccgcgggttgtcgagaacgcccaacgcgcgatcctcaagacgatcaaagcccagctcgccaagctcgaggcggcgatcgaggccaagatcgcggcgaatgcgcagttccttgcacgccgcgcgatcatcgccagcgtgcccgggttcggcgatcacttcgtcgccggcgcgctcgcttggctgccggagcttggccgcatcggtaataaagccgccgccgggctggtcggtgtcgcgccgtacgacgacgacagcggtcagcatcgaggcgagcgccatatcaagggcgggcgccgagacatccgcaccctgctctatatggcggccctcggcgccgcgacccgccacaatccggttgtcatggcctattacaaaaggctgcgcgctaagggcaaaaagaccaaagtcgcgctggtcgcctgcatgcgcaaactggttgtcatcctcaacacgatgctcgcgcggggtgagatgtggaacccgacccctcgcaccaccgccgtcgcatgagcgaccgtagggacgccacggccgacgctgccgaaggcagggcccccagcgccgcccttgagcccggccgatcaccgggctacctctcatcctcacagttg

SEQ ID NO: 6348 - DNA, 1592 bp, unidentified
  source 1..1592: mol_type = unassigned DNA; note = element_9d49414
  misc_feature 1..2: note = core
  misc_feature 3..253: note = LE
  misc_feature 254..1426: note = CDS
  misc_feature 1427..1592: note = RE
  misc_feature 3..230: note = bridgeRNA
ctcgtattatatagttatacccattctttacctttgtaattgattagggtatgctgttaaagatgctgtggattggtttatttctcctaccgcatagacggtttttgaaaggctccaaccacagtctctttgtttaattgttaatcagttagataccgcatgacggtttatgtagaacgaggatacatcttgcaaagagccctgtggatcttataacagcagcatcaactactatttaaggaggatcattgttatgatctatgttggtatcgacgttgccaaggataagcacgattgctgtattcttgatagcaacggtcagaggatgtatcccatcttcacaatctctaatgacaaggccgggtttgatgagctgttctccaagatcagatctgttaccaggttcaagaagaaaacaaaagtaggtcttgaggctaccggtcattactctaacaatcttctggcagcactcgttgataagggtttcccgacctacgttatcaacccgttacatacaaatcttttcagaaaaggtcagagccttagaaagacgaaaacggataaagctgatgccagttcaatcgctatgatgttattaaccgataggacactcaagccctactcagatacatcataccataatgaggaactaaaatcactcactcgttatcgttttgataaagttcatgaacgttcaaaactaaaaacttccctttccagacttgtaactattctatttccagaactggaaaagctggttcctactcttcatatggcttcggtgtatgctctcttaatcgaattccccggagcatccttcatagcaagcagccatctcacacatctgaaaaatgtcctttgtaacgcctccagagggcgctatggtcgcgataaagcaatcgagatcaggaatgcagcaattacttccatcggcactgttatggatgcaaaatcgatggaattgaagcacaccattcagcttatccaagtactcgacgaagagatcaaggagattgaagcttccatcaaaaaaatcatggatgcatcacacacacctataatgacaatccctggtatcagttatcgaatgggagccatgatcctttctgagatcggagacttctctcgttttgataatgcagacaagatacttgcctacgcaggtctttctccttcaacataccagtccggtcagcttgattcttctcattcacgaatggaaaaacgcggttcaagatacctgcggtatgcattgtttaatgccgccaagttcgtctgtaaatgggatgaaagcttcggttcttacctcggaaagaaattatctgaaggtaaacattacaacgtcgccgtgtcccacgcaacaaaaaagctagtacgaaccatttaccgtatggagataaacaaagaagcctacactcctcactaattctattcgttcacctttcctgttagagcacccgcccggatgctctgtttgtcatgcgattttcaaagtactgattgttgagaattagtctcaaccgctatatagaatgcatttctgcacttatatcataataattcatttttctacttgacttttaatagttagt

SEQ ID NO: 6349 - DNA, 1522 bp, unidentified
  source 1..1522: mol_type = unassigned DNA; note = element_9d4ef75
  misc_feature 1: note = core
  misc_feature 2..75: note = LE
  misc_feature 76..1122: note = CDS
  misc_feature 1123..1522: note = RE
  misc_feature 1296..1510: note = bridgeRNA
taatgagatggtccgccgcaacgtggtttgctggacgatgcgtgaaagcaaacctcagaacgaaggagagtgcaaatgaacattcgagtcgttggcatcgacgtgggcaagaccgtctttcatgtcgtcgggatggatggccacgggaaggtgatactgaaaaaccgcctgtcccggccgcagctgctgaagcgtctggtgaaccttccgccctgtcttataggaatggaggcgagctgcggggcgcattacctggcacggagtctgtcgaagttcggccacgatgtgcggctgatccccgcgcagttcgttcgaccattcgtgaaatctcagaagaacgactatgttgacgcggaggcgatcgccgaagccgtacagcggcccacgatgcggttcgtcccggtgaagaccgaagatcagctcgacctgcaggcgctgcatcgggtccgtgatcgcctcatggagcgaagaacgagcgtcataaaccagatccgcgcgtttctgctggaacgaggactggctctgcgagccggcagcaatcacctgcgcaccaacctgcctgccgtgctggccgcggcggaacagaacatgtcgccacgcatctatcaactgctctgccttgttgccgaggagtggcactccatcgagcagcagatcgaacggctggaccgggagatcgagacaatcgcgaccagcgacgaggcgtgtcggcgattgctcacggtgcccggaatcgggccgttgatcgccacggccatggtggcagctgtgggcaatgggagcgcgttcggcagggggcgggagtttgccgcatggctcggccttgttcccagacagcattcgacaggcggcaaagcccgactgctcggcatcagcaaacatggcaacgaatacctccgcaggctattcatccacggcgggcgatcggtccagcacagggtatcgcgtgagaagcaccgcttcggcccgtggctcgctcagcttgaactccgcgcaaactcgaatatcgttggggtcgcgatggccaacaagctcgcgcggatcgcatgggttgtgctgaatcggcaggaagtgtatcgcccgtacgagaatcagggacgcgcttcaagcctatgtgcgtgaatgcggttgcggtgccgccttcgctcttcagaccctcaatgcaccgatggcggccaccggtcaaggctccctgatgaactcgctgcgctcggccttgaccggcgcccgccatcggctgcctgaaccagcgagaagagcgaagccagctcctgaatccagcttttgatgtccggatcacctcggttttgcgaagtggaacattcgatgatggaaacagtcaaacgacgtgctcacaacctggcgaaagaactggtccatccgagaccgtagccgttatgaggcagagcgcgtgcgaatactcatcgtggccagggcactgcccataaacaggccggatacatttacgcagaccttatccagaatcgactttcctcttgcaaccggagcggcggaccataca

SEQ ID NO: 6350 - DNA, 1527 bp, unidentified
  source 1..1527: mol_type = unassigned DNA; note = element_9d4fb03
  misc_feature 1: note = core
  misc_feature 2..259: note = LE
  misc_feature 260..1459: note = CDS
  misc_feature 1460..1527: note = RE
  misc_feature 10..258: note = bridgeRNA
ccgttaccttttacgtgtccccgcaatgggggcgcctggcctccgggcccggtatggctctgccaccctgccgtgtctatggccttgggcgtgttgccgccgggttttggagcactgcctgaccgctgataaggggcctggtccgcatcccgtgcccggcgcaacgccgggcgttttctcggggcggcctgtgtaacgtggttgccggctgcggtgcgatggtcgaggccagggccatgcgaagtagaaggcggcgagcgtgtacgacaccagcggtatcggggtcttcctcggcctggacgtgggcaagggcgagcaccacgcccacgggctgaccccggccggcaagaccgtctacgacaagcgcctgccgaacaccgaaccgaaactgcgcgccctgttcgagaagctgatcgcgaagttcgccaccgtcctggtgatcgtcgatcagcccgcgaacatcggcgcgctgccgctgagcgtcgcccgcgacgtcggctgccaggtcgcctacctgcccggcctggccatgcgccgcgccgcggacctctacgagggcgaggccaagaccgacgcccgcgacgccgccgtgatcgccgacgtcgcccgcaccgcacccagggcgctgcgcaccctgaccgtgctcgatgagaccgaggcggaactggccatgctcgtcgggttcgaccaggacctcgcgggcgagtcgacccgcacctccaatcggctgcgcggcctgctcacccagatccacccctccctcgaacgcgtcctgggcccacgcatccagcaccaggccgtcctcgcgctactcgcccggtacggctcccctgaactgctcgccgaggccggcacccgacgcatcgtcaaactcctgaaacccctggccccgcgcctggccgagcgcctggccgaggagatcgccgaggccctcgcagaacagacggtcgtggtgcccggcacccgggccgcagccctcgtcatcccctccctcgcccgccagctgaccgagatcctcgcccaacgccgcacgctcgagggacagctcagtgccctgctggaggcccaccctctttccccgctcctgacctcgatgcccggcatcgggatcaggaccgccgcgaccatcctgaccaccgtcggcgacgccgccaccttccccaccgccgaccacctcgcctcctacgcaggacttgccccggtcaccaagtcctccggcagctccatccgcggcgaacacgcacccagacgcggaaaccggcagctcaaacgcgccatgttcctctccgccttcgccgccctggccgaccccgactcccgcgcctactacgacaaacaccgcgccgcaggcaaaacccacacccaagcaatcatccgcctcgcccgcagacgcatcaacgtcctccacgccatgctccgcaacgccacgctctacacgccccacaccgccaccacataacccgagcaacacccacccacatgcccgttacagcgagcagcccagacttgacggaagacataggggca

SEQ ID NO: 6351 - DNA, 1163 bp, unidentified
  source 1..1163: mol_type = unassigned DNA; note = element_9d559db
  misc_feature 1..2: note = core
  misc_feature 3..209: note = LE
  misc_feature 210..1151: note = CDS
  misc_feature 1152..1163: note = RE
  misc_feature 36..215: note = bridgeRNA
cttgtcttatgactttgctgtccgtttgggtgatgatgcgatgcccgttccggggtggccaccccggaacgggcggaaggggacggatcgcgaaaatgccggtcgttgagggaccgggttagagtgggatcgcccctttcttttcgtgtcggcccgaacggataccggggtctttcggcccggatgacaagcatgggacagcggaaaagatgagcgaacctctaccacaaaccatcggcatcgacatctccaaagcaacgctcgattgtcatgcccaccctgccgggatcgaccggcagttcgccaactcggccaaggggtacaagtccttgattgcctggccccgccaatgggagatcgagcggatcgcctatgaggcgaccggaacttaccaccgcgcgctggaacaggccttggcgcacatgccctgcgtcaagcttaaccccgagcgtgctcgccgtttcgcccaggccaccgggacacttgccaagaccgaccggatcgacgcggccttgctggcgcgcatggccgccacgctgcagccgccgatcaggcctgcaagaagcgcacaacaggcgctgttggccgaactggtcaatgcgcgcgatgggcttgtgcgcgatcgtaccgcgctcaagaaccgcgagaaaaatctcaccgtcgccctgctcaagcgccactgcaaacagcgtctcgaacagatcgcccgccatctcgaagcgctcgacgccgagatcgccgcgatcatcgccgccgatgccgatctcgcccggcgtcaccaaatcctcaccagcatcgacggcgtcggaaccctcaccgccaaccagctcgtcgccaccatgcccgaactcggcacgctcgaaaacaaagaggccgcctcgcttgccggcctcgctcccgtcgcgcgccagtccggccagtggaaaggcaagagcttcatccgcggcggccgcgccaacgtccgacaggccctctacatgcctgccctcgtcgccgcccgcttcaacccagacctcaaggacaagtatcagcagctcatcgctgcaggaaagcccgccaaagtcgccatcaccgctgtcatgcgaaagctcgtcgtcaccgcaaacgccctgctcaaagcagaccgcctctgggtcaaatcactcgcttgaccatcacggata

SEQ ID NO: 6352 - DNA, 1365 bp, unidentified
  source 1..1365: mol_type = unassigned DNA; note = element_9d607c2
  misc_feature 1..2: note = core
  misc_feature 3..81: note = LE
  misc_feature 82..1107: note = CDS
  misc_feature 1108..1365: note = RE
  misc_feature 1086..1352: note = bridgeRNA
cgatggtgtggacgcccccgcccggcatcgcaatgtgccaaggtagcgatgtcggaagtcgaaccaggttaggaggaaatcatgcaagacgttcacatcatcggactggatatcgcgaaaaactcatttcacgcacatgctgctgcggtcgacggaactgcactttttagcaaagctcttccgaggggtcgggtattgaacgtactcggcaagctgcaaccatgcatcgttgctctcgaagcttgtgccggcgcgcatcactggggccgcgagatcacggccctcggccatgaagttcggctaatcccaccacaatatgtcaaaccgtatgtgaagcgacaaaagaacgatgcctctgatgctgaagccatcgcagaagcagcctcccgcccttccatgcgctttgtcgccgtgaaaagccctgaacaacaagggcaagcgatggtactgaaggtgcgggacctattgacggcgcagcgaactcaaacgatcaacgcgctccgcggacatctttcggagcacgggattgtctcgccaaaaggccctcagcatttgccgcgcctcgaagacgagatgaatgctcgcaaagatatcttgccgcacacggtcatctcggtttgtcgcgtgctcttcgtgcttatcagctctctttccgagcgcatagaagctctatcgctgcagctgaagcaggtctccaagcaagacgatgtcgcaaaacgtctaatgaccatgccgggagttggccctgtgacggcggtttcgctgtctgttttggcaccaccacccggaaccttctcgaaaggtcgagatttcgccgcctggataggtcttgccccgcgccagcactcaactggaggcaagaccaagctgggacgaacatcgaagatgggacagcgcgatctcaggaggctgctgattatcggcgcgatgtctacgatccaatccgccgagcggcggggcggggcgcccgaaggatcatggcttgcccgcatgctcgcccgcaaaccgaagatgctcgtggcagttgccttggcgaataagatggcgcgcatcgcctgggtcctgatgacccgaggcggcgcttacgaaaccccggcgcgcgcctgagcgcgatggggcccaaagggaagcggcagttctgaacggaggtcatggcaaagcgtcgacgagatcaggaataggaaaaccagtgaccctcccggaggcttagaccccgcaaatgcgttttggacccgttcctcgaactcaccatgagggcccgcagcgaacactgctgcataaggaggccggatacacggaagaactcgaccgctccaccatgcccaacaggaagaaatcgcttgcatccctgggggcgtccataca

SEQ ID NO: 6353 - DNA, 1379 bp, unidentified
  source 1..1379: mol_type = unassigned DNA; note = element_9d652a8
  misc_feature 1..2: note = core
  misc_feature 3..240: note = LE
  misc_feature 241..1059: note = CDS
  misc_feature 1060..1379: note = RE
  misc_feature 1150..1367: note = bridgeRNA
tgatgggaaggatgccccctgctccgcggcatcgaggtgccatagtgtggttggtgctgagcctgaccacgagggagaggaggcatccatggaaaaggttaagacaatcgggctcgacttggccaagagcgttttccaggtgcatggggtcaatgcagcaggcggggtggtagtgcggcgcaagctccgccggtcagccctgctggaattcttcgcggcctgccgccggcgttgattggcatggaggcctgtagcggagcgcactactgggcgcgcgagctcacccgcctcggccatacggtccggctcatgccaccggcctacgtgaagccctatttcaagcgcggcaagacagacgcggccgacgccgaggcgatttgcgaggcggtaacacgtccgaccatgcgctttgtgccggccaagattgaggcgcagcaggcgagcctggtggagctcaaggtccgcgacatgctggtgcgccagcgcacccagaccgtcaacgcgctgcgctcccatcttgccgagtacggcatcgtggcggcgcaggggcgcaaggtttccgagctgatcgaggtagtccgcgatggcgacgatgcccggctgcctgatctggcacgccaggcgctatgcgagctggtgacccagattgaagccctggaggagcgcattgaacggctcgaccgccgcatggtccgccatgcgcgtgaggaccagacggctcggcggctggcgggcatccccggcattggggtgattggcgcgacagccctggccgcgatggtgcccgatccgcatggctttgcctcggcgcggcactttgctgcctcgctaggcctgaccccgaagccgcactcgagcggtggcaaggagcgcctggggcggatctcccggcagggcaacgccatgttgcgccggctgctggtgctcggtgctacgagccgcctgcgctatgcccggcgcagcccggaggcagcggattgggccacgcgcctgctggcgcggcggcccttcaaggtcgcggctgtggcgctggccaacaagatggcccgcatcgcctaggccttgctggcccggggagggacctacaccacaaccgcgaccgcctaggcggtcgcgtccgagctcgccgggcgccgcgcccggcgggggccaaggtgctgaagcgacgatgacagcgagagaccggtgagccggtgacgagacaggccgtttatcgcaatgcgccacccgagcgcgctcacctgattgcccctcgttccgcgcagctcatcagggctcgcggccagaccggccgcatactgaggccgtacacatgaccgtacccgtgctctcagtgccagagttgtagacgtgtcttgacccgcagggccattcacaca

SEQ ID NO: 6354 - DNA, 1611 bp, unidentified
  source 1..1611: mol_type = unassigned DNA; note = element_9d693d0
  misc_feature 1..3: note = core
  misc_feature 4..277: note = LE
  misc_feature 278..1447: note = CDS
  misc_feature 1448..1611: note = RE
  misc_feature 13..256: note = bridgeRNA
cttatataatgtatttaggttgttaaaggtaacctataaccctttatcgactaaatattattcagttttactgtataatattgttattagatagagtgtactcgttcgctccttgagatttaatctcgtacttgaaagagtgagacctctaatcttttaactgtttacgaataagttagatgttgaccctttcagggtacttcggatttgccataaggcagtaacgttattagattttgaggtgtctatctaaaatatattttttgtgaggtatcaaatgttttatttaggtattgatattggtaaaaatactcatgttgcttatttacttgattctaagaaaaaagttgtttttaaggctttttctttttcaaattctattgatggtgctgaaagtttaatctgcaaattagaacctttcaaaaatgaacttgaaattggtatggaagccactggtcattattggttaagtctatactcataccttagtgaaaaaaattttactgttcgtgttatcaaccccatccaaactgatggttggagacaaggtattgagattagaaagagaaaaactgatattatcgattctcttttaatagctgatcttcttagatacggagacttcgttgaaacatcactttccgatgaatactatttatctttaagaaatctttctagatttaggtcttatctagtatcttcaattggtgaccttaaaagaaaaacaattgctcttttagatcaaattttccctgaatatgcctcttcttttagtaatatttttggtaaaacttcaaaagaaattctagcgaatttttcatctccatctgattttgaagatattagttctgaaaagttaacatcttttttagagaatgttactatgaaaaaatttgctactagaaaacttgaagagctttcaaaaaaagcatcaacctcttttggtgtaaatttctgcttggattcatttggtttacaaatcaagatgcttatcgaacaaatttctttcattcaaaatcaagtgttggatgtcgaaaatgaacttgctactatattagaaaaacttaattctccaattactaccattcccggtattggttctgttaatgcagctacaatattaggtgagataggagatattaaaagattttctaatccttctaaacttgtcgcttatgccggtttggatgcaagtatttctcaatctggagagtttgaatccacttttaatcatatgactaaaagaggttctccttatttaagacgtgctttgtttcaatctgctcttagagctgaattttgtgaccctgttttttctaattattatcaaaagaaaattacagaaggaaagcaccatctcgttgctactaatgctgttgatagaaagctttgtcacactatttttgctgttttaactaaaaatgaaccttatcaagaacaaagttagttttgtttaattgtaaattacaatctaaaaatcaaaaactttgctaaccctattttttttagtcttaaactctagggggggttcatgcttatttttattcagtttttatcaatatcaatccttatattttttttcgtttaacctcttgacttttaatagttagt

SEQ ID NO: 6355 - DNA, 1493 bp, unidentified
  source 1..1493: mol_type = unassigned DNA; note = element_9d6af57
  misc_feature 1..2: note = core
  misc_feature 3..199: note = LE
  misc_feature 200..1471: note = CDS
  misc_feature 1472..1493: note = RE
  misc_feature 5..202: note = bridgeRNA
ctgatggctttaccctcctgggtcatggggtcgccccctgggaacgcttccggcgcttgtcctgcgaggactgaggtgagacggcgtcccagggggccggccccgcaggcccgacgcccacaagggtgtcgtcccaagaggactggtccatcagcacggcgccgtgcctgcgcccggacgtcggttcaggaaaggaagcatggtgctgggggttgggatcgactgggccgaggagttccacctcgtcgccctgggccggcccggcgagggggtgatccaggtccgccgggtcgagcacaccccggccgcggtcgacgccatgctggccgacatcgcccggttggagcccgacccggccgaggtccgggtggtgatcgagacccgccacggcctgctggtcgagcacttggtcgacgccgggtacgtggtgctgccggtcaaccctgacctggtcgcccgccgcaggggcccggcccgcaagaaggacgacgccgccgacgcccgcatctgctgcctgctggcgcttgaccgccacgccgccctgcggccgctggtcccccacggcgagctcgccgccgagctcagggcgatcgcccgcgacgacgagcgcgccgcccgtgaccagcggcggctgggcaaccgcctgcgcgccgacctgctggcgaccttcccggccgcgctggccatcgccggcgacgacctgggcgccccgacggtgctcaagctgctggaacgctggcccacccgcgaccagctcgccgccgcttcgcgccaggagctggtcgccttcgcccgcgccgcccaccacggctggcccgaacgcctcgccgacaagatcgagcaggcactggccggcgaccacttcaccccacgcgcctggctcgtcagggccaaggccgacaccatccgcctggccgcggtccagctgctgctgctcgccgcccagcggcgcgcttgggagcgcaggatgggcgagctgctgctcggcgcccccaggcacgggcgcgccaagcagccacgggagcacgagctggggcaggcggtccctggcggcaaggtctacctgagctttcccggcctcggtgaccgcctcgccgccagggtcgccggcgaaatcggcgaccaccccgagcagttcgggtcgccgaacgcgctggcatgctacgccggcaaggcccccgtgacccgccgctccggcaagcacgagctggtggtcgcctgccggctggcctgcaaccgccacctggccgccgcggtgcagcagtgggcgttctgctcgctgcgggagtccgcgtgggccagggccttctacgacgcccagcgcggccgcggcaagacccaccacgccgccctcagggcgctgggcaaccgctggctggaggtcctgtggcactgcctgctgcgcggccagccctacgacgaggccacccacgtcgccaaccgcaaccgcgccatcggcaaggccgcctgaccccatggttgacaaagggtgt

SEQ ID NO: 6356 - DNA, 1395 bp, unidentified
  source 1..1395: mol_type = unassigned DNA; note = element_9d6f933
  misc_feature 1: note = core
  misc_feature 2..89: note = LE
  misc_feature 90..1130: note = CDS
  misc_feature 1131..1395: note = RE
  misc_feature 1160..1393: note = bridgeRNA
taatggaatggtccacctctccccaaatgacctcaaatgagtcatgatgttagtaccaaaaacaaacatcaaaaagagagaggcaggccatgacctataataacccaaaaggtgtagtagcagtgctaggaattgatttagcaaagaaaagtttccaactccatggcgtagatggccatggaaaagttgtattaatgaaaaagctgagacgtaataaacttcgagccttcgtggcacagttgcccatatgccttattggtgttgaagcgtgtggaggggccaactattggaagcgcacctttgagcgatatggacatagcgtaaagatgatggcgcctcaattcgtaaagccctatgttaaatcgaataagaacgatgtaattgatgccgaagcaatatgtgaagccgtacaacgcccatcaatgcgttttgtcccctccaaaagcattgcgcaacaagatattcagagcatacatcgaattcgcagtcaggttgttgcaagaagaaccgcacaggcgaatcaaattcgaggcttactgatggaatatggaatcatcatccctaaaggcatcgcgaatgtgcgcaaagaaatacccggtattcttgaagaagcagataatgagctgacgatgctgtttaggacactattaaatgacctatatgaagaaatggtgcatttagaagaacggattgagaagctcgaaaatgaattaaaaactgtctgccgtgaaaacagtcattgccaacgtttgctcaccattcccggcattggattacttagtgccacagccctggtagcagccattggtgatattagtgtttttaaaaatggacgtgagttagcggcctggctaggtttggtgcctcgtcaacagagtacgggaggtaaaccaacattgctgggtatcagcaagcgcggtgatacctatttaagaaccctgttaattcatggtggtcgatccattgtaagagttgctgagaaatatcaggataaacgtaatcagtgggttggtaagctagaaaaacggcgaggaaataatattgcagcagtcgctgttgcgaataaaaatgtgcgaattgcctgggtgctaatgagtaagcaaacaaattttcaagtaagcatgatttaaagtattaaacaacctattgtgagagagcgagaatcaacgaattgcgaggataaaatagaagtgatggcataaaaggtagcacctgcacattcataaatctgaacgggacttgggctgatagaagccggactgctgataagatggatgtgcgcagattccatcggggccagagattaaaaaatatctcagagaaaggccggatatatgggagcaatactttttagttacacattattttatcttgcaatatgaggtggaccatata

SEQ ID NO: 6357 - DNA, 1641 bp, unidentified
  source 1..1641: mol_type = unassigned DNA; note = element_9d7a65d
  misc_feature 1..2: note = core
  misc_feature 3..299: note = LE
  misc_feature 300..1475: note = CDS
  misc_feature 1476..1641: note = RE
  misc_feature 40..271: note = bridgeRNA
ctcgtattatatagtagtggtttttagagaccctctccaaggtctttataactattaagtcatagtcttttctttacctcttctgtaggttcgactatgatatataagatgctgtggattggtttttttcacctaccactcgatggtttaagtgaggctccaaccacagtctctttgttcatttgttaatcagttagataccgcatgacggtttatttagaacgaggttacaatcgcaaggagcaccctgtggttctaaaacagcattaataattaatacatttcaaaggagatttattatgatttacgtaggaattgatgttgctaaagataagcatgattgctttatcaccaactctgatggagaagtgttatttaaagcattttccatctccaacaacttagatggctttactgaactttatcaaaagattaaatccgttatggatgacgtaacaaaaataaaagtaggactggaagccactggacactacagttacaatcttcttggatatctcattgataaaggtttgcccgcctatgttatcaatccgttacataccaatctatacagaaaaagtctaagccttagacagacgaaaacggataaagtagatgcccgcacgattgcttccatgctaatgtctgatgtgaacttaaagtcctactcagacacatcttaccacaacgaggaactaaagtcattaacccgttatcgttttgataaggtaaaagaacgtgcaaatctgaaaacttccatttccagacttgtctgtattctttttcctgaattggaaaagctggttcctcaacttcatatggcatctgtttatgcaatgctctctgaatttcccggtgcaaaacaagtagccagtgctcaccttaccagacttaccaatctactttctgaatcctcaaaaggtcattacggcaaggaaacagcaatcacatttagagatgctgcaagagcttctatcggctcatatatgcctgcgaaatcacttgaactaaaacacaccatcaagttgattcaggaacttgattccgagattaacgaaatcgaaaatgaaatcaaaatcatcatggataaaatcaactccccgattctcagtattcctggaatcagttatcgcatgggagccatgatcattgccgagattggtgatttcagtcgttttgattctcctgataaaatcttagcttatgccggcttttcgccatcaacatatcaatctggacaactgaacggtgcttacgcacatatggaaaaacgtggctccagatacctgcgatacgctctgtacaatgccaccaagtatgtctgccactgggatccaacatttacagcctatcttgctaaaaaacgagcggaaggtaagcattacaatgttgccatatcgcacgctgcaaaaaaattggttcgagtaatttatcatcttgaaaaaacaaagcagcaatacataacagcagcttaaatctttctaattcaatactcctttttgagcacctatcacgatgctctttttatcatgtagttttcaaggttcaaggaactctaactaagttccaaatatatctaaaatacatttctgtactttattcaaaaaatatcattttaagacttgacttttaatagttagt

SEQ ID NO: 6358 - DNA, 1376 bp, unidentified
  source 1..1376: mol_type = unassigned DNA; note = element_9d911df
  misc_feature 1..2: note = core
  misc_feature 3..78: note = LE
  misc_feature 79..1119: note = CDS
  misc_feature 1120..1376: note = RE
  misc_feature 1119..1363: note = bridgeRNA
tgatggtgtggacggccccctacggcatcagttgtgccagaatgaggttgttgcaaatctcagacaagggagccgtccgtgagagagattatccgcattggcatggatacgtcgaagcatatttttgtgctgcatggggttgatgccgaggaacgcgtggtgctgcgcaagaggctttcgcgcaggcaggtattggagttcttcgcccaactgccgccgactgcaatcgggatagaggcctgcggggcttcgcaacattgggcgcgggagcttggcaagctcggccatgaggtgaagctgatggctccgcaactggtgaagccctacgtgatgcggaacaagaacgacgggcgggatgcggaagggctgtgtgaggcgatgggccggccgagcatgcgctttgtgccggtcaagaccgccgagcagcaggcggcgctgatgctgacgggggtccgcgatggattgatcgcccggcgtacccagcttggcaatacgatccgcggccatgcggcggagttcggcctgatcgcgcccaaagggaccgacaagatcgagccgctgctggcgcggattgcgcaggacgagacgcttcccactctggcccgcgagctgtttgtcatgctcggccgcgagtatgccaggctcgagactgagctgcgggagatcgaggccaaactgatagcctggcaccgggctgacgccacgggccgccgcctggcgcagatcccctcggtcggtccgatcgttgccacggcgctggtgatgaagacgcccgatccacacgcgttccgctccggccgtcactttgcggcctggctcggcctcacgccgaaggatcattccaccgccggcaagaccaggcttggcaagatcacccgggccggcgacgaagacctgcgccgcctgctggtgatcggagcgacatcggtgatccagcaggccagacatgggcgaggccgtcactcgcgctggctgctggcgctgatcaagcgcaagccgccgaagcttgcggccgtggcgttcgccaataaggtggcccgcatcgcttggaagctgatggtgacgggggaaagttatgacgcggcacggataaacccgatcccgacagtcgccgcctgacagattggccggccggcgggctcgcccgccggctgacccggagctgcaagagcagatggagcgatcgatcgagcaacgatgcgagacaatccgtgggacccatcggccgcgaacaggccgcctggttgtttggagctcgcttcgcgcaaaccatcttggccagcgatcaatccgatcgccctcaacaggccggacatatggatgcaagcgacccgatctcaccaaaaagctcttgtgccacgggggccgtccacata

SEQ ID NO: 6359 - DNA, 1684 bp, unidentified
  source 1..1684: mol_type = unassigned DNA; note = element_9d9656d
  misc_feature 1..4: note = core
  misc_feature 5..332: note = LE
  misc_feature 333..1541: note = CDS
  misc_feature 1542..1684: note = RE
  misc_feature 48..296: note = bridgeRNA
acccattacgttgttagcagttccgcttgaaggaccccaggattcgtgctcctagccccatgctggggcaggctatgtttatctgcgttccttctgccttctggcagtggaactagtcgctggcttcggtatggcttgttatcgtccctgtctgaaaatgatccggggggtgatgccgccgaaggcagtgacatactccagactgctaataggaacctgacccatacgatatgtgtgaggtctcaaagtaatgtggatgccagcgtgaagtatgtccgaccaccagcgatgaaagaagtcctatactcattcaactcgctaggaggtctggcatgacctacgactatgtcatcggcatggacgttggcaaatactttcaccacgcttgcgtcttagatatcgacggcactcaggtgctatcaaaacgcatcaaccaaaacgaacaatccctgcgcacactcttttcaacgttcagcgaaaacgaccacaaggtccttgtcgtcgtagaccagccaaataacatcggacgactaactgtcgcggttgcccaagatatcggaatcgacgtgcgctaccttccaggtttggctatgcgtcaactctcacgcatccacgctggcaatgccaaaactgatatccgggatgcatatatcatcgcccacgctgcaaagaatcttccggaatccctccgcagtctcgaccgcgtcgaagaagccttcctccaattgaaagtcctcaacggcatcgacgaagacttagcgcgctcctacaccaggctcatcaatcagattcgaagtgcactagtaggctgctacccgcaattcgaacaagcccttcgcagccagataatccaccgcacatgggttctgcacctccttgcacgctacggcgggccaacgaaaatcaaacgcctcggtaaagcaaaaaccctagcgttcgctcgccgccataaagcgcgcaatcccgagccagttattgatgcgatattcgctgccattgctgaacaaacagtatctattgccggtgcagactacgcagaaatgggcgtggcaatgtcggcaaaagacgcacttgccaaacttgatcaccgcaaggaaatcgacaaggaagtcctcgccgtcatcgacgacattccccacacccaaatcctgctatccatgccaggaatcggcccgaaaacagcagcacagatcctcatgactgtcggggatatgtctgattttcccacaccaggacatttggcctcatatgctgggctatcaccccggacaaaccagtcggggacttccataatgtcgaactcgctcaatagagccggcaacaaaaaattaaagaacgccctatggcaatcatcttttacatccatcagattccacgagcgttcacggcaattctatgaacgaaagcgccgtgaaggcaagcgtcacaacgccgcagtagtagcactggcccgcagacgaatcaacgtcgtctacgccatgatgcgcaaccacgagtattaccgcgatcccgccccagcaaaggaagccgcagcagtctaaccccctacccacgaaaacaagccgactgggccaaatcccagtcggctaccagtcatgcgcaaaaccagcacacctaaacaatccggggtcgcgtatccgcccccggccgcaccacccgcaaggttgacaaactatataggaac

SEQ ID NO: 6360 - DNA, 1548 bp, unidentified
  source 1..1548: mol_type = unassigned DNA; note = element_9d9b469
  misc_feature 1: note = core
  misc_feature 2..230: note = LE
  misc_feature 231..1535: note = CDS
  misc_feature 1536..1548: note = RE
  misc_feature 13..245: note = bridgeRNA
ctacttcttgaatggacgtacggctccagcccggccaggctgggtcgaggtgaccggcgggaggctctcacttgcggctgcccacctgcggtcttggggtgtggctctgatctggcgtgcggcctgccggtcaccgtggcgaggttgtggctccagaggggtctgccctgctcgaagtagcgctgccctcctcgccgatatcagctgagctctgatcgaggaggaaccgtgtggcacgggtgatcatcgggatggatccgcataaacggtcggcgacgattgagatcatcgacgggcgggagaaggtcctggcgcagggccggttcggtaccgacagcgacggctaccgggccatgctcgcggccgggcggcggtacccgcagcgggtgtgggcggtggagggctgcaacgggatcggtaggcacctcgcgcagcggctggtggctgatagcgaggcggtggtggatgtgccggcgaagctgtcggcgcgggcgcgggtgttcgccaccgggcagggccgcaagaccgatccggtcgacgcccacagcgtggcggtggttgcgttaggtaccaacgggttgcgtcaggtcaccgtggacgatgccacggcggcgttgcggctgcaggtcgaccgccgcgatgggctgggccgagcccgcaccgacaccgtcagccggctgcacgccctgctcctggatctggtacccggtggagcgaagaagcacttgtccgcgccgcaggcccgcacgatcctggccacggtgcgcccgcgtgagctggtcgggcggacccgacggcagctggcgtcggacctgatcaccgagctcgcgatcatcgacaagaagatcaagcaggcgaacgcggtcctgaccgagctcatcgcggcgaccggcagcaggctgcaacagctcaacggcatcggtccatcgaatgcggcccggctgatcggcgacatcggtgacatcacccggttggccagccgtcaccatttcgcgtcgtggaacggcaccgcgccgctggaggcatcctccggcgagcagcaacgccaccggctgtccagagcaggtaatcggcggatcaaccgagcgttgcacatcatggccgtcgtgcagctgcgtcacgacaccgagggccgcgcctacttccggcgtaagctcgccgcgggcaagacgccgatggaagccatgcgctgcctcaaacgccgactgtccgatgtggtctatcggcagatggccgacgacgcgagcaaggcgagtccgggagggcaaccgggggcgactctgtcatccagcgcggccgacccaaccccgacggtcgacacttcggataagccacttcccggactcaaccacgagcctacgccgccaggcgtacagctccaggccgctgccgaaccgccacctacagcggtgagctcacggccgccgacccggaccgccaaaccgaggcgtcccgccacccgcaccaccacgccgaccagcgcttcgaccgccgcgtcggcccaaccaacgaagagatcttcatccaaggcttgacaaagaggggagc

SEQ ID NO: 6361 - DNA, 1350 bp, unidentified
  source 1..1350: mol_type = unassigned DNA; note = element_9d9be55
  misc_feature 1..2: note = core
  misc_feature 3..79: note = LE
  misc_feature 80..1093: note = CDS
  misc_feature 1094..1350: note = RE
  misc_feature 1082..1337: note = bridgeRNA
tgttggggtggacggcccccgacggcatcgaatgtgccaggctgtgatggttgaacaacgcagccaagggagccgcccaatgatgattatccggattggcctggatacctccaagcacgtctttcaggtgcatggggtcgacgagagcgagcaagcagtgttgcgccggcaggtgcgacgcagcgagatggcgaagttcttcggcaagctggcgccggcccggatcgggctggaggcgtgcggcgcctcgcaccattgggcgcgggtgttgcgcggcctggggcacgcggtggtgctgatcgcgccgcaatacgtcaagccctatgtcaagcgcggcaagaacgacgcgatcgatgccgcggcgatttgcgaggcgatgagccggccggggatgcgctttgtgccgatcaagagcgccgaacaacaggccgggctgatggtgctcaaggtgcgcgatctcctggtcaagaagcgcaccatgctgatcaacgcgatccgcggccatgccgcggagtttggcgtgaccgcggccaaagggccggtcaaggtggccgagctgctgcagcgcgccgatgccgaagcggcgggcgtgccggcgctggcgcgcgagatgctcggcgtgctgtcgcgccagctcgacgcgctcgacgcccagctcaaggccctcgagatccggctgatggcgctgcacaaggccgacccggtcagccaatgtctggcaacccagcccggcatcggtccgatcggcgcggtcagcttctcgctcaaggtgagcgatcccaaagccttccgctcgggccggcattttgccgccgcgctcggcatcaccccgcgcgagcattcgacggcaggacgacatcggcctggccggatcagccgacagggcgatgaaagcctgcgccgcctgctggtgctcggggccatggcgcagatccgctttgccaagcccgggcggacctcgccctggctgctcaacttgctggcacgcaagcccaaaaagctcgcggcgatcgcgctggccaacaagatggcccgcaccgtgtgggccatgatggtgagcggcgagacttaccggcagcccaaagcggcctgaggctcgctcaccaccccaccctgacctggcgctggcaaggacagcagcaagatggcgatcggtcgaaccgaggatcgggacaccccgcggaacccgctgatgctgagacatcgcgtttatgttcaggacccgatccgcgcaacccatctaggccagcggtccccgaccgcacacacaggccggacacatgaccgcaatcgaccagacccgtcccatcagctgcacaaaatccttgcaacccgggggccgtccacaca

SEQ ID NO: 6362 - DNA, 1429 bp, unidentified
  source 1..1429: mol_type = unassigned DNA; note = element_9da88fa
  misc_feature 1..2: note = core
  misc_feature 3..122: note = LE
  misc_feature 123..1154: note = CDS
  misc_feature 1155..1429: note = RE
  misc_feature 1187..1389: note = bridgeRNA
agatggggtaatcggccggcgttcttgtggatagctgaagaaattgggtgctgcgcttcaggctgatggtgaaacgaggtcaccgtggttagggcctcaagcatcagaaggagaagcgcagcatggagcattttgctggactggacgtatcggtcaagctgacgagcctgtgcattgtggatgacgcaggtgggattatccgcgaagcgaagattgagagcgatcctgacgctctcctgcaagtgctcaagaacggggcctatcacttcaagcggatcggattggaagcggggccattgtcgcaatggttgttcagcgctctggccgaggcgggcttgcccgtaatttgcgtagagacgcgtcacatgcgcgcagcgttgaaggctcagatcaacaagactgatcgcaatgatgcccgcggcatggcgcagatgatgcgggcggggctctaccggccagtgcatgtgaagacggtgcgcagtcaaaagctgcggatgctgctgacccatcgcaagctgctgcagtcgaaggcgattgcgatcgagaacgatctgcgtgccaccttgcgcaactttgggctcaaggtcggcatggcgggagcggtgaagtttgaggcgcgcatcaaggaactcgtggaaaacatcccggatctggccatccttgtcgaaccgctgctgattgtccgacgcacgctgcgcgaacaatttggcatcgtgcatcgccgcctattggctgttgttcggcaggacgaggtatgccgacgcctcatgaccgtccccggagtgggaccggtagtggcgctgacctatcgctcgactgtcgatgtgcccgcgcgctttcgaaactccaaggcggttggggcggtgtttggattgacaccgtccaagtatcaatccggcgaaattgaccgaaccggcgcgatatcaagatgcggcgatgagatgatgcgggtcatgctctacgaggcagctcagagcatgttgtattcgaggaaatggtcctggctcaaggcctgggcgatgcagatcgccaggcgccgcgggatcaagaaagcgatcgtcgccctggcccgccgactggcagtcgtcatgcaccgcatctgggtagacggcaccgagttccgctggaccaagcaagaggccgcagccgcatgactaggcaacattaaatccgataggagaaaacgcgagctccaccaagcggtggaatggtgtccctcgcgggacgatggatgaggtgagttcgtatgtccgcttggacctgccgtcagcttgacggcaagaccgaccaatagatcgttccgcctcgtcctcgaatcccatgatggaagggccctggtgccgattccggagagaagcacgagcccgcgagtgacattcatctgtcgtggacagtcggaagcgcttgacccagatcggccgattagaga

SEQ ID NO: 6363 - DNA, 1480 bp, unidentified
  source 1..1480: mol_type = unassigned DNA; note = element_9dc7834
  misc_feature 1..4: note = core
  misc_feature 5..232: note = LE
  misc_feature 233..1459: note = CDS
  misc_feature 1460..1480: note = RE
  misc_feature 6..230: note = bridgeRNA
ctaatggggttgctgggttcgtgagagtctggcttcgagccgctggccggtgagcactcttgccgcctggagccctccgggattcctagggttagatcgtgccccggctggcaggttcgggttgcccatcaagcgctcatggggtgtcgtgccgtagagcactgatccattaggtcgccgctcgggaagcccgcaggctcaccatgttgaaccacaaccgaggaggcacaccatgaaagtgttcgtgggcgatgactgggccgaagcccatcacgacgtccatctgatgggcgagaccggcgagaagctggctgcgaaacggttgcctgaggggctcgatgggatcgcgggtcttcatgcgttgatcgccgaacacaccaccgatccgacggaggtgatcgtggggatcgagaccgagcggggcttgtgggtccaagcgctgatcgccgccgagtatcaggtgtacgcgatcaacccgttgtcggtctcgcgttacagggaccgccacaacgtcgccggcgcgaagtcagaccctggcgacgcgaaactgttggctgatctggtgcgcaccgatcggcacaaccatcggcctgtcgccggtgacaccgaccaggccgacgggctgaaagtcctcgcacgtgcccaccagaatctgatctgggaccggacccgtcacaccaaccggctccgcaacgacctccgcgagttcttccccgccgcactgttcgcgttcgagagccttgccgaccgggacacgatcgcggtgttgactaaagctccgcaccccgatcaggcccgacggttgtcgatcgcccagatccgttcggcgctccgaaaaggcggacgtcaacggaacctcgaccggcgggcctccgagatccaacaggcgttgcggacccctcaactcgacgcaccgccagcagtgacgacagcgttcgctgcgaccaccaaagcgctggtcgaggtcatcgccgggctcaacaccagcattgctgaactcgagaccgagctggccgcccattttgatgaacacccggacgccgacatctacctctccctgccaggactcggtgttgtgctcggcgcccgggtgctcgcagagttcggggacgaccccgaccgctacgacaacgccaagtctcgcaggaactacgcgggcacatcaccgctcaccatcgcctcaggcaagaaacacgcggtcctcgcccgccatgtccgcaaccggcgtctctacgacgccatcgaccaatgggcgttctgcgcgatcacagcgagccccggctgccgagagttctacgaccaacaccgtgccgccggtgacctccaccaccaagcactcagagcgctcgggaaccggctcgtcggctacctccacggatgccttcgaacccgcacccactacgacgaacacaccgcctgggcacaccgtcaaccagcacaaacacagattgctgcttgacaccttccacccctggggtgt

SEQ ID NO: 6364 - DNA, 1351 bp, unidentified
  source 1..1351: mol_type = unassigned DNA; note = element_9dd641b
  misc_feature 1..2: note = core
  misc_feature 3..75: note = LE
  misc_feature 76..1104: note = CDS
  misc_feature 1105..1351: note = RE
  misc_feature 1120..1349: note = bridgeRNA
atgaaatggctacccccgctgccccctgtgatcgcccactaagctttcaccgggggctcatcggagatcattgccatgaacaacgtagctatcgccgccatcgacctcggaaaacatacctttcacctgcatgcgcaagatgatcgcggccacgaggtttaccgcaaaaaatttacgcggacggcgctcacccggcacctcgcaaatctcgccccctgcaccgtcgtgatggaagcctgcggcggcgcccacttcatggcgcaagaggtcgccaagctaggacatacacccaagctcattgcccctcatctcgtgcgtccgtatgtgaaaagcaacaaaaacgacttcgctgatgccgaggcgatctgcgaggcggcgacccgacccacgatgcgttttgtgccgcccaaaacccaagcccagcaggcgctggccatgtccaactcgctacgtgagtcgttcattaaagaccgcacggcgaccgtcaatcggattcacgcagcccttctggaggttggcgtcagcctggccccgggcttcaaaaccatcaaagagcttccagcgttgcttgaggtgagttcattttctgaacgcatcaagaaaaatctgatgctgctgcatgggcacttcaactatctggatggacaggtcaagtcgctggacaaggaggtggagtgccaggccgccgaagatgatctggcggcgcgcttgatgaccatgccgtgtgtcggcccgatcacctccagcgccctggctgccgagttgggcgatggcaaacagttcaaatgcggccgaggctatgcggcctcgatcgggttggtgcccaaacaacattccacgggcgacaagaccgtactgttgggcatcagcaaacgcggcgatcgaaaccagcgacgcctgctcatccagtgcgcccgtgtgtacttgatgcaactggatcgacagaaaggcgctttggcggactgggtccgccagctcttggcgtcccgccatcactccaatcttgtggtttgcgcgttggccaacaagctggcacgaatcgcctgggcgattgcggcacaccacactgaattcgatgcggggccagccgcgatgaacgcctgaccccgctgtcacccgagcaccacccacctggttttgcgatgctggataactgatgacgtgaacggccaaccggcctgacgacaaccctgggctcctacacggctgaaaggccgttaccctaattagggtcgttgggcatcgattctcatcgaggcgcggggccacaaaccccacttagacgccggatagatgaaagcaagccaaacacgcatcaagaacagtattgcagaaaagggggtaaccatag

SEQ ID NO: 6365 - DNA, 1429 bp, unidentified
  source 1..1429: mol_type = unassigned DNA; note = element_9de003b
  misc_feature 1: note = core
  misc_feature 2..78: note = LE
  misc_feature 79..1143: note = CDS
  misc_feature 1144..1429: note = RE
  misc_feature 1193..1420: note = bridgeRNA
taatgggatggtccggccgtgctcccgccccaccagcaagcgatgcttgtacggggcaccaaagacaaggagcacgccatggcagaagctctcaagaattcaatcgccttcgtcggcatcgacatcggcaagaactctttccacgtcgttggtctcgatgagtgcggtgcgatcgtgctgcggcagaagtggtcgcgcggccaggtagaagcgcggtttgcgaatatgccgccatgtctgattggcatggaagcctgcgtcggcgcgcatcatctcagccgcgggctccagaagcttggccacgatgcccggttgatgcctgcgcggtacgttcggccctattcaaagggccagaagaacgacttccgcgacgcggaggccattgccgaagcggtgcaacgcccgacgatgaagttcgtcgcgagcaagaccgccgatcaactggaccttcaggccatgcaccgtgtgcgagagcggctagtgagtcagcgcaccggcatcatcaaccagatccgtgcttttctgctagaacgtggcgttgctgttcggcaaggattgcgcttccttcgaagcgagttgccgggcatcctcgcccgaccatccgacatcctgtcgccacgcatggtgcgcatcatcgaagatctggctggtgattggcaccggctcgacgagcgcatcgagggtttgtcgagcgagatcgaagccatcgcgcgccgggactccagttgtgagcggctgatgagtgttccgggcattgggccgatcatctccagcgcgatgatagcggcgatcggcgcaggcgatgtgttctccaaaggccgcgacttcgccgcctggctgggccttgtccccaagcagatatcgaccggggaccgcaccgtcctcggcaagatatcgaagcggggtaaccgctacctgcgggttctgtttgtgcaggcggcatgggtggtgctgatcaggccaaagagctgggagcgccacgggctcaagtcctggattgaagccgccaaaaagcggctgcaccgtaacgtgctcgcgattgcgctggccaataaactggcccggatcgcctggagcgttcttgcgcacggacgttccttcgaagcgagcaaactcgccgaagtggctgccaaatccgcctgatcgccgatggcattgaaaggacaagcgatgacgtaatcccacaccctttactcgccgaggtctgcgagaggataagaagagatggaggatcggtcttcccggcgcttgcgaacactggtgacccaaatgacccgttgaggcctgtccggtaatgagaacgcacgcgcgctgatatccatgatggtccggagcacaacaagctccaatcagagaccggatacattgatgcaagaccgctgacgccagatcgacgaaaacctcttgcgacgcgcggccggaccataca

SEQ ID NO: 6366 - DNA, 1344 bp, unidentified
  source 1..1344: mol_type = unassigned DNA; note = element_9de3743
  misc_feature 1: note = core
  misc_feature 2..275: note = LE
  misc_feature 276..1301: note = CDS
  misc_feature 1302..1344: note = RE
  misc_feature 101..257: note = bridgeRNA
ctctaagtttgcaaaggaaagcgacgtagtcgcatgactaaatatgaaggcaaaaagacaaataactcaagactgtttcttacctttgttgtataaaggtggaatcggtctgtcgaagaggtaaaccagctaatgacccagccgtaaggctataaatcgtttaggacctctccgacatagttgcaaagacaagatagaaagttatcggcatagagcctagttagagttccagtccatacaactattgaccaattccataaaataaaaacaaagttatgaagaatttatttattggtatcgatttttcaaaagaaaaattggatgtggctgttattacagccgtgggactgtcagaaacagcacaaagagagtgctatgagttcaagaattccgtatcaggattcagacaactggtcaaatgggttgagcgtaactccaatggcatagccacctcatcgtggctcttcagcggtgagaacaccggagattacagcaaacccctatgcaacttcctttatggaaagggatacgacatttggctggaaaatgccaagagtatcaaggatgcctctggcatcagacgactgaaatcagatcgtgctgatgctttgatgatagcggagtatgctatgaggaactacgacaaagcctttatgtatgaacctcttagtgcatcgttatcacaacttcgtgaattattcctatacagacagatggtgataaggcacaggtgcagctttcaggtgcgcaggggagaaaagagactcgccatggagaagtctcccgtcaagacaattatttcacaaagtggcagacatatcgtatccgaactgaacaaggagatagagaaaatagacaagcggatagcagagcttattgattccgaagaggaactaaaggaaatttaccacattgtaacttccgtaccggggataggatgtcagaatgccgtctgcctgatggtgtacactgataactttcgcaggttcaattacgacgccagaaagatagcatgctactatggaatagcaccattcggcaaaaactcgggagccagtgtacatacagatccacacgtccactatctggcaaaccgacagataaaggcgatgctgacccaggctgcgttagctgcaatcaaccacaatcctgttctttcacaatactacttgaggcttgtggagagaggaaaaaagaagcaggtggcgatgaacaatgtcaagaacaaactcatacatttggtcactgctatggtcagaaatcgccaagttttctctcctgaatataaaatatcagcataaattaaaaataatggtcaaaatatttggattttaacatagaaag

SEQ ID NO: 6367 - DNA, 1458 bp, unidentified
  source 1..1458: mol_type = unassigned DNA; note = element_9de754a
  misc_feature 1: note = core
  misc_feature 2..110: note = LE
  misc_feature 111..1136: note = CDS
  misc_feature 1137..1458: note = RE
  misc_feature 1180..1401: note = bridgeRNA
gaatgaaagggacttccccgtcccggggctgcggcggaagccgcgagtcggcatcgtagtgccatgatggagtatcgaaacttcatcaacgccaacaggaggggaagtccgtgccaattgtcaccgtcggaatcgatcttgccaagaacgtgtttgccgtccacggcgtggatgaggccggcaaagcggtgttgatcaagccacgtgtatctcgcgaccagctgggcgcattgatcgcccagttgccgccgtgtgtgatcggcatggaagcgtgctcgggagcccattactgggcacgcgtgttccagaggtgtggccacacggcgaagttgatggcaccaaagctagttgcgccatatcggatgtccggcaagcgcggcaagaatgacgcggctgatgcggccgccatttgcgaggcggtgacgcgacccagcatgcgtttcgtgccgctcaaggatgagcaccagcaagcgacgctttgcctgcatcggacgcgacagggatttgtcgaggaaagaacagcaacctacaaccggttgcgaggcctgctctcggagtttggggtggttctacctcagagtccggaaaggctacggctagacatcgcgactcacttggacttgctgcctagctgggcgcgacggtgcatcagcgatttgctggagcatgccggcaacatagaggaccggctgggtgaatatgaccgcgcgattgccgagattgcccgagaggatgagcgcagcaagcgactgatgcaattacgcggcatcggtccaaccacagccagcgcgttgctggccagcattggtgccgggcatgacttccggaatggccgacaggtcgcggcgtggcttgggttgacgccaggacagcacagcagtggcggaaaagcccggctgggcagcatcacgaaagcaggcgacgcgtatctgcgtagtctgctggtcctcggcgcccgtgccgtgatggccaacctgggcgacaaacaagaccggttcagccggtggatcagaaacttgatggagcgccgtggttactggcgggcagcgatcgcaatcgcagccaagaatgcacggatggcgtgggcagttctgaagtacggcgacgattttaggaacgagccggtggcagcgtaaggctccggaccaaactgccgactactcccatggaaaccacgatagtgcccatgacaggatagaagatcactttgcactgccagcggtgatgtgaagcgggttggacccgcgcggggcatacctggacaaaatactgggagttcaatcccgatatccgaacgaggccctcgcccgcgtctttcatcagggtccggaccattggtccaatatgaccggttgtagtaccgcagtccttcaccttctcacttgcaccagcgaagcagcgtagtacataaggacgtcaaagcaacgttgagcttgcagccaacggggagcccttgta

SEQ ID NO: 6368 - DNA, 1223 bp, unidentified
  source 1..1223: mol_type = unassigned DNA; note = element_9de8a92
  misc_feature 1..4: note = core
  misc_feature 5..238: note = LE
  misc_feature 239..1210: note = CDS
  misc_feature 1211..1223: note = RE
  misc_feature 56..221: note = bridgeRNA
tcatcctatgtttgcataatgcaaataagggaggaacttagtcccattattaacaatcaaacagaagaaggaaaaggaaccagattattattcgtcattggtctgaagaccgttcgcaatgctagtcccttttccttttactgctggcatcctgaacagttcattaggcgtcgcgagcctgtatgtaggattgataggagaaagcagtacttcttctgcgtgatataaaaactaagtgatgacaaaggtaaaaaaaattgcaggctttgatgtcagtaaaacatttttcgatgtttgtttatgcaaccagggagttctatctcaaaagagatttaccaatgactcaactgggttcggtcaattatcagcaatgctgccagcagaaactcattgcgttatggaagctaccgggccttattatttacaactggctttttttctgcatgcacaggcaatgaaagtgagtgttgtaaatcctttagttgttcgacgttttagccagatgcgattaacaagagctaaaacggacaagtccgatgcgaaaattatcttagattatggcatcaaagaagaaccttcagcttgggaacctcctaaagtctatgtcgttcaattacaacaacttcaggcattgtcagctcaattacaaaagcattacagggcgttgagtaatcagcaggaagcattttttataagtggcttaatgcaaaaagagctgggaaaattctttaaaaaagaactggcgagaatccaggctcagttggatactatagaaaaacagatgcatgaaatcattacccaataccatggggagctgatgacccagctcacaagcatacctggcctgggtaaaaagacagcaatgacattaattgttttaagcgggggctttaaaaagttcagcaactataaacaactaagcgcctatgtaggattaagtccaagaatttatgaatctggaagcagtgttaaaggtcgtacaagaatctgtaaaatggggatgggaagaataagagcgctgctatacgtgtgcgcatggagtgctaaacgatgtaatagtggctgcaaggaactttatgaccgattagtagcaaacggcaaaaataagcgactggcattgatagcagtggctaacaaactgataaaacaagcgtttgcgattgcaaccagcaactgtgtttatgataaaaattatagtaaaaatatttgaaattaaacacagt

SEQ ID NO: 6369 - DNA, 1362 bp, unidentified
  source 1..1362: mol_type = unassigned DNA; note = element_9df8636
  misc_feature 1..2: note = core
  misc_feature 3..40: note = LE
  misc_feature 41..1030: note = CDS
  misc_feature 1031..1362: note = RE
  misc_feature 1076..1350: note = bridgeRNA
cgttggggtggacgccccctgacggcatcgatgtgccatagtggaggtgttgaaacatcacttgaaggaggcgtccaggggtgaggttagcacagtcggcatcgatttggccaaatcggtttttcaagttcacggctcggatgcgggcggcacggtgatcttccgcaagaagctacggcgtgatcaggtattggcgttcttctcgacactgccgcgatgcgtggtggcaatggaggcttgtgcgagcgcgcattactgggcgcgtgagatcgccgcggtggggcacgacacgaagctgatcccgccggcttacgtgaagccgttcgtgaagcggcagaagaacgacatggccgacgcggaggcgatttgcgaggcggcacaacgaccgacgatgcggttcgtgccaggcaagagcgcggcggctcaggcctcggcggtggtgttccgtacgcgcgacttgctcgtgcgccagcgcacccagttgatcaacgccttgcgcggacatctcaccgagttcggctacatcgtgcgccagggtgtcgggcacgtcgccaagctcgtcgaaatcgtcgtcgatcccacaaccgacgtgccgtctgaggcgcgaccggtgctggccgtcatcgcggagagcctgaaggcgctgcagtcgcagatcgctcttctggaccgcgagatcgcaagccgggcaaaggctgatcccgtggcaaagcggctgatgacgatacccggtgttggcccggtgatcgcgaccgcgctggtagcgctggcgccggcggccagcacctttcgacgcgggcgcgacttcgcggcctggcgggctcgtcccacggcagcactccagcggcggcaaggagcggctggggcgtacgacgaaaatgggcgagcgcagcctgcgacggctgctgatcttaggcgcgagttcaacaaccaaggtcgcggcgcgcgatccagacaaggccggggcatggttggccggcatgctagcgcgcaagcctcgcatgctggtcaccgtcgcactggcgaataagatggcgaggaccgtttgggcgctgatggcgcatggcgggtcctacagagctccggccgcggcggtgtgaccgccaaggcttgaggcgtcagggacgcaaggaaggtcagtagagaggtatggcgcaacggtcagatgacggggttgggaaaaccagtgcaatgtccaagcgcctcgagcgcgcagaaccggtcttgacccaatccgcgatctccatacaggccagcagccgtgatgatggctgcatcagtaggccggacacacggaagcacctgaacctgcgcgatcaaatctctcgaatacccccttgtatccgacggggcgtccacaca

SEQ ID NO: 6370 - DNA, 1350 bp, unidentified
  source 1..1350: mol_type = unassigned DNA; note = element_9e0441c
  misc_feature 1: note = core
  misc_feature 2..1102: note = CDS
  misc_feature 1103..1350: note = RE
  misc_feature 1102..1340: note = bridgeRNA
tatggaatggcccgcccctatccccagcggtgtagagttgctggagtatcaactggaggaaggggttatgagaattacagtgcttggaatcgacctcggcaagaatgtctgcagccttgttggcctcgacgagaacggcgccgttgtgatgcgccggcggaacaggcgagacctactgattcactatgtggtcaaattaccaccatgcattatcggcatggaggcctgttgtggcgcccatcatcttggcaggttgttcgcttccacgggacacgacgtgcgtttgatgtcgccggcatatgtgcgtccttacgtaaaagcacagaagaatgatgatcgggacgccgagggtattgcggaagctgcaactcggccgaccatgaggtttgtggagatcaagaccgaggcgcaactcgacatgcagacgctgcaccagtctcgggaacgcctggtgggcgaacggacgactctgatcaatcagctccgcgcggtgcttctggagcgcggcattattgtcccccaaggcaagcgcaagctggagcaatatctcgtcgaactgttgcaggaaccagaaacaccgaggttgagcgtgcgaatgaggatgctggtcgccgacctgcaggcacaatggcgggaactcgatcggcggatcgcggcattcgaggctgagtttgttgcctatgccaaggaaagtgatgatgcccggaagctgattacaattcctggcgttggcgtgataaccgcgacggagttcattgctgcgattggcaacgccgagaccttcacgcacggacgcgaccttgctgcatggctaggccttgttccccgccagtcaacgacaggcggcaagccaaggttgctggggatcagcaaacgaggcaaccgaaatctccgaaagctgttgatccatggagcccgggcggcgttgccgcatgtcgctgaacgcgatacccctctcggaagatggatcaaggatctgcttgtccgtgttcatcccaatgtcgccgtcgtggctcttgccaacaagctggcgcgtatcagctgggcggtccttcggactggacaacagcttaacgccaagggacgagacgtggcggcatagccaatagccgagcaacaactctattgatcggctggcgaagttcgcgagtggtggaaacgagatggcctgactgtcgaacggcgttctagaaacctggttcaaaaacggcgcgtgacgccggaagttttatgaggaccggagcgcgcgtatctccatcttggccgggttctatacccgagaccggatgcgttgaagcagactgctcatggcattcttgacatatcacttgcaacggggcgggccatacg

SEQ ID NO: 6371 - DNA, 1622 bp, unidentified
  source 1..1622: mol_type = unassigned DNA; note = element_9e04a8a
  misc_feature 1..2: note = core
  misc_feature 3..274: note = LE
  misc_feature 275..1501: note = CDS
  misc_feature 1502..1622: note = RE
  misc_feature 13..294: note = bridgeRNA
ctcctacaataataattaaggtttaaggcgcggccgccagccgcgtcttttttccatctcaaagccgaagctgttaaaataagagagtaatggtctgacccgttctaccttgggccagaacgcctgtaatggagtccgtcagccgcctctcttattcgcagcattcgatttgcgcaggtagagccaccgtgttgtgcgctcgtgtcacccgggagattgaacaggcaatgagtaaacggcggaacgccatattcaatcacacaggaggagcacaatgaacgcagtaggaattgatgtttccaaagggaaaagcatggtggcagccctgcggccaatgggtgaagtggcattagtgccatgggaatttcttcataccgcatccggcttataccaggtggcacatgccattcttgcattaggtgaagatacccgcgttgtcatggaggcaaccggacgttatcacgaacccgttgcagcggcgctgagtgcatatggtatttacgtttgtgttttgaatccgctttacatcaagcagagcggcgctggttcgatccgcaaggtcaaaaccgacaaagcggattccttgaaaatcgccaagtatggtcttgacaactgggtcgatctgcgagaacatactgctatggatacaattagacaacaactgaagctgtgcagccgccagtacaacatctacatgaaaacggaagtatcgctgcaaaacaatctcatttcgctgacagataaaacatttcccgacgtaaacgagctgttttccagtcctactcgtgcagacgggcaccagaaatggatcgattttgtcatgactttctggcatcgcgactgtgtttgccacatcagcgagaacgcatttacctctcggcacgagaaatggtgcaagcgcaagggatatcattttagagccgacaaagccgctgagatttacgcccgaagctgtgagctgtttaccacattgccgaaagatgacaacacgaaactgctcattaccactgcggcccagcagctgctggcaggtaaagtgacattagccgctctgcgtgcagagatgacccgccttgcgcagcagttgcctgagtacgatactgtgcgtgccatgtacggtgttggcgaaacgactgctgctcagcttatggccgagattggtgatgtgcgcctttttcctcgccgcagttcgatcgtggcatttgcaggtgttgatccggctgttgcccagtctggtaagcacgaggtgcaaagcaccgctacgacgaaacacggctcaccacatctgagaaaaacactgtaccagatcgtctgcacctatctgagaaaagcaccaggagatgagccggtatatcaatttctcgataaaaagcgcgacgaaggtaaaccgtattttgtctatatgacggcggcacaaaacaagttcctgcgcatctattacgctcgtgtgaaggattgcctcgaggcattcgacacacagcagaacacagtgcaggactaagttaatttacatctatccgcggctggcgatttttctccagtctgctttgctataccctttttcagtctcgcaaattttgtgggacttttttcattttggctattgacttttgtttgcagga

SEQ ID NO: 6372 - DNA, 1405 bp, unidentified
  source 1..1405: mol_type = unassigned DNA; note = element_9e06ba4
  misc_feature 1: note = core
  misc_feature 2..87: note = LE
  misc_feature 88..1122: note = CDS
  misc_feature 1123..1405: note = RE
  misc_feature 1175..1397: note = bridgeRNA
caatgggatggacgcccctcccaaaacggcatcagaagtgccaaagtggaagcgttgttttccacttaaccgagaggagcgtccaccatgaacattacgacagtaggcatcgacctggcaaagaatgtcttccaggtgcacgcggtcaacgaggctggccgcaaggtctggaacaagcagatcaggcgtgagcagatggccgagttcttcgcgcaattgccgccttgcctgatcggcatggaagcttgcggcagtgcccaccactgggctcgcaagctcaccagcctgggccataccgtcaagctgatggcgccgcagttcgtcaagccctacgtcaagaccaacaagaacgacgcggccgatgccgaggcgatctgcgaagccgtggcccggccgaacatgcgcttcgtgccgatcaaggacatcgagcagcagtcgctgctggcgctgcaccgcgtacgccagggctttgtcaaggcgcgtaccgcgcagggcaaccagatccgcggtctcatggcggagttcggactgatcatgcccaagggcatccggcatgttgcgcagtacttgccagagctgctcgaagacgcgagcaacgagctcacgggccagttccggcagctcatggagcggctgctgcagaacctgaaggagctgacgcggcagatcgacgagaccgaagcgctcatccggctgtggcatcgccagagcccggcctgccgccagctcgagacgatcccgggcatcggcccgatcacggcgacggcgctggtggcgagcatcgccgacgccaagagcttcgccagcggccggcagctggcggcctggctgggcctggtgccgcgccagcactccagcgggggcaagcagacgctgctgggcatcagcaagcgaggcgacgcgtatttgcggaccttgctcatccacggcgcgcgggcggtgatctgccggcgccagaagtcggccgagcagacggactggctcaagggcctgctcgagcgcaagaagcccaatgtggcggcggttgcgctggccaacaagaacgcgcggatcgtgtgggccttgctgacgacgggccgaacgtacgaggcgcagtactgcgctggcgcggcggcgatataaacgcgcaggccgcaaatactctgcgcaggcaaagacgaactggagttagaccaccgattgctcgggcaatcaggcagtgatggcaagacaggtaagaccggggttggtcagacccgctacgggacaggcacttcgagtgcacattggctatcgggaaccaaccagcagaacccatcagggatcgcagtccgaaaggctgcacaaagtccggatgtacgggtgcaatctttttcttgatcgagccgccaccaactgacttgcttggcaaaggggcgtccatgta

SEQ ID NO: 6373 - DNA, 1392 bp, unidentified
  source 1..1392: mol_type = unassigned DNA; note = element_9e0b8e4
  misc_feature 1..2: note = core
  misc_feature 3..70: note = LE
  misc_feature 71..1093: note = CDS
  misc_feature 1094..1392: note = RE
  misc_feature 1161..1389: note = bridgeRNA
taatgggatggtccgtcgccttccaaggttagttgtggcaggctggaaccagaaaaggaggaaactcccgatgacagcacacgtttgcggcatcgatatcggcaagacagtctttcatctaatcggcctgagcaaggaaggccaaatcgtcatcaaaaagcgctttacgcggaagcagctcatcacccatacggtaaacatgcctgcctgtttgattggcatggaggcttgtcccggtgcacacttcctggcacgtgttctcggagcacaggggcacgaagtgaagctcatgcctgccgagtacgttcggcccttcgtcaaatcgaacaagaacgactacgtcgacgcggaagcgattgctgaagcggtgcaacggcccacgatgcgctttgttccaatcaagtgcgaagcacagcttgatcttcaagctttgcaccgtgtacgcgatcgctggatggggcgacggaccgccgtaatcaaccagatccgtggattcttgctggaacacggtattaccattgccgtgggcccagctcatctgaagcgacagattccttcgattctcgaagacgcagacaatctgctgtcgtcgcgtatgcgagcgctcctagttgagcttcgagacgagtgggagaagctggagacgcagatcgaggaaatcgaccgggagtttgctcaagctgctaagaaagaagagaattgccgacgtttgctcaccatccctgggatcggacccctcacagcgactgcgctcaccgccgccatcggaaacggtacggcttttcacaaaagccgagatctggcggcctggctcggtctggttccgcgccagcattcaacaggcggcaaatcaagacttctcggcattagcaaacgtggcaatccctatctgcgacggctttttatccacggaggtagagccgtagtcgcacgtgtgagacgcgaaaatcacacattcggcagttggcttgatcacctcgaagccaggtccccacggaatgtagtcgtcgttgccatggccaacaaactcgcaagaatcgcctgggcggtgctgacccgaggccaggtctattgtgcgacagcttgcccgtgaggaaaagatggaaatcgcgcggcgattcccactttccctcacgacgacggcgacgatgagttctcaccaggtttgcacgcagattcgctgatggctcaacaggtccatccggcccacctcaaacctcaagaaggtgtacggtctgcagttgagaccacccagataattaggagagggcgggcgcggattccatcatggctcgaagcagatccatcgcttcacccagaagccgtatacatagaagcagaccgcttctgccatcaaaagatattgcttgcaatcgggcgacggaccataca

SEQ ID NO: 6374 - DNA, 1399 bp, unidentified
  source 1..1399: mol_type = unassigned DNA; note = element_9e152f2
  misc_feature 1..2: note = core
  misc_feature 3..84: note = LE
  misc_feature 85..1125: note = CDS
  misc_feature 1126..1399: note = RE
  misc_feature 1144..1387: note = bridgeRNA
tgatgaggtggaacggcccgctccgacagcatctagtgctaaaacgtggtcgttgcttgaacgccacaaaggagggaccgttccatgaagcaagttagcaccatcgggctggatttggccaaacacgttttccaagttcacggcgccgacaatgaaggttcgcccatgttcaatcgaaaactgcgtcgcaccgaggtgctgcgcttcttcgagaggctgcctccatgtctggttggcatggaggcatgcggtggcgctcactattgggcgcgggagatcgctaaacttggtcatgatgtgcgcctcattccgccggcctacgtcaaacctttcgtcaagcgcggcaagacggacgcggccgatgcggaagccatcagcgaggcggtgatccgcaagaccatgcgcttcgtccctatcaagtccgccgaacagcaagcggaggcgatggtgctgaaaacacggtctcttctggtgcaacagagaacgcagtcggttaacgccttacgagcgcatttggccgaactgggtatcatcgcggccagtggccttcccaacgtcgcagcgttggtggccatcgttcgggaagtagaagatactcgactacccgcagcggcacgcttcgccctcacggcgattgtcgaccaaatcgacgccttggccgaccagctcgacgtgctcgaacgtaccatcgttacggaatcgaagcgcgacgaagatatgcgccgcctaacgacgatccccggtgtcggtgccatcactgcggcgacgataaaggccttagttccggatcccgggggcttcaaatcggcacgccacttcgccgcctgggtgggattgacaccgaggccccattccagcggaggcaaggagcgattgggcaggatctctaaaatgggtaatcccgaactccgcgttctcctggtcctcggagcgacagccgttctgcggattgctcgaaacgatgatcgggcacgaccttggctgaaagcgctacttgccaggcgtccgttcaaggtggcagctgtcgcgttggccaacaagatggccaggatcatctgggcgctgctgaataacggcggggtttacaatcgtcccaagccgctctcgattactgcggctgcctgatgagtatatgacccacaaaccaatctgaccggcgcaggccggcagatgtaaggtgcaacaacaagcgatgaacccatgggacgaaatcccgaaccgagcaaagccgccaacctcactgcacttaaagtgcgcggatgtgatttagctcctcgtttcgcggatctcatcgaggccagcggtcatgtaccgcacgtaaaggccgtacatatgaccgcaccgtccgcatgcgtgaattcgactgtgaagccccttgcaccgcgggccgttccacata

SEQ ID NO: 6375 - DNA, 1392 bp, unidentified
  source 1..1392: mol_type = unassigned DNA; note = element_9e15db0
  misc_feature 1: note = core
  misc_feature 2..98: note = LE
  misc_feature 99..1130: note = CDS
  misc_feature 1131..1392: note = RE
  misc_feature 1164..1390: note = bridgeRNA
taatgtaatgaactatccccaccctagccgctagcgcggaaggagtcctcagactagccttaagactgaaggacctcaactttggatgggaggtcgacatgacaattagcatactaggcattgatattgccaagaacacttttcagcttcatggcgcggacaataccggcaaggcggttatgaagaagcgcttacctcgacacaagcttgccgcctatgcggcaactttgccagcctgcactatcgtaatggaatcctgcgggggagccaattactgggcgagagtcttccagagaagcggtcacacggttaggctgatcagccctcagttcgtcaaaccttttgtaaaaacaaacaagaacgatgccaatgatgcgctggcgattgtcgaagcagcgagtagaccgtcgatgagctttgtgccaatcaaacaggttgagcagcaagatattcagtcgatacatcgaattcgaacccgcgtggtcaaaagtcgaacagcgttgatcaatgagatcagaggactgtgtctggaatatgggttgatccttacggctggagccgccaaggttaagccctcgctgtgtgctgctatttctaactgtgataatgagctaacaacatcctcgcgagagagcatgcaggatctttatgaggagcttgttgatgttgagatcagactaaaaaagcttgatagtaaggttcgccaattatgtcgacagagcgagagctgccaacggatattgaaggagcccggagttggcgagttaacagcgaccgcaatcgtggcggccgttccagaaccacgcgaatttaggaatggacggcacatgtcagcctggttagggctggtgccccggcaatcatcaagtggagacaagcaagttcttctgggtatcagcaaacggggtgatcggtatttacgaacactgctgatccatggggcacgagcagtactaagccaccgcaaggtcttggatagtaactacgaccgctgggtggctaataaaaaggcaacgttgagccacaacaaagcggctgtagcgctagccaataagagcgcgcggatcatctggtccatgttaaatacaggagaggagttcaattacggagttcaaaaaaccgctgcctgatactcaatatcgggcggcatcattcaccaaaggaaaatatcttaagtttgctttagttgatttgaatgatggtcaataggtcataccagctcttttagatcctggaacttgtcacggcccttagaggtcttggtactgatgaggaattagagcgcggatttacatcagggcacaagcttggcttgcatgccgaatatatgactgcaacttagacctataacatccatcagtaatcaacttgcaaaaggggatggttcatata

SEQ ID NO: 6376 - DNA, 1419 bp, unidentified
  source 1..1419: mol_type = unassigned DNA; note = element_9e185b8
  misc_feature 1: note = core
  misc_feature 2..227: note = LE
  misc_feature 228..1406: note = CDS
  misc_feature 1407..1419: note = RE
  misc_feature 14..241: note = bridgeRNA
ctacttgttccattgccgtaggaccggtgtctggcgaggctcggtctaggcgtccggtccgtcgctctcggttgcggctgcccacgacccgtcgtgtggctctctagtggcatgcgcgggccggtcgtcgccagggccaggagaggctcaagaggggactgcccagctctaagtagcgttgccctcccggctcgacaacccattggttcgagcatcggagaagcgcagtgaacgagacgacgacgcgggtcgtgatcgggatggatccgcacaaacggtcggtcacgatcgaggtgatggaggccgacgagacggtcctttgcggtgagcggttcggcaccgatgaggccggtttcgccgcgttgatggattacgtcagccagttcgaggaccgcgtctgggcgatcgagggctgcaacgggatcggccgccatgtggcggtccgactggttgaccgaggtgaggaggtggttgatgttccgccaaagctcagtgctcgggcgcgggtcttcacgaccggccagggtcgcaagaccgacgcgaccgatgctcactcgatcgccttggtcgggacccggatgacgggcctgcggccggtggccaacgaccaggacctggcggtgctgcgcctgctggtcgaccgccgacgatccctcggggaggagcacacccgcaaggtcagccaactgcacgcattactgctggaactgatcccgggcggggcgaagaaggacctctccgctgctcaagccaaagcgctgctggccacggtccgcccacgtgacctggccggcaagacccgacgccgcgtcgctgcggaactggtcggcgacctcgagcggatctacacccggaagaaggccgcgaacaaggagctcgtcgagctggtcgctgccagcggcagcaccctgctcgacctgcccggcatcgggccctccggtgccgctcgacttctggtcgaggtcggcgacatcacccggttccccactcgcggccacttcgcgtcctggaacggcaccgcacccatcgacgcctcctccggcgaccatgtccggcatcggctgtcgcgcaagggcaaccggcagatcaacaagaccctgcacatcatggccaccgtgcagctgcgccggcccagcgaaggccgttcctacttcgaccgcaagaccgcagccgggaagagcaacatagaagcgatgcgatgcctcaaacgcaggctgtccgacctggtctacaagaccatgctcgacgacctcgtcaccatcaaggcgacgggtccgggaggacaccggggcaacgtctctcaatccagcgcgaccggctcacaaccccacaccggctcttcggatcagtcacttcccgaacccgccaccaccaagcctaaacccgcacttcccgctgcgtcttgacacagaggggtgc

SEQ ID NO: 6377 - DNA, 1389 bp, unidentified
  source 1..1389: mol_type = unassigned DNA; note = element_9e1e3a3
  misc_feature 1..2: note = core
  misc_feature 3..88: note = LE
  misc_feature 89..1117: note = CDS
  misc_feature 1118..1389: note = RE
  misc_feature 1088..1376: note = bridgeRNA
agatggggtggttgccgtcctccccgaacggcatcgcaatgtgccactgtggtggttggaaactcagccacggaagagaggacggcaaatgaaagatacgatgatcggggtggatctggcaaagaacgtatttcagattcacgctgcgtcccgggtgggcgaagtgctgtttcgcaagaaagtccgccgcccgcagttcctggagttcatggcgagccagcctcgcgcgctcgtggtgatggaggcgtgcggaagcgcgcatcactgggcgcgagagctcacgaacttgggacatgaggtgaagctgattgcaccgcagtacgtgcgtccctttgtcaaacgccagaagaatgacgccgccgatgccgaggcgattgtgatcgcggcacggcagccggagatgcgctttgtggtgccgaagacggaggcgcagcaggcgcgtgctgtcctatttcgcagtcgtgaccgcttggtccatcagaggaccgaactcgtcaacgccctgcgagcgacactctacgagtttggtcttgtcgtaccgaaagggctgggccatctcagtagtattgaggagttccttgaggataatagtgtgtcacttcccgaggttgtccgtgaggaatgccgcgatctcctgacccagatcgatgaacaatcggttcggattaccgagaaaacacgtgcgatggtcgaattgtcgaatgaaagcggtgtcgcacagcgcctggaatccctgcctggggtcggacctctgacggccctggcgatcgaagcgtttgctccttctatgaaaaacttccgttgcggccgcgatttcgccgcatggctcggtcttgttccccggcagttttcatccgggggcaaagagcggctgggccggatttcgaaggccggtcaagccgacatccgtcgacttctaattattggcgctatgacgcgggtgaactgggcgagccgcaagccacctgttcctggcacgtggctcgcgcggatgcttgagcgtaagccccgtatgctggttgcgatcgccctggcaaacaagatggcgcggaccgtctgggctatgctgacgaagcaggagaattatcgggatccggttctgtctgcggcggcatgagatgacctcagtcgcgcatggacagaaccggtaagggggtgtgagaaggcgacgacccatatgggcgcatgatcgagccgatccggagcgggaaaaccagccaatgactgggtgccattgagcacggttgtcagatttggacccaatccgcagatcaccatatcggccagcggcttctgaaaacgccgcgttcaaaggcctgacagaagaccgcagtcgatcactcgttcactgagtcagatacttcttgcactatggacggcaaccacaga

SEQ ID NO: 6378 - DNA, 1550 bp, unidentified
  source 1..1550: mol_type = unassigned DNA; note = element_9e27519
  misc_feature 1..3: note = core
  misc_feature 4..236: note = LE
  misc_feature 237..1430: note = CDS
  misc_feature 1431..1550: note = RE
  misc_feature 7..256: note = bridgeRNA
attcgtaatatataagtagaggtataataacctttgcttatttttatataatgaagtgattggctaacgtaatttctgattgggattgtacgcccagctacaaatgtgttagccaaccttcattatccagcgttcgattaagcaagttgggatgactagatcactcccgtttaactcacgaatatgaatggatcctgaagtgttggagtcaactaattattcaaaggaggtaaaaaatgattgctgttggaattgatgtttcaaagtacaaaagtacagttgcaatactcaattgtgatagaagtattagagctaaacctttcaatgtgcaacataatcaaactgagatgaatgtactagtagattatctaaaaagtctggatgaggaacttataatattaatggagtacacgggtcactaccattatccagtactgaagaaactacaagaagaaggttttcaagtatgtatggctaatccatatcaaatgaaaaagtatggagatgtagaaatccataagtctaagactgataaaaaagatgctattaggattgcaacatttgcattagaaaaatcatatttgctaacaccgtatagccctttagagcaaaaatttgatgacttaaaattcttgtctcgtcaatacaatcaaagaatatcatatttaactaagttaaaagtgcaattacttaatttattagatgaaactatggcaggcataacaaaagaactgaaatttagaagtcgacatccagaaagttgtgttttactgcttttcataaaaagatatggatcttatgatgtcataaataagatggggaaaagtcgatttctagcaacgtatgcaacattaatgaaaaaaacaaaaaatcgttatgcaccaagaaaaggcttagttatatttgaacaagctaaggacagtataacaacaagaggagacaatgattatattttgtctgtacagaatcaacttgttgatttattatccagtgcacaaaatgcagcagacgaagaaatctatctgatgcaaaatatagcaaagacaataccagagtataaaatactaagagcaatgaatggagttggtgatcgtttaggtcctgttatattagctgaaattggtgatatatggagatttcatagtgccaaagctcttaactcatttgctggtaatgatgctcctccataccaatcaggtcagtttgaaagtaagaatcgtcatatatcagaacgtggtagcgctatacttagaaaagtgtgctatgaagtcatgcagtgtttgaaagcatccaaaccagaagatgatccaatttacctattcatgataaaaaaggagctagaagggaagccgctaaaagttgctaagatggcaggggtaaataaatttctacggatattttatgctcgtgcgatggaactttatagttaaatcgaaaagctagtaattattttatttaaaatctgctaaaagtaggtttattaaggttgcccatttattaggcaaataatataaaaaaaataaactttgggcttgacaaacattagcaag

SEQ ID NO: 6379 - DNA, 1402 bp, unidentified
  source 1..1402: mol_type = unassigned DNA; note = element_9e2a7b5
  misc_feature 1: note = core
  misc_feature 2..228: note = LE
  misc_feature 229..1389: note = CDS
  misc_feature 1390..1402: note = RE
  misc_feature 13..240: note = bridgeRNA
ctacttaatactgggcagcaggatcaggtccggccagactctggtccaggtgctcggtgagtcgctctctcatcgcggctgcctgccggtctgattggtgtggctctctcatggcatgcggtctcaccgggcaccgcgcgaggagtggctggaaaggggtctgttctgctcgaagtagcggtgccctccttgctggcatagtcgtgttcaggcaaggagaaatgtttgatgacagtcattatcgggatggacccgcacaaacgatcggccacgatcgaagtgatagacgatcgaggcgacaaagtcgggtccggcaaattcggcaccgaccagcccggctacgccgaaatgctggcggccgggcgccgattcgccgatcgagtgtgggcagtggagggctgcaacggcgtcggccggcatatcgcgcaccgcctcgtgcatgacggcgagaccgtgctggatgtgccggcaaagctgtccgcgcaggtgcgggtattcgcgaccggcaacggccgcaaaaccgacccggtcgacgcgcactcagtcgccctggccgcgttgcacgccccgaacctggtccgtgtccatgtcgaccccgaactggtcgtgatgagcatgcttgtcgaccgtcgcgacgagctcggtcgcgcgcggacccagactgtcaaccggctgcaccggttgctgctggaactctttcctggcggggcaaagaagttcctgtccgcgacgcaggcccgcgccttgatcgcgacgatcaaaccgcgggatatcgtgggcaagacccgccgccggctgaccgtcgagctgatcactgaactcgaggccatcgacaagaagatcaaggtcgctgacaaagatcttcgtggactggtcaccgcccgcggatctaccttgctcgatctgcacggcatcggccccgccggtgccgcgcggctcctggccgatgtcggcgacatccaccggttcgccaaccgtgaccgcttcgcctcctggaatggcaccgcaccgctggatgcttcctccggcgaacaacaacggcaccgattatcccgtgctggtaaccgcagaatcaacagaacattgcacatcatgggagtcgtccaactacgcaaccccaccccaggtcgcacctatttcgacaccaagaaagcggccggcaagacgtcgatggaagcgatgcgcgcgctcaaacgacgactatcgaacgtcgtctacgcccgcatgctcgccgaccagaaccgacgagaagcggcaggcccgggagggcaatcggggacgactctgcaatccagcgcgaccggcctgaccccggacaccggcccttcggacaagccacaacccagacccgccatcaaccagcctaccctcgccacaaccaccccttgacataaaggggagc

SEQ ID NO: 6380 - DNA, 1611 bp, unidentified
  source 1..1611: mol_type = unassigned DNA; note = element_9e2f941
  misc_feature 1..2: note = core
  misc_feature 3..279: note = LE
  misc_feature 280..1491: note = CDS
  misc_feature 1492..1611: note = RE
  misc_feature 14..299: note = bridgeRNA
ctattacaatagatttatagatcaggggagcggttcgcgaccgccccttgtctacctcgttacctaagctgtagaataagagggcattggtctgacgtgtgcttcctggaacgttacgtccgcaagtaagtccgtcatccatcctctcattcccagctgttcgttttatgcaggtagaactgcattcttgcacgttcgtgtcagccctcaatagatcgaatcggcaatgaggagtttggtttaccattgctgcaaatctattgttttggaggggttcacatgaacgctgtcggtattgatgtctccaagggaaaaagcatggttgccgcccttgcgccaggaggaaagctgcttgcccgcccctttgaggtgctccacaccaagagtggcatcaagcaactcgtttcctttgtccacacactcggcgcagatacgcgcattgtcatggagcacactggacgttactacgagccgctgctccaacggcttgccaaatccggtctttttgtcgccgccgtcaatcccaaactcatcaaggacttcgggaacaacacgctgcgtaaagtgaagacggataaggccgatgccaagaagattgcacgttatgcccttgacaattggtgcgatttgcgccagcatacaggcatggataccacacgtacacaactcaaaaccttgaatcgacagtttgccttctgcatgaagcagaagacggcctgcaagaacaatctcatcgcgctcatcgaccaggtctatcccggtgccaacacctattttgaaagccccgccagagcggacggctcgcagaaatgggtggactatatcgccacgttccggcacgtcgattatgtctgcgctatgagtctttctgcctttacggagcgttaccgcaaatggtgtcatcggcacggctataactttcagccggacaaaccgaggatgctctgggagaaggcaaaggatctcattgcgatgctcccgatggacaaaacgacgaagatgttggtgcagaactccatcgcccagctcaatgtactgtccaagacggtggaggccttgcgcacgcagatgatcgagcttgccgagcagctgccggaataccccgttgtgattgatatgaacggtgtcggtccgacacttgccagccagctgatcgctgagatcggtgacatcacccgttttccccgtcgtggctcgctgaccgctttcgcgggtgttgatcccggagcaaagcagtccggtacaatgcagctaaggagcaacaagacatccaaggcaggttctccgcatcttaggagggcactgtttcagatcgtttcaggactcctgatgcgtgctcccgatgatccggtctacaacttcatggacaagaagcgctccgagggaaagccttactacgtctatatgacggcgggagcaaataagttcctgcgcatctactatggacgtgtgaatgagtatttagcgagctgtcccaaagaccacgaataacgtttcaccccaacctgttcggtcggcgctcctgcggcgacctgtttgttgtgccaaaagttcacttgccgcaactcctcatctttttttcgtctaggggcttgactttttatttgcagg

SEQ ID NO: 6381 - DNA, 1421 bp, unidentified
  source 1..1421: mol_type = unassigned DNA; note = element_9e33bcf
  misc_feature 1: note = core
  misc_feature 2..120: note = LE
  misc_feature 121..1140: note = CDS
  misc_feature 1141..1421: note = RE
  misc_feature 1180..1418: note = bridgeRNA
aaatgtaatggacgccttcctccctagtcttgaaacggcggtaatgcgtccacggaaccgtcattgctgtttggtccgtgctaaaccaaaggtgtcctggacctaactggagtcgtgatcatgaccaataccgttgtcggcgtcgatatcgcaaaaagtgtgtttcagatccatgaggtgagcagtgcgacaggggagattgtcagcattcaagtcaagcgtgctcgtttcctacatcatttcgtcaatcgagagccgtgcctgattggtatggaggcatgtggcggtgcgcagcattgggcccgtcaactcatcgctatgggacatacggtcaagttgttgcctgcacaaatggtcaaaccgttcgctggcggaaacaaaagcgacatggcagatgccaaggcgatctgggtggcggtccagcagccggcggtacgagcggtggcgatcaagacggaagctcagcaggccgtgttggcgttgcatcgtatgcgtcagcaactcgtcaagttccgcaccgcgcagatcaacgcactgcgaggtctactgaccgaatacggagaggtaatgccacttgggcgagatgcattggccaggatgttgccgacggcgtttgcgcgcgtggcagagcgcctgcctgcagttctcatcgagacgcttcgcgaacaatacgagcggataaggcaacttgatttgcaagtgtctgagatggaacgtcgcttgcgggaatggcacaaagaagatgatgcctgcaaacgaattgcagcgattccaggagtcggattgctgactgcgacggcaactgttgcgacgatgggcgaccccaaagcattcagatcgggtcgggagttcgcggcttggttggggctggtacctcgccaaaccggaaccggtggacgagtgaagctgcttggaatcagtaagcgcggggatacctatctacgcacgctactgatccatggggctcgtgctgttcttactagcagtaaagcaccacccgaatgggcggtgaatttggccaagcgtcgcccattgaatgtagctgtcgtggcgttggctaacaagatggcacgcacgttgtgggcgcttttggcgtaccagcgggcgtatcaagctgggtacgcaagtcgaccggtttgaccgggatcctgcgtactcccgataaatttcaacagagggtggacagctaaaaggttgcacaaggtacggaagaagtgatggcaaacaggtcggaccgcgacccaccaagtctgaatcagtagttggacttcgagtccatggaggaaatgagacgtgggtcggcgaattccatcagggccagcaggtatctgacctgcgacacaggccggatataaaactgcagccgtgtcctgttacgacatcaccgaagacgttcttggcaaacgggaggcgtccatata

SEQ ID NO: 6382 - DNA, 1371 bp, unidentified
  source 1..1371: mol_type = unassigned DNA; note = element_9e393ed
  misc_feature 1..3: note = core
  misc_feature 4..74: note = LE
  misc_feature 75..1103: note = CDS
  misc_feature 1104..1371: note = RE
  misc_feature 1108..1358: note = bridgeRNA
tgctggtgtggacggcctctcatcccaacgggctaatggcgctcaggcgtcaggccatttgagaggagagagcgatgaagataccagtacgcatcggcatggacaccgctaagtcggtgtttcagctccacggcgttgacgagaacgaagttgtggtcgtccgccgccagttccggcgcagcgagatgatcggctactttgagcgtctcccaccggttttggtcgcgatcgagtcctgcggcagctcccaccattgggcacgcttgctgcagtctttgggccacgaggtgaagctgatcccgccgcagtatgtgaagccctacgtcaagcgggggaagaacgatgccgccgacgccgaggcgctatgcgaggcagtcacccggcccagcatgcggttcgtgcctgtgaagtcgcaggagcgccaagcggcgtgcatgttgatgtcggtccgggagcgtttggtcagcgtgaagtcgcagctgagcaatgcctttcgaagctatgcggctgagttcggcatcgtcggtccggccggccggcagaacgtcaatgcactcattcagcaggtgctcgagaacgacgcccttcccaagatggcgcgagagctcttcgcgttccaggcccaggagtacgccgcggtcgaggcgcggctcaatgagatcgagagcaagctcatgaagtggcaccgcgaggatgacgtcagccgccggattgcgtcgatccctggtgtcggtcccatcggatcgacgatgctaagcatgaagacaccgccgccggaagctttcagatccggccgtgacttcgcggcctggatcgggctcacacccagagaccattctacgggcggccgacaaaggctgggcgggattacaaaggccggggactctgcactcaggtcggtactgatcgtcggcgccaccgcgttactgaggcacgtccgagcgggccggcacaagccttcgccatggctggcagcgctgctggaacgcaagccgcctaagctggtagccgtagcgctggccaataagttcgcgcgcatcgcctggcgactaatggtctcgggcggggtctacactcggccaccggtcgcaatggccgcctgatacgagatcgctgcccgccagcgatgttgctcggcggatagccactgaacttgcaggacgcagtagatggaaggaccgatcggtcgatacgcgcgagcttccgaaggttacactggcatctccgatgccgccaatgtgcttggaacgggcgtagcgaacaccatcttggccagcgagctcgtctcgcgcaaataggccggacatctgagagcaagcgatcagctcagaagtctgctaccatcctgacaagtggggggccgtccacatc

SEQ ID NO: 6383 - DNA, 1207 bp, unidentified
  source 1..1207: mol_type = unassigned DNA; note = element_9e39afb
  misc_feature 1..2: note = core
  misc_feature 3..223: note = LE
  misc_feature 224..1204: note = CDS
  misc_feature 1205..1207: note = RE
  misc_feature 26..195: note = bridgeRNA
cttgtatggttctgtagcccccaccgaaatgtgttcagtgggagctggggatcgggacacacccatccatcagccgttcgcgcggactgacgtcggtagatatcccaccccgcccaaacacgtcgattaagaatctagcggccaagaccgccgattgatcgcaaggtaacgcatcgggcgcggcttccccagcaggcataacgctatcgcaagggttctacagatgcaaatcgcagtgtcttttttcggcgcagatgtgggcaaggccgagatcgtcgtggccgatcatggccgtgccaagcccgtcaccaaaatcctcaagaacacgcccagcagtctgagcaaatggctgcaaaccctgccgccaggcagcgtgcttgccatggagtccaccggcggctacgagcgcatgctggctgacctagcccacgagcgtgggctgagggtctatgtccttaaccccaaggcgctgcaccactacgccaaatcccagggccagcggggcaagaccgatcggctcgacgccatcatgatcgcccgcttcatcgcctccgagcatgaacgcctgcacccatatcaaccctgcgcccaatacatcgagcgtctgcgtcagatgctgcgtttgcgcaggatggccgtgatcacccggactcaactgcgcctgtccagcgagcggcaccatcaagtccatgacgcccaggctcaggtgcagaaggcactcgatgccctgacggagttggccaagtcccttgaagatcagatgctcgccgagatccaggccgaacctgccttggcgcaagacttcaagctgcttaccagtatcgtcggcgtgggcaacctgacggcaacggccctggtgaccaccttcgctcgcataccgtttaccagctccgatgccgtggtggcctatgccggactggatcccaggcccaaggagtccggcgcctacaaaggcatgagaaagctcagtaagcagggcgatgccatcctgcgcagcctcgcctacaacgccgccactgccgccgccagatcaatcaccttcaaacccatgtatcaggcattgctcgccaaaggctgggcaaccacccaagccttgaacatcattgccagaaagctcttgcgcatcgccttcggcgtatggaaatcacgcaaacccttcgagcgagaactcttcctcgccaaccaggcttgcgtgaaaccatagaat

SEQ ID NO: 6384 - DNA, 1446 bp, unidentified
  source 1..1446: mol_type = unassigned DNA; note = element_9e48e02
  misc_feature 1..2: note = core
  misc_feature 3..236: note = LE
  misc_feature 237..1439: note = CDS
  misc_feature 1440..1446: note = RE
ctcctaccatgaattcttatagaatattatttaattgactacagggatggcaataatattcatgggaaggcaggaggactcattacttcctgggcgacagagccctcatttcagtatgtcccaagcctctatgaatcataataggttggttggatcatagaatccttgtcacgctggaggattggtttagaggctaaatttcctgctttatctttcttttgtcgggaggtgatgtgatgcccggattaaagggtagcgttgatgcttttttcggtatcgatatttcaaaagataaatttgatgtctacgggattggaagggacgagaaaaagctatttcagttttcagcggccatggaccggaatggttttgagaagctgaaggaacatctggtggttgtttcggtctcatccgttttaatcgggatggagtccacggcttcctatcatgtcaatcttttctcttatctggtttctgagggataccaggtcgttatcatcaatcctttgctgatttccaattatgtcaagatgcagctcaggaagaccaaaaccgacaagaaggatgctgtggtcattgcccagtttcttcttgcgaatgggaacactctgatccaacgggtcgattcatctttgatttccgatcttcgtgatctctcgcgtcagcgggaaggtttgattgacgagatgaccgcattgaagatcaatatcaagaggctcctgaatatcacttttccggagctggagcatatgacttccgtctttacgaagtccatactgaagcttgtacagaaatacccttctgccattgctcttggaaatgcaaaccttggtcaattatctcagatgctgatcgcagattcctatgggcataaaagagaggcgtttgctgtgaagctgatcaaggccgcacattcgtcggtcggtaccaaaagttcagccaaggaaatcattctcaagcaaaacgtgactctgctccttcaccttgaagaggcactggaggagataaccggcatattgattgagatgagtcgaaagcagatggaagacgatatcaacattcttacttccataaaaggtatcggggacaaaagcgctgtaaattttctcattgagatgggtggcgatgttaatcattacgaatattctgggaaaatcattgccatggcaggattggacccggctgtttaccagtcaggtcaacatgaaggtaaaggcaggatcacgaaacgtggaaatcgtcatctgaggagaatcatatggatgatgacaaccaaagtgattcaatataacgatatttttaaggcttattaccttaaacgaaggactgaaggcttgccctataaaatggcggtattggccactgcacataaattgattcgtatcgcctatgccatgctgacacgacggacaactttttgcccacagatgaattcttgatagttga

SEQ ID NO: 6385 - DNA, 1540 bp, unidentified
  source 1..1540: mol_type = unassigned DNA; note = element_9e4be2d
  misc_feature 1: note = core
  misc_feature 2..81: note = LE
  misc_feature 82..1143: note = CDS
  misc_feature 1144..1540: note = RE
  misc_feature 1303..1530: note = bridgeRNA
taatggcatggtccggccgcgctcagtgccctacactgggcggaccaggtcggggagggatatcgagcgaaggagcgcgcgatgtcatccaacctgcaaaagcacgccgacgtttccgccatcggaatcgatatcggcaagaacacgttccatctgatcggccaggatcggcgcggcaagatcatcatgcgcgctcgcgtatccagagctcagctcatggagcgtcttgtcaacgtcccgaagtgcttgatcggcatggaggccggtgcaggcgcgcatcacatcgcgcgtcggctgatcgagctcgggcacgatgtacggctgataccggcgcagtacgtgaagccgttcctgaagggccacaagaacgactaccgagacgcggaggccatcatcgaagccgtgcagcggccgacgatgagcttcgtcgccgtgaagaccgcggagcaatgcgatttacaagcgatacatcgcgtccgctcacgcctcgtccgacttcggaccggcgccatcaatcagatccgcggactcctgctcgagcgtggcgttgtcataggacagaggacggcgcctctgcggaaggctctgccggtaatcctcgcagacccacccaagcatctctcgccgcgtgtcttgcggctgatcatggcgctgatcgacgagttgaacatgttggaagctcgcatcgatgctctcacggaagagatcaaggcactggctgctgaagatgacgcttgccagcgcctgatgagcgtgccgggcatcggtgtcatcatctcaagcgccgtcgtctccgcgattggcaccggtgggaccttcaagcaaggcagggatttcgccgcctggctcggtttggtgcccaggcaggtatctaccggcggccgtaccaagctcgctgggctctcgaagcgcggcaactgctacctgcgacatctcttcgttcaggcggcccacgttattctggtgaagaagccggtagccgcgcaggctgctctttggccatggatcgagcgcgcggccaaacgcatggcgcatcgcaatctgctcgcgacggccctcgccaacaaacttgcgcgcatcgcgtgggcggttctggctcgcggacattcatatcggccgatagctaaccctggacaggtgtaacgagatgctcgggtccaccacagggatggccgccaatccgctccgccaccaccgctcaccggcctttgtgagcgagcgaaggtggctccgcagggatggcttctcatagcccttcaccaattcgatgtagctgagcaacaaaactaggagatcaccgcttcccgccgaggtctgcaagacgatcatcaatatggacgaacggtctgcccgtcgcacccttcaggctgagcagagatttggctctcagaagtctgtccgcttatgagccctggatgcgcgcggattccattatggcccggagctcagtgctccactgacgtggtctgatacattgatgcagctcaccacgttcgcccacttcgagatcaggcttgcgacgcgcggccggaccatacat

SEQ ID NO: 6386 - DNA, 1327 bp, unidentified
  source 1..1327: mol_type = unassigned DNA; note = element_9e4eec8
  misc_feature 1: note = core
  misc_feature 2..70: note = LE
  misc_feature 71..1111: note = CDS
  misc_feature 1112..1327: note = RE
  misc_feature 1110..1315: note = bridgeRNA
ctatgtatggactcctccaacctaatttcttaggttggaaggtcgaccaaaaccctattggagtccatacatgtcttattcaactacagttggcgtcgaccttgcaaagaacgtcattcagatctcggtagtttcgagccggggtaaagagctttccaaccgctcgctcacgcgcaagaagttcgcggagttcctgggtaaacaagagccatcactcgttgcttttgagtcgtgcgcgacagcgcactattgggcacgtgccgcggagcggtacgggcacaaagcgcacatcattccggcgaaggccgtggcaccgttccggcgaggtcacaagaccgacagcaacgacgcgttggctgttgctgaagcggcacgcagaccgaacatcaaagaagcaccgatgaagacagttgagcaacaagggttgcaggcgatccaccgctcgcgtgagctgctgaaccaggagtgcacagcgctatcgaaccacctgcgaggcctgctgatggagttcggcatcgtcatcccgaagggttttgcatcgctgctgaaggcagtgccggagatcctcgaggacggtgagaacgagttgccggagctgtaccggccgacgctgcatcgcatgtacagccggctgttggagttgcgtgaagatatcggggcgatgaccaaggaagtcgagcgcctggcgaaggctcacccgatctgcagcaagctgatggcactggaagggatcggcccgatcggtgcgctgctactgtacgcgaccatgggctccggggcggcgttctccggtagccgcgagttcgctgcttacttgggtctcgcaccaaagcaatacagcagcggcggtaagactaacatcgtcggcttgagcaagaagatcggcaacagccgcttacgatcggtgctgatccttggagctcgcgcctacgtgtacaaagtcaatgagccgaagagttcgaaagacaaatggctgaaggcaaacatcgaacgcaacggcgagagccgcgcggcgatcgcgcttgccaacaagaatgttagaacggcctgggccatggtgacccagggaacggagtatcaacgtcgaccgcaactggagatggctgcctagaacgtcctgcaaacagagaccacgtatcagatatagatatctgctccggtgaaacctacacgcctttgaggccgcaaagcccattgacccttagaggaaccggagtgcgcatacatagtgggccaggagatagcgtctccaccaaaaggccagatatacattcgcgtcttaatcctgattgaggaaactgtttgctagactggaggagtccatata

SEQ ID NO: 6387 - DNA, 1077 bp, unidentified
  source 1..1077: mol_type = unassigned DNA; note = element_9e4f83d
  misc_feature 1..2: note = core
  misc_feature 3..216: note = LE
  misc_feature 217..1074: note = CDS
  misc_feature 1075..1077: note = RE
  misc_feature 22..192: note = bridgeRNA
cttgtatgttgtatctcgacaggccagaaagggcttgtcggggtggagggacgagcgacgcatctggccttggcacagaccgtaggagaaatcgtcccacccttttcacctcagcgccgataaggaatccatcggccgtttggaccgacgatcttggcaagccagcgcctcggtgatccccgacaagcacactcaccctagtcgggagttctcatcatggcaataccggttcaacccacgttgttcggcgtcgatgtcagcaaggccgaactgatcatcgccgcgcaagacggggcggttcaggcgctggccaatgacccccgcaccatcgagcgctggctggccacgctggccggcccctgctggttcgccctggaggccaccagcacctatcaccaggccctggcacaggcggcctatcggcagggccatcgcgtctacctgctcgatggctatcgcctggcccgctaccgcgacagcatcggcgggcgcgccaagaccgatcaccacgatgccctgctgctggtgcgctacctgacccgcgagcacgacgagctgcgcccctgggcgccgccaccggcggcctatacccgcctgaagaccctgctgcgccagctcgcccggctcgataccctgatccagaagcagctgcgcgaggcgctcgccgacgccggctggcgggatcacgcccggcgctgccaggcgatcgagggcatcggtccactcaccgccaccgcgctcaccaccgtcttccatcgcgggcgcttccgctccagcgatgccttcatcgccttcctcggcctggatgtgcgcgtgcgggattcgggccaggcccgcggccggcgcaagctcaccaaacagggcgaccccgaactgcggcgactcctgtacctggccgccatgacggccaggcgcagccccacctgggccggcttctatcaacgctacctcgaccgcggcctgaaaagcacccaggccctcaccatcctcgcccgcaagctcgcccgtatcgccttcgccatcctcaaaaatggatccgactatgtgccaagaaaactttgccttgcgacatagaat

SEQ ID NO: 6388 - DNA, 1369 bp, unidentified
  source 1..1369: mol_type = unassigned DNA; note = element_9e5625a
  misc_feature 1..2: note = core
  misc_feature 3..76: note = LE
  misc_feature 77..1108: note = CDS
  misc_feature 1109..1369: note = RE
  misc_feature 1081..1357: note = bridgeRNA
tgatggggtggacgccccccgacagcatcgatgtgtcaaggtaggtgttgtcgagcacctgtgagaggaggcgtccgtgagcgaggttactgtgattggtctggatatcgcgaagagtgtctttcaggcgcatggagcagacgcgcgaggtcagcagctgttcagccgccgaataacacgcgggaaagtactggagttctttgtggatcagcccaggtgcctggtggcgctggaggcttgcggcggcgcacatcactgggcgcgcgaactgacgcggatgggtcatgatgttcggctgatcccaccggcctatgtgaagccattcgtgaagcggcagaaaaacgatgctgccgatgccgaagcgatctgcgaggccgctcagcgcccgaacatgcgctttgttgcggtgaagagcgaggagcagcaggcttcggccctggtgttccgcacacgcgacctgctggtccggcagcggacgcaaacgatcaacgcgatccgtgggcatatggctgagtatgggtgggtcgcgcccaaggggccgtcatgggtgacgaagctcggcgatctgatggaggatggggtcggcgcgtctttgccgcgggcggcgcaggacatgtttcgggtcatgctggcgatgctcgaggagttgaatcgtcaggttgccgcactcgacaaggagattgcacgacgcgcacgtgaggacgaagtcgcccgtcggctgatgaccattccgggcattgggccgatcacggccaccgcaatcgtcgcgctggcgccggcggccgagacgttcagacggggacgcgattttgcggcctggctcgggcttacgccgagacagaagtcgacgggtggcaagaccaggcttggtcggacatcgaagatgggcgagcgaaccttgcggcgcttgttgatcatcggcagcagcaccgtggtcaagtatgccagtagtcgcggcgcacctgagggatcatggctggccagcatgatggcgcgcaagccccgcatgctggtgacggtggcacaggcgaacaagacggcgcgcatcgtctgggcactgctgatgaagaacgagaattacaaggctccggtggcagcagcggcgtaagccggcggaccacctgaggtcgtcggaggacggcaggcggacgaaggagggtatggcgcaacagtcggtcagacggggtcggaaagccagtcacatacggcgtgccctcgagcacgcgatgatgttttggatccgatccgcgaactcccatacgggcctgccgccaaccttgcggcatcaagaggccggacagatggcggcatccgatcaagcgcaccgaatgcccgaatttccacttgccttccgcggggcgtccacaga

SEQ ID NO: 6389 - DNA, 1252 bp, unidentified
  source 1..1252: mol_type = unassigned DNA; note = element_9e61f08
  misc_feature 1..2: note = core
  misc_feature 3..244: note = LE
  misc_feature 245..1237: note = CDS
  misc_feature 1238..1252: note = RE
  misc_feature 34..196: note = bridgeRNA
cttgtatgtttagatccgacgaactgatagggttcttcaccagttgccggggaggccgtccgctcctggaggcagtattaactgacctcgtctgtagagtggctccccgcctcattgctgacctcgaagagtatcgggaagccagcaagactggacttcgcatcgcaaggtcgaggccgcatcaagtgcgaggtcggggaaccggtggctattgtgacgcaaagcctgccgggagtggaagttgatgagtgtgtttgttggtgtggatattgcggccaagtcctttgatttggtcagcagggtagaagaaaaatcctctaaggccgagcggtttagccaaacatcccaaggacatgccaaggccatcaagcgactcaaggcactcaaaccctcagtcatcgtcatagaggctaccgggatctactacctggaccttgcggtagctctggtcaaagctgatttgccggtctcggtaataaaccccaaaagcttccgccactttgcagaattgaagttggctggcagtaaaacggatggcgtggatgctacgctgctggccgagtacggcgaacgcatgagcccgaggctttggacaccgccgagtgaagagcggttagccctgcgtgatatcggtaggcagataaaccgtttaaccgccaccaagacacaggccaagaaccgtctgcacgcccttcagtcgaagcgtgcaacgatgccattgctgatcgaggatgagcaggaaggaatcgcgctactggaccgcaggatcaaacggctcagccaggcagctctagagcttattgccggctgtggagagctttcgacgcacttggccaacataggcgccgcgaaagggattggggaggccacagcgatcgcagttttggctgaactctgtgtgcttcccgctagcttgaaggcaccccaggtgagccgccacgcagggctggatgtaaggctgacccaatccggcaccagcgtgaacaggccggcacgcctgagtaagtcaggtaatgcctacctgcgagccgcgctgtatatgccggctatgagtgcagcgcgacatgacccaagagcaaaagccttctacgagtccttggtagctagagggaagaagaagatacaagcccagtgtgctgtgatgcgaaaatatctcactggcatctgggcctgtatgaagaccggatcagcgttcgactctacgttgctattcagcgaagagcataagaacgcttgacccgaaacagagtat

SEQ ID NO: 6390 - DNA, 1354 bp, unidentified
  source 1..1354: mol_type = unassigned DNA; note = element_9e69db3
  misc_feature 1..3: note = core
  misc_feature 4..139: note = LE
  misc_feature 140..1339: note = CDS
  misc_feature 1340..1354: note = RE
  misc_feature 8..156: note = bridgeRNA
cttgtatcttgaaggcgagacgcggggaagccgagagatcccaaagccaagagcttgtgacgaagataggctccccgccctcgtcaccaaggccgaagagtatctgaggcccgagagccagcatttacaaggtcggcaggtgagggtacagggtcgggaagcccgcgtcttgaataacgcaggatggagggggaatgcaaccgatcaagacgcgggtggggatcgacgtgagcgcgagacgttggccgtagcgcgctggcgtgagaacgaggacaaggggaaggccaaagagtttgagaacgatgccggcggacatagtgaattggtccagtggatcggcaaaggtgcgcgcgtctgtatggaagcgacaggcgtgtatcaccttcaactggcgctgaaactggtgtctgccgggattgaagtgatggtggtgaatccgagggtagcgaaagatttcggacgagcgctgtcgaatcgaagcaagaccgatcgagtggatgcctggagtttgctcgagtacgttcagcgaatggagtttgtgccgtggaaagcgcccagcgccgcggtgctggagctacgagagctcggcaggcggctgagcgaactgattcaagcccgagccgatgaaaagaaccgtcttcacgcaaagaagacggcgggcatcagcgcgacggtggtcaaggacgtgaaggcgcacatcgctcagcttgaaagccggatcaaacagatcgaaaaagccgctgtggcggtggttcgcggcgacgccggcttgcgcgagcagttcgggattctgacgaagatcacgggggtgggagggcgatctgcgattctgttgctgacggagctggctgttttggatccgacgatgacggtcaagcagatcgttgggcatgcgggactggatccacgacagtatgagtccggaagcagcgttcaaaagccgccgcggatcagcaaggtcggaaacgcgcggctgcgaaggatcctgtatatgaacgccatcactgcgatccggcacgatcgtggagcacggctcttttttgcacagctcgtggcgcgcggcaagaaacggatgcaggccatcgtagccgtcatgcggaaactgttgcacggcatctggatcgtcttgcagcgtcgagtgccgttcgacagctccgttctattcgcggcctcgcttgcgaaggccgaatcctccgattcggccgtagcagccgatcagccggagccgagccaggatcacccgaagggccgtagcgaagcggaggagctgcgccagcagcttgatcctggctcggcgcaggctacgcactcggcgaaaacaacatcgaaagccgcttgactctcaacagagtat

SEQ ID NO: 6391 - DNA, 1185 bp, unidentified
  source 1..1185: mol_type = unassigned DNA; note = element_9e715b0
  misc_feature 1..2: note = core
  misc_feature 3..208: note = LE
  misc_feature 209..1108: note = CDS
  misc_feature 1109..1185: note = RE
  misc_feature 6..213: note = bridgeRNA
cttgtatgttcagaccagaccagcacggtagagtttggttgccgttgaggcggccagaccggtccgtgcagcctggtatgcgctggggctttgaagcccgtgtctgagtacatcgcgcacggccaccgtgctggtcttcctgaagcccgaacggttacgcgcgccggttcgcccgagagcgcattcacaagcaagggatctgaagaccatgtctgtttcctctgtggtggtgggcatcgacgtcgccaaggcgcacgtggatgtctgggtgctgagcaccaagctcgatgtccagcgtttcgacaatgaggccgaagctcattcggcgctggcggcggcgctgaagccactggacgtggcgctggtggtgatggaggccaccgggggctacgaggcgacgctggcctgtgcgctgcaggcagcgggcttgcccgtggcggtggtcaatccgcgccagacgcgcgacttcgccaagtccatgggacggctggccaagaccgaccgcatcgacgcgcgcatgctggccgagtttgccgctgtactggtgcgccgcgacgacctggccagcttcatccgccccctggcggatcaagagcagcaggcgctggctgcgatggtcacgcgcaggcgccagctcgtgacgatgatgctgtccgagcgccagcggctgcagttggccattgccgtcgtgcgcccgagcatcgaggccatgatcgaggcgatccgcaagcagctcgatgacgtggaggcccagatggtcggccacgtccaggcgcaccacgccgagttggacaagctgctgcgctcggccagcggcatcggcccggtggccagcgccaccctgatcgctgaattgccggaactgggcaagctcaaccgccgcgagatcgcggccttggtcggcgtggccccgatggccaacgactcggcaactcgaaggggcgacggcgcgtgcagggcgggcgcttcgagatacgccgcgtgctctacatggccacgctcacggctgcacgccacaacccggccatcaagtgcttccatgaccggctgctggcagcaggcaagctgcccaaggtcgctctggtggcctgcatgcgcaagctcctgaccacgctcaacgtcatggtcaaaaccaacaaaccttgggataaatcccttcacggcacttgactcgaaagacagtta

SEQ ID NO: 6392 - DNA, 1382 bp, unidentified
  source 1..1382: mol_type = unassigned DNA; note = element_9e733d7
  misc_feature 1: note = core
  misc_feature 2..86: note = LE
  misc_feature 87..1100: note = CDS
  misc_feature 1101..1382: note = RE
  misc_feature 1142..1374: note = bridgeRNA
caatgaaatggactcccccctcctacggcgtcaacgcgccagactgaagtggctggaaacagcagtcaccagaggagggagtccccatgaaactcaagcggataggcgtcgatttggcaaagcaggtgttccagatccatggcgtcgacagccacgagcaggcagtctgccgcaagcagctcaagcgctcgcaaatgctggacttctttcgtcgactcgagccctgcacggtggcgatggaggcctgtggcagtgcccattactgggcgcgagaactgcggaccctcgggcacgaggcgcgtctgatcgcaccgcagttcgtcaagccctacgtcaagagcggcaagaacgacgccaatgacgccgaggcgatctgcgaggcggccagtcgaccgagcatgcgctatgtcgaggtgaagagcgccgagcagcaggccagccaggcgctgcaccggatcagaagccgcctgatccgggcgcggacggcgctggtcaacgagattcgcgggctgctgggcgagtttggccgggtcgaagcccggcacggcgtcgcggctacccgccgactgacgcagacggccctggatgcgcagaacggcttgcccgggcagatgcgcgagctgctggcggagttgggcggcgagctggacgagcatgatgcgtggttgtcccgtctcgacgacatgatccagcgccaggctcgcgaggacgaacgtgtggggcgcctgatgcaggtcgagggcatcggtccgatcacggccaccgccctggtgtcggccgtgggcgatgctcgccagttcagcagcgcccggcagttcgctgcctggctggggctggttccccgccagcactccagcggtggcaaggagcgtctgggggcgatcaacaagcggggtgatagctacttgcggaccctgctgattcacggcgcccgggcagtgctcagacactgccaggacaaggcggatcgacgcagccagtggcttcggcaactggtctgccggcgcaatccgaacatcgccacggttgccctagcgaacaagaatgcccggatcgtctgggcgattctcagccggggcgagggttatcggcctggctgagacccccaggctgtatagctgggaagacgttgagcggtagatccaccacgattgcacagtgacatgcagcgatgacgaaccgggcgaaccggcatgtgtgaaacctgcttgcaccccaggccctctggtcaccaaggccgctagggcgatcaggcgcacatgagcggatattcatcatggctcggggcaaacagagccccctcgaaagccggatatacggaagcagtcgtaccacggtcgtcgacaaagcgtttcactggcaaaccggggggagtccatata

SEQ ID NO: 6393 - DNA, 1455 bp, unidentified
  source 1..1455: mol_type = unassigned DNA; note = element_9e7f9dd
  misc_feature 1..2: note = core
  misc_feature 3..237: note = LE
  misc_feature 238..1440: note = CDS
  misc_feature 1441..1455: note = RE
  misc_feature 12..201: note = bridgeRNA
tccttacctttcttgaagggtggtttttgccctcggccgtaggcttcggactgcccagggacgtcgggtatggctttcatgcgtttgcggtgtttcatggccgaaggagattggccgcccggcgtcccgcgacgactcgaccgctaattgagagatgcgattcgatcgctgtgtaaggacacgtcggcgtggtcgtctgctgggctgaaagaaacgacaacgatcgcggaggtggttgtgcgccaacaactgtgggccggcgtcgacgctggaaaatctgaccactactgcgtggtcatcgataccgacgggcagcgcttgctgtcgcaacgagtcgctaacgacgaggcggtcttggtcgaattgatcgacgaggttatggcattggccgacggcggtgaagttacgtgggcgatcgacctgaacgccggcggcgccgcgttgctgattaccttgctcgtcacttccgagcagcggctgctctacattcctggccgcactgtttaccacgcctcgtccggctaccgcggcgacggcaaaaccgacgccaaagacgccgcgatcattgccgatcaggcccggatgcgccgcgacctgcaaccgctgcgacccggcgatgacatcgccgtcgagctgcgcatcctgaccgctcgacgcaccgatctggtcgccgatcgcacccgggcgatcaaccggctgcgcgcccagctgctcgaatactttcccgccctggaacgcgccttcgactacagcaccagcaaggccgcgctcatcctgctcaccggctaccaaacccccaacgggctgcgccgcgccggcgccgcccgcctgacagcatggctggctaaacataaggcccgcaacgcctctgctgtcgcaaccaaagctatcgaggccgccaacgcccaacacaccactgtgcccggccaaaacctcgccgccaccatggttgcccgcctggctaaggaggtgatgaccctcgacaccgaaatcgacgcgaccgagacgatgatcgaggaccgatttcgccgccaccaccacgccgaaatcatcctgagcatgcccggcttcggcgtcatcctcggcgccgagttcatcgccgccaccggtggcgacatgagcgcctttgactgcgccgaccgcctcgccggcgtctccgggctggccccagtaccgcgagattctggccgcatcagcggcaatctcaaacgcccccgccgctacaaccgacgcctgctgcgcgcctgctacctgtcggcccagatcgccatccgcaccgacatcgcctcgcgcacctactacgaccgcaaacgcaccgaaggcaaaacccacacccaagccgtcctcgccttggcccgccgacgcctcaacgtcctgtgggccatgctgcgcgaccacaggatctatcaacccaccgcacctaacgccgcggcggcttgacaacttcattgagaa

SEQ ID NO: 6394 - DNA, 1372 bp, unidentified
  source 1..1372: mol_type = unassigned DNA; note = element_9e8a377
  misc_feature 1..2: note = core
  misc_feature 3..307: note = LE
  misc_feature 308..1117: note = CDS
  misc_feature 1118..1372: note = RE
  misc_feature 1137..1360: note = bridgeRNA
tgatgctgtggacggctccccacccggcatctgagtgccaagatgtggttgctgtaagtgaccacatgaaaggggagccatccaatgggtgacgttatcacgatcggcgttgatctcgccaagtcggtgttcccggtccatggcgtcgatgcggaagggacggtggttgttcggcaccagctgcggcggcggcaggcgttgccgtttttcgagaagttgccgccctgcctggtcgggttggaggcgtgcgcgacggcgcatcactgggggcgggagatcgagcggctcggccatcgggtgatggctgatgccgccgcgctacgtgaaggcgtatgtgaagatccagaagaacgacgcggctgacgcggaggcaatctgcgaggcggtgaccaggccgacgatgcgcttcgtcgaactgaagacgagcgagcagcagagcattctgatactgcatcggacccggcaattgttcgtgcgccagcgcaccacgctgatcaatgcgatccgagcccatctggcggagttcgggattgtggcgccggtcggccgtaacggtgtggagaagctgctgcagaccatcggtgatggccaggattcccggattcccgaggtcgcccgaacctgcctggaggcgctcgccatgcagctgcagccggcgaaccggcagatcctcgaggccgatcggcgggttctggcctggtaccggtccaacgaggccagtcgaaggctcgatcgtattcccggcattgggccgctgatcgcgacggcgctggtcgccagcgtgcccaacccgcaggccttcaagtccggtcgggatctggccgcctggatcggtctggtcccgaagcagaactcgagtggcggcgaggaacggctcggcggcatctccaaacatgggaaccgctacttgcggacgttgctgaccgtgggtgccctgtctgtgatccgatacgctgagacgcacggaaccgcgcatcgcccttggctggcgcgcttgctggaacgccggccagccaaggtcgcggccgtggcattggccaacaagatcgcacgcatggcctgggccgtcatggcgcggggcgaggcgtatcgggagccgaaggttcagaccgcctaaacgcgcgccctgcgccccaaccagttgggaagggcaactgcgagataatgcgaatgccggttgatccggggatcgggacaacccatttgtgccagcgcatctctgaatgcgtgcttttgaccgggatccgatccgcggagagcattatggccagcggccatggagcgccgcatcaacaggccggacacatggctgcaccaaacagcctcgcatcacctcaaagaaaacccttgccaaggcggagccgtccacaca

SEQ ID NO: 6395 - DNA, 1446 bp, unidentified
  source 1..1446: mol_type = unassigned DNA; note = element_9e9655c
  misc_feature 1: note = core
  misc_feature 2..110: note = LE
  misc_feature 111..1127: note = CDS
  misc_feature 1128..1446: note = RE
  misc_feature 1137..1361: note = bridgeRNA
gaatgaaagggacttccccgtcccgagtgcgccgcggcgaagcggcagccggcaactgagtgccacgatgggaagtgcgaactctcatcaatgttcggaaggggaagtccatggccattttgtacgtcggcatcgatctcgccaagaacgtgtttgccctccacgcggtggatgaagcggggcacgcagtgctggtacgcccgagcgtgccgcgcgccaagctgatggagctggtcgcctcgttgcccgcgtgcacgatcggcatggaagcgtgctcgggtgcacaccattgggcgcgccagttcatggcgctgggccacacggtgcgcctcatcgcccccaagttcgtcgtgccctaccggctgtcgggcaagcgcggcaagaacgacgcggccgacgcagcggcgatctgcgaggcgctgcagcgcccgcagatgcgcttcgtgccgctcaagagcgaagctcaacaggcgcagctgacggtgcaccgggcgcgtcagggcttggtggaggcgcgcacggccacgctcaatcgcatgcgcggtctgctcagcgagttcggcgtcgtgctgcctttgaaggcggccacggtgaagcgccaggccgcggccgtgctcgaggagttgccgggccaggccaactgggtgatcggcgacctgctcagcgaagtgcaccacctggatgagcgcatcgcgcagtacgaccggctgatcgcgcagatggccaaggaggatgcgcgagcgcagcagctcatgcgcctggacggtgtcggcgagaccaccgccacggcgctggtggccaccatcggcagcgggcacgagttcaagggcgggcgccaactggccgcctggctgggcttggtgccgggccaatacagctcgggtggaaaggcacggctggggcgcatcaccaaggccggcgatccttacctgcgctcgctgctggtgatgggcgccagagcgctgctcaacgcagccaaggcgaagaccgacagcgtgagccgctgggcgatcgcgttggccgagcgcagaggctactggaaggcgatcgtggcgattgctgcgaagaacgcgcgcatggcgtgggcggtgctcgacagaggcgagcgcttcgtcatgccgagctgaagaacacacacctaccgccgcgtgacggctcgcgttgatgagtgaaggttggacctgcgcggggagtgcctgattaactcggggcgacagcgaaggctgttcgcgactaacgaatgaggcccccgcgtgcgtcttgcatcagggtccgcagcgttgaagctgcatcgatgaccgtttgtagttgcgccagtccgcaccttgctcaaacgcagcgcgatcgacacgcaggcgagtagatcagtgacctccaaatgcaaacgagccgctcgcgcggctcgttgaggtcagtcgttgcttgacggcgggggaagcccttgta

SEQ ID NO: 6396 - DNA, 1383 bp, unidentified
  source 1..1383: mol_type = unassigned DNA; note = element_9e985e6
  misc_feature 1..2: note = core
  misc_feature 3..83: note = LE
  misc_feature 84..1127: note = CDS
  misc_feature 1128..1383: note = RE
  misc_feature 1106..1371: note = bridgeRNA
tgatggggtggacggccccgcctcaacggcatctaaagtgccaagacgtggtcgccggagcgccacagagagggaggccgtccatgaagaagtttatcagaatcgggattgatttgggcaagcggtattttcaagttcacgcgctggtgagcgaggatgggcgggccgtcacgcgcaagctgcggcgggatggttttcttgcttttttcgccgaggcggggccctgcctgatcggcatggaagcctgcggctcggcgcattattggggacgcgaactgcgcgccatgggccatgacgtgcgcctgatcccgccgatttacgtcaagccctatgtcaagcgcggcaagaacgacgcggtcgacgccgcggcggtgtgcgaggccgtgtcgcggccagacatgcgcttcgtgccgatcaaaagcgccgagaaccaggcgagcttgatgctgcacaagacgcgcgagcttctggtcaagcagcgcaccatgagcgtcaatgcgctgcgcggacatctcgcggagtttggcgtcgtcgccgccaagggcgtcggccatgcgggcgaactgctggaaaaagccaagaatgacgcgacgcttccagaaatcgccaaggcgaccgtaaagattttcgtccagcagctggaggcgatcagcgccgcgatcgtcgcgctcgataaagagatcgccaacgtccatgcgcaaagcgagatcagcaaattgctcgccggcgtccccggcgtcggcaagatcgtcgccacggcgatcgtcgccagcgtcccggaccccagcgtcttcaaatccgcgcgcgactttgccgcctggctcggcctcacgcccaggcaaaactccagcggcggcaaggaaaagctcggcgccatcaccaagcagggcaaccgctatctgcgcaagctgctgacgctcggcgcgacctcgctgttgcgcgtggccggcaaacgcaacggcgttctgcgcgattggctcgtcgccctcctggccaggaagccggcgcggctcgtgagcctcgcgctcgccaacaagctggcgcggatcatctgggccatgatgacgaccggcgaggccttccgaacccagatcatggcgcgcgcagggaagccctcgatggcgtaaccgttcgaaccatccagtttggcgagggcgaaacatcgacgtgatgaacgacagggtcggaaacgacgacgaaggacactccgctacgtgtcacgtgcacaaagctcgcgggaatgatcaggagccttcgcagtcgaacttcatcagggccagcggacatacgcgccgcgccaaaaggccggacatatgaccgaaacccgccaccaggttcaccgcgccgacaaaaaaccgcttgccaagcggggccgtccacata

SEQ ID NO: 6397 - DNA, 1357 bp, unidentified
  source 1..1357: mol_type = unassigned DNA; note = element_9e99275
  misc_feature 1: note = core
  misc_feature 2..63: note = LE
  misc_feature 64..1107: note = CDS
  misc_feature 1108..1357: note = RE
  misc_feature 1122..1348: note = bridgeRNA
taatggaatggtctgccccacctcctgcgcgatactaggcgcgtccaccctgggagagcgaccatgaacgatcaccgcgtctatgtcattggcattgatctcggcaagaattggttccacctcgtagcgaacgacgagcgaggtactgaactattccgcaagaagctcaaccgaggccaactggcagaatttgcggtcacggcaccccgatgtttgatcgccatggaggcatgtcctggatcccaattctgggggcgacgattccagcaggcgggccacgagttgcgcattatcccggcccagtttgtaaagccgtatctcaaatcgaacaagaacgatttcaacgatgctcaggcgattgcggaagctgcaagtcgcggaagcatgcgctgtgttccgctaaagacaactgatcaaatcgagctgcaagcattgcatcgagttcgccaacgattcattgtcgagcgaaccgccgtcgtcaaccagatgagagcgctgcttctcgagcacggcattgtcataccggttgggcgtgctctcttcgcccgacgcttgccagcagtattggccgatccccaaagcggcttatcgccacgactgagtcagatcatttcgcggttgcgtcagcgatggctgactttggacgaagagatcgacacggcgtcggctgaaattacccagatcgctcgtgaatcggagctctgccgacgtgtctgcacagtacccggcgtcggtccggttgtgtcaacggctctaattgccgcggtcggcaatggtgctgcgttcaagcgggctcgcgatatgtcagcctggctcggccttgtgccgaagcaatactcaacgggaggcaaatcgaatcttggtggcatcagcaagcgcggcaacgcctatttacggatgatggtgatccaaggcgcacgtgctttgatgatccacatgaagcgcgatcaatcccgaatgggcttatggcttcgcgaggtcgaacaacgtagtcatccgcacgtcgccctaatcgcactggccaacaagatcgtccgtatctgctggaaggtgttgaccagccagcagtcctatcgaccgtttgtggaagtacccgcagctgcctgagcaagtccgagcactaccgtcctgttttgcgagccctgcatagctgatgacacagaaccgttgaccggcatgccgaaagcccggctaaaaaagcagtctttagtgactgaacgctttattgggttaggtgtgcgcggattccatcatggccagcagtctcgaactgcgcgaacaggccggatacattgacgcaaacgatgttctgtcgaaacggctacacagtccttgcaaatctggggcagaccataca

SEQ ID NO: 6398 - DNA, 1658 bp, unidentified
  source 1..1658: mol_type = unassigned DNA; note = element_9e99dc4
  misc_feature 1..2: note = core
  misc_feature 3..303: note = LE
  misc_feature 304..1488: note = CDS
  misc_feature 1489..1658: note = RE
  misc_feature 70..275: note = bridgeRNA
ctggtatattgtaaatgactcatctaaaagtagtcacaacgaatataccttttcctttcctcaacctttataaccgaaggttgataacggtcaaagtaaatagtatcatttgaaatgtgtgaatgtggatttgtatttctccttgtggcaatgactactatagaaaggttcttaccacttccttattccaaaacaatgatgagttagatgagtcttagaattcgtatcacgtaccaggatttgtggtttaagtgttgtggtttatccattcacatacaagtatttaagaaaggaagtgtttgtatgattcttgttggaatcgatgttggtaaactctctcatatgttttgcatcatggattctacaaatggtgaaattctcgttaagcctagttctttccaaaacaatagggaaggttttgaacttttgttaaacaaaatgaaatcctattctaaagacaaaatgctcattggaatggaagacaccggacattaccatttcaatttgttaaaattcttgctagattgtggttatacggttgctttgattaatcccatcacaaccgaccttgctcgtaagatgcaactttgcaacaccaaggacgatgctttagataccctaactatctgcgatgtcatctcctctaatttgcataaaaaaggatatagaatctctaaggtcaataactttgctctttatgaacaaaaacgtcttactcgtgaacatcatgatcttaaggaagaattgaattctctcgctaataaacttcaaaagtgtattgatattgttttccctgaatttaattccttatttaaatcaaagcttggttctttatatatgaagcttttaaaaacctttggtagtgctgatgccattgctcatgccaatatacgcaagattcgtaaatgcttcgattcttgtaaaagaggtcgccctctttcgttgaccgccgaaatgttgaaagaaacagctagaaattcaatcggtttcccttctaatgctgaagtaatcgaaatgcgtcatttgattgatagaataaacttgattaaaaaacaaatttctgatgtggataaaaaaatagaagagttctcaattcaaaacaactctcctattctatccatcccaggaatctctcatttctctggtacttctattctagcagaatttggagattttagcaactatttaaaagcatctcaaatcattaaatttgctggtgtctctccttctaagtataagtcaagtcaatttgaggcccagcatatggccattactaagaaagggtcttgttatcttcgtaaaacgctttatcaagttattctacctgtcatccagtttaatcctgttttttataactattatcatcttaaactttctcaaggaaaaggccatcgctgtgctcaaggacattgtgttcgaaaacttttaagagttatttttcatctggtgacaacaaataatttttttgatccttctcttttaagataattttactagacggttcactattgatatttgaaaccttattctaggtcgctatttttgtcatgcctttttattcactttttcaaagatcactatctatttttcgctaactattttctttttttatttatttttaaactttttcatctctctcttgacttttatatagttag

SEQ ID NO: 6399 - DNA, 1362 bp, unidentified
  source 1..1362: mol_type = unassigned DNA; note = element_9e9d6f5
  misc_feature 1..2: note = core
  misc_feature 3..74: note = LE
  misc_feature 75..1103: note = CDS
  misc_feature 1104..1362: note = RE
  misc_feature 1076..1350: note = bridgeRNA
tgatggggtggacgccccctgacggcatcgctgtgccagaatggagtgttgcaaccattcgaagggaggcgtccgtgtctgaggttaccacgatcggtctggatatcgcgaagaatgtgttccatgcgcacggttcggatacacgcggtcgaggcgttttctcgaagcggctgagccgggcgaaggtgctcgacttcttcgccgcacaaccgcgttgcaccgtggctatggaagcctgcggcggtgcgcatcattggggccgtgagctaatggcgctcggccatgacgtacggctgatcccgcccgcgtacgtcaagccgttcgtgaagcggcagaagaacgatacggtggatgccgaagcgatttgcgaggcagcgcagcgcccaaccatgcgcttcgtggccgtgaagagcgaggagcagcaggcgtccgccctcgtgttccggacccgcgatctcttggttcgccagcgaacccagctcgtcaacgccatccggggacacctcaccgagtacggttgggtggcgccgaagggagtgtcctacgtctcgatgctcggcgatatgctcgaggaggagatggcagccttaccggcgacggcggtcgcgatgttccgcgtgatgctggatctcctggccgagttggacgagcggatcgcgaatcttgaccgggagatcgctcgccgtgcccgcgaggacgagacggcgcgccggctgatgaccattcctggcatcgggccgatcaccgcgacagcgttgaccgcccttgctcccactgccgagaccttcgccaagggtcgcgacttcgccgcctggctgggtctgacaccgttgcagcgatcgaccggaggcaaacagaagctcggcgcgacgtcgaagatgggcgagcgaacgctgcgccgcctgctgatcatcggcgccagcgccgtcgtcaaacaggcggcacatcgtggagttcccaagggatcgtggctggaacgaatgctggcgcgcaagccgcgcatgctggtgacggtggcgctcgccaacaagatggcgcgcattgtctgggcccttctggcgaagggcggaagttaccgagctccggcagcggtcgcggtgtaagccgggatcgacgtcagaggctgtcgggcacgcgaggtcggtcgaaggagggtatggcgctacagtcggcgagacggggctggaagaaccagggaacggcagagcgctatccaagcgcgcaaagctgatgtggatccagtccgcgaactcccatacgggcccgcagccgatggctgcatcaggaggccggacagatggcagcatccgacatcgtgcctaccgccaaaaaaccgcttgcgtccggaggggcgtccacaga

SEQ ID NO: 6400 - DNA, 1325 bp, unidentified
  source 1..1325: mol_type = unassigned DNA; note = element_9e9fc57
  misc_feature 1: note = core
  misc_feature 2..255: note = LE
  misc_feature 256..1314: note = CDS
  misc_feature 1315..1325: note = RE
  misc_feature 39..249: note = bridgeRNA
ctattggtgcaaagtgagtcgtgcccgaacatcttcgacgggagaggttcgggttgggcagttgggtgactcggagaacacgtgccgcttcaggccttccgttgatttgtccacagctgtctatggggcgagagccctgaccgagagtgacttgatagaagcctgctgagccgtcaactcgcaataggtctgtccctcggtcagggccctcgccgctgtcccgtcatccgcgtgggcaaacgagaggacatcacgatggtgacagtggggatcgacccgcacaagcacgttcatgtcgcagtggccgtcgatgcggccggcaggcggatcggccaaccactgaccgtgaagaacgacgcactggtgatcactaacctgctcaagtggattcggtcgctcaccgatgacgcgctcatcacctgggccatcgaggatggtcgtgggttcgcccgccgtctggccgatggcctactactggcaggtcatgaggtggtctgggtcccgagccgtctaaccgcagcccaccgcaagctgcacgccgccaccggttccaagtccgaccccacggacgctgcggctgcagctcatgccgtgatcgcgactcccgaccttgaccggcaccgcattgatgaacacgtccgagagctgcgggttttggtcgactaccgctccgatgtggtcaaacgccgcaccatggtgatcaaccagatcaaagcgcagttccatgtctggctcgaccacactccaggcgacctgtcacgcaccaaagtgctgaacaccctgactacacggttgggcgcagcaccgctgcgcactcatatccgccaggcgctcaccgagatgatcgccgagatcgccgacctgaaccgacgtgttcacgatctggacgcgacgatcaaggatctcgtcaccccgcttgccccgacactccttgagatcaccgggatcagccacaactcggcagcggtgctgatctccgaaatcggtgacgtaacacgcttttccacatcagccaaacttgcccgctacacgggctgcgcgccaattccggtttactcctccgacaaagagcgctaccggctacaccgaggcgggaaccgccgactcaacagcgtgctctacacagccgccatcgtgcagaagagatggcaccccgccgcgcaagaactactcgctcgccacacacccgccaaaggcgcccgcggcgcacgacgcatcctgcagcgccacctcgtcgacgtcgtacatcgggcgatgatcaccgaccaggcgtcatggcagcatcagatcacccgatatcagcccgccgcttgacatagaagcat

SEQ ID NO: 6401 - DNA, 1607 bp, unidentified
  source 1..1607: mol_type = unassigned DNA; note = element_9ea2cdd
  misc_feature 1..4: note = core
  misc_feature 5..385: note = LE
  misc_feature 386..1597: note = CDS
  misc_feature 1598..1607: note = RE
  misc_feature 153..383: note = bridgeRNA
ctcactggactaccctccaatcctcggtagcggtggagttggtatggcgcagggttatccacggtggcggtcggtcggcgcttgcgacgaaccgaccgaccgccgcggtgggtaacccgtgtttagcgctagggccgatccagtccttgacaggacgctgttgccgaaccgaaggttgattccgacttccgtgcccccggggcgactgccaatgtcgctggccgcttgacggcccgaatgagacccgcagccctcggggtgccggaagacccagacgggctacagggtgtagcgccatggagaagagccaagagcgccgatcagtgagcgacccgcaggggcttccggcacggcaagtcataccgcaattgacaggagattgtccatgactactttcttcgccgggctggactgggccagtcaaacccacgccgtttgcatcattgacacgcagggatccgtccatgagcaattcgacatcgatcacaccgccgtcggcctggccgaactgcggcgccatctgatggctgcgggctcgccgcccgtcgccatcgaacgcccctcgggcctcatcgtcgatacgctggtggaagccggcttcaccgtcatccccatccatcccaatgcggtcaaggccacccgaccccgctatcgcagccacggcgccaagagcgatgcctccgacgcctacctgttggccgatctgctgcgcaccgacggccatcgtttcaagcccttggcgccccaaggcgacgagattcgtgccttgcgcgccctggtgcgtggccgcgacgatctggtcgccacccgcgtgcagttggccaaccagttgcgcagcctgctcgaatcgttctggcccggcgccaccgctgtcttcgccgagatcgattcgcctatcgcgctggccttcgtcgagcgttacccgacgccggagtccgccgcccgactcggccccaagcgcatggctgccttctgcgcccagcatgcctactgcggtcgccgcagtgccgaggaactgctggcccgcttgcatcgagcccccgccgcagtctgcggcgaattggaggcggacgccaagggcgagctggcgcgtagcctcgcgcgcacactgactcgtctggtcgagcagattcggctcctcaccagccgaatcgagcatcaggtcgcttccctcgacgacggtcggatcgtcatgagctttccgcgcgcaggtcgcatctgcgccgcgcaaatcctcgccgagctgggcagcgtgcgcgaacgcttcaatagcgacacccaactggccgccgaagccggcgtggctccagtgacctatcagtcgggtaagtcgaaagccgtcaccttccgctgggcctgcaatcatcgcctgcgcgccgccttgacctgcctggccgacaactcccgccatgtcagtgcctgggccgctcgcgtctatgcccaggccagagcccgcggttgcgaccatccccatgccattcgcatcctcgcccgcgcctggctgcgcgtcctctggcgcgcctggatcgaccgcaagccctatgaccccgcgcaacacggcggggcaatatcggccttgaaaacagtggagggttgacacagggtgt

SEQ ID NO: 6402 - DNA, 1472 bp, unidentified
  source 1..1472: mol_type = unassigned DNA; note = element_9ea9abf
  misc_feature 1..5: note = core
  misc_feature 6..248: note = LE
  misc_feature 249..1457: note = CDS
  misc_feature 1458..1472: note = RE
  misc_feature 1..252: note = bridgeRNA
cacccgttaccttgttggtggtcgcggggagaagcctcgcggctgggccggcgacggccggcatgatgtcttgcccctgtctatcgaatgatccggggggtgttgtcaccggccgtcgtacggcgacgtgtgaccgctgataaggggaatgacccaccacctgatactggtggcgaggtctttcgtaacgtgggtgcggggctcgtcgtcagcagccggccccgtcccgcggagcgaaggagcgtgtcatgcaggtggacgacatcggcgtcttcatcggtatcgacgtcggtaagagcgagcactgggccacagccctggaccgggacgggcggagaatccatgacagggccctacccaatgacgagtcccgtctacgggacctgtacaagcatctggcggagcacggccgtgtgctggtggtcgtggatcaacccgcgaccatcggggccctggctgtcgcggtggcccaggatatgggtgtcacagtgggctacctgccgggactgtcgatgcgccgcatcgcagacttgagcccaggaaacgccaaaaccgacgcccgtgacgcagccgtgaccgcccaggccgcccgcaccatgcctcacaccctgagagctatcagcacttcggatgaggacactgcagccctgggcatgctgactggtttcgacctggacctggcacgccaggtcaaccagaccgccaaccgcattcggggcttgtacacccagatccaccccgccctcgagactgtcctgggatccctcttggagcacgacgccatcttggaggccatagcggcctggcccacccccaccgcactgaagaaggccggcaaggcacgcatcgatgccaggctgaacaagcacggagcccgccgccatgccgcctgggcccagcagatctgcgatgccctggacaagcagaccgtgacggtggcaggcactgatgccgccggggcggtcctgccccacctggcccgccagctcatcgccttgcacgcccaaagggctgatatcgccggccgtgtcgaggccctggtggaggcccaccctctttacccggtcctggcctccatgcccggcatcggggtcaggaccgccgccgtcttcctggccgagaccctgggcaagaccttcaccaccggggcccagctggcctcctacgccggcctggcaccggtgaccaggaggtcaggatcctcgatcaagggcgagcacgtctcccacgccggaaacaaaagactcaagagagccatgttcctatccgccttcgcctccctcagatccgaccccatcagccgcgcctgctaccagcgcaaacgagaccaaggcaaacgcctgggccaagccgtcctcgccctggcccaccgccgcatcctgaccctgaacgccatgatccgagacggagccctctacgacccccaaccagcagcacagctacccaccaccgcttgacacaccacatagggg

SEQ ID NO: 6403 - DNA, 1436 bp, unidentified
  source 1..1436: mol_type = unassigned DNA; note = element_9ea9e63
  misc_feature 1..2: note = core
  misc_feature 3..235: note = LE
  misc_feature 236..1408: note = CDS
  misc_feature 1409..1436: note = RE
  misc_feature 23..200: note = bridgeRNA
cttgtatgttgtccgctcatcggatcgctccgagaatggacaccgacggaaccgggagagggtcgccgctgcggcgcttgaagcccaggcttcggaaatgagattggcgccctcgaccggtgctcagggtccgaacggtatcccggggccggcagtgccgtgtcctcgcatgcacaagcgcggacacgagcaccggctccgaggctcccgacttcctccgtcgccaggaggacgtatgcgcttcgccggaatcgacatcgcctcggaaacgcatgtggtggccatcgtagacgcccaaggcgccgtggaattgaaagccacttcgtttgccgaagacgccgcgggctaccagaaagtgcttgcgcttctcggcaacccgaaagaagtgctgatcgccatggaggccaccggacactattggaagaacctgttcgcagtcttggccgccaccggccatagcatcgcgttggtcaacccgttgcgcacgcatcgcttcgccggcgtcgacctcgagcgcaccaagaccgacgctatcgacgccctgggcatcgcccgcttcgccgccaacaagcgcccgccagccacccctctgcccgatgcgctcgccgaggagctgcgcgagctcgtccatttgcgtgagcggctgctgcaggacttcggcgatcgcgtgcggcaattgcaccgcctggtcgatcttggcttccccgaattcacccgctacgtgcgcaccctcgacagcgagctcgccaccgccatcctgcgcgactatcccaccgcagcggcctatcgcggcgtctcggtacgccgtctcgccggcttgcgctacgacgctcggcaccaggtcggcctcgacctcgcgcgcaccctcatcgacgccgcgcgccgctcggtcggccaacatcacagcgccacctaccgcctgcagatccgctatgcctgtgatgacctcgacgtgctgcgccaccgcctgcgcgatatcaaccgcgacatcgacgccaaactgcgccagcacgaggttggccgcttgctcaccaccatcgacggcatcggcccgcaaaccgccgcctgcctcatcgccgaactcggcgatcccgcccacttcagaaacgcccccgcactggctgcttacgtcggcaccattcccggtctcaagcaatccggcaaacgccacaccctccatgccggcctgacgccagtcggtaatgcccgcttgcgcgccgcgttgtggatgccaaccttgaccgcagtgcgcttcaatccgtggctgcgcgctcactaccaacgcctgcgcgcccgcggcaagctgcccaaagtcgccttggtcgcctgcatgcacaaattgctcttcgctatctatgccgtcgccaaacatcgccggcccttcatcgcccagagccccacgacatgaacataccgcttgataaacatcacggtat

SEQ ID NO: 6404 - DNA, 1365 bp, unidentified
  source 1..1365: mol_type = unassigned DNA; note = element_9ead38f
  misc_feature 1: note = core
  misc_feature 2..84: note = LE
  misc_feature 85..831: note = CDS
  misc_feature 832..1365: note = RE
  misc_feature 1128..1318: note = bridgeRNA
gaatggaagggacttcccctggatatgcacctgattaaatattgtgcaatcatgggggtaaacatagccccggagggattcgttatgaccatcactactgtcggtatcgatcttgctaaaaatgtgttcgctgttcactgcgttgaccaacacggtaaaactgttctggttaaacccaaagtaacgcgtgctgcccttcctgagctgattgccagtttacctccctgtgttatcgggatggaggcatgctctggggctcactactgggcaaggttgtttcggcagtatggtcatgaaccgcgcctgatggctgctaagtttgtatcgccttaccgtatggctgttaaatcagggaaaaatgatgctgctgatgctcaggctatctgtgaagctgtccgtcgtccgcatatgcggttcgtaccagtgaaagatgaaagccagcaggccatgcagtgtttacatcgtacccggcaaggttttatcgaagagaaaacagcaacatataatcgcctgcgagggttgatctctgaattcggcgtcatcgctccacaaagtacagatgccctgcgccacatggtatctgaacagaagaaatctttgccacttcaggttcagcaatgtgttgatgacctgctggaacacattgatcgcattgaaaataacgttactgaatatgaccggatcctgtcctgcatggcaaaagcggatcaccgcagccaacggctgatggaactgaaagggattggccccacaacagcctgtgctctggtcgccagtatcggtaatgcacacgattttaaaaatggacgacaactggccgcttggctgtgactaacaccatcgcaatatagtagcggcggaaaatcaaagcttggcaggataacgaaggcgggcgattcgtatctacgaacgctgttggtccagggcgctcgttcagttctgattggtgccgagaaaaagacagactcattcagtcgttgggtttgttcgctagttgagcgtataggatactggcgtgccgttgtggccatagcagccaaaaatgcaagactgtgctgggcatcgctacattatggtgatgatttcaggttgtactcagtgagctaaagcacgaagctgattaaccatcttaactgcaactcgttgatgataaagggttagaccccgtgagacatatctgactattgtacaggatatacgtatccgttaaacgaacaagaatctcacgagcgtctttcatcagggtccgaatcgataacgattcctcatgaccgtttatagtaccgcagtctctcccctttatttttactgacgagcagaaagaaaccgaaaaccctgcgttgacatgccggggaagcccttata

SEQ ID NO: 6405 - DNA, 1360 bp, unidentified
  source 1..1360: mol_type = unassigned DNA; note = element_9eae5e1
  misc_feature 1..2: note = core
  misc_feature 3..74: note = LE
  misc_feature 75..1103: note = CDS
  misc_feature 1104..1360: note = RE
  misc_feature 1079..1348: note = bridgeRNA
tgatgatgtgaccgccccccgacggcatcgatgtgccaaggtgggtctgcgacgatccacagaggaggacggtcatgtcggagattaccacggtcgggctcgatctggcgaagaacgtgttccaagcgcatggggctgatgcctctgggcgagctgtgcttcggaagaagcttcggcgcgaccaggtgctggacttcttcggccgcctgccgccgtgcgtggtagccatggaagcctgcggcggcgcccatttctggggccgcgagatcggcaagctcggccatgaggtgcggctgatcccacccgcctacgtgaagcctttcgtgaagcggcagaagaacgacgcggccgatgccgaagcgatctgcgaagcggcgcttcgcccgacgatgcgcttcgtacctgtgaagagcgaagagacccagggggcggcgatggtcttccgcatccgcgagcttctgattcggcagcggacgcaagcgatcaacgccctgcgaggccatctgggcgagttcgggcaggtcgtgccgcagggagcggccaacgccgcccggctgatcgccattgtggaagatgccgacagcggcctgcccgccgacgccatcgcgaccttgacggtgctggtcgcggcgctttcgcatctcgaggccgagatcggcaagctcgacgtcgagatcgaggcgcgtgcaaggaagaacgaggtggcccgccggctgatgaccgtgccgggcatcggccccctgatcgccacggccattgcggtattggccccgccgcccgagactttccgcaaggcgcgggattttgcggcctggcttggcctcacgccgcggcagcactcgaccggcggcaagcagcggctcggtgccacgacgaagatgggcgagcgatcgctccggcggctgctgatcatcggcgcgaacagcgtgatcatcaagcgacacgtccatgccgctgcacggccgggcacctggctgggcggcatgctgacgcgcaagccgccgatgctggtgcgggtcgcactggccaacaagatggcgcggatcgtctgggccctgatggcccggggcggcgtctacaagtctccggccacggcggcatagccgtcgtcggtcgcgaggacgtcggagcggaagagggcaaggagtggtttggcgcaacggtcgtagacaggatcagaggaaccagcctgcaacaaagtgccttcgagtacgcggcgttgatttgggatctgatccgcgaacaccatacgggcccgcggcgtggaagtggccgcatcagaggccggacacatgtcagcacccgacgatgcgccaggacgagcctgcaaataccctcttgcgcaaggggcggttacaca

SEQ ID NO: 6406 - DNA, 1474 bp, unidentified
  source 1..1474: mol_type = unassigned DNA; note = element_9eb2338
  misc_feature 1..2: note = core
  misc_feature 3..236: note = LE
  misc_feature 237..1454: note = CDS
  misc_feature 1455..1474: note = RE
  misc_feature 7..235: note = bridgeRNA
ctaatgggggtcgaccgcctcgttcgtgttgcgggcgaggatggttccgagccgccagcaggtcagcactcagttgcgcagtgccgttgagttctagtcctagatcgtgcgcctgttggttggtgaggtcgaccttgatggctggtgggatgacgtgccgcgagcactaaaccattagcgagctgccggtcgcctcgggctcaaaccgattgttgcgacgcgaatgggaggctcgcatggcaagggtgttcgttggtcacgactgggccgaagcccatcacgacgtttgtgtcgaggatgagcaaggccgacggctcgagcgagcccgtctgcccgaaggcgttgagggtgtggctcggttccatgcactcgttgctgaccatgtggacgatccggctgatgtggtgatcgcgtccgagaccgatcgcggcctgttcgtcggtgcactcgtcgcggccggctacacgatgttggccgtgaacccgatgtcgacgtcgcgctatcgggaacgccactcgacctcgggcgcgaaatccgatcccggtgatgcgtgggtgttggcagagctggcccgcgtcgacggtcacaatcaccgttcggtcgcgggtgacagcgacctcgccgaggcggtgaagctcctggcgcgggcgcaccagtcgatgatctgggcgcggcaacgccagctgaatcagctgcgttcgacgttgcgcgagttctatcccgcggcgctcgttgcgttcgatgagctcggctcgaacgacgcgctcgccgtgttggcgatcgcgcccaccccaacgttgggacgcagcctgtcgcgctcgaagatcgccgccgcgctgcggcggggcggccgtcaacgacgcatcgacgcacgcgccgccgagatccagaacgcgttgcgcagcgagcagctcgaggcacccgcgctcgtcgccaacgcgatgggcgccaccgcgaccgcgatcgtcgcggtcgccgtcgagatgacagcccagatcaaccgcctcgagacccagctggccgaacattttgaacaacacccggacgccaagatcatccgttccctgccaggactggggatgacgctcggcgcccgggtgctcggcgagttcggggacgacccgaaccgctatgccgacgctaagtgtcgcaagaactacgccggcacatcacccatcaccaaagcccccggcactcgtcgcgtcgtgctcgcccgctacgcccgcaaccgccgactcgccgacgcctgctacatgtgggcgttcacggccacgaacgcgagccccggcgcccgcgcgttctacgaccaacgccgagccgccggcgacacccaccaccgtgccctacgggcactcgcgaaccgactcgtcggcatcctccacggctgcctccaccacggaaccgtctacgacgaacacaccgcatggggccaccgcgaacagatcgccgcttgacatttacgaacgtgggatgt

SEQ ID NO: 6407 - DNA, 1374 bp, unidentified
  source 1..1374: mol_type = unassigned DNA; note = element_9ebfa6b
  misc_feature 1..2: note = core
  misc_feature 3..240: note = LE
  misc_feature 241..1269: note = CDS
  misc_feature 1270..1374: note = RE
  misc_feature 5..218: note = bridgeRNA
ctcctatgtttgttatcattaaatatattagcgttataaagtgaaaagggatgagagcagatggtcgaccaaacaaccataaggtatgttcagagagagaaactgcctcatttctttttaccctttagagtttgaacagaatgtaaggaatattgccccgcgatataaccaggatatccagtcaggagaaaagacgaagaagggttattcacttttgatatatcataatcaaatgaagtgatgacaaagattttaaaacaagtagccggtattgatgtggcgcaagatgaactggtagtttctttaggccgggtagatgaatcccttcgtaaagacatttatgcttacaagacctttgccaataagccatcgggatttggagccttattggtatggataaagaaacacacagacaatggagtgtccgttcgctatgtaatggaagcaaccggggtttatcaccagaaagcagcttattacctttctgaccagggtcttgaagtaagtatagtactgcctaataaaataagcagctacatgaaaacactggagataaagacgatcacagataagacggcatcacaggcgatatgccagttcggcttagaaagaggacttggtctttggcaaaagccaaaaaaactattcagggatctgaaacaactgacacgggagcgggatcagatcgtagccgaccgggtgatcgctaaaaatcaattacatgcagaacagacagaggcttttcctaatgatagaagtatctgcagggcaaacgggcgcattaagttacttgatgagcaagaaaaagaaattaaacgtgaaatagctgaacttgtaaaaatggataaagaggtgcataaaaagatagacctgatcacctccatacccggcgtaggaagcttaacagcggcaatagtaattgcggaaaccaatggttttgatttgatcaggaataaaaaacaactagtaagctatggcggactggatatcatcagaaaagattcaggaacatctgtgagaggaaaacccaggatctcgaaaaaagggaacaggcagttaagaaaagcgatgcatatgcctgctttagcggcgattagaaatgacgatcgcttcaaagccatatttggtagattggtatccaaacatggcattaaaatgaaggcgacagtagctgtacaaagaaaaatactggaaatgatctatacgatatggacaacggaaaaaccttacgacaaagattatttacaaaaaacaagtacaacggcttaaaagagttagagcggatataacccgaagttacaccgccctaaacaggctaacataaagtcgccttaagcaacaaaattaaatattatttgataattaacacagaat

SEQ ID NO: 6408 - DNA, 1988 bp, unidentified
  source 1..1988: mol_type = unassigned DNA; note = element_9ec6b8c
  misc_feature 1..6: note = core
  misc_feature 7..236: note = LE
  misc_feature 237..1511: note = CDS
  misc_feature 1512..1988: note = RE
  misc_feature 14..235: note = bridgeRNA
ccccccgttaccgtcttcgtggccccgcaacggggctcccggcctccggcgcggcatgattgttcccccctgtagttcgcatgatccggggggtggtgtcaccgggccggaggcatcggtagaccgctgatagaggcaggaccaccagcgtgctgggaggctcttcgtaacgtggatgccggcgactggtgccacgccaatgaggccgggacagcacgaccgtgtaagggatcagcgtgatcgacaccggcgatgtggacgtcttcctcggcttggacgtcggcaagggcgagcaccatggaaccgccgtgacccgagctggcaagcgagtcttcgacaagcggctgccgaacagtgagcccaggctgcgggccgtgttggacaagctcaccgcgaggcacggcacggttctggtcgtggtcgaccagcccgccttcatcggggccctgcccctggcggtcgcgcgggacgtcgggtgccgcgtcgcctacctgcccggtctgacaatgcgcaggatcgccgacctctacccgggcgaggccaagaccgatgcccgcgacgcggccgtcctcgcagacgccgctcgtacgatgccccacaccctgcggggcatcgagctcgccgacgagaccatcgccgagctggagatgatcgtcggcttcgacgacgacctcgcgggcgaagccacacgcatcgccaaccgcctgcgcggactgcttacccagattcacccgcacctggagcgcgtgctggggcctaggctcgaccatccggcggtgctggccctgctggagcggttcggttccccgaccgccctgcgtaaggccggacgccgccaccttctcggcgtcgcccggcccgtggccccgcgtatgttcgagcgcctggtcgaggacatcctcaccgccctcgacgaacaaaccgtggtcgtcgcgggtaccgaggcggccgcactgatcgtgccgagtctggccggttcgctgcgggccgtcctcgatcaacgcaatctcctggagaagcggatccaggaactgctggacgagcatccgctgtcgcagatcctcacgtccatgccaggcatcggcaccagaactggtgcccgcgtcctgatcgacgtcggcgacgcagccgcgttcccgaccgccgcccacctcgcctcctacgccggcctcgctccagcgacccgcagttccggctcgtctatacgcggcgagcaaccctcccgccgcggcaacaaacagctgaaacgggcgttgttcctgtccgcgttcgcctccctcggtgacccggcctcccggacctactacgacaggaagatcagccagggtaaacgccacacccaggcactgctctgtctggccagacgccgggtcgatgtcctcttcgcgatgctccgcgacggcaccctctaccaatcccgccctgcccaacgcggtcagctcagccgtggcttcgccagcagcaccacacggtcggctgcggggacgaacccgagcaccgggttcgcatagtcaccctcggcggtcatgaccaccggcttgcccagccaccggccgatcgcggccaggaaatcacacagggtgtctaccccagcctggccctgcaactcgcgaaggtcgacatcgaagtcaatctcgtcagtacacatcggacggaagatcaccaacacacccgggaccggccagacccgcagatcgaccgtctccccatcggcgggacgcgacagcacctccaccgcgggcggcagtggcccgacgactccgcccactgaatactcccacgtccatcccctcaacctgaccaggtcgaacaccgcctgccagtcctcgaccgaggcatcctccacagacatatccggcagggcacccatcagatcagggtcgaagaagtcctggacgtcgtcccacagcagatccggcaccccgccatgctgcctaccgacacctcccgcacgcagcctgattccttgacgaaccccatagaggcac

SEQ ID NO: 6409 - DNA, 1400 bp, unidentified
  source 1..1400: mol_type = unassigned DNA; note = element_9ec9a8c
  misc_feature 1: note = core
  misc_feature 2..226: note = LE
  misc_feature 227..1387: note = CDS
  misc_feature 1388..1400: note = RE
  misc_feature 13..241: note = bridgeRNA
ctagttagagactggtgtcaggatcggatcccggccaggatcaggtccaggtgcccggtggggtgctctctcaatgcggctgcccaccgttgtcatgggtgtggctctctaattggcttgcctcccatcgggtgccgtgcagggagtggctcgaaaggggtctgcccccagctcgaactagcggtgccctccctcacggacaccaactgccgacctgggagggatgatgggcgtcatcatcgggatggatccgcacaaacgctcggccacgatcgaagtcatcgactccaccggacgtgtgctcgagactggccgctacagtaccgacactgctggatacgcggaaatgctgactgccggaaggaaattcgacacacgaatctgggcggtcgaaggctgcaacggtgtgggccgccacttggcccaccgcttggtccacgacggggaaaccgtcatcgacgtcccctcgaaactctccgcgcaagtgcgggtgttctccaccggcaacggccgcaaaaccgacccggtcgacgcccactcggtggcattggctgccctgcacgccccgaatctgcgccgcgtcaccgccgacccggaattgctggcgctgggcatgctcgccgaccgccgcgacggactcggccacgcccgcaccgacgccctcaaccgcatccaccggctgctgctcgaactgattccgggcggcgccaagcaatttctgtcggctccgcaggcgcgagaactgatcgcgtctctgcgccccacggacgcggctaccgccgttcagctgcgactggtcaccgagcagatcgaggacctcgaaaccatcgaccgcagaatcaagaccgcggacaaggaactccgtcaactggtcactgcccgcggttccaccttgatgcagttgcatggcatcggaccttccagcgcggcaaggcttttggccgatacgggtgatatccgccgctttcgcaatcgggatcggttcgcttcctggaacggcaccgcgcccttggatgcgtcctccggccagcagcaacggcatcggctttctcgcgccggcaaccgcaagatcaatcgagtgctgcacatcatggccgtcgttcaactacgtcaccgcaccgccggtcgcatctactacgacgcccgcaaggcgggcggcaagacctcgatggaagcgctccgagcgctcaaacgccggttatcgaacgtcgtctacgcccggatgctcgccgaccagcgacgccgcgaatgggcgggcccgggagggcaatcgggaacgactactgcctccagcgcgaccgagcttcaacccgcacccggtccttcggacaagccacaacccggacccaacacacaggctaacccccgaaccccactccgcacttgacctaaaggggagc

SEQ ID NO: 6410 - DNA, 1324 bp, unidentified
  source 1..1324: mol_type = unassigned DNA; note = element_9ec9c36
  misc_feature 1..2: note = core
  misc_feature 3..67: note = LE
  misc_feature 68..919: note = CDS
  misc_feature 920..1324: note = RE
  misc_feature 1090..1323: note = bridgeRNA
ataatgagatggtcactccctcttcctgagcgctatgctaaaaacaggcttaatttggagaatcaccatggaaaacattgctcttattggtattgatctgggtaaaaactcctttcacatccattgtcaggatcagcatggtaaagcgatttatcgaaaaaaattcaccaggcaaaaactgtatgaatttcttgtaacatgcccggcgacaaccatcgtaatggaggcctgtggtgaggttcacttcatggtgcgcaaactgtccgaactgggacatacgccaaagctgatatctccccagtttgttcgtccatttgtcaaaacgaacaaaaatgactttgttgatgcaaaggcgatctgtgaggcggcgtcacgaccatccatgcgatttgttaagccccgcacagagtctcagaaggcaatgcatgctttacaccgggtcagagagccgctggtcagcgacagggtcaaaaccacaaaccagatacaggcatttttactggaatttggtgtcagcgccccaaaaggtccgacgctgataaagcgcttagcagagatcatggagacaaacaatctcccgccttacatgactgggttgctgcaaaaactgcgcgaacattacgattatcttgttggtcaaattaaagatctggaaattcaactgcaaatatcacttgacgaagacgaaactggtcagcatttactctccatcccctgtatcggccctttaaccgcaagcctgctttccacccaactgggagacggaaaacagtacggcagcagccgggattttgcggcctcgacaggtctggttccgcgccagtacagcacaggagggcgactaccctgcagggcatcagtaagcgaggaaataaaaggctgtgggcattgctggttcagtgcgcccgtgtatatctgaggacgctggagcaccggacaggcaagcttgccgactgagtcagaggattattgctgcgaaaaaataattttgtagtgacctgcgccctagcaaacaagctggccagaattgcctgggcactgacaacccggcaacaattttttgaggcgtaattagctaatatatttcaacaatgtgacttatctggttttgcgaatacttattattgatggtatcaacggctaaccggcttgatgaaaagcctgtggttaggaatggcagacagaatgccgcccaaatttataaggttcaacaggcgcggaactcatcggggcgcgggctaaaagcctatgaagacgccggatagattcatgcaagccaaccatattgtcaaaatcggtgttgcaaaaacgggagtgaccatag

SEQ ID NO: 6411 - DNA, 1347 bp, unidentified
  source 1..1347: mol_type = unassigned DNA; note = element_9ed16f8
  misc_feature 1..3: note = core
  misc_feature 4..79: note = LE
  misc_feature 80..1102: note = CDS
  misc_feature 1103..1347: note = RE
  misc_feature 1086..1336: note = bridgeRNA
tgatgatgtggacgcccccgcactgaccgactcggcatggtatgagccggtctccaaagcagaaagaggagcgttcaagatgacgattacaactattggattagatttggcgaagagtgtgtttcaagcgcacggcgttgatgggaccggtgcaacggttctagtcaagaagttgcaccgaaagcagatgctgcccttcttctcgaagttggcaccctgcctgatcggggtggaggcgtgcggaacagcgcattattgggcgcgtacgctcgccgcgatggggcacgaggttcgcctgatcccgccatcatacgtgaaggcctatgtgaagcgcggcaagagcgatgccctcgatgcggaggcgatctgtgaggctgtacagcgcccgacgatgcggtttgtgccggtcaagacggtcgagcaacaagccatccttatgacccatcgcgcccgatccctgctcgtacgccagcgcacgatgctcgccaatgcccttcgcgctcatctggcggagttgggctttgttgcgaaccccgggcttgccaacctcgccaagctggccgagcaagtgatggccgacaaggatgccttgccgtcttatgcccagtcggcgctggagatactgatccgccagatcatgacaatcagcggtgagatttctgccctcgaccagcaactcaaggcctggcataccaagagtgaagccagtcgcaggctcgccgcgattcccggcatcggggtgatcacggccacggcccttgccgccaccgtcaccgatccagaccagttccgctcaggcaggcagttcgccgcatggttgggcctcacaccccggcagcattccacaggcggcaagacgaagctcggcggtatctccaagcaaggagatcgatacctgcgccgattgctcgttgtcggggccacagccgttatgcggcacgtcaaagataagccaacgccgatggcaaactggatcaggaagcttagcgagaagaagcccttccgcctcgtatcggtcgcgctggccaacaaactcgcccggatcgcatgggcagtactgacccggaaggaggcttatcgcccctacgcacatttgacctgaactaacccaggtcacccgaattggtaatggcagtcgatgatgagtaacgatcgagccaatggtgagaccaacccgcctgattcaatgcgcctcaaatgcgcgctagcttgattagggacctcaccggcggatttccatcagggccagcggcagcatcctcgccgcacaaacaggccggacatatgaaagcaaccgatcaaaaaccatcccgacaaaaagcccttgccaaagggggcgtccacata

SEQ ID NO: 6412 - DNA, 1437 bp, unidentified
  source 1..1437: mol_type = unassigned DNA; note = element_9ede413
  misc_feature 1: note = core
  misc_feature 2..226: note = LE
  misc_feature 227..1423: note = CDS
  misc_feature 1424..1437: note = RE
  misc_feature 12..241: note = bridgeRNA
ctactagacgattcacgtagggccggtgtctggccagactcggtctaggtgatcggcggacagctctccatgcggctgcccaccaggttcgtcggtgtggctcactatcggtttgcggcccgccggtcgccgtgacgaggcgtggctcaagaagggactgccctgctcgtagtagcactgcccacctcgccgtccaccacggaacgagtacaggcgggagcagcacatggagcacgtggtcatcggggtggatccccacaagctgtcggcgacgatcgaggtcgtcgaccaacgcgaacaactgctcggctcgggacggttcacgaccgaccgggctggcttcacggcgatgcgcgcgtacgccaaggcatggccggatcggacctgggcggtcgagggcgcgaacggtgtcggacgaccgctggcacagcgactgctcgagtccggggagcaggtggtcgatgtcccggccaagctcgccgcccgggtccgtctgttcgactccggtcacaaccgcaagaccgacgcccacgatgcgcactcgatcgcgatggtcgcggtgcgcaccaagggccttcgggtattgcaggtcgacggcgagctcgaggcgctgcggatgctggtcgagcgccgcgaggccttgacccggcgacgcgtccaaacggtcgaccggctgcaagccctgctggcggaactccttccaggacaagccaaacgcgacctgaccaccggtcaggccaagaccatgctggctaccgtgcgcccgcgtgacatcgccgggaagacccgccgacggatcgcggtcgaggagctggcggaactggtcgcggtcgaggcgaagatgaagaaggccaccgccgagctcaaggcgatcgtgctcgcccgcggctcgcacctgatggacctgcacggcgtcggacccgtcgtcgcagcgcgtgtcctggccgacgtcggcgacgtcgcccggttcgccgaccgcaaccggttcgcgtcctggaccggcaccgcacccctggacgcctcatccggtgagcagaccaggcaccggctctcccgggccggggaccgacgggtcaaccacatgatccacatcgccgcgatcagccagatccgcctcgacaccgatgggcggacctactaccggcgcaagcgagccgatggcaagagacccctggaggcgttgcggtgtctcaaacggcgcatctccgacgccatcttccgacagctgctcgccgacgccgcggccccacaagaacatgtggaggcgggcccgggagggcaccgcggggcgactcaagaatccagcgcggccggttctcacccgcacaccgacacttcggatcagccacatcccggacccgcacccacgacgctacgccgcccgctcacggcgcggaagagacagctcgacccgatcagttgacaacagaagggagc

SEQ ID NO: 6413 - DNA, 1395 bp, unidentified
  source 1..1395: mol_type = unassigned DNA; note = element_9ee2560
  misc_feature 1: note = core
  misc_feature 2..88: note = LE
  misc_feature 89..1129: note = CDS
  misc_feature 1130..1395: note = RE
  misc_feature 1158..1393: note = bridgeRNA
taatggaatggtccgccccactccaaaaacggcttcaaatgagccatgatgtgtagcgaacaaccatcaaaattaagcggggtaagtcatggataatcatgtagcaaaaactgaaattgtagttttaggaatcgacctggcgaagcaaagctttcagctccacggagttgacatcaaaggcaaggaagtaattaaaaagactttaaataggaaaaagctctcgcaattcattgcacagctgccaccttgcaccattggcatagaagcttgtggtggagcaaattactggctacgtatttttgaaagctttgggcataccgtgcatatgattgcaccgcagtttgtaaaaccgtatgttaaatccaataaaagtgatgctgcagatgctgaggcgatttgcgaggctgtacagcgaccttctatgcgctttgttcccgcgaaaagtattgagcaacaggatatgcaaagtctgcataggattcgcagccaagctgtggccagacgaaccgcgcaagcgaaccaaattcgaggcttgcttatggagtacggcataatactcccgcggggtatctcctacgttagaaaatccattcctctaatactcgaggattccggcaatgaactcacagctctgttcagggagctgcttgcagggctataccatgaattggttcatttggatgagcgaatagaaacccttaaaattaaactcgaaacactttgtactcagaatgaagattgtcaacgtcttctcagtattcccggtgtcggcttgctaagcgcaaccgctatggtggctgccataggggatataaaagcatttaaaagtggtcgcgaattagctgcctggctaggtttagtgccaaggcaacactccacgggaggaaaacctacgttacttggtattagtaagcgcggggacacctatctgagaacactgctaatccatggtgggcgaacggtagtgagagtggcagacaagcaccaagatcaacgtaataagtggattactgagcttaataccagacggggtaagaatatttcagccgttgcggtggctaacaaaaatgcacggatagcctgggctctactgaacaataagtctatgtacaaagcacgtgccgcataaataaaaaagcaaagaatttaatcgttattgattatcaacgagttgcgtagataaagttcaagtgatggcaaattaggtaaaacctgcatatcaaaaaatctgaaggggtctagggctctctagaagccgaagacttgatgagacggatatgcgcgaattccatcagggccaggggtatagaccacctcacaaaaaggccggatatatggaagcaaccttcttctatcgctggtaatcttgtcttgcaatacggggcggaccatata

SEQ ID NO: 6414 - DNA, 1405 bp, unidentified
  source 1..1405: mol_type = unassigned DNA; note = element_9eeb9ec
  misc_feature 1..2: note = core
  misc_feature 3..94: note = LE
  misc_feature 95..1111: note = CDS
  misc_feature 1112..1405: note = RE
  misc_feature 1169..1404: note = bridgeRNA
ataatggtatgaacccactccacttcctaacggcctcgtaatgggccaaaatggaattgtatagataccatttaatagaagcggagtggataatatgaagattacaacaattggacttgatatagcaaaatctctttttcattcgtacgaaattaatcatacggggcgactacttaaaaagaagcaattaaaacgaaaacagctactcacttattttgccaaattacagccaagtatagtcgtcatggaagcctgtggaggagctaactattgggcaagagagcttattaaacatggtcatcaggttaaactaattgcgccacaatatgtgaagccttttgtaaaaggtaacaaaaacgactacaacgatgctcaagggatagcagaagcatcacaacgttctagtatgagatttgtccctataaagtcagtagagcagcaagatttacagaattttcatcgtcaacgtgaacgcattaaaaaagagcgtaccgctttagtaaatcaaatacgtggcctcttggctgaatatggagttgtggtcaataaaggcgtaacggctgtaaggaaggggctccctttcattattgaagatgcagaaaatgggttaaccgtactatcgagagaattatttaacgaattacttgatgagctttgcacgatggatgttcttattaaaaattgtgataagaagataaatataacgaataaaagtaatgacgtatgcgttcgtttaggtggggttttaggtattggtgctattacatctagtgcactttatgcggcagctggcgatggaaaagactttgtgaatgggcgtcacttttccgcatggataggtttagttccaaggcaatattcaacaggtggaaagcctacattacttggcataagtaaacgagggaatagctatctgaggacgttattgatacatggcgctagagctgtattaaggcattcagaaaagaagaatgaccgtttcagcctttgggctcaggcactacttaaacgtagaggacaaaataaagcctgtgtagcagtcgccaataagcttgctagaatggcatgggtcataatggctaaaggtgaaacgtatcgtccagtgatataaaaataaatttaatggtattagtgaaaagcactagtgcttattaggtaagtgtaaaaccctttacttcagttgcaaaagataaaagatcggatggtgagataggtcagaccggctcattcaaaacctgctacctgcatcggctcttaataagccgtatggatgatgaggaggatgagcgcaaataaccatcggggccaggaagtgaaatcttccataaacaggccggatatatgagagcaatgattttcctctcacactacgatcaaatatcttgcaaacggggtgggttcatat

SEQ ID NO: 6415 - DNA, 1612 bp, unidentified
  source 1..1612: mol_type = unassigned DNA; note = element_9ef6445
  misc_feature 1..2: note = core
  misc_feature 3..270: note = LE
  misc_feature 271..1494: note = CDS
  misc_feature 1495..1612: note = RE
  misc_feature 26..290: note = bridgeRNA
ctgatacaatataattgaccgaaaaaagtgcggtatttgaattagcacttttcaagttccgttacctaagctataatggaagggtaatacaggtctgaccatactctccttgggcttttacgcccgtcaataagactgtcagccgtccttccattatagcgttcggtttttgcaggttgggcttcgcgtccgtgtaacgaatcagattgaatcggtaatggataaggtcggtcgccttaattactaattcttttcttggaggttacacttatgaatgctgtcggtatcgacgtctcgaaaggcaaatctaccgtagccgtcctgcgcccgttcggagaaatcgttgtttctccgttcgacgtatcgcacagtccaaaggaactttcgaagctcgtcacactccttaaaactttgaacggcgatacgaaggttgttatggaatatacaggtaattactatctcccaatagccctgtttctccgtaacaacggttttttcgtttctgtagtcaatccaattttagtgaaagattacagtacaaaatctttaactgtccgtaaagttaagaccgataaaaaagatgctcttaaaattgcttcttttgctctcgaccgttggaatgagctttcgccgttctccgctcaatccgaagctcgacttttacttaaatcctacaatcgccaatacaatcaatacaacaagctcaaaattatattgaagaataatcttatcgctcttctcgaccaaactttccccggcgcaaatactttgttctctacgccgacaagaaagtccgacggtcatgaaaaatgggtggattttgttctcaaattttctcattcggagtgtatttcgaaaaaatctttctcatttttcctaaaaagttatctctcttggtgtaaaaagttcggctacaaattttccaaaagcaaagctcaagcagtttacgatttcgcgtgtaactgttcgccgtctttatctttttcagacagttcagctttacttgtctcaaatgctataattcaactcaacagtattaacgaaacacttgcgtcgttagcatccgagatgaacaagattgcagccacgcttcccgaatacgactctgttatgtctatgttcggcgtgggatccgttctcggctctcaacttattgccgaaatcggcgacgtttcccgtttcccaaacaaaaaagctctcgtcggttttgccggattagatgcttctccgtttcaatccggaaacttcaatccgcaatctcggtctatttcaaaacgcggttcagcagccttgcgaaaaacgctgttccaagtaatgtccgtcgttttgcaacgagcaccgacgaataacgtaatattccaatttatggacaagaagcgttccgaaggcaaacatttctatgtttatatgaccgctgccgccaacaagtttttaagaatttattatgctcgcgtgacggagcatttgaacctttttacaacaaccaccgcttagccgtttttattcatatttcaagtctgcgtttttacggaggcttttttgtgttaccgttttttgcttggaaaattttttcaatttccttcttcatttctcttgacttttatttgcaggt

SEQ ID NO: 6416 - DNA, 1434 bp, unidentified
  source 1..1434: mol_type = unassigned DNA; note = element_9ef9c8e
  misc_feature 1: note = core
  misc_feature 2..18: note = LE
  misc_feature 19..1143: note = CDS
  misc_feature 1144..1434: note = RE
  misc_feature 1200..1425: note = bridgeRNA
taatgggatggtccggccgtgctcctgccccgccagcgttttatgctggcaaagggcaccaaagacaaggagcacgcgatgtctcaaacactcaaatcagcgattgccgtgatcggcatcgatatcggcaagaactcgttccatgttgtcggtcacgatgagcgcggtgcgattgtgctgcggcagaagtggtcacgtggccaggtggaagcacgctttgccaacctgtcgccatgcctggtcggcatggaagcctgcgtcggcgcgcatcatctcagccgcaagctcaatagccttggccacgatgcccggctgatgccagcgaagtatgttcgtccctattccaagggacagaagaatgactttcgcgatgccgaggcaatcgccgaggcggtgcagcggccgacgatgaagttcgtggcaacgaagaccgccgatcagttggacctgcaggcgctgcaccgggtacgggagcggttggtcagccagcgcaccggcatcatcaatcaaatccgtgccttcctgttggagcgcggcgttgcggtgcgccaggggttacggtttttacgtgccgagctgccgcgcatcctggccacgccaccagatgtcctgtcgcctcgcatgttgcgcattatcgaagatctggccggcgactggcgccggctcgacgagcgggtcgagggtttgtcgaaagagatcgaagccatcgcgcgccaggatgccggttgcgagcggttgatgagcgtgcccggtattgggccgatcatctccagcgcgatggtggccgcgatcggcgcaggggatgtgttcacgaagggccgagactttgccgcctggctggggctcgtgcccaagcagatctcgaccggcgaccgcaccatcctcggcaagatatccaagcggggtaaccgctatctgcgggtcctgttcgtgcaggcggcatgggtggtgctgatcaagccgcagagctgggagcgtcacgggctcaaatcctggattgaagccgccaaaaagcggctgcaccgcaatgtgctggcgatcgcgctcgccaataaactggcccggatcgcctggagcgttcttgcgcatgggcgctccttcgaagcgagcaaactcgccgcggccgtcactcaacccgcctaattgccgggagcattgaaaggacaagcgatgacgtaatcccagaccctttacccgttacccgccgaggtctgcgagaggatgagaagagatggaggatcggtcttcccggcgcatgcgaacactggtgacccaactggcccattgaggtctgtccgataatgagaccgcatgcgcgctgatatccatgatggtccggagcaaaacagctccaatcagagaccggatacattgatgcaagaccgctgacgccagcttgacgaaacctcttgcaacgcacggccggaccataca

SEQ ID NO: 6417 - DNA, 1317 bp, unidentified
  source 1..1317: mol_type = unassigned DNA; note = element_9efe97b
  misc_feature 1..2: note = core
  misc_feature 3..61: note = LE
  misc_feature 62..1066: note = CDS
  misc_feature 1067..1317: note = RE
  misc_feature 1099..1298: note = bridgeRNA
ttatgggatggacgcctccctccgaaccttcagaatgaaaggccaaccaaaggaggaagtcatgacattcgaattgctcgcaatcgatctcggaaagtcgtcgtttcatctgcacagcattgcttcagatggcgctattctgtcgcgcaaggtcagcagatcgaagttggccgagactgttaacgcactcgcaccaaagacgattgctatggaagcgtgcgccagtgcgcatcactggggacggcaattcaaagataatgggcgagaggtcctgcttatcaaccctcgctttgtgaagcccttcgttcgcggctccaaaaacgacgccgtagatgctgcggcaatttatgaagcggcgacccggccgaccatgcgatttgtgccggtcaaatcgatcacacagcaagacgttcagtcgctgcatagagttagagaacgtatgatcatccagcgtacatcgctgatcaatcatgcacgcggtcttctcgccgaatatggcatcgtgttgccgcaaggagcatggcgttttgtatcccaggcacccgcggctgttgagagcgctgatctctccgatctcgggcgcgagctattcctcgaactactcgaccaactcaccgatgtgaatgaccgaattgccaagattgataggaagattagcgagatttgccgcgatcgagaggattgccgtcgtttgtccgaactgccaggcgtcggtccgatcattgcaacggcactcgttgctagcgttgaggacggacgtcactttaaatccgggcgagagctggcggcttggatcgggctggtcccgcgacaatactcgactggcggcaaaccacgccttggcggaattggccgccgagcgaaccattatctacgtcgccagatgattcatggcgcacgtgcagttatcagccgacttgccagtcacgatgatcgtcgatctcaatggctgaaagagctcgtctctcgccggggttataacaaagcgatcgtagcgcttgccaataagaccgcgcggatagcatgggccctgctcacacgacaggagcgaaacgccgcacaatagtcatttgccaatcgttgccgatgaggcaatgatgaatgcggggtaagaactgatggcgtaacggcacggaccgcagcttcggatcctgatttacgacaaggccataaaggtcgatcatgttatgaggacagaggtagcggactcccatcaaggccaggagcgtgatcgctccagcgataggccggatagattcacgcatccaatgccgagttgccgccaaatgttcttctcgcccgggaggcgtccataga

SEQ ID NO: 6418 - DNA, 1419 bp, unidentified
  source 1..1419: mol_type = unassigned DNA; note = element_9f089a5
  misc_feature 1..2: note = core
  misc_feature 3..125: note = LE
  misc_feature 126..1166: note = CDS
  misc_feature 1167..1419: note = RE
  misc_feature 1187..1414: note = bridgeRNA
agatggtgtaacgggcgcgcggaacactgaccggcttgaggttgggtggtcgtccctcagaatgatggtgtccgaagtcaacggcgtcaggttgggcctgcgccaagcatcatcgaggaacgaccatgaagcagtatgccgggatcgacgtgtcgttggaagcctctcacgtctgcgtggtggacgctgaggggaagatcatccgcgagggcaaggtgctgagcgagccggaggccttgatcgcctggttcgccgagcatggggtggcgatggagcggatcgggttggaagctgggccgctgtcgcagtggctgtacgcggccatgagcgagggcggctttgcggtggagctgctggagacccgccatgtgcgcaccgccttcaagaccatgccggtgaagactgacaagaaggacgcccgcggcatcgcccagctgatgcggctgggctggttccggcccgtgcattgcaagtctgttccggcgcaagaggtgcgtgcggtgctgacggcgcgcaagctgttgcagggcaagctgcacgacgtggagatgagcctgcgagggatcctgcggggcttcggactgaaggtaggcgcgaccacgccgaagacctatccagcccggatccgcacgctggtcgagggccatcccgctttggaggtgatcgccaccgcgctgctgaaggcgcgaggggtcctggccgaagagttccgcggctttgagcgtcgggtgcgggccatggcgcgccaggacgagcgcgcgcgccggctgatgaccacacctggagtcggcgtcctggtggcgctgacctttgtggcggcggtggatgatccggaacggttctgctcatcacgagcggttggcccgcacttcggactgacgcccaagaagtatcagtcgggcgagacggactacaccgggcggatctccaaaatcggcgacgctggggtgcgggccgccctctatgaggccgccaacgtcatcctgacgcgacccgtgcggggatcggacctaaaaacctgggccttgggcgtcgccaagcgcgcgggcccgcgcaaggccaaggtcgcgctcgcccgcaagctcgcggtcgtcctgcaccgaatgctgcgcgaccagacctcttttgtcactcacagggccgcgccgtccgtggccgcagcataaaccaggaggagacgacacacttttcgggagggacctcaccgtcacccttccggagcgaagtcccttcgccgggacgatggagcggtcagatcgttacgagcgacgcagcacttgtgactgcgcttaaatgagatcgatcggccgagcctcagcaaacatcatcgagcagagacgtcgatctactgcggacagaagcacgcatccggcgaagcgatggctcgaagaaagggttgacagcgaagcccgttacaga

SEQ ID NO: 6419 - DNA, 1155 bp, unidentified
  source 1..1155: mol_type = unassigned DNA; note = element_9f0b611
  misc_feature 1..2: note = core
  misc_feature 3..195: note = LE
  misc_feature 196..1143: note = CDS
  misc_feature 1144..1155: note = RE
  misc_feature 43..205: note = bridgeRNA
cttgtctgttggacggatgctagggtttggggtcttccgggacacccgcctggtgttagccgcaccaggcgggtttcggcggaggggccgatgacccctgggcgtttgggccgtgggtgagcagggccgccgccgaagtttcatgacccggatggttgcagggacgatgaggtccgaagccacaaggatgggtcgatggaacggcgcgagcgtagcacgaaaatcggcgggatcgacgtaggcaagcggttgctggacgcggcggtgcatggctgcgccgaacagttccaggcggccaacgacgcgggcggctgggaggagctggccgtctggctgaaggagcgaggcatgggacgcgtcgggctggaggcgacggccggctatgagcgcggggtgcgggctaggctggaggcggcgggcctggaggtggtggtgcaccagccgctggaggtgcggctgttcgcgcggctcaagcggcggcgggccaagaccgatcgactggacgcggcgctgatcgcggcggcgacggcgcaggtggacacggtgcgggcggcgcaggatccgcgcctggccgaactggccgagcgcatgacggcctacgagcagatcaccgaccagaccgcccagctcagaaccttcatggagcacgtgaccctgcccgacctgatcgccagcctcggcgagcagatcgaaagcctgtcgcggctgaagacgcggctggcgctcgagatcttcaccaggatcaaggccttcgaagatctcgctgctcgctggcgactgctgcagtcgttgccgggcgcggggccgatcgtggccgccagcctcgtcatccgcatgccagaactgggcgccctcaagcgcggccagccggccgccctgctcggcgtggcccctttcgatcgacaatcgggacagtggcgcggcaacagcgtcatcggcggcggccgaagccgcccccgtcggatgctctatctcgccgccatcgccgccaagcgcttcgaccctggcttcaaggccttcgccaaccgcctcctggccaaaggcaaaccacccaagctcgccatcgtcgccgtcatgcgaaagctcatcgaggctgcaaaccttgtcctcgcaagacagcagccctgggtgcgccaagcctgatcaacatggttg

SEQ ID NO: 6420 - DNA, 1420 bp, unidentified
  source 1..1420: mol_type = unassigned DNA; note = element_9f0cf3e
  misc_feature 1..2: note = core
  misc_feature 3..116: note = LE
  misc_feature 117..1157: note = CDS
  misc_feature 1158..1420: note = RE
  misc_feature 1177..1368: note = bridgeRNA
agatggggtaatcggctttgagccccactttcaacgaaggaggaggtgctgcgctcgagctgatggtaaaagtggttggaactaccaaccctaagcatcaggaaaggaagagcaggatgaaatattatgccggcctagatgtatccgtaaaggaaacctctgtttgcatcgttgatgacagcgggagaattatgcgagagcgaaaagtagtaagtcatccagaggatctcgtcacatatctcaatgatgcacagttgcatttcgagcgcgttgggctcgaagccggaccactgtcccagtggctatatgagggtctggccaaagccggtcttcccgtgatctgcatcgaaacacgccacacgaatgcctttctgaaagctcatccaaacaaaactgaccgaaacgacgctcgtggcatcgctcaaatgatgcgtgtaaatctcttcagacctgtacacgtaaagacgctcacaagccagaaacgtcgcgcgctgctgacggcacgcaagctgctccaagaaaaatccatagcgatcgagaacgatattcgtgggctgctgagaaactttgggctgaaggtcggcctgattggaacagtgaagtacgaagagcgtatccgcgagcttgtgtcaggttttgaggatttgatcgatattgtcgaaccgctgctcgtggcgcgacgaaagttgcgggaagaatattcaaaattggatcgcaaagttcagcttgaagccaaggccgatccggtgtgccaacgattgatgacagtaccaggcgtcggcccaatcgtttcgctggcatatgcagcgaccatcgatattcccgcacgcttccgaacatcccgatctgttggcgccgtcctcggtttaacgccgactcttattcaatcgggagaaagcaatcgtataggccgcatctctctttgcggcgacggcatgctgcgaagcctgttgtttgaggcggcgcagaccttgctgacaagggtcgcgaaatggtcctggctcaaggcttgggcgatgagcatcgccaaacgaagaggagcccgaaaggctatggtggcgctggcgcggaggctcgctgttatcctccatcggatgtggagtgacggaactgagttccgttggacaagggaaacttcgacggtagcggccgcataagtccaacgtaaccagttacaaagttccgcttcgtggcggaagacgtccttcgcggacgatggatgatgtgagttcgcgcgatcccttactccgatgctcgttatcaggatgcgggtcagattgtaccatatcgttctactggaccccatgatgggacgacttgaatgtcgatcccggagagaagcgcgggccgcgaaacgacgtcgaaatgccatgccagcgaaaagctcgattgcgcttgacctcaccacgccgattagaga

SEQ ID NO: 6421 - DNA, 1347 bp, unidentified
  source 1..1347: mol_type = unassigned DNA; note = element_9f10d06
  misc_feature 1..2: note = core
  misc_feature 3..74: note = LE
  misc_feature 75..1097: note = CDS
  misc_feature 1098..1347: note = RE
  misc_feature 1128..1345: note = bridgeRNA
ataatgaaatggtcagcccgatcgcccgatgcatcgcctaggctggaggcgttacttctcggagggagactgccatgagtgaagtcgcgttgatcggcattgatctcggcaaacatgtctttcacttgcatgcccaggatcgcggtgggcatgaactctggcgcaagaaggtgacgcgcaagcagttgctccttttgatgagcaactttccgccctgcacgctggtcatggaggcctgcgcaggctcccattgccttgcgcgagagctgcaggcactcggtcacgacgccaagctaatcgcgccacagtatgtcaagccgtttgtgaagggcaacaagaacgatttcgtggacgcggaggctatttgcgaggcggcttcccgacccgccatgcattacgttacgcccaagacagaagcccagcaaacgctggccgcgctgcatcgcgtcagggaaggattggtgcgagaacgcacggcaaccgtcaatcgcattcacggcattctccttgagtttggcatcagcttacgcgtcggcatgcgtgtcattgagcggctgcccgtcacgttggccgagcacacgctgcctcccaggctcgtgcaggtgctagaccgcttgcacgcccatttcaagtaccttgacgaccaggtcaagcaagtggagtctgaactctcgcagcaactcaaggaagacgacaacgctcagcgtctgttagccatcccgggcatcggagccatcaccgccagcttgctggccgcagagcttggtgatgccaagcattttcgctccggtcgagatttctccgcatcgatcgggctggtaccaaggcagtacagcaccggtggacgaccgattctgcttggcatcagcaagcggggcgacaagacgatgcggtgtctgctgattcaatgcgcccgagccgtgatgacgcgccttcaccgacgcaccgatgcgctcggagactggattcggaagatgctcgtacggcgccattcaaacgtggtcgcgtgtgccttggccaataagcttgcaaggatagcgtgggcgttgttgtaccgccgcagtgattaccgaattcaggtggccgcgaccacctgaaggttggccgaccgcgctggttttttgttagttctggttttgcgacgttgactttgatgacctaacggcccagtggcccggtggacaccctgacaaattggttagctgccaacaagctgcggacattttaaggaccactgggcgcgactttcatcgtggagcggggagcaatctccaagcagactccggatagatttaggcaagccacagatcatcgacctcaaccttgcaaagatcgggctgaccatag

SEQ ID NO: 6422 - DNA, 1166 bp, unidentified
  source 1..1166: mol_type = unassigned DNA; note = element_9f134d4
  misc_feature 1..2: note = core
  misc_feature 3..161: note = LE
  misc_feature 162..1160: note = CDS
  misc_feature 1161..1166: note = RE
cttgtaatagcaaaatcgattatcgttggcatgttccgaaaggaatgctctgccgcggacggccatccgcggcagagcggctggcgatcggatcgaacccatcctgagtcatttctgactctttcgtagcgtgatcgcgtcagcgccttcatcggacccggatggttgccggaacacatggttcgctcaacaaggcggggtcgaggaagatgacgcagattagcagaacggcgggaatagatacatcgaaagccaggctcgatatcgcgatctatggcggctcggaacactggcaggtcgtcaacacgatagttggttggcggcggctggccgcggaatttgccagcgccgatgtgaggcgtgtcggcatcgaagccagcggggggtacgaatgcgatgtggtcggctacttgcgcgaacggggctttaccgttctggttctgcagccgatccaggtcaaagcctatgctcggctgcatctgcgccgcgccaagaacgataagctcgatgcggttctcatcgccgcctgtgcggcgacgatcgaccggccgcgcatcgagccggaccaacgcctggcgaagctggctcaccatctgaccttcgtcgagcagatcgaagaggacatcgcccgccataaggttcggctcgagcatgtcggggatccgcggctgcggcgcgtcgtcctcgccgacatcgcgcgactgaaagcgcgacgcgcgagcgaactgctgcggatcatcactgcgttgcgcgcccatgacgacctcgcccgtcgcctcgatctcgtactcagcgttcccggcatcggcgagcgcaccgcagtcgcgctcatcattcgcatgcccgaactcggccgcatcagtcgtgagcaggccgcagcactggccggcttggcgccctacgacgacgacagcggaaaacgccacggtcagcgacacatcgcaggcggccgtggccggttgcgccgctcgttgttcgctgcagctctgccggcagccttccgttggaataaggcattgatcgaactttatcggcgtctcgtaacacgcggaaaggcccacaatgccgctctcatcgcctgcgcccgaaaactcctcatctacgccaacaccgtcgtacagcgcggaacgccctggaccgaacgactagtcggcatttaatggttg

SEQ ID NO: 6423 - DNA, 1381 bp, unidentified
  source 1..1381: mol_type = unassigned DNA; note = element_9f28cc1
  misc_feature 1..3: note = core
  misc_feature 4..87: note = LE
  misc_feature 88..1116: note = CDS
  misc_feature 1117..1381: note = RE
  misc_feature 1119..1367: note = bridgeRNA
tgatggtgtggacgaccgccacccaccggcatcaaggtgccataaagtggtcgtgattgaagcgccacattcgggagggccgtccacatggcgattgttaccattggtcttgatcttgccaagcttgttttccaggttcatggggtcgatgaagctgggcaagtagttgttcgccgccaactccgacgcgccgaagtcgaggggttcttccagaagctgcctccctgtctggttggcatggaggcttgcggatcggcgcattattgggcgcgccggatttcggcgttcggacacgaggtgcggctgattgcgccgatccgggtcaaggcttatgtgcagcgaggcaagaagaatgacgccaatgatgctgcggccatcgccgaggtgatcacgcgcccgcacatgacgttcgttccagccaaaagcacggagcaacaaggcgtgttgatgttgcaccggacccgtgacctgatggtgcgtcagcggacaatgctgataaacgccctacgcggccatctggcggagttcggtatcgtggcggcacagggcgtgcgaagaatcaatgaactgatcgacggtcttggtaacgcagcgatcccggagctggcacgcatcgccctgcggcagatcgccgtacagatcgacgcctgcagccaaagcgtggaagtgctggaagggcagatcgtcgcctggcacaagaccaacgaggccagccgaaatctcgctaccattcccggcatcggcccgatcaccgcttcggcgctggctgtctcggtccctgatccctctcttttcaattgcgggcgaaaattggcagcgtggttggggctggtgccccgccaaaactcgaccggcggcaaggacagattgggacgcatcaccaagaccggcgatagctatctccgccgcctcctggtgatcggtgctaccagcgtcatccgttacgcccgagataaagcgccaggcaaaggggagtggctgaagacgctgctcgatcgcaaatcgccgcgtctggcctcggttgcactagccaacaagatggctcgcatcgcttggtctgtgctcaccaggggcgaggtttaccgagaaacatatcccgttccaaatgcggcctgacccaagaagggctcggcaaggaaaaggatatgtaacgcgcaggggtgaatgtgacgtgatggcaacccggtcaagccggggattgggaagacccgcatagattcatgtgcacaaaatgtgcgtttgtctgattgggacctgatccgcggatttcatcatggcccgcggtcatgcgtaccgcatctttagaggccggacacatgaccgcacctgactttgttgttgttcgtcaatttttccttgcgcccaggcggtcgtccacaca

SEQ ID NO: 6424 - DNA, 1544 bp, unidentified
  source 1..1544: mol_type = unassigned DNA; note = element_9f295db
  misc_feature 1..2: note = core
  misc_feature 3..106: note = LE
  misc_feature 107..1222: note = CDS
  misc_feature 1223..1544: note = RE
  misc_feature 1240..1507: note = bridgeRNA
agaccacatgtccgtctgaggctggtgtgacccgcctcacaatatgcaggaaacgagggttgcgtcgaagaggtcggcgcagagcctcatgcataggagacgggtcatgggcgatggtatcagatttgtgggtctggatgtgcacaagcggcagacggtagtggcgcttgccgatagcggccgcgagggtgaggtgcgccactacggagctgttgagaccgatcgttcgagcatcgagaagctggctcggaagctggcccgtggcggcaagccactgcggttctgctacgaggcgggtccgtgtggctacggcatccagcgctggttgacggggctcgggcatgactgcgaggtcgtggcgccctcgctgatcccatgccggccgggtgagcgagtacgcaccgaccggcgcgatgccatcaagcttgcccgattgcatcgggcgggcgaactcaccgcggtctgggtgccggagcctgcacacgaggcgatgcgcgatttggttcgggcgcgcgcggtggcggtatacgcagtgcgccgcgcccgccagcaattgtccggtttcctgctgcggcatgatcgtatttacagccgcaaggcctggacgggggcgcatcggcgctggctggccgagctgaagttcgagcatgcggcacagcggatcgtgttggaagattacatcaatgcggtcggcgcggcagagcagcgacgcgacggcttgaccgagcaaattcgggaactgctgccgagctggtcgctggcgccgatcgtggaggctgtgcaggcgctgcgcggcgtggcggcgatcgtcgccatcatcatcgtcgccgaactcggagatccgcgccgcttcgacagtcctcggcagttgatggcttatctcgggctggtgccgtctgaagcctcgagcggcgagaaggtgtatcgcggcggcatcaccaaggccggcaaccgcaccgccaggcgggcgctcatcgaggcggcctggacttatcgctttccggcacggcgatcgaagcatttgctggcgcgctgcgagacggtcccgccggcgatccaggcgatcgcctggaaggcccagctgcgcttgagcgcccgatatcgcaagctcgtcgcccgcggcaagctgcccacggtggcagtcactgccgtcgcccgcgaactcgttggcttcatctgggccatcgcccgcgagctgccggcgatcccggcgcgagcctgacccgatcgtcagctcgccaacacgaaaggaggcactcggccaaacaggcaaccaaagcgcccgcgcgtgaggcgggaggcacggccaaggtcaggagaaccctcggcggtactatgagccgggcaaccgcccgatgctcgccgctagaccgaggcagctccacgacgaaccaatggccctgcggtcccgacacgcgcatcagagctggatccaccgtcgtttcgcggccgtgtctcctgccatgcgcgcggcgatcattcacttgtgcttgttcgcaagccacagaaaaatcttgcctgcatcttgaaacgacggacatgag

SEQ ID NO: 6425 - DNA, 1502 bp, unidentified
  source 1..1502: mol_type = unassigned DNA; note = element_9f2ac06
  misc_feature 1..2: note = core
  misc_feature 3..243: note = LE
  misc_feature 244..1482: note = CDS
  misc_feature 1483..1502: note = RE
  misc_feature 15..243: note = bridgeRNA
ctaataagtcttgtcgggtccgccgtacggcagacttggcgggtagtggccgccggcaggtgagcactcttttctcccgggcttcgagccctgaagacagatcgtgcccctgccggcagctgggagagttgatcgctgctgggatgtcgtgcccgccgctggcgtgagcactgttcttattaggtcgccgatagttcttccactggctgctggcatgtttcgacaacgttgacgggagctggagtgcggctgttcgcaggtgatgactgggccgaggaccatcacgacgtcgaggtgatgaacgaggcgggcaaggtgctggccaggaagcggctgcccgagggcgcggccgggatggcgcagttccacggcctggtcgggcagttcctgcccgacgacgacccggacggcgcggaagtcgtgatcgggatcgagaccgaccgcggcccgtgggtcgcggcgctgatcgccgccggctacacggtgttcccggtgaacccgctgcaggcgtcgcggtaccgcgagcggcaccacgtgtccggcgccaagagcgacgccggcgacgcgcacatgctcgccgacatggtccgcaccgactcccaccagctgcgggccgcggccggcgactcgccggaggcagcgggcatcaaggtgctggcccgcacccacaagacgatgatctgggaccggacccggcaggtgcagcggctgcggcaccagctgcgggagtacttccccgccgcgctggaggcctacgacgacctcgacgcgcccgacacgctggagctgctgggcaaggccccggacccggcccgggcggcgaagctgaccagggcgcaggtcagcgcggcgctcaagcgcgcccggcgccggaacatcccggacaaggccaccgcgatcctggccgcgctgcgcagcgagcagctcggccagcccgaaccgctcacggccgcctacgcggccacggtccggtcgctgatcgcgctgatcgcagtgctgaacgagcaggtcaaggcgttgcaggggcaggtggaggagcattttggccgtcacccggacgctgaggtctacctgtcccagcccgggatgggcaagatcctcggcgcccgggtcctcggcgagttcggcgacgaccccgcccgctaccgcgacgggaaagcacggcggaactacgccgcgaccagcccgatcacccgcgcgtcgggcaagaagaaggtcgtcgcggcccggttcgtccacaacgaccggctcgtcgacgcgctcaacgcccaggcgttcgccgcgctgaacgcctcgcccggcgcccgtgccttctacgacgagctccgcgcccgcgaaatcgaacacagtgacgcactccggcggctcgcgaaccggctcgtcggcatcctgcacggatgcctcaagaccagaaccctctacgacgaggcagccgcctggggacacaggcaaagtacccctcaatcttcggctgcggcttgacatttaagctcctgggatgt

SEQ ID NO: 6426 - DNA, 1501 bp, unidentified
  source 1..1501: mol_type = unassigned DNA; note = element_9f301da
  misc_feature 1..2: note = core
  misc_feature 3..374: note = LE
  misc_feature 375..1481: note = CDS
  misc_feature 1482..1501: note = RE
  misc_feature 14..245: note = bridgeRNA
ctaatgggttctgggagtgagccatccggcagactcctggtgggtaggtagccgccagttggtgagcactggccgttcctggacgttgagtcctggtgaaagatcgtgccctggctggtcggtgtggagagttgatcgctgatgggatgtcgtgcccgcccggttgcggcgtgagcactgcttctttaggtcgctgatggttctcctcctggctaccgaaggtgatcggttcgataggcgggagacgtgttgctgttcgtgggagatgactgggcggaggaccaccacgacgttgaggtgatggacgcctccggccgccggctggccaggcccggctgcccgagggcgtcgcgggtatcacgcggctgcacgcgatgatcggccagtgcctcggtgacgacgtcgacgtcgacgatgtcgccgcccgggtgaagatcggcatcgagactgatcgggggccgtgggtgcaggcgttggtcgccgccgggtacacggtgcacgcggtcaacccgttgcaggcggcccgctatcggcaacgcctcgcgctgtccggggccaagagcgacgccgcggacgcgcacatgctggccgacatggtgcgaaccgactcgcaccagctgcggccgatcgccggcgactcggccgaggccgaagcggtcaaggtcgtcacccggatgcacaagacgctgatctgggaacgcacccgcgccgttcagcggctgcggcacgcgctgcgggagtacttccccgccgctctcgcagcgttcgaggacctcgacgccgccgacaccctggaactgctcgcgaaggccccggacccggccgccgccgccaggctgagcatcagccagatcagcgcggctctcaaacgggcccgccgccgtaacaccgcggccaaggccacggcgatccaggccgtgctgcgtgccgagcacctcggccagtccaccgtggtcaccgccgcctacgccgcgtcggtccgcgccctggtcgcgctgctcgtcaccctcaacgagcaggtcaaggccctgcaagggcaggtggaggcccattttggccggcacccggacgctgagatcatcctgtcccagcccggactgggtgccgtcctcggcgcccgggtgctcgccgagttcggcgacgaccacaaccgctacacctcggccaaggcccgcaagaactacgccgcgaccagcccgatcacccgcgcatccgggaagaagaagaccgtcgccgcccggttcgtgcacaacgaccggctcatcgacgcgctcatgacccaggcgttcaccgcgctgaccgcctcgcccggcgcccgcgcctactacgaccggcaacgcgcccgcggcgccacctacaacgccgccctgcggcaactcgccaaccggctcgtcggcatcctgcacggatgcctcaaaaccggcacccgctacgacgaggcgaccgcctggtcccaccacctcaacaaggctgctgcttgacattcaagcccctgggatgt

SEQ ID NO: 6427 - DNA, 1717 bp, unidentified
  source 1..1717: mol_type = unassigned DNA; note = element_9f39cd1
  misc_feature 1..2: note = core
  misc_feature 3..354: note = LE
  misc_feature 355..1575: note = CDS
  misc_feature 1576..1717: note = RE
  misc_feature 55..329: note = bridgeRNA
ctcgtataataagtttcagagactgttttaagtgcactctgtatacactccataaagtttttcagcaggctttgagatgcccgtggtaaaatgctgttggtcggcagggtcaagttctggttgctccagttgagccgtaaggctgcttcattgaaagtccgttcccctgagccggaagttagcttcatactcattggctgtttgccgaacgtaaggtcgcccttttagcagtgagggccttcgcatcgaccttcttcggagcaattctcatacgcgaggttgctgatgctccggttatcacgggtatctcaaagcctgctgactgaaaatccagctcagaagggtggtgaaataatgaatcagctctatgttggtattgacgtaggcagcaaaaacaatgtagcatatataatgcttccgaatggggatatgcacagccggtttcctattgaaaataaccttggcggttacagaagcaccgctaagaggatcgtatccgccttagagtcacagtctcttaccgctgtccaaatcggtatggaggctacttccgtttacggtgagcacttcgttcactctttccgggaggatggcgctctcggccgctttgatcggacaatccacgtcctcaagcccaaacaggttcggaagttcaaggaagcctacaacgatttgccgaagaatgattacgtcgacgcctttgtcatagcggactgtctccgtttcggcagaatcagaaatgaggtctacatggacgactaccgctatgaagctttgaaaaaccttacccgagccagattttacgctgtacagaaccttgccagagagaaacagaggtttggaaatctgctgttcaagaaatgcagcggtcttgctcaaagcgcagacatcaagaacacagcgtcctctacctttgcgcttatggagcattttgagaccgtggacgagctggcaaactgttcattggaagagttatcctctttcttacatactgcgagccggggtcgctttgcggactccgacgaaaccgctaagattatccaagctgccgcgcgaggctccttccgcttgcctaagacgctcaatgattccgtcaatcaggcaatgagtgtctccattgcctcgatacgtgccattgagaagcaagtcaaggatctggagaaggctatcgatcaaatgttcgagatcattcccaatactttgacctctatccccggtatcggcaaggtttactccgccggtattatcgccgagctcggcgacataaaccgcttcaagtcccaggcatctgtagccaaatatgccggccttgtctggtctcagaaccaatctgccgagttcgaggcagaggatacccacctcatcaaatccggcaaccgcttccttcgctattacctgctggaagctgctaactccgtgagaggatgcgaccccgagcttcagcgctactatgacctcaagttcaaagaggtcaacaagcaccagcacaaacgtgctctcgcgttaactgccagaaaactggttaggttggtccttcgactgctgaaagacaaccgcctgtataacgcccgctgagctgactgactcatgcggttttagaccctgtttcaaaaattttcaggggcagggtctggttaggtgtacccaaaattccgccttttcctctcaatttccccctttttctttataaactttctcttgacttagcaccattgga

SEQ ID NO: 6428 - DNA, 1383 bp, unidentified
  source 1..1383: mol_type = unassigned DNA; note = element_9f40186
  misc_feature 1..2: note = core
  misc_feature 3..81: note = LE
  misc_feature 82..1107: note = CDS
  misc_feature 1108..1383: note = RE
  misc_feature 1151..1370: note = bridgeRNA
tgatgtggtggacggcgcccgctcccggcatcgaagtgccatagggtggctcgtcggagacgaatcacaggagccgtccacatgcaaattaccacggttggtttggatatcgccaagaacgtgttccaggttcacggcattgacggggccgagaaggtcatcgtcagaaagcagcttcgccgcggccaggttatggcgtttttcgaagctctggcgccatgcgtcgtcggcatggaggcctgtgccacgtcgcaccattgggcgcgtgagttgacgaagctgggccacgaggtccgcctgatgccggcgaaggatgtgaaggcctacgtcaagcgcaataagaacgatgccgccgacgcggaggcaatctgtgaggcggtgcggcgtccgaccatgcgtttcgtgaggattaagactgccgaacagcaggggcagttgatgcagcatcgtacgcgggatctgctgatgcgccagcgaactcagttgatcaacgcattacgggcgcatttggccgagctcggcattacagcggtgcagggacgcgaggggatcaaagagttgttggcgatcgtcacacaggatgatggttcgcgcttgccggttgatgctggtgcgagcctgatggttctggcgacacagcttcagactgtccagacgctgatcgggtcgatcgagaagcggatcgttgcacagcatcgctcgaacgaggccagtaagcggctcgagaccatccccggtatcggcgtcgtaggcgcgaccaccatcacggccgtcatgaccgacccgaaggcgttccggtcgggtcgtgattttgcggcttggatcgggatcgtgccacggcaagattcaaccggtggcaaaccgaagctgaggccgatctcgaaacagggcgaccaatatctcaggcgcattcttatcgtcggagcccattcggtcttgcggcgcgcgcgccagcagccggagaagtatccctggctcactcagcttctggcccggcgaccgttcaaggtcgtcgcggtcgcacttgccaacaagatggcgcgggtcgcctgggcgttgttggccaagggcgggacctaccgggcgccccaactcgtggcggtctaaaagggctcggcaatgggaggatgaggttgcgtccgtgcgttcacgaactgcaggggtgatgacgacattgatgcgaaacggtcgagaccgtcgattgggaaaacccgtaaagtgccacgcgaggaaagaacgcgtgcttttggttgggacccgatcagcggatcacatcagggccagcggccaaagcggctgcattcataggccggatacatggctgcacccgaacgcttcgccgaattgtcagattcctcttgcaccgcgggcgccgtccataca

SEQ ID NO: 6429 - DNA, 1428 bp, unidentified
  source 1..1428: mol_type = unassigned DNA; note = element_9f44f32
  misc_feature 1..3: note = core
  misc_feature 4..137: note = LE
  misc_feature 138..1175: note = CDS
  misc_feature 1176..1428: note = RE
  misc_feature 1187..1424: note = bridgeRNA
agatggtatggacgcctccccccggcaacgggtcgtggaacagcggggcggataagcgccggtggatcctcgctgccacggcatcgatgtgccaaagtggagatgggtatgtcaccacttgagcaggaggatccgaaatgaagcatagcgtaatcggtatggatatcgccaagcgtgtctttcaactgcacagcgtcgatccgacgaccggcgagatcgagcgcattaagctgcgtcgcgatgaagtgctgccgttctttgcccagcgcagtgcctcgctggtggcgatcgaagcgtgcggcagtgcccactggtgggcgcgagagctgcgccgcctgggccatgaggtcaaactgctggcacccaagtcggtgcgtccgttcgtgcgctccaacaagaccgatgcagccgatgcgcgggcgatctggacggcggtccagcaaccggaagcgcgactggtcgcggtaaaaagcgagcagcagcaagcgattcttgctctgcaccgtctgcgcgcgcagttgatgaagtttcgtatcatgcagaccaacgccttgcgcggactgctctacgagttcggggaagtgctgcccgagggctacagcgcattggccaaagcgttgcccgcggcgctggccagcgtagctgagcggctgcccgcgatgctgatcgacagcctgcgcgagcagtgggcccgggtacagatgatcaatactgagattacaaccattgaacggcgcctggccagcgccctgcgggcaagcgaaccgtgccgtcagatcgccgccattccgggcgtggggctgctcacggccacggccgcggtggctgcccttggcgagcccaacagcttcgcctcgggtcgcgagttcgccgcctggctgggcttggtgccacgacagagcggcaccggtggacgcatacgccaactgggcttgagcaaacgcggtgacagctatctgcgcaccttgcttatccacggggcacgctctgtcatggttcgtggcaaacattccccgtgggtcgcggcgctgctcaagcggcgaccctacagcgtagcggtggcggcactggccaacaagctggcgcgcacgatctgggccgtcctggccaggggccggccttacgatgtgacggtgttcgacgtaagcgttgagcccgccatgcacatagcatgaacaggtaagcgaaacttctccaaggagcgcaggcgattcacgcatgatggcgacacaggtaggaccgggacgaggacaacctgatagggaaggtgaaccttcgagttcgatattcagatgaggacctcgtcagcaaattccatcagggccagcaggcttacgccgcctgcactaacaggccggatataagactgctaccttactctgctagccaacatgccaaatcgtttgatctccgggaggcgtccatata

SEQ ID NO: 6430 - DNA, 1713 bp, unidentified
  source 1..1713: mol_type = unassigned DNA; note = element_9f4f370
  misc_feature 1..2: note = core
  misc_feature 3..340: note = LE
  misc_feature 341..1573: note = CDS
  misc_feature 1574..1713: note = RE
  misc_feature 44..316: note = bridgeRNA
ctcgtaatatatgttttgttactaagtttttacatttatacaactccatcaatcggtttggttatgctcatgatattattgaccttgagtcaatcaggtaatagttctttcactccttgttgagccttaatggttacttcataaatagtcagttcccctggcacggaagttaacttcaaacccactagctgtttgttagagttcatggtttcccattggcagttgggtcgcaacaaatcatctctaactgaattcttttatgcgaggttgttgatgctccgcgatcatgggcattaccaaaccgattgattcaccaatacactgaagggaggtgaacatcatgaacacactttacgttggtattgatgtaagcagtaaaaataatgttatttatctcatgaagccagatggctccaaacatagcaactttaaagttgccaactctttgaatggttcaaaagagcttgttaaaagaatcatatctgctttaaattctcttgaattaacatcgctatctattggtttagaagcgacatcagtatacggtgataacctcgtgtactttctcagagaagatggttctattgccacttacgacaagcagatacatgttttaaatcccaagcaggtgaagaagtttaaagactcctataacgacctgcctaagaatgactatattgattcttttgtcattgccgattgcctgcgttttggaagaatcaacaaagaagcttatctggatgattataggtacaaagctttacaaaaccttactcgtgccagatacttcgctgtccaaaacctgaccaaggaaaaacagcgatttctcaactatctgtttatgaagtattcttctatgacgcaggaaaaagttttttcgcgcaaatatggcacaactgcttttgctgtctacgaagaattcgaatccgcagaacagttagcagaaatggacttacatgatctaactgaattcatcaaggagaaaggaaaaaatcgtttctctgaccctgatgcagttgccaaagccattcagaaagcagctcggggatcgtatcgtcttcctaagacaataaacgattctgttaatcaagtgctttctatatccataagctctatgagagcattggaagctcaaataaaagagtttgataaagcaattgaagaacaagtaaaactgattccaaatacattgcaatccattcctggaattggaccagtttactctgctggcatcattgctgaagtcggtgatataaatcgttttaaaaatcaggcttctatggctaaatatgctggtttagcctggagtcaataccagtccggagattttgaagccgaacacactcatcttatccagtctggaaacagattcttaaaatactacctgtgtgaaggagcttggtctcacgtgtgttgcgacacagaatacaagcgcttctatgacatcaaatacaaagaagtcaacaggaaccagcacaaacgcgcactcgcacttactgcccgtaaatttgctagattggtctacagtatgctgaagactaatcagctatacaaagctcctgtttcaaagtagtaaatactactttaggagttaacgccctgtttttttgaaacagtacggcagggcttaggcggtcgttctttcttttttgaaaaataaccaaaacgaaagggacttttcaagattcttcatcttgacatatcaccgctaga

SEQ ID NO: 6431 - DNA, 1309 bp, unidentified
  source 1..1309: mol_type = unassigned DNA; note = element_9f57b39
  misc_feature 1..2: note = core
  misc_feature 3..219: note = LE
  misc_feature 220..1185: note = CDS
  misc_feature 1186..1309: note = RE
  misc_feature 35..198: note = bridgeRNA
attgtatattaattaaacgttgtacttttgtataaattttcaacatcaaagtgtggaataagaccgatgtaagcttaatcgttaagattgtattggatgttcagcccccacacttttacatcagaatccggatagttcattgggcagttagaccccgcatttgcaatgatggctcaagatgtatagatgttgcgttgttaattataaaaacattagcttatgacctacgttggaattgatgtaagcaagttgacatttgttgttgcttattcgtctgcaaagactagtaaaaccaaaacctttaagaatacagctaaaggtattcgtgagtttataaaaacaatttcagttgatgaacatcattgtgttatggaagcaacaggcaattacagtacattgcttgtatatatgctttccgagtttggttttacagtaagcctggagaaccctttgaagataaaaaatttctccagagtaatgctttcagtcataaagtctgacgagattgatgcacgtcttatagcactatacggtgagaagatgcaaccatctccatacagaatgcgcagcgattcaattttaattctcaaacaaaaacgtactgtcctacgccagctaaagaagcagctagtagcaacaagcaacctgaaaggttctatggaggttcttccaatttatgattctaaatgcaagaaaacaatagagaaaaccattgcttttctggaaaaacagatcaaatatatggaagaagaacttgcttcattggctaatgatgaattcaagagacaaatggatttactcacatccataaaaggtatcggtgtaacactagctgcggctttaattgtggcaactgctggctttacatactttgataatgcaaaacaacttacgcgttatcttggcttatcaccaacatatcaacagtcaggtacatctgtcaactttaaaggccacataaacagaaatggcgatccaattcttcgaagtcaactgtatgtggcagcattctcatcacttaggtgcaatacagaatgtaaagcatgttttgaccgtctacggtctaaaggtaaacctggtaaagtagctgttgttgctgtcgccaataaattggtaagacaggcctttgcagttgttacacaagataagccatacgtggatggatttatatcagtaaaaccataatctctcctgcggagggagcgccatgcggcaagggactgagcagtcaggcccgacgagcttccattatatatatgcataaacatacttataattgttaaatatattcaagtttttattatagttc

SEQ ID NO: 6432 - DNA, 1226 bp, unidentified
  source 1..1226: mol_type = unassigned DNA; note = element_9f66169
  misc_feature 1..2: note = core
  misc_feature 3..239: note = LE
  misc_feature 240..1211: note = CDS
  misc_feature 1212..1226: note = RE
  misc_feature 6..212: note = bridgeRNA
cttgtatctcgactatcgctccgacagaagcgatagttctcgactgatcatcgagggagggacttggaagccgtacagctccttaggctttttgcctgtgatgtagatagtgctccagccctccacactcactcgtatagttcgaacggtatcttgggcccgtccctggcgagagcccgcattcgcaaggttggacagagtgcagtgatgatcggaaacggatcaacggagagacggtcatgtccaatttcgtcggtgtcgacgtcgctaaaaacacttttgatatcgccactcatctgccaaacggcaagcacaaaaccaaagccaaactggctaacaactcgaaaggcttcaaggagtttgaagcttggctgaacaagcatgccgagcctgcagcccggatcgtgatggaagctaccagcgtttatcatcttgaacttgccgagttcgtctacaacaagggttaccgggtctgcgtagtaaatccggcaacaacccacgcttacgccgacagcgagttacgtcggatcaaaaccgataaaagcgatgccaaactgattgctgactttgctcgggaaaaagcggaaaagcttcagcagtgggcaccggagccgaagaaataccgccaactaaaggcaatggtccgtcggctggatgatcttcaggaaatggagcaaatggagctcaaccgcctggatgtgtctgacgaaaaagtcaaagactcgatcaactccgtgctgcgccacatcgaaaaagagattgctgaaactcacaaagtgatcaaaaaacacatcgacgatgatccggacatgcgccaaatgcgcgatttgatcgtgaccatcgacgggatcgggcagaaaacccttgagcggctgctggccgaactgggcgacctgcgtaaatatgatgaccctcgcaaactggtcgctgctgctgggttgaacccaaagctacaggactcaggaaagctcaaaggcagaacagtaatttcgaggattggctcggcgcgcgttcgtgcgggtctgtacatgcctggcctggtagcgttgaagcacaacgaacccattatcgccatgaggaatcgcttgaaggccaacggcaaggcccccaagcagatcatctgcgcagcgatgcgcaagctactacatttcgtttacgccgttctcaaatcgggtcagccatttgatccaaaatttgcccttgctcgatgaggggcaagacggtat

SEQ ID NO: 6433 - DNA, 1170 bp, unidentified
  source 1..1170: mol_type = unassigned DNA; note = element_9f67ac6
  misc_feature 1..2: note = core
  misc_feature 3..180: note = LE
  misc_feature 181..1149: note = CDS
  misc_feature 1150..1170: note = RE
  misc_feature 37..201: note = bridgeRNA
ctccttgtatcttgaaaattggttaaaatagctgcgtttggatttggcaaggtgtatgcagcccgacctctccaggggtttcaagcccgtcgttaagcgaatggcacatacactgagccactcatctgaaacccgaacagttgtccgtactccataacgtatttgcaaggatgggtaataatgagtcagccaagtccactctgtgtgtgtatcgatgtttcgaaagcaactctggacattgccgccaacagcgcgattgaacaattttctgtttgcaatgacgctgacggctttgattccattattgctgagttgagaaagtacgcggttgtactggttttgatggaggccaccggaggacttgaatctgccgtagcttgtgcgcttcagtccgaaggttttgagatcgctgtggtcaatcctaggcaggctcgagactttgcccgtgccatgggatatctggccaagacagaccgtattgacgccagagtgctcgcacagatggctgaggttattcatcgccatcctgaacgggaacgctttatccgggctatgccggatgctgaacgtcaggttctcacggctatggtagtgtgcagacggcagttggtcacaatgctggtcgctgagcgtaatcggttgcacccagcccaccctcaaagcagaaaaagtattaatatcatcatcaaagcgctggcagatgagcttgcgcggatcgatgaggatatgagtaaccatatttgtatccacttcaaagaactctctgagcgattgagtagcattaagggcgttggcatcatgaccgttgccgcactgttggccgaggttccggaactggggcggctttcgagacgggaaatcagcgcacttgtgggcgtagcgccagtaaaccgagactcgggcacaatgagagggcgacgaacgatctttggtggcagggctggagtgcgaacagcgctgtacatggcgacactcgttgctactcgctttaatccagtgataaaagcgttttacacgcgtcttgttgcggcaggaaaagccaaaaaagtcgctctggttgcctgtatgcgcaaactgctgactatcctgaatgcgatgctcagaaagaacgaagaatgggatgaatcgtatcattgtgttgttccctaatttttacgttcaagacagttg

SEQ ID NO: 6434 - DNA, 1368 bp, unidentified
  source 1..1368: mol_type = unassigned DNA; note = element_9f6a778
  misc_feature 1..2: note = core
  misc_feature 3..82: note = LE
  misc_feature 83..1111: note = CDS
  misc_feature 1112..1368: note = RE
  misc_feature 1085..1355: note = bridgeRNA
tgatggtgtggacacccccgcccgacggcatcgcaatgtgccatggtggtgatgtcgaaatcgccacagaggaggggcgtccatggaagagattaccatagttggggtcgatctggccaagagcgttttccagatccacgcagcaaatgccgacgggcgggccatcgtcagaaagcgactgccgcgcgctcgctttctgtccttcatgtcacttatcaagccgtgcgtggttgcgatggaggcttgcgcaacctcgcaccattgggcgcgggaactgacagcactgggacacgacgtccgtttgataccgccgatttacgtgaagccttttgtcaagcgacagaaaaacgatgcgaatgatgctgaggcaattgtcgaagcggcgataaggccatcgatgcgcacggtgccagtcaaatcgccggagcagcaggcccttgccatgctgttccggacacgcgagctgttgctgacgcagaagacccaactgatgaacgcgcttcgggcccatctggcggaacatgggatcattgttgctggaggccgccgatcaattgatccgttcatccgggttctagacgatctgacgaacacgcttcctgatgtggttcgcaaagccggtgccctttatctggacaggatcgcccggacatctggcgagatcgaggctctggaacggcagatcgacgaacatgccaacgagcatgagatggcaaagcgcctgcgcaccattcctggcgtcggaccggtcacggctatggctgtcgaagctttcgctccggggatggagagctttgcgcgcggcagagatttttctgcctggctcgggcttgttccccggcaacactccagtggaggcaagcaccgcttggggcgaacttcgaaaatggggcagcgcgatatccgccggttgctgatcagtggtgcgatgtcgatcatccactggaggggaagggacggtggaaagcctggttcctggctggcccgcatgctgacatccaaatcacggatgctgaccgccatcgccctggccaacaagcttgccaggatcatctgggccatcatgacacggaaggacgtttacagggatcctgccggtgcggtctgctgaccgctacctgtcaggagcgtcggtgacgcaagtggagcactgatcttgtatgggcaaaagatcgaccgatcggggtggggcagccagcgaaaggcaaagagcttcgagctcgcagttctgatttggcctccatccgcgcatcaccataccggccagcggcatcaaaggccgcgcacaaaggccttacacatgttagcagccggtcacttgatcatggagatcacgaaatcacttgcgcaagcgggggtatccacaca

SEQ ID NO: 6435 - DNA, 1358 bp, unidentified
  source 1..1358: mol_type = unassigned DNA; note = element_9f6b814
  misc_feature 1..2: note = core
  misc_feature 3..74: note = LE
  misc_feature 75..1103: note = CDS
  misc_feature 1104..1358: note = RE
  misc_feature 1079..1346: note = bridgeRNA
tgatgatgtgaccgccccccgacggcatctgtgtgccaaggtgggtctgcgaggatccacataggagagcggtcatgtcggagattaccactgtcgggctcgatctggcgaagaatgtgttccaggcacatggtgccgacgcctctgggcaagctgtgctgcgcaagaagctgaggcgggatcaggtgctgtcgttcttcagccagttgccgagctgcattgtcgccatggaagcctgcggaggggcgcatttctggggccgcgagatcggcaagctcgggcacgaggttcggctgatcccgcccgcctatgtgaaacctttcgtcaagcgccagaagaatgatgccgctgatgccgaggcgatctgcgaagcggcgcagcgcccgacgatgcgtttcgtcccggtgaagagtgaagaaacccaagggtcggcgatggtattccgtatccgggaacttctgatccggcagcgcacacaggcgatcaacgccctgcgtgggcatctgggcgagtttggtcagatcgtgccacaaggtgctggcaacgctgcgcgacttattgcgatgatcgaagacccggacagcgggctgcccaccgaggccctccccacgcttgatgtgctggttgcggcgctccggcacctcgagacagagatcgggaagctggacgccgagatcagccggcgggcaaagggcaacgaggtcgcacggcggctgatgacaattcctggcatcggccccctgatcgccacggccattgctacgctggcgcccccaccagagatattccgcacaggccgggactttgccgcctggctcgggctcacccctcgccagcattcgacaggcggcaaacagaggctcggggccacgaccaagatgggggaacgatccctgcggcgcctgctgatcatcggcgccaacagcgtgatcatcaagcgacacgtccatgcctcggcccgaccgggaacctggttgggcgggatactgacgcgcaagccgcccatgctggtgcgggtcgcgctggcgaacaagatggcgcgcatcgtctgggcccttatggcccacggtgacgtctacaaggctccggccgcagcggcataagccgtcgaggtcgcgagaacgtcggagcggaagagggcaaggagacgtttggcgcaacggtcgtgagacaggatcaggggaaccagcctgcaacaaagtgccttcgagcacgcggcgttgatttggggcctgatccgcgaacaccatacgggcccgcggcatgacgatggtcgcataagaggccggatacatgtcagcacccgacaacgcgtcaaaagaagcttcgaacccccttgcgcaaggggcggttataca

SEQ ID NO: 6436 - DNA, 1187 bp, unidentified
  source 1..1187: mol_type = unassigned DNA; note = element_9f6c062
  misc_feature 1..2: note = core
  misc_feature 3..209: note = LE
  misc_feature 210..1172: note = CDS
  misc_feature 1173..1187: note = RE
  misc_feature 6..214: note = bridgeRNA
cttgtatgtttcaaaccagaccagcgcggtagattccgactgctgttgaagcggccagaccggtccgtgcagcctggtaacggctggggcgtcgaagcccgtgactgagtacatcgcgcacggtcgccgtgctggtcaacctgaagcccgaacggttacgcgcgccggctcgtccgagcacgcattcacaagcaagggatctgttgaccatgtctgttacgtcagtggtggtgggcatcgacgtggccaaggcccacgtggatgtcgcggtgctgggcggcaagctccaagcccagcggttcgacaacgaggccgaggcgcactcggcgttggcggcggccttgaagccgctgggcgtggcgctggtggtgatggaggccaccggcggttacgaggcggcgctggcctgcgcgctgcaggctgcgggcctgcccgtggcggtggtcaatccgcgccaggcgcgcgacttcgccaagtccatgggacggctggccaagaccgaccgcatcgacgcccgcatgctggccgagtttgccggcgtgctcgcgcgccgcgacgacctggccagcctcatccgtcccttggctgacgcgcagcagcaggcgctggcagcgatggtcacgcgcaggcgccagctcgtgacgatgatgctgtccgagcgccagcggttgcagctggccatcgccgtggtgcgcccaagcatcgaggccatgatcgaggcgatccgcaagcaactcgacgatgtggaggcccagatggtgggccatgtccaggcgcactacgccgagctggacaagttgctgcgttcggccgcaggcatcggcccggtggccagcgccacgctgattgccgaactgcctgagctgggccggctcaaccgccgcgagatcgccgcgttggtgggcgtagcgcctatggccaacgactcaggcaacgtcaaagggcgccggcgcgtgcagggtgggcgcttcgagatacgacgcgtgctctacatggccacgctgactgccgcgcgccacaaccccgccatcaagaccttctacgaccgactgctgggcgccggcaagttgcccaaggtggcactggtcgcctgcatgcgcaagctcctcaccacgctcaacgccatggtcaaaaccaacaagccctgggacaaatcgcttcacggcgcttgactcggaagacggtta

SEQ ID NO: 6437 - DNA, 1684 bp, unidentified
  source 1..1684: mol_type = unassigned DNA; note = element_9f7020e
  misc_feature 1: note = core
  misc_feature 2..70: note = LE
  misc_feature 71..1105: note = CDS
  misc_feature 1106..1684: note = RE
  misc_feature 1203..1420: note = bridgeRNA
taatgggatggtccgccgcctgactccagccggaagctgggaatataacaggcgtaaggaggaaccattcatggaactacatacaatcggcatcgatttgggaaagacagtttttcatctggttgggatgaatccccgtggcgaagttgtggtgcgcaagaagttctcgcgcacacaactgctgcgcttcacggtgaacctgaaggtcgacttcattggtatggaagcttgcgggggagcgcattttttgggtcgggcattgcgggaacaaggccatgaggtgcggctgatgccggcccagtatgtaaaaccctacgtgaagacgaataagagcgactacatcgacgccgaagcgatcgctgaagctgtggcgcggccaaccatgcggttcgtgcccatcaagagcgacgatcaactggatctacagtcgttgcatcgagtgcgcgagcgctgggtgatgcgccggacagccgtcgtcaatcagattcgcgcattgctgctcgaacgtggcataaccttgcgccagggcagacgacatttggaccatgcgctgcctggcatcctggaagacgccgatgcgaaattgtccagcgcactgcgcctgttgctggcgcaactgaagctggaactggaccagctcgccgaacgggtggatcaagcggacatggccatcgcacaaagcgtccggcagagcgaagcctgccagcgcctgatggccatcccgggagttggaccggtgacggccaccgccatgatcgcggcgatcggcaatggagccgcattccgcaaaggccgcgattttgcggcttggctgggcgttgtccctacggaacactcgaccggcggcaagcagaagctgttgagcatcggcaagcgcggcaacacatatctgcgaaggctgttcatccagggcgcccgtgccgtcctgcggcaaagaatgaagcagacctccggattgagcgcatggctaactcaattgacggtgcgcgcacatcccaacatcgttgccgtggccttggccaacaagctggcgcgcatggcctgggcagtactggcgaagggcgaaacttatcgacctcccgtgctgctggttggtttagcctgactgggctgtagatgacgcttggcgaagccaagcttggaaatcgctggcgcgatttccacatccacaccccagcgactacggagtttatgattttctgccaggtctgctggcgaactatgagatgacacaacggtcgaacccgacgctttctaaacctggtgtgggaaaaagtcctgcaagactgaccacttaaataggacgagagcgcagcgcattccatcctggcccaggagcgtggtactcctaccaaggccgtatacattagcgcagaccaacccgtcaccctcattttttgcttgcggaaaagcggcggaccatacattcccgcaccaccacgacgactaaagtttccccaccgaagtctgcacggagtagcaaggacgaaagaacagtcacaacggcgtgtccgcagcctggtcccgaaaatggtcttcaacgaccgaccgactttgaaggacggacacgcgcgcaactcatcctggccaggagaactagtctccaaccaaaggccgtatacatttgcgcagacttgtcttctcgcccaaacttttcccttgcagtcctgcggcggaccataca

SEQ ID NO: 6438 - DNA, 1533 bp, unidentified
  source 1..1533: mol_type = unassigned DNA; note = element_9f76184
  misc_feature 1..2: note = core
  misc_feature 3..241: note = LE
  misc_feature 242..1417: note = CDS
  misc_feature 1418..1533: note = RE
  misc_feature 11..217: note = bridgeRNA
cttgtattatagagtagtagttattagagcccctctccaagggcttgtgctacactgtaagggatgctgtggattggtttgaaacccctaccacgcgatggttcacgaaaggttccaaccacagccctttgcaggtttgttaatcagttaaataccgcccgacggtttatgtggaacaaggttacaagagcaaagtgtcctgtggatgcagcatcataattttaccgccggaggttttgctatgatttctgttggaatcgacgttgccaaggacaaacacgattgcttcatcatcgactcggaaggggaagttcttgcggatgtgttcaccgttccaaacagcatggatggctttcaccgcctgctgcaaaggatccgagactgctcctcgccccaagacaagataaaagtaggacttgaggctaccgggcattacagctgcaacatccttgggtttcttcttgacaacggtcttcccacctatgtcttgaaccccttgcacacgaacatgtaccggaaaagcctcagcctcagaaagacgaagacagaccgtgtcgatgcgcgaacgattgcggctatgcttttgtccgatgtgggcctcaagccctacacagacacagcttaccacaatgaggagctaaagtcactcacgagataccgctttgacaaggtgaaagagcgcggtaagcttaagcagtctattgcccgcctggtctgcatcctgttccctgaactggaaaaactggtgccgacgcttcacatagtctccgtttacgccttgctggtggaattccccggagccaaacagattgcccaggcacatctgacgcggctgaaaacgcttttacatgacgcttccagaggtcgctacggacgggacctggccgtgaatattcgggatactgccagagcttccgtcggttctgaaatgccggcgaagtcgctggagctgcggcacaccatccggcttattcgggaactggatgccgagattgcggaaatcgagtccgccatccggcacatcatggacgagcttcattcgcccattacgacgatcccgggtattggcacccgcatgggggccatgatccttgccgaggctggcgacttctcccggtttgattctccggacaagctgctggcctacgccgggctttcaccttcaacataccaatccgggcaactcaggaattgctatgcccatatggagaagcgcggctccagatacctgcgttacgccatattcaatgccgcaaagtatgtctgcctctgggatccgacattctctgcctaccttgctaagaaacgggcggagggcaagcactacaacgtcgcaatctctcatgctgccaaaaagctggtacggctcatttacgccttagaaaagtccggagaaccttatcgcttggcagcgtagctttcactcaatagccggcatggggctttaatgcgcccctgctttgctatacctttttgagccatctggtttttgtccacaatccttaattcagggcttgacttttaatagttaat

SEQ ID NO: 6439 - DNA, 1329 bp, unidentified
  source 1..1329: mol_type = unassigned DNA; note = element_9f774cb
  misc_feature 1..2: note = core
  misc_feature 3..75: note = LE
  misc_feature 76..1101: note = CDS
  misc_feature 1102..1329: note = RE
agatgggatgaagagtggcgtacctttccggtacgtgctcgaagcacagatattccatccggaggaaggtacgccatgaagaccgtgacccatgtaggagtagatcttcaccagcgattttgctacttgacggctatcgatgcaagcgggaagaagttgaggcaggcgcaggtggtcaacgaggcagaggcgctgcgggcgtggttgcggcagttgccgggcgagcggcaggtggtggtcgaggccagcggattctggccggcgtttgcgcgggccgtcaagccggaagcggaacggttggtgatggtgcatccgcaacggaccagggcgattgcggcggcgcggctgaagaacgatcgtgtggattcggagacgttggcgcacctttcgcgcgccgatctgctgcccgaagcctggatggcgaacgagcgtacgcagcagaccaggttgttgacacggttgcggatcacgcttggccggcagagggccaaggccaagaaccagatgcaggtggtactgcatcaggaagggtttctgaagccggtggccgatgtgtttggcaagaagggacgggtctggctggcggggttggcgctgagtccggctggccgcgtcgtggtcgaggtgtggttgaaggtcgtcgaccagatggacgccgcgatccttgaacagacgaaggcgctggagcggatggcgaaggaagatgtccgcgccaggtggctggagacggtgccggggatcgggccttactcggcgatggtgatcctgggcgaggtgggcgagatcgaacgcttcgccagcaagcgggcgctggccagctatgccgggctgacgccgagcgtgcgcgagtcggagggcaagcgcaagcgcggcgggatcggccatcatgggtccgggacgctgcgctggctcatgctgcaggtggcgcaggtggcgtgccgccactcgcccgcggcaggggcctggtatcggcggctgaagcagcgaaaacctgcccaggtggcgctgatcgcgctggcccgcaaactgctgaccgcggtctgggcgctgctccgccacggtgcctgcttcgacgagagcgtcttcgccgggcagggttgaaccaccgcaaaagcgcctggaaaagaaaattcaacaacggttttgcgacggttgcaaggtagcccggtcagctcgctcatcctctgtcccaggaagaaaatcccccgaggacatcctcagatggagcggccgggaagcgaatcccccttgtgtgcccagagcacgaatagaagactgtacgcaatctattcgcaaataccgctggacaaatgcgtcatccttcataga

SEQ ID NO: 6440 - DNA, 1354 bp, unidentified
  source 1..1354: mol_type = unassigned DNA; note = element_9f786b2
  misc_feature 1..5: note = core
  misc_feature 6..241: note = LE
  misc_feature 242..1306: note = CDS
  misc_feature 1307..1354: note = RE
  misc_feature 29..224: note = bridgeRNA
cttttatttttactgagaattacaaaaaggtcattatattgttgttatgcaaaatgtattggctattcgtgtgagacgaattggggctaggtaaacagatcgttataccgtaaaaaaggaattgtccacacgattatattctcaggagtctgaacagtacttaaggccgctatttcgagcctggataaaacaaaaggatagacgaaggaggattaagtcgatacgatttaaattcttgactatggctattagcaaacaatgcattgggatagatatctcaaaagcgacatttacagcatgtgtgtgtcagcgttcagatgatggaggattaacgttctccaagacagtggatttcagtaatgataccaaaggattcaaccagtttctgcgttggtccaaaggagtcattgtgagagatgcagaacttgtttttttgatggaggctaccggtgtgtattatgagaaccttgcccaccatctgcacaagattaagaaaagggttcatgttgttcttcccaatacgtcaaagcactatttttcgagcctcaatatcaagaccaaaacggatgctgttgatgcgcggatcctgagtcaattcggtgtagaaaggatccataaaggatggagtcctcctccaccagtcttattgcagctgagaaatctaaccagataccatgtccagctgcaggagcagaaaacggcattaggcaacatcaaacatagtaaggactgttcgcatgctatccagatctttatactaaaaagcaataaaaaacttattgctgagatagataaggagattgccagatgtatcaaggaaatcaacagactggtaaagtcagatgtggatctccatagaaaaattgagaagcttgcaacgataaaggggatcggaatgatcaccatggttaccattcttgccgaaacaatgggttttgaacagttcagtagcgccaaacaacttgtcagctatgctggatatgatgttgttcagcgggaatctgggacatctgtaaaaggaaaaacgaggatctcgaaaaaggggaacagatatatcaggaatgcactgtatttccccgctatggtatcctgcagatacaatccattgctaaaagaagcttacatgaggatcatccagaaaaaaacatcaaaaatgatcggacaggtggccatccagagaaaattattaatcttaatgtatacactttggaaaaatgataccgtgtttatagaaaattataaagtaagtagtcccggtccgaaaaccgagactacactagatagttcagaagctgaacttctttagattacaaaaatacttttttgtctaaatatttggaatttaaaacagtac

SEQ ID NO: 6441 - DNA, 1364 bp, unidentified
  source 1..1364: mol_type = unassigned DNA; note = element_9f7b671
  misc_feature 1..2: note = core
  misc_feature 3..77: note = LE
  misc_feature 78..1103: note = CDS
  misc_feature 1104..1364: note = RE
  misc_feature 1079..1351: note = bridgeRNA
tgatggggtggacgccccccgacggcatctgcgtgccagagtgaggtgttgttgagcttcactcgagggaggcgcccatgggcgaggttaccaccattggcctggatatcgcgaagtcggttttccaggcgcacggagctgatgcggccggctcggtcgtgtttcgcaagaagctgggtcgcacgcggctgctggcgttcttcgccgcccagccgcggtgtgtggtggccatggaggcgtgcgccggcgcgcaccactgggggcgcgagctgaccaagctgggccacacggtgcggctgatcccgccggcctacgtgaagcccttcgtcaaacggcagaagaacgatgcggccgatgccgaggcgatctgcgaggccgcccagcggccgacgatgcgtttcgtcccggtgaagagcgccgagcagcaggcctcgggcgtggtctttcgggccagggacctcctggtgcatcagcgcacgcagatcatgaacgctttgcgcggccacctggcggagtacggccacgtcgccccgaagggcgtcatgtacgtcgaccgactggtggtcgagatcgagaatcccgacagcgagatccccgaggctgcgcggacgagcctgaaggccacggtccggatgctggaccggctcgacaccgagatcgccgtgctggatgcggagatcgcgcggcgggccaaggaagatccggtcgcgcggcggctgatgaccattcccggcataggaccggtgagcgcggcggccctggtcgccctggcgccggctccggaagccttccggtgcggccgggacttctccgcctgggtggggctcacgcccgtgcagcgatccaccggcggcaagccgaagctcgggcagatcaccaaggccggcgagcggaccttgcgacgactgctggtgatcggcgcaagcgcggtgatcaagcaggcgctgctgaagggcgcgccccccggctcatggctggcccagatgctggctcgaaagccgcgcatgctggtggcggtcgccttggcgaataagactgctcggatcgtgtgggcgctgctggcgaagggcgggatctacagagctccggcgctggcggcctgaccgccgttagctccagaggcgtcgacgcgtaagtcggacgaaggagggtatggcgcacagtcggcgagacgggaccgggaaaaccagggctttccaccgtgcctcacgagcacgctacgggtgatttggacccagtccgcgaactcccatacaggccagcaccgccacggcggcgcatcacaggccggacagatggcagcatccgacgaagcgtcagaacctcattacatccgcacttgcgctaaagggggcgtccacaga

SEQ ID NO: 6442 - DNA, 1315 bp, unidentified
  source 1..1315: mol_type = unassigned DNA; note = element_9f7cb41
  misc_feature 1..2: note = core
  misc_feature 3..267: note = LE
  misc_feature 268..1269: note = CDS
  misc_feature 1270..1315: note = RE
  misc_feature 47..214: note = bridgeRNA
cttgtatattaaatacatctctaaagcacaggattatgtgacacaaaaaagtttatagtgataagtgattttctggggaagccgatccggccttaagctctgagcttgttcgtagataggctccccaccctcgtcatccatgccgtggagtatctgagacctgtaagcataagcttctgagtctgcattcacaaggacggtaggtgaagtgtcagggttgggaaaccagttatcatcataacaaaatgactataaagagatgaaaaaatgaattatgcaggtattgatgttagccataaagaacttgttatcgtggtcagtgtaaaaggtaaagctcacaaagccaaaacctttgaaaataccgcatccggtcacaaagctatcattcaactgttatcaaaattaaaaggagaatcaaaagtttgtattgaagcaacgggtgtttatcattttgatttggcagtagcactgagtcgtgccgaaggtattgaagtgatggttatcaatccgaaagcttcacataactttgccaaggtgctgatgaaacgcagtaaaaccgatgcggttgatgcagaaatattggcggtttattgcgaaagaatgccttttgaagcgtggcaacgcccagccgatgagcacattgccctgagagcgattgctcgaagaatcgccgctttgaccaagctaaaaactcagactaaaaatcagctgcatgcgttaaaagccaccgaagaaacgcccgtgttggtgattgaatataccgaagaattgattgaagttgtggacaaacaaattcaagttcaccgtgagagtgcgcgtcaattaatccagcagcacgatgagctggcagaagcctttgcgttgattaccggcatcaaaggtattgccgtggcgagcgcagtgcaaatgttgggtgaattgatgatattgcctaaagacatgagtgccaagcaatgggtcgcttatgcgggtttagatccacggcaatttgaatcgggtagcagtgtgacgaaaaagccacgtatcagcaaggcgggtaataaattcgttcgccgagcactgtatatgcccgcattggttgcaacgtgccatgagcctcatattaaaggctattacacgcatatgattcaagacaacggtttaaagaagatacaggctgtatgcgcggtaatgcgcaaacttttacacgccatccatggcatgctgaaagctaaaaaagaatttgacgggactcgtttttacacgtttcctgttgaagcaaattcataagattttatgatttttgcaaatttgggcttgtgtcttaagagagtat

SEQ ID NO: 6443 - DNA, 1349 bp, unidentified
  source 1..1349: mol_type = unassigned DNA; note = element_9f84aa4
  misc_feature 1: note = core
  misc_feature 2..61: note = LE
  misc_feature 62..1093: note = CDS
  misc_feature 1094..1349: note = RE
  misc_feature 1123..1340: note = bridgeRNA
taatgggatggtccgccgcagctctatggaagttgtagagtgcggggcaaggaggcatctcatgaaaatcttcgcgctgggcattgatttgggtaagaccgtatttcatctggtgggtttggatgagcgtgggcaggtggtagtgcgcaagcgttgttctcgtacgcaactgctggcttttacggcgaatgtgcaggtgcagttgatcggcatggaagcgtgcagtggagctcattttctagggcgggctctgcgcgctcaggggcatgaagtgcgcttgatgccggctcagtacgtgaagccgtatgtgcagacgaacaagagcgactacatcgatgcggaagcgatcgccgaagcagtacaacggccgaggatgcgattcgtgccgatcaagacagaggagcagttagatttgcaagcgttgcatcgtgtgcgggagcgttgggtgatgcggcgcacggcggtggtgaatcaggttcgtagtctgctgctggagcgtggactgacggtgcccaaggggcgaaggtatctggagcaggcgcttccccggattttggaagacgccgaattgaagttgtctgggtctttccgtgttctgctggcgcagctcagactggaactggagcaattggcggggcgcattgagaagatggatcgggtcatcgagcaagaagctcgagaacatgaagcctgccaacgactgacgacaattccgggagtcggtccggtcacggcgacagcgttgatcggtgcgatcggcaacggcagcgcatttcggaaagggcgcgatctgtccacctggatggggatcgttccgggagagtacacgaccggaggcaagcagaaactgctgggaatcagcaagcgcggcaataaatatttacgaagactcttcgtgcaaggcgcacgcagcgtgctccagcagagagacaagcaggcgccagggctcagccagtggttagcgcaactgctggcatcgaagcaccagaacgtggtggtcgtggccttagccaataaattggttcaaatcgcctgggccgtcttgagcaagaacgaagcctatcgctctcccgttcttgccgaatccacctaagactactcgggccctaagagcaaaaccgttcttgtcgggtctgctggcggaaaacacagatggccatgggtctctcccacgctctcgaaacctgatctcggaaaaggtccatgcgaggccgtccagtttataggacgggagcgagcggacatccatcaaggtccggagtctatgactccacacgagaccgaatacattggcgcagaccatttgccatcgcgcgtttttcgcttgcaactctgcggcggatcataca

SEQ ID NO: 6444 - DNA, 1299 bp, unidentified
  source 1..1299: mol_type = unassigned DNA; note = element_9f85b00
  misc_feature 1: note = core
  misc_feature 2..240: note = LE
  misc_feature 241..1284: note = CDS
  misc_feature 1285..1299: note = RE
  misc_feature 4..217: note = bridgeRNA
cagtgaggatggtggggtgggtcaccgggttggtctgactcgccggcagaccgacgttgctgtcctcatcccgattcgtcggccggcccggtggctccgcgagctgcatgtcaccggtcaggcgtcgtgacctgataggagtctgtgcgagaggcgcccaccactgggttgtccgcatcgcctgaccggtgatgtgtccacgtgttctcgactcgaccgagaagggcggaccccaccagcatggcagccaagaagcgatcggtcatcggtggtatcgacacccaccgcgccgccatcatcgacagcaccggcggactcctcggcgacgccgagtttccggcgaccaccgccggctacgcggatctgctggcctggatgcgctccttcgggcgggtcgcggccgtgggcgtggagggcaccggcagctacggggccgggctggcccgctatctgaccagcaagaagatggccgtcgtggaggtggaccggcctgaccgccgcgctcgtcgcgcgaagggcaagtccgactcgatagacgctgtcgccgccgcccgggcgaccctcggcggcaccgccatgggcaccccgaagacccgcacctggccggtcgaggcgattcgcgccctgagggtcgcccgccgaggagcggtcaaggcccgcaccgccgccctaaatcagatgcgcggcctggtcgccgccgcccccgagcccttgcgagcccacctgaccagggtcagcgccgccgtgctggtcagccggtccgccgcactgacctacgacccggccagacttcacgagccgaagcacgccaccgccgcagccctggtcgggctcgcccgccgggtcaccaccctcaccgaggagatcaccaccctcgaccggcaggtgacacccatcgtccagaaagcggcgccccgcaccacggccctgttcggtgtcagccccgacgttgcggcccagctgctcaccaccgccggcgacaacccagaccgactgcactccgaagcggcgctggcccacctctgcggcgcagcacccatccccgcaagctccggacgagtgcgccgccaccgcctccaccgcggaggcgaccgcggcgccaaccacgccctgcacaccatcgcactctgccgcatgcgctacgaccaacgcacccgcgcctaccagcaacgacgcaccactgaaggcctcagcaatcaagagcttctccgctgcctcaagcgctatatcgtccgcgacgtctacaccgccctacgcgccgacttcgccgccctcaccccttgacctccataggagcat

SEQ ID NO: 6445 - DNA, 1389 bp, unidentified
  source 1..1389: mol_type = unassigned DNA; note = element_9f87473
  misc_feature 1: note = core
  misc_feature 2..88: note = LE
  misc_feature 89..1123: note = CDS
  misc_feature 1124..1389: note = RE
  misc_feature 1156..1384: note = bridgeRNA
caatggaatggacgcccccaccctaagcggaattcatgtgccagagtggaagcgctgatcaactactcaagtcaaagaggcgtccatcatgaagattacgacagttggaatcgacctggccaagcacgtgttccaggttcatggcgtcgatgagcagggcaacacggtgctgcgcaagcaactcaagcgcgaccagttgagtgtgttcatggccaccttgccgccgtgtcgggtggggatggaggcgtgtggcggcgcgcatcactgggcacgcaagtttgagggcttcgggcatacggtcagactgatgtcgccgcagttcgtgaagccctacgtgaagagtaacaagaacgatgcggcggatgccgaggcgatctgcgaagcggtctccaggccgaacatgcgctttgttcccatcaaaagcgtcgagcagcaggctgtgctctcgctgcatcgggttcgccagggctttgttgccgcacgtaccgcgcaggccaatcagatccgaggcttgctcgcagagttcggcctagtgttgccaaccggactctgcgcgttacgcaaacagctgctggtgcttctggatggcgtgggtgatcaggtgccagaagtgttcctgcgtctggtgcggcgcctgcacgaacacctggtcgaattggaccggcaggtgggcgaactcgaggtgcagatcaggcaatggcaccgcagctgcacccagagtcagcgtctggagaagatcccaggcgtcggaccgctgaccgccacggcgctggtgacctcgattgcagatgcccgcagcttcaagaatggtcggcaactggccgcatggctgggactggtcccacggcagcactccagcggcggtaagccgacactgctgggcatcagcaagcgcggcgatgtgtatctgcgaaccttgctgatccacggtgcccgggccgccctgtcggctgcgaagcgccatgcaaagtcgaatccctggctcggcaagttgcttgagcgacgaaatccgaatgtggctgccgttgccctggcgaacaagaatgcgagaaccgtctgggccttgcttgcccacgaccgggagtttcaggtcgattacacgccgactctgacaaccgtataacccgcatcacccagtgacatcgagcaggacggatactccaccgattgctctggcaatcacgtagtgatggcgaaacaggtaagaccgtggttggccaaacccatccggggcggcgcacttcgagtgcattgaatcgatcgggacccaaccagcgcattccatcagggacagcggcattgccgcaacgaaagtccgaatgtacggctgcaagcttgcttgataaccatcatcacctgagagctgggcaaaccgggggcgtccatgta

SEQ ID NO: 6446 - DNA, 1574 bp, unidentified
  source 1..1574: mol_type = unassigned DNA; note = element_9f886d5
  misc_feature 1..2: note = core
  misc_feature 3..244: note = LE
  misc_feature 245..1453: note = CDS
  misc_feature 1454..1574: note = RE
  misc_feature 14..297: note = bridgeRNA
ctattactatgtgtttatggttaatattcctaacatccagctaggatgttatccatcttgttgcttaagctgtagaatgatggaagcaataggtctggcctgttcctcctagaatcttacgttcgtaaataagtcagccaaccagttcctcattcgcagcattcgttttacacaggttgaacctcccgttcgtgtgagacacccaatagattgaataggcaatgagtaaaactggtattgaccattgctaatacatctcaaaggagtttctatcatgatgaatgcagttggtatcgatgtttcaaaaaacaagagcactgtcacgatccgcagacccggtgatgaggttgttctccctccctgtgatgtccgccatacccgttcctctattgatgcactgatcaatgagatcaagagccttgagggtgaaaccaaggtatgtatggagtgtacaggcagatactatgagcctatggcaacctggctgacagatgcaggcctcttcgtgagcactgttaatccggtacttatcaaagactttggcgatgactccctccgtgctcccaaaaccgataaggctgattcaaagaaaatcgcacggtacactcttgaccgttggacgaaattgaagcagtatgatctcatggacgaaacacgtaaccaactcaaaacaatgaaccgccagttcggattctacatggatcagaagacttcgatgaagaacaatctcatcgctctgcttgatcagacattccctggcgcaaatgacttctttgacagccctgtgcgccctgatggcagccagaagtgggtggacttcgtctacacctactggcacgtcgattgtgtgacaggaaggacacttgatgcctttacggagcattaccataaatggtgcagtcgtaagggctataacttcagtgcagctaaggccaagaccatctatgatgtctctaaagaccttattgccgtattccctaaggatgacgtaaccaagataataattcatcaggccgtagatcttcttaacgcagcatccaaaactgtagagactctccgtgccaggatggatgaaaccgcatccacgctccccgagtatcccgtcgttatggatatgaacggtgtcggccctacacttggtccgcagcttatggctgagattggggatgtcatgcgtttcgaaaagcgtggttccctgacagcttttgccggtgttgatccaggtaaaaacgaatctgggcaatacgtgcaaaaaagcgtgcacacctcaaagaaaggatctccgcatttaagaaagactctcttccagatcatggacggactcattcagcgatctcctgttggtgagccttactacgtctacatgaccgctggagctaacaagtttctccgcatctactatggtcgtgtcaaggagtatctgaaatcacttgaagccaatgaatctgaataatcaatagcatccctcgctatcgtagaccggcatatatggcggtcttgttttgttatcttaaattcaacctgtataaaattttcaaagtacatcaatttctgcttgactttttatttgcaga

SEQ ID NO: 6447 - DNA, 2111 bp, unidentified
  source 1..2111: mol_type = unassigned DNA; note = element_9f8ac1d
  misc_feature 1..2: note = core
  misc_feature 3..273: note = LE
  misc_feature 274..1488: note = CDS
  misc_feature 1489..2111: note = RE
  misc_feature 25..250: note = bridgeRNA
ctcgtataatgaatttacggtttaggtgtggtgggaaaccacacaaaacccacttgttgttccacaagccatgtgggataataaggccagcagacagagggcgcagatcacctccttgaagtacggcttccgctgaaagaattgcgcctctgtctttgcgggttgacgcgaatgagctggatagcgagtatgcgctgcatatcgaacgaggttgtgtcccgcaaagaagcgtgaggaaactctgtctgaaatcttgaaacgggaggtttcgccatgttctactgcgggatcgatattgcaaagtataagcatgaagcaacggtcattgacgagaccggcacagccctgttagacagcatctcctttgccaacagcaaggaaggctgtgaaaagttgctgagtctgttttctcgcctggacatttccagagaagacttgctcgttggcatggaggcaaccggtcattactggctgagtgtgtatgggtacttgctggagcaggatttcgaggtcaaggtcatcaatcccatccagtccgaggcgtttcggaagatgtacatccggcagacaaagactgaccggaaagacagtttcatgattgcccagatcatgcgttttgggcaattctccgccacaaatctgtcagaggagaccattgtggcgctgcggcagctaagccggtaccggctggccctggtagacgcctgcggggactgcaagcggcgggtcatcgccctgttggaccaagtgttcccggagtacgccgcactgttctcggacacctttggcgtgacctctaaagaagtcctctcccaatatcccacgccggaggacctgctcagtgtctccacccgcaagctctccaatcttttggagaaaaccagtcgtggccggctgggaagagaaaaggcggagcagatgaaagccgccgctgccaattctttcggtgtcagctttgccaaggatgctttttcctttcagatccggcagctcattgaacagttggagtttctggaaggacagattgcagaactggaagaacaactcgcttccctgctgaagcagactggcagctatattaccactatccccggtattggagacaccctgggcgccatcattctgggtgagattggcgacatccaccgcttcgacgctcccaacaagctggttgcctttgcagggttggatgtacgagtctctcagtccggtgaattcaccggcacccggcagaagatctcaaaacgtggttcaccgtatctccggcgggccatctggctggccgcctccagggcggccttttgcgaccccatcctttcgaagtactatcaatccctccgtgcccgcggcaagcaccatctcaccgccatcggcgctgtctcccgcaaactttgcaacatcatctttgccattctcagcgacaatcggccctatgagcctgttccaccaaaaggaattcgacacgattcggcagatttcacaacctgaaatgcatttcgtcgctgtgtgacacaaattggtatattcttcctctcgcaaaggaggaatacctgtgtcattcaaactgcgattctccggcgatctgcgccaggctcgtgatgcaaagggctggactcagccctttgtcacggacattgtttcgatcactctgcgggaatatcaaaatatcgagagtgggaaacaaattcccaagacagagaccttcttaaagctggtctttctgtttgatctggatattgaaaactatcgggaggagtttgagattcatgttccgctatctcccgttcgaaaatgagagccattctccctgcattggctcatactgtacatttggcctgcgtgttcttctgtcccaaaatggaattgaaaaagaagtcatgcttttaccggatatttccacagacttctcgtttgtgctgcgcctcgcggaattattcacacgcaagcagctagatccgattcatctgctggatgtattggaagattctctttgagtgatcttccaataccatcactaggctcacattcccgtgagccttttcgtgttgtctatttcatccctactttttcctctttcttttttatttttcccttgactctttatagctggt

SEQ ID NO: 6448 - DNA, 1383 bp, unidentified
  source 1..1383: mol_type = unassigned DNA; note = element_9f9c82d
  misc_feature 1..2: note = core
  misc_feature 3..90: note = LE
  misc_feature 91..1119: note = CDS
  misc_feature 1120..1383: note = RE
  misc_feature 1093..1370: note = bridgeRNA
agatggggtggatgccgcgctcccccaacggcatcgcaatgtgccaagcttgtgatgtcaaagcacaagacaagacgggagacggcatccatggaagaagttaccatcatcggcattgatctggcaaagaacgtgttccagctgcacggtgcggcggcggacgggcggcccgtgtttcggaagaagctcacgcgtctgcagttccagcggttcatggcggcgcagccgccgcgcacagtggcgatggaagcctgtccgggctcgcattactgggcgcgggagatggctgagctgggtcacaccgtgaaggtgatctcgccgcaatacgtcaccccctacgtcaagcggcagaagaacgatgcggccgacgccgaggcgatcgccgaggctgcgacccggccgcacatgcgtttcgtcgagcccaagagcgccgagcagcaggcccgcgccgtggtgttccgcgtccgccagaaggtgatcgcgcagcgtatcgaactggtgaacgcgctacgctcgcatctctacgaattcggcttcatcgctccggtcggcctgcagcacctgccgaagctgatcgcggtgctggaggacgaaagcagcgatctgcccgggcccgcgcggatcgcctgccgcgggatcctgcgccagatcgagagcctcggcgccgagatcgccgcgctcgacgcccagatcgccgagttgtcgaaggaaagccgctgggccaggctcctgcagaccatgccaggggtcggtccgatcaccgccatggccatcgaggcctttgcgccgcccatggagaccttccggcgcgggcgcgacttcgccgcctggctcggcctcgtgccgcgacagagctcgtccggcggcaaggcgcggctgggcaaggtgtcgaaggccggccagcacgacatccggcgattgctggtggtcggcgccatggccgcgatcgtgggcgcctgccggcgcggcatccccgaggacacgtggttgggcaagctgatgctcagaaagccgcgcatcctcgtggccatcgcgctcgccaacaagatggcgcggcgcatctgggcgatgctgacgaaaggcgagagttaccgggatccggccctggcggcggcgtgacaccgctgccggtcagccggatatcggggatgtgaggaaggcatgagccgaatggacaactgatcgaccggatcggggcagggaaaaccagcgagacgcgtagggcttcgagcccggtgagaagtgttggacccggcccgcgaaccaccatcccggcccacggcgcatgtgaaaagccgcaatcaaaggcctgacacaagcgcgcactcgatcacacgtccaagaggttcacgatgtccttgcattccgcgcggcatccacaca

SEQ ID NO: 6449 - DNA, 1570 bp, unidentified
  source 1..1570: mol_type = unassigned DNA; note = element_9f9cc9e
  misc_feature 1..2: note = core
  misc_feature 3..251: note = LE
  misc_feature 252..1424: note = CDS
  misc_feature 1425..1570: note = RE
  misc_feature 3..227: note = bridgeRNA
ctcgtattattaagttgtagcttttctttacctgttcttggtaatcagctactattgttatctgatgctgtggattggttatcacctcctaccgcgcgacggtttttgttaggctccaaccacagcctctttgttacattgttgatcagttagataccgcatgacggtttatgtagaacgaggatacaatcagcaaagagccctgtgggtcgataacagcatcaaacacttattacaggaggatttactaaatgatttacgttggaattgatgttgctaaggataagcatgactgttgtatccttggaccagataccgaagaactgttcccagtctttacgatacggaacaatagtgatggctatggagaattattccacaagattgagtcagtctcaaaggacaaatctcagataaaaataggactcgaggctaccggtcactattcctacaacattctgggatcacttcttgaccatggctaccacacctttgtcatcaatccgttacatacaaatctttacagaaaaggtcaaagccttagaaagacgaaaacggataaagtcgatgcccgctccattgctgaaatgcttgtgactgataagacactcaagccctatacaggtacatcctaccacagcgaggagctgaagtcattaactcgttatcgttttgagcttgtcaaagaacgtgcgaaactgaaaacttcagtatctaggcttgtaaacatcctgttcccggaacttgagtctcttgttccgactctgcacatgaactcggtataccgtcttcttcaggaactgccgggagcatattttatcgcaagttccaatctcacccacctgaaagctctacttgctgatgcttcaaaagggcactatggtcgtgaaaaggccatcgaaatcagagagactgcaaaatcttctatcggatcacttatgccggctaaatcaatggaactcaggcagacaatccgccgaattgacacactgacttccgatattaaagaagtcgagcagtccattcagaaaatcatggatgagtgtggttctccaattacaactattcccggcatcaagtatcgtatgggtgcaatgattctagcagagattggagactttgcacgctttagcaatgcagatcaagttcttgcttatgcaggactatctccgtctacgtaccagtccggacagctaatatcttcttatgctcgcatggaaaaacgtggctctaagtatctgcgttacgcacttttcaatgctgctatatatgcttctgtgtgggacgagcgattcaggctctatctgtcaaaaaagcgggcagagggcaagcactactatgtcgcaataagccatgtgattaaaaagcttgtcagaaccatctttcggatggaaataacccatacgtcatatcagcctttataagttaaattagctcataatcttttctgagagcatcatcgctgatgctctattcgtcatacagttttcaatgtactaatctatctaaaatacgtttccgtattttattctgaaaatctaaattttatgcttgaccattaatagttagt

SEQ ID NO: 6450 - DNA, 1152 bp, unidentified
  source 1..1152: mol_type = unassigned DNA; note = element_9f9e366
  misc_feature 1..3: note = core
  misc_feature 4..211: note = LE
  misc_feature 212..1129: note = CDS
  misc_feature 1130..1152: note = RE
  misc_feature 10..194: note = bridgeRNA
gcttgtgtcttgatctgggaataaactctgaggtgagaggggtggatggcaagctgtaagtccgcagtgctagaagcacgagtgggagcaaagctgccatccacctttccactctggcccataagcccgaacagttgaacgagcgccactcgaatcacaagcgtgggctaagccagagtgctctcactcctgagtgtaagagggttttgccatgatttcctgggtcggcatcgatatatccaaatcaaatcttgttgtctgggttcaacctcagggcgaaggatttgaggtttcaaacctttctgaaggctttgctgaactgatcaaacgcttaagatgcttcgaggttggccgggtgttacttgaggctacgggaggctatgagcgccaggttatggcagcgcttcaggaggcaaatttcaacgtactccggatcaatcctcgccgagccagagcctttgccgtggcaatgggcaagacggctaaaactgatccgattgatgcggctgttctggccgatttcgccgaagttcttcatgggtctcgtgaaaaacgcatttcgcctgagcgtgaggcgctgcgtgaactgattcagttgcgcgagcacttcgttcagcagcgcgacgataacaagcgtcggcttcagcaagcccagttgccagcggttgtcacggccacccaagaccatattcgctacctaaaaacgcagattaaggcacttgaaaaatacatcactcacagcatgcttgagctcgacgcggaaaaagccaaccgacttatgtctgtgaaaggcattggcatggtggctgctgccagtttgctggtttacctgccggagctcggtgagcttgatcgcagggaagttgcggccctggcgggaatcgcgccgtataacgacgacagtggaaatcacaacggaaaacggcaaatttacggaggaagaggccgcgtacgacatgcgttgtacatgtctagctgggttgtgatccgctatcaagctgacttcaaaacccgctacgaggctctgcgcgagagaggcaagagcgcgaaagtcgcgctcattgcctgcatgcggatactgcttatcagactgaatgccatgctgcgtgacggcaccgaatggaggtgacgaatggcatgttgaagacagtt

SEQ ID NO: 6451 - DNA, 1360 bp, unidentified
  source 1..1360: mol_type = unassigned DNA; note = element_9fa0455
  misc_feature 1: note = core
  misc_feature 2..301: note = LE
  misc_feature 302..1345: note = CDS
  misc_feature 1346..1360: note = RE
  misc_feature 21..298: note = bridgeRNA
ctgtgagagtcgctgttgctgtcttgaccggttgtcaggctggcgtcgaccgtgctcgttcgtgactccgggaatgtctgaccgtccttgagggggcgtgtctttcgggggattcgtccgggcgagtgggccggcgccggcctggcgcgagtgggccggcgccggcctggcgctccgctcgttggcttgatcagaagcttgtccgccgtttgtggcgtgacttctcacagacctgccgcgtgcggttccgatgtgtcaggccggcaccggaattgtcccccgtcgtgcggaggtggaagagatgtttgcagagtcggtcgacgtcgtgatcggcgtcgatacccatcgcgacagtcacgcgctcgcgttggtcgacgccgggctgggtgcgctgatcgcggaggagcgggtcgaggcgaaccgagagggctatcggcgggcgctcaagctggcgagcggttgcggccagcgtcggctctgggcggtcgagggcaccggttcctacggagccggtctcgctcgttatctacagcagcggggcgagcgggtgctcgaactcgagcggccggcccgcagcggtagccgcggccgcgccaagagcgatgccctcgacgcgctgcgcgcagcgagggcagcgttgacgggcgagccgctggccgagctgcgcagcggcggccgccgcgaggcgttacgtgtgctgcttgtcagccgcgaggcctcggtcgcggtccgccgcaagggcctcaaccagctgcgcgcgctcgtcctgaccgcacccgccgagctccgggagcggttgcaggggctgccgaagggcgagctcgtcaaacgctgcatcgcgctgcgcccacgcccgggccagcaaccgcagctgcgcggcacactgctcgcgcttcgctcctgcggccgccaagtcaaactcgccagccgcgaagccgcaaccctcgaacgcgaactcgccgccctcgtccagcagcactcgccgcagctgctcagccactacggcgtcgggccgatcaccgccgcccaactcctcgtctcctggtcccaccccggccgcctccgatccgaagccgccttcgcacgcctcgccggcgcagccccgatcccctgcagctccggcaaaaccatccgccaccgcctcgaccgcggcggcgaccgccaactcaaccgcgccctgcacacaatcgtgctcgcgcgccgccgaggcgaccaacgcacgatcgcttacgtccaacgtcgaatcagcgaaggcaagaccgaacgcgaagcgatccgctcgctcaagcgctacaacgcccgcaccctctaccgactaatggagcacaccaaccgagacgcttgacaaacatagaagcat

SEQ ID NO: 6452 - DNA, 1939 bp, unidentified
  source 1..1939: mol_type = unassigned DNA; note = element_9fa3272
  misc_feature 1..2: note = core
  misc_feature 3..128: note = LE
  misc_feature 129..1415: note = CDS
  misc_feature 1416..1939: note = RE
  misc_feature 1607..1877: note = bridgeRNA
agcttcctgtataattcaagtatagggaattccaagaaagaaggttgagaaaaaaatacctcagagtaaaataagattactgacttcgcaggttagtaaaaatcttattgaacagagaggtatctaaaatgaattgtaacacacaaaacgcaaaaattgcatccataactgaaaaaactttgattgttggaatcgatgtaggaagtgaaacccactatgccagggcattcgactggcgcaactatgaatataccagaaagccactggaattcagtaacacagaggcagggttccagacattcaaagcatggatggaggatatagcggcgaaacacggtaaaactgctgtaataccgggcatggagccgacaggacattactggtttgccctggggaaattcctgcaggacagcgggatgaggcctgtgcatgtgaatccccaccacgtgaaaaaatcaaaagaactggatgacaacaaccccaacaaaaatgaccgtaaagacccaaagacgatcgctgcgcttgtcaacgagggacggttctcgtacccttacataccaaccggtatctatgcagagatcaggagcctgtcaaacctgcgcttccagacgcaggaggagctcacgaggatcaagaaccgcctggccagatggttcgccatctactttcctgaatataaagacgtttacggggatttgaaggcggtgagcgggaggatggtgctgaaggaggcaccgctgccggaggacatcagaaaactgggagtggaaggtgtgaaccggatatggagggacgcaaagctcagaggcgccggaatgaagagggcaaagaccctggtatcggcagcggggcacagcgtaggaagtaaggaagcaccgggagcggcaaggatggaactgaagaacctgctcaacgacatggatgtatatacctcaaggctggaggagcttctcctgaaaatagaggaaaagctgaaagaaatcccatatgttgataaactgatgggaattaaggggatcggcctggcaacagtcagcggattcattgcggaggtgggagacattggacgttttgacaacccaaagcagttacagaagctggcgggatatgcgattgtggcgaatgattcggggaagcataacggcgaaagccggatcagttacaggggaaggaaacgcctgaggtatgtgctgtatgaagcagcgatatccttgattgggaagaatgcagagttcagggcaatacatgagtattaccggacacgtaaagaaaacccattaaagaagatgcagtctgtcgtagcggtagcgtgtaaggttctgagggtattctacacgatactgacaaaaggtgtagactatgatgccggaaaactgatgggcgacatcaggaggccacagatccaggcagcgtaataaacgaacataaaccacaagcaggcaatgccctgtcatagttgggttgaactttcaaaaattttgattgagggttgaatccagctgtgacaggaaagctggaaagtatggggaacgatccgggaaaacgtccaccgaaaggtgccggtgagggaagcatacgggacaggtcagtaagacttataacaaagaatgagccggtagtcggcaggaatattatccatagggcatgaccctgtaaaggagctaagctgacaccctggttatggacaggcgggacgaaggaagttaggacccggcagagatgctggtgatcctggtagacacgggaggtacgctgccgtagaaggaggggcatacacaaggccatgtagagcggaaacggaagacgttctactttgtatacccaacacctctattttcgtaccagatacaaagaaatgtccattatcttggctcattcatctgagatatataactaaaaaatccttgaaaaataaggaaaaagacttgactaaataggg

SEQ ID NO: 6453 - DNA, 1376 bp, unidentified
  source 1..1376: mol_type = unassigned DNA; note = element_9fa7788
  misc_feature 1: note = core
  misc_feature 2..88: note = LE
  misc_feature 89..967: note = CDS
  misc_feature 968..1376: note = RE
  misc_feature 1138..1366: note = bridgeRNA
tatgggatggcccgccccttatctctccaataccgcgaagttggagcgctaagctggcaaggcaaccggagaaacaggagcggggctgatggagatcgcagtattaggtatcgacctgggcaagaacagctgcagtgtcgtggggctggatacaacgggccgtgttgtcctgaagcgtcgcctccatcgcgatggcgtcgtcaagcttgctgggggcctacctagctgcgtgatggcgatggaggcctgctgtggtgcgcaccatcttggccggatactgcgcgatcacggacacgatgttcggctgatgtcgccggaatatgtccggccctacgtaaaggcccagaagaatgatgaccgggatgccgaggcaatcgccgaagcggcaacgcggccgaccatgcagttcgtggagctgaagagtgagacacagctcgacatgcagagcctgcaccgtgcccgcgaccggctgatcggcgagaggacggccctgatcaaccagctgcgcgccatcctgctggagcgtggcatcatcatgccacaaggacggcgaaagctggaactacacctcgatacgcggcttgctggagaaaccgttgcattgagcacaaggacccgcctgctggttgacgacctgcgcctcgagtggcgcgaactggaccgccgaatcgaggtctttgacgccgagttcgcagcgcaggcgcgcaccgacgagaccgcccgattgttgaccacgatcccaggtattggccccttgaacgcaacggcgctggcggccgcaatcggcaacgcccagaactttccaacgtggacgcgacctggcagcctggctggggctggtgccgaagcagatgacaaccggcggcaagccaaagctgttgggcatcaacaagcgaggcaacggatacttgcgcaagatgctgatccacggggcgcgagcggccttgccgccactgtccacgggtgagacgccgatgggcgactggttgcgcggtctgctcgcacgagcgcatgtgaacaccgtggtggtcgcgctggccgccaagctggcaaggatcatctgcgcagtgctgcgtagcgggcggaagttcgagcttacgactgcaacggtatcataaccaatagaattggccagccgcgctcatccggcgcggacggctgatggggtctgcgggtggtaaatgcgagatggcctgacagtcgatcggcgttctggaaacctggccaaaaaaatggcattcgtcgccgccacttttatgaggaccaggacgtgcggatctccatcttggccgggacttgtcccaaggccggatacgttggcgtagactgaccagatcggatcgcagaaatcgcttgcagacggggcgggccatacg

SEQ ID NO: 6454 - DNA, 1498 bp, unidentified
  source 1..1498: mol_type = unassigned DNA; note = element_9fa7ac7
  misc_feature 1..2: note = core
  misc_feature 3..132: note = LE
  misc_feature 133..1164: note = CDS
  misc_feature 1165..1498: note = RE
  misc_feature 1201..1374: note = bridgeRNA
acatggggtaatcgcggcgcgatctcctcagtgcatttttactagatggtactggctgggttggttgcccccgataagatggaaatacgggctcacgattggaaccgggcccaaacatcaatggaggcaaccatggaccagtatatcgggcttgatgtttcattgaaagatacggcgatctcgatccgagaggacgggaagcggatatggcgagggaagcgcgcttcggatccaaagctcttggcgcaggtgatccgcaagcacgccccgcacgccaagcgcgttgtgtttgaaacggggccgttgtcgacgtggttctatcatgcactgatggccgaaggggttcccgcgatctgcatcgaagcgcggcacgcgcaaaagatattgcacgagacgctcaacaagacggatgccaatgatgcggatggcctggcccagatggccgaagccggcttctacaaggcggtccgggtaaagtcatttgacagcatgctgacgcgcaccctggtggcggctcgcaatcagcttttgagcatctcgacccagctcagcaaccagatccgcggcctgatgaaaacattcggcctcattgtttccaacggaaagggtagggtgtttgatggcaaagtgagggagctattagctgggaatgacgcccttgcagcgatcatattgcccctgcttgatgcgtggcgtggcatccgcaagcgcgcggccgatctggatcgccagctgctcgcagtggcacggcagagccagccgacgaagctcctgatgacgatcccgggtatcggcgccgttacggccgtctcctatgttgccgcgattgaagatccagaaaacttcaaaacgtcgcgctcagttggtgcctggcttgggctgacaacgcggcgctaccagtcaggtgaggtcgactatgacggccacatctcgcgacgaggcgacagccatctgcggggactgctgtatgaagcggcaacggtcctcctcacgagaaccagacccggcaacgaaagccgtctcaggagctgggggctgaagctgcgcgagcggttgggcttcaaacgcactgcggtggcggtcgcccggaagcttgcggttatcatgcacagcatgctcaggacaggagaagtgttcaacgcctcggctggcgccgccgcttaagcgacagccagccttcctccctcagcgcgtcaaacctgatttgaggcactgagcgtccgtgctgcggacgtaggttggatcattccgtatcgctcgctgcaacgtaatagaagattgcgccgttcacataaggaagatcctacctgcgaatacccatcatgcggcgacatttgtcgaccgcgaagacaaccctgctcccagcactggacagctctgaaggacatggccgctgagggccgaaccgacaattcggattgcgccgcgttgccttccttcagcccggtaaggatgccgcatgctcaacctctcttgacggacggaatgcgattataca

SEQ ID NO: 6455 - DNA, 1328 bp, unidentified
  source 1..1328: mol_type = unassigned DNA; note = element_9fa9afb
  misc_feature 1..2: note = core
  misc_feature 3..68: note = LE
  misc_feature 69..1073: note = CDS
  misc_feature 1074..1328: note = RE
  misc_feature 1095..1326: note = bridgeRNA
ttaatgagatggtcactccctccttcccggtactatgctgaggacaggctttcattcggagaactatcatggaaaacattgcgctcattggtatcgatctgggtaaaaactctttccatattcattgccaggatcgtcgcgggaaggctgtttaccgtaaaaaatttacccggccaaagttgatcgaatttttggcgacatgccccgctacaaccatcgcaatggaagcctgtggcggttctcactttatggcacgcaagttggaagggttggggcattccccaaagctgatatcaccacaatttgtccgcccgttcgttaaaagcaataaaaacgactttgtcgacgccgaagctatttgtgaagctgcatcgcgtccgtctatgcgttttgtgcagcccagaacggaatctcagcaggcaatgcgggctctgcatcgtgtccgtgaatccctggttcaggataaggtaaaaacaaccaatcaaatgcatgcttttctgctggaatttggtatcagcgttccgcgaggtgctgccgttattagtcgactgagtacccttcttgaggacagtagtttgcctctttatctcagccagttactgctgaaattacaacagcattatcactatcttgttgagcagattaaagatctggaatctcagttgaaacgaaagttggacgaagatgaggttggacagcgcttgctgagtattccctgcgttggaacgctgactgccagtactatttcaactgagattggcgacgggaagcagtacgccagcagccgtgactttgcggcggcaacagggctggtaccccgacagtacagcacgggaggtcggacgacattgttagggattagcaagcggggcaacaaaaagatccgaactttgttggttcagtgtgccagggtattcatacaaaaactggaacaccagtctggcaagttggccgactgggtcagggagttgttgtgtcggaaaagcaactttgtcgtcacctgtgctctggcaaacaagctggccagaatagcctgggcactgacggcgcgacagcaaacttacgaagcataaaggcagaaatacaccagtttaaacaatcattcatctggttttgcgaatactgatattgatgatactaacggcccaccggcctgttgaggaacctgtaaaacggaaaggctcattgaagccgtatattttctggaggttcatcaggcgcggaactcatcgaggcgcgggaataaaatcccattcagacgccggatagattcaagcaagccaacttgtcgtcaaaatcggtgttgcaaaaacgggagtgaccataga

SEQ ID NO: 6456 - DNA, 1370 bp, unidentified
  source 1..1370: mol_type = unassigned DNA; note = element_9fabac3
  misc_feature 1..2: note = core
  misc_feature 3..75: note = LE
  misc_feature 76..1110: note = CDS
  misc_feature 1111..1370: note = RE
  misc_feature 1083..1358: note = bridgeRNA
tgatggggtggacgccccccgacagcatcgatgtgccatagtggaggtgttgatcaccactgagaggaggcgtccgtgtcggaagttaccacaatcggtctggatatcgccaagagtgtttttcacgcgcacggcgctgatgagcacggtgctatgctgttcagcaggaagctgacccgtgcgaagctgctcgagttttttgcagggcagcctcgttgcattgtggctctggaggcgtgtggcggagcgtatcactgggcccgccagctgcaggagatggggtttgccgtgcggctgatcccgcctgcctacgtgaagccgtacgtgaagcggcacaagaacgatgcgatcgatgcggaagcgatctgcgaggcagcgcagcgtcccggcatgcgctttgtcgcggtgaagagcgaaaagcagcaggcagcagggctggtgttccgcacccgtgacctcgctgtgcgtcagcgcactcagctgatcaacgcgatccgcggccacctggcggagtatggctgggtcgcgccacgcggaaaggcgagcatgacgatgctggccgacctgcttggcgaggaggagatggcctcaagcctgcccaaggcagcagtgccgatgttcaggctcatggtcgacacgctggcggagcttgatgagcgcatcgctacacttgatcgcgagatcgccaggcgcgccaaggaagatgaggcggcgcggcggctgatgactattccgggcgtcgggccgatcgccgcaacagcgatcgtcgcactggcaccgccgctcgagaccttccgcaagagccgcgactttgcagcctggctggggcttgcgccacgacagcactcaaccggcggcaaacagcggctcggtagcatctcgaaaatgggcgagcgtactatcaggcgattgctgatcattggcggcagctcgattgtgcggcaggcgtgtcgccgcggtgcgccggccggctcgtggctggagggcatgcttgcccgcaagccgcgcatgctggtctcggttgcgcttgccaacaagatggcgcgcacggtctgggcgctgctgacgaagaacgagaattacagagctccggcagcgatcacggcgtaagccgaggtcgaggccagaggcgtcggggacgtaggcggtcgaaggagggtatggcacaatcgtcggcgagacggggctggaaaaaccagtgaatggcagagcgctatccaagcgcgcttagctgtattggatctggtccgcgaactcccatactggcccgcagcaaaggcgctgcacatcgaggccggacagatggcagcatccgactacgttccaacgtaccccaatttaacgcttgcatccgaaggggcgtccacaga

SEQ ID NO: 6457 - DNA, 1156 bp, unidentified
  source 1..1156: mol_type = unassigned DNA; note = element_9faecf0
  misc_feature 1..2: note = core
  misc_feature 3..208: note = LE
  misc_feature 209..1144: note = CDS
  misc_feature 1145..1156: note = RE
  misc_feature 36..214: note = bridgeRNA
cttgtcttatgacattatttggcggagaggcgagaatgaaccgctgggagagagtagcagctctctcgtcagcggcgagggatggatcgtcgacgcgctggccgtttgaggggccgagctaaagtttgatcaccctcgtctttttccgaaggcctgaacggatacgcgcagtttaagctgcgcatgacaagcagaggcacggcaaaagatgaccgagattaccattggcgttgacgtctcgaaagaggcgctggatgcctatcgcttccccgatggcgagagccgccacttcgacaacaacgccaagggtcacaaggcgctgatgcgctggatcggctccgaagtcacccggatcgtctacgagcccaccggggcttaccatcgcgggtttgagtgcaggcttgccgaggccggactgcccctggtcaaggtcaatccgcgccaggcgcgccgcttcgcggaggcgaccggcaagctggccaagaccgaccgatgcgatgctgcgatgctggcgcgtatgggggcagtgctggctttgacggcgcggccgcttcgcggcgcactgctcaatgaactcaaggatctacacatggcccgtgcggctctgatcaaggatcgcaccgcagccaggaacagagccaagaccctgacccttgccttgctcaagcgccagaacggcgagcggttgaagcagatccaacgtcacctcggcgatctcgatcagacgatccttgcgctcatcaaaaccgatcccgaccttgcccagcgcctcgacatcctgaccagcatacccagcgtttcgcacgcgaccgcatgcgcgctcatcatcgatatgcccgaactcggagccctccagccgtcagaggccgcaagccttgccggcctcgctccggtcgctcgtcaatcgggcacatggaccggccgagccttcattcgcggcggccgggccaatgttcgccaagctctctacatgccggccctcgtcgccatgcgcttcaacccggatctcaaggcaaaataccaggcgctaaaggcggcaggcaaacctccaaaggtcgccatcaccgccttgatgcgtaagctcatcatcctcgcaaacgcgctcatcaaggcacagcgaaaatgggcccctaaaacaccttgatcaaaacggata

SEQ ID NO: 6458 - DNA, 1432 bp, unidentified
  source 1..1432: mol_type = unassigned DNA; note = element_9fb467d
  misc_feature 1..3: note = core
  misc_feature 4..134: note = LE
  misc_feature 135..1154: note = CDS
  misc_feature 1155..1432: note = RE
  misc_feature 1192..1432: note = bridgeRNA
agaatgatatgaacgcctcccacccgtgagcggtggaagcgaagaaggaaggtggaccctcacgggccgacggcatcaaagtgcccagggtggtagatcatgcagatcttcacagacaaactggagggtccgacatgaagcttacgacagtgggtgtggacattgcaaagagcgtgatgcagctccattacgtcgacgcggaaacgggcgagatcgtgaacaaaccggtcaagcgcgtggcgtttctcgagcacttcgcgaaccggtcgccgtgcctgatcgggatggaagcctgcggcggctcgcagcactgggcgcgcaagctcacggcgatgggccatcaggtgaagcttatgccagggaagttcgtgaaggcattcgtgatgggcaacaaaaatgatgcagccgatgcgcgtgcgatctggatggcggtgcagcagccgggcaaatcggtcgcggtgaagacggaaacgcagcaggccgtactgggactgcaccggatgcgagagcaactggtgaagttccgcacgatgcagacgaatagtctgcgcggcctgctgaccgagtacggcgaagtgatgggcaagggccggcctgctctggacaaagcgattccgggcgtactggagcggctggtggatcgtttgccgacaatcctgatcgacacgctgcgcgaacagtggaacggactggctgaactggataaacagattgcccagatcgaacgacgtctgcagacgtggatgaaaaaggacaacgcttgcaaagcgatcgccgcaataccgggcgtcggtctgctaacggcgacggcagcggtcgcaacaatgggcgacgcgaagacattccggtcggggcgcgagttcgcggcctggatcggattggtgccagcgcagacaggatctggtggcaaggtccagctccaggggatcagcaggcgtggtgacacatatctgcgcacgttgttgattcacggcgcgcgcagtgtgctcttccacgcgaaagaaccggggccatggattgagcagataaaaaagcggcgaccactgaatgtggtgatcgccgcgcaggccaacaagatggcccggatgatctgggcgatcctcgcgcacgacaggccgtatgaaaagagttacgtgagcgtgaagccggtctgactggtgagcggtacgcaggaagatcaatttttaccggatgacacgtcgaaaggttgcgctggcaatcgtatgcgatgacaacacaggccggaccgggactcgctaaacctgaatcatctctagagcttcgggctcgtttgaagaatgaggtgtgggtcagcggatttcatagtgggccgcagcggatcaggctgcaacaagcccggatatagagctgcaacccatcctgtcgtcgtctgagcacacgaatagccgtcgcaaacgggaggcgttcatat

SEQ ID NO: 6459 - DNA, 1608 bp, unidentified
  source 1..1608: mol_type = unassigned DNA; note = element_9fd0f4e
  misc_feature 1..4: note = core
  misc_feature 5..286: note = LE
  misc_feature 287..1483: note = CDS
  misc_feature 1484..1608: note = RE
  misc_feature 30..306: note = bridgeRNA
tttggtacaatataagcgtagccctatacagatcaaatcggtatagtcagctatgcttatttttgttataataagagagcaatggactgacgaggttttctttgaacttcgcgttcggtagtcaaagcgtcatccgttctcttattataaagattcgattaagcaggttgttccgattttgcagggggcgagccccctgcaaaaaatcgcgtccgcgtcacgagccaaaatgagtcgtaataagctgaaacggtacattgcagaataaacaaaaaggaggatttttatgatctgcgttggtattgacatcgcaaaaggaaaaagcaccgtgtgctttttgaagccgggcggagaggttctgaaaacaccttacgacatggaacacaccgcagaggaaatcacaaagctcatacgggatattcgctcgtatgacgaggaggttcgtgtggttctcgaagccacgggacactaccacttgcctgtggtagctcaattgctggaagcaaatgttttcgtttgtgtggtgaacgccttacgtatgaagaagttctgctcacaagatatacgaaaagcaaagacggacaaaattgacgcggctaaaattgccgccttcggtcttacctattggcaggatctccaagctgccaagccgacggatgaagtctaccgcgagctgcggttactttcacggcaatattttcaacttacgtctatgctcgtgaaagccaagatctcgctgggtaatctccttgacaacgtgatgcccggtattacagatcttctttacgaccgggaacctcaccacaaattaacggattttgttctcaggtatttgcattttgacaagatttccgctatgggggagagaaaattcaccaccgattactgcaaccgggcaaaaaaacagggataccgcatgtacgaacgccaggcagaagagatcttcgccttggttcaaaacagtatccctgcgctccctatgactgcatccaccacgatcgtcgtcaaggaagctattaaagttgtgcgagaactcgaaaactctcgcgcatctattttagcacaaatgcagacgtttgccaagtcccttcccgaatattctttgattcgtgagatggcttgtgttggagatacgctgactccacttgtcattgcggagatcggcgacgtcagaaactttcactccaagcacgctctgattgcttatgcagggatcgatgcgccgccttaccagtccggcggattttacgggacagaacgacacatctcaaagcgaggaaacggttatctacgtcatgttggatttgagataatgcaatgcaagctccgactaaaacccgaaggtgatgcggtctatgactttattcaaaagaaacgttccgaaggcaaatgtggcaaggaagccatggttgccggtattaacaagttcctacgtatttactacggcaaggtcaccgagctttaccgtgacttagaggcttaattacatacaaccgaatacctctcgggcgaaaaaatttatcccttttcgcccttttggtgcttcttctattacctcaaaaaaagtttcaattgttttcgaaaaaactgttgacttttcttagcagg

SEQ ID NO: 6460 - DNA, 1360 bp, unidentified
  source 1..1360: mol_type = unassigned DNA; note = element_9fd3e10
  misc_feature 1..2: note = core
  misc_feature 3..65: note = LE
  misc_feature 66..1088: note = CDS
  misc_feature 1089..1360: note = RE
  misc_feature 1119..1347: note = bridgeRNA
tgatgtcgtggacggcgctccacctgaccggcacttttgtcggtctgtgtggagaggaggacatgatggaagacgttgcggttgtcggcgtcgatctcgccaagtcggtgtttcaggttcacgggatcgatgctcgaggccaggtggtgctgcgccgtcgcctgcggcgatcgaagctgctttcattcttcgcaaagctgccggcttgcctcgtcggcatggagacctgcgccagcgccacccactgggcacgcgagctgatggcgctcggtcacgaggtgcgcctcatgccgccccaatatgtgaagccatacgtcaagcgctcgaagaacgatgcctcggatgcagaggcgatctgtgaggcggtcacgcgcccaacgatgcgctttgtgggcgtgaagtcggctgagcagcagagcgttctggtgcttcatcgcacgcggctgatcctgacgcgtcagcgcacgcagacaggcaatgccatccgtgcgcacctcgccgagttcgggatcgtggctccggtcgggcggctggggctcgatcgtctgctcgcggttattgccgacgagggtgatcagcggcttccgacatcggcacgctcgtgcctggcaatgctgatcgagcagcatcgcctcgtgctgacgcatctgctctatactgaccgggcgatccgcgctcacagtcgtgcaagcgagctcgggcggaggctgcaggagattcccggcgttggaccactggtcgcgagcgcgcttgtcgcggcagtgccagatccgcacgtcttcaggagcgggcgaagcctctcggcatggcttggcctcgtgccgcggcagaactcgtcgggcggcaaggaacggctcggcaggatcaccaaggcgggcgacacgtatctgcgcaagatgctgttcgtcggcgctatggcggtcatccgccatgccgagcggtacggcacacgcaagccctggctgatcaagctactcggccggcggcacccgcgcatcgcggcgatcgcattggccaacaagatcggccgcatcgcctgggcgctgatgactagcggcaagcgctaccgcgagccggtgcccgcatgagctaaggcgcgaacgcgcaaacgaggttggcaagagcaggagactgactgactgaagctgccaaacggcgggaccgacggtccgggaaaacccatttacgacccggcgctcttaagcgcgtgcaattggttgggacccaaggatccgcggaaaaggcatcatggccagcgacacatggataggccgcatcaacaggtcgaagacatggccgcatcccaacacagcagccaagcgcggcaatctgaacttgctaacggagcgccgtccagaca

SEQ ID NO: 6461 - DNA, 1204 bp, unidentified
  source 1..1204: mol_type = unassigned DNA; note = element_9fdc819
  misc_feature 1..2: note = core
  misc_feature 3..220: note = LE
  misc_feature 221..1189: note = CDS
  misc_feature 1190..1204: note = RE
  misc_feature 6..225: note = bridgeRNA
cttgtatgttcaaaccagaccagcgcggtacagttgggtcactgctgaggtgaccagacagggacgtgcagcctggaaagctctggagacggcaagcatgcttgccagctcgtgactgagtcgattgcgcacggaccccgtgctggtcttttgggtgcccgaacggttagccgagcggcgtttggcctgctcgcatgtacaagaaggggagatgaagaccatgtctggatcatccgtgatggtggggatcgacgttgcctgcacgcacgtcgatgtggcttgtctgggggcggccttgccggccgagttggcccgtgtcagcaacgatgccgaggggcattcggccttggccgaagccttggtcaagctgcaacccgcgctggtgctcatggaagccactggcggctacgaggcggcgctggcgtgcgcgttgcaggcggcgggtctgcgggtggcaatcatcaacccgcgcatggcacgggacttcgcccgtgcgatgcagcgcctggccaagaccgaccgcatcgatgcggccaccctggccgagttcgccgccgtgctggctcagcgccccgactgcgagcgcttcgtgcgccccttgagcgagcccgagcagcaggatctggccgctttggtcacccgcaggcgccagctcgtggcgatgcagttgtccgagcgtcagcgcctgcgcctggcgcgcccggtcgcacgcccgagcatcgaggccttgctgcaggccattgcccgccagctcgacgacgtcgatgcccagatgctcagccatgtcgagcagcaccatgccgcaatggccaagctgttgcaaggcgtggccggcatcggtcgcatcgccgctgccacactgatcgccgagctgcccgagctgggacggctcaaccgccgccagatcagcgcgctggtgggtgtggcaccatacgccaacgattcgggctccagtcgaggccgaaggcgcatcgtcggcggacgcttcgaggtgcggcgcgccctgtacatggccacgctcaccgcaacacgagtcaaccccgctatccgcgccttctacgagcgcttggtggctgcgggcaaactcaaaaaggtggccttgatcgcctgcatgcgcaagctgatcacccacctcaatgccatcgcccgaaactacctcaacgctcaacatcaacctctgactacttgactttgaacacggtta

SEQ ID NO: 6462 - DNA, 1436 bp, unidentified
  source 1..1436: mol_type = unassigned DNA; note = element_9feebd8
  misc_feature 1..2: note = core
  misc_feature 3..229: note = LE
  misc_feature 230..1420: note = CDS
  misc_feature 1421..1436: note = RE
  misc_feature 10..222: note = bridgeRNA
tccctacgttgttctgcgggacgtggtgaacccttcgtatggttcacccacccaggggcgccgagtgtggctctaactgatctgctgttcgtagctggaaacgattggccgctcggcgccccacgacgactcggctgctaattaggaattgcgaatgatcgctgagtagggatctgacagcgaagtcgtccgtgggaggcacccgcagcgcactgtacggaggcaccacatggccgcgatctgggctggcatcgacgcaggaaagacacaccaccactgcgtcgcgatcgacgagagcggccgtcggctgctgtcgcggcgcgtcgcaaacgacgagtccgatctcctcgaacttctcaccgacgtcctggccttgggcaaccaggtgacttggggaatcgacttggccgacggcggagccgccctggccatcgcgatcctcctcaaccatgaccagctcgtccactacatctccggccgagccatccaccgagtctccgagagctatcgcggtgaaggcaagaccgacgccaaggatgccgcggttatcgcggatcaggtacgtatccggcgtgacctgcagcccttacgcgccggcaacgagaccgtcaccgatctcaagatccttaccggtaggcgaatggacttggtcgcggaccgcacccgcaccgtcaaccggctgcgggcgcaactgtccggactcttccccggcctcgagcgggcgctggatctcacgaacaccggcccgctcaccctgctgaccggctaccgaaccccggctgccctgcgtcgactcggcaccaaacggctggcgacctggttacgcaaccgcagcgttcgcaatgccgaccagctcgcgcagacggcctgtgaagccgccgagcgtcagcacaccagcctgcccggcgagaggctgatcgcgcagatggtgcacacgctggcgaaggaggtcatggctctcaacctgcaggtctccgagctcgacaagctcatcgaagcccggtttcgtgaccaccaccacttcgacgtgatcaccagcatgcccggactgggcgtcatcctcggtgcggagttcctcgccgccaccggcggcgacatgagcgtcttcggcacctccgatcgcctcggcagcttcggcggcgccgcgccggtcccgcgcgactccggcaaggtcaacggaaacctgcggcgcccacagcgatacaaccgccgccttcaacgcgtcttctacacctccgccctattcagcatccgaaggtgtgaggagtcccgccgtttctacgatcgcaaacgggccgagggaaagcgccacactcaagccgtcctcgctctcgcccgccgtcgcgtcaacgtgctctgggctcttctacacgaacaacgatgctacgagcccattccgccgacagccctcgcggcttgacaaacgacattaggaa

SEQ ID NO: 6463 - DNA, 1499 bp, unidentified
  source 1..1499: mol_type = unassigned DNA; note = element_9ff7f58
  misc_feature 1..2: note = core
  misc_feature 3..249: note = LE
  misc_feature 250..1479: note = CDS
  misc_feature 1480..1499: note = RE
  misc_feature 7..233: note = bridgeRNA
ctaatgagacttgccgggtcggttgcggcagactcggcaccggtagccgctggcgggtgagcactcccggttgcaggacgcgttgcagtcctattgacagatcgtgcccctgccggtggtcgggagacggaatcgctgatgggatgtcgtgcccgccgcaggtgcgtgagcacttgatcattagcttgcggaaggtctcccggaggctgccagacagctcgcgcgactgtggacctgcgggaggacgacgtgctgttcgtgggagacgactgggccgaggaccaccacgatgtcgagatacaggacgaggcgggccgacggctgggcaaggcgaaactcgaggaagggatcgcggggatcgccggcctgcacgcgctgatcggccagcagttgggcgaggacggcgacccggtccaggtggtggtcggcatcgaaaccgaccggggtccgtgggtgcaggcgctgatcgcggccggctatcaggtgtatgcgatcaacccgctgcaggtggcccggtatcgggaacggcacgccgtctcaggtgcgaaaagcgacgctggtgacgcccacgccctggccgacatggtgcgtaccgaccggcatcagctacgcccggtcgccggcgacagcgctgcagccgaggcggtcaaggtcgtggcccgggcgcacaagacgctgatctgggaacgcacccgtcacacgttgcggctgcggcagacgctgcgggagttcttccccgccgccctggtcgcgttcgacgacctgaccgccgtcgacgccctgcagctactgggcaaggctcccgacccggcgtcggcggcccggctgaccactgcgcagatcaccgccgcgctgagacgggcccgccgtcgcgacgtgccggccaaggccgagaaggtgcaggccgcgctgcgcacccagcagctgggccagccgccagtggtcaccgcggcttacgcagccaccgtccgcgcccaggtagcgatcctgaccacgctgcacacccagatcaaggcaatggaagagcaggtcgaggcgcattttgggcagcacccggacgctgagatctacctcagccagcccggcctgggccgaatcctcggcgcccgggtgctagccgagttcggcgacgacaccacccgatacgccgacgccaaagcccgccgcaactacgccggaaccagcccgatcacccgccagtccggcaagaagaagatcgtgctggcccgctacgtgcacaacgaccgactcatcgacgccctcggccggcaggccttcgccgccctgaaagcctcccccggcgcccgcgcctactacgaccagcaacgccaccgcggcctcggccaccacgccgcactacgccaactcggcaaccgcctcgtcggcatcctccacggctgcctcaaaaccggcacccactacgacgaagccaccgcctggcaccaccgcgaacagcaccaccaagacgccgctgcttgaccgcagcgctcatgggatgt

SEQ ID NO: 6464 - DNA, 1356 bp, unidentified
  source 1..1356: mol_type = unassigned DNA; note = element_a0040df
  misc_feature 1: note = core
  misc_feature 2..71: note = LE
  misc_feature 72..1076: note = CDS
  misc_feature 1077..1356: note = RE
  misc_feature 1121..1353: note = bridgeRNA
taatgagatggtcacctccaccctgtgagcggtaagctgacagggtgttttttctttcaggagaggccatcatgcaaaatgtcacgcttattgggatcgatctcggaaaacactctttccatgtgcattgccaggataagtccggtaaggagcttctacgcaaaaagttcacgcgtacaaagttaatgttatttctggcaacatgtccaacggcgaccgtagttatggaagcctgtgctggtgcacattttatggcgcggcgtatcaatgacatcggtcatgaagtaaaacttatctctcctcaattcgttcgcccgtttgttaaaagcaataaaaatgactttgttgatgcagaagcaatatgtgaagcagcgtcacgtccttccatgcgctttgttcagccaagaactgaagtacagcaggcaatgcgggcattgcatagggtcagagaatcacttatcagagataaagtaaaaaccactaatcagatacacggatttctgctggagtttggaatcagcctgccaatcggtaatgcagtgatcaagcgtctgccaacgatacttacagaacacgaaatacctgaataccttgaccgtttattgatgaaattacaggctcattatttttatttggttgaacagataacagagctggaatcggaactaaaccaatctatcgaagctgacgatacagcacgacgaattatgacgataccaggtgtcgggccgatcactgccagcctgctctcatcccaacttggcgatggaaaacaattttcatgcagcagggattttgctgcttccacagggcttgttccccgacaatacagcactggcggtaaaaacaccctgctgggtattagcaaacggggtaacaaaaacttacgtcgtttactggttcagtgtgcccgatcattcatgatgcggctggagaatcagcagggcggacttgctgagtgggtcagagagcaactgaacaacaagcactcaaatgttgtcgcctgcgctttggcgaacaagttggcccgaatagcatgggcaatcaccacgaaccacagtgaatatcaggtctgatgtatgcgtgattgattaaattcattaattattaacaggttaatagtagttacccatctggttttgcgacgattgattattgatgacatgaacggcatattggcctgatgaaaaacctggcgaaaaaaatggctcattgaagccgcggggatttttaagaacatcaggcgcggaactcatcatggcgcgggcatccttgcccatagtgacgccggatagatttaagcaagcccaccattaatcaaaaatcagtgttgcaaaaatggaggtgaccatagat

SEQ ID NO: 6465 - DNA, 1365 bp, unidentified
  source 1..1365: mol_type = unassigned DNA; note = element_a01d8ca
  misc_feature 1..2: note = core
  misc_feature 3..86: note = LE
  misc_feature 87..1118: note = CDS
  misc_feature 1119..1365: note = RE
  misc_feature 1114..1347: note = bridgeRNA
tgatggggtggacggcccccgcttccggcatcgatgtgccataacgtggtcgtctgtaagcgccacaatgagaggagccgtccaccatgcagattaccaccatcggtttggatctcgccaagaactggttccaggtccacggcgtcgacgccaatggacaggtcgtggttcgcaagcggttgtggcgcagcggcgtcatcgcctacttccggtcgctcgagccgtgtctggtcggcatggaagcgtgcgcgacagcgcattactgggcgcgtgagctggccgcgctcgggcatacggtgaagctgatgccgccggcctacgtgaaggcctacgtcaagcgcaacaagaacgatgctgccgatgcggaagcgatctgcgaagccgtaacgcgaccttcgatgcggtttgtgccggtcaaggacgccgagcaacagtcagtgctgatgctgcatcgagtacgcagtcttctggtccggcaacggacgatgttggtcaatgcattgcgcgctcacatggccgaatttggcatcattgcgccgcagggcctcaggcatgtcgagatcctgacaaagacaattgctcatgaacaaaagcagctcccggaactcgcgcgctcgatcctgcagacgattgttgaacagctgaacggcacgatggctaggatccgagagatcgaggtgagtatcgcccgttggcatcagcagaaccgggtcagccgctcgttggcgaccgtgccgggtgttggcatcatgggtgcgagcgctgttgccgcgactgtcgccgatccctccctgttccgatcaggccgagagtttgccgcctggctggggatgacgccacggcagaactccagtggcggcaaggagcacttgggccggaccagcaagcgcggtgacaaatacatccgcagcctgctgatcgccggtgcgatggccgtgctgcgccatgcgcgcaatcgaccgacacgcgacggcgagtgggtccgcgctctgctggcgcgcaagccgaccaaagttgccgcagtggcactggccaacaagaccgcccgcatcgtctgggcggtgatgatgcgcggggatggttaccgcgcgacggaggttttcgggcagccggcataggcgccgccagcccgttcagcatgcgagggtgaagaggatgtgatggcgagcggtcgagccgcggatcgggaagacccggaaaattcaaagcgcaaagcagcgcgtaatcttgatagggacccgatcagcgaactccatcagggccagcggtcagatgaccgcaccaaagggccggacatatgactgcacctgaccatttcgccaaagctgaactcaacatctttcgcaggcgggggccgtccacata

SEQ ID NO: 6466 - DNA, 1167 bp, unidentified
  source 1..1167: mol_type = unassigned DNA; note = element_a01deea
  misc_feature 1..2: note = core
  misc_feature 3..159: note = LE
  misc_feature 160..1161: note = CDS
  misc_feature 1162..1167: note = RE
  misc_feature 3..193: note = bridgeRNA
cttgtattagcgcgaatcgctatggtgcatgccgttccgtggggaacggcccggcccaggtggccgcctagaccgggccgccggtcgtcggatcggaggctcgcgagccaccagggctgctgctgagcgggatcgcgatcggctcttcatcggacccggatggttgaaggaaccgagggttcgcatcacaaggaaggggcgacgaagatgagcaagtctaccacgatgtgcgccgggatcgataccggcaaacacaagctggacgcggcgatcgatggctgcaccgagcggctgcaggtcgacaacaacgcggaaggccatcgcgctttgtcggcctggctgcggcagcgccgggttgagcgcatcggcatcgaggcgagcggtggttatgagcaggcggtggtctcgtcgctgcgggcggacggctttgtggtcatcgtcttccagccgatccaggtgcgcgcttacgccaagttcgtgctgcaacacgccaagaacgacgccatcgatgcggccctgatcgcccgctgtacggccgcggccacggacacccgtgaaccgccggatgcgcgtttggcgccgctggcccggcatttgacgctgatcgagcagctcaccgaggatgtcggccaactcaagacccgccgtgaggcgtgccgcgaggagcggattcgggagttctggaagcaggagatcaacaggctcaaggctcttctgagcagcgagctcaagcggctggtcgccgccatccgcgagcatcgcgacctgtccgatcggctcgacctgatcgccagcgtggacggtgtcgggctgcgaaccgccgtcgccatcctggtgcgcatgccggagatcggccgcatcacccgtgaacaagccgccgccatcgtcggccttgccccctatgacgatgacagcggtctgcggcgcggctcccggcgcatcaagggcggccgtcagcgattgcggcagagcctctatgcggccgctcttccggccgtcttctattggaacgcccaattgaaggctgtctacaagcgactgctcgcggccggaaaacctcacaggctcgccctcgtcgcctgcgcccgcaagctcatcatcttcgtcaacaccgtcgtcgcacgcggcaccccttggacgtcctccgcagccgccacataatggttg

SEQ ID NO: 6467 - DNA, 1425 bp, unidentified
  source 1..1425: mol_type = unassigned DNA; note = element_a01e8f3
  misc_feature 1..2: note = core
  misc_feature 3..340: note = LE
  misc_feature 341..1162: note = CDS
  misc_feature 1163..1425: note = RE
  misc_feature 1177..1356: note = bridgeRNA
acatggggtaatcgcggatcgtactgaacccttttacgacttggacgggcgatatcggtgccatcaaagttcggcgctaagatgaagcgctggttggggaagtagccctgatcctgcctatgacggaggacgaccatgagcgcgtatgtcggtttggacgtttcgttgaaagagacagcggtatcggtgcgacggggcggcaaacgcatctggcgtggaaaatgtgcgtcagatccgaaggttttagctgatttgatccgcgcacgcgcgccggacgccgagcgggtcgtattcgaaaccggtcaattgtcgacgtggttctaccatgcgctcaaggccgatggtgttcctgccatctgcattgatgcgcggcacgcgaactgcgctggatatggccgcgaacaagacagacgcgaacgacgcggatggtctggcgcatattgcagaagtcggcttctaccgggaagttcgggtaaaggggttcgagagcatgctgatgcgtacgctggtcgcggcgcgagatcagattctcaaagtgatcgtccagatgtcgaaccagattcgcggactgatgaagacctttggcctagtcgtgccgaaaagtgctggtggtgcttttgagggccatgtccgtcgattactggcggataatacccagcttgaacggatcgtcttgccgatgctcgatgcctggcgagggttgcgtatgcaggctgctaaacttgatgggcaacttcgtgccgcctcgcggttggatcaacgatgcgctctactcatgtccattcctggcatcggtccggtcacggcgtcttcgttcgtcgcagccgtggaagaacctggcaatttcaaatcatctcgtgcggtaggcgcttggcttggtttgacgactaggcgctaccagtccggcgaagtcgattacggcggccacatatcccgtcgggggagatccgcgcctccgcggcctgctttacgaggccgctgtcgtgatcctgacgcgtcgacgggcgaaagcactttgaaacagtggggtgtcggattgagggaacgtctcggcttcaagagagcagccgtggcggtcgctcgcaaacttgccgtcatcatgcaccgtatgctgcatacaggagagcttttcgaccggaccgctggcgctgccgtcagctgacaacagcttgaccgaaatgccagcctgaggatgcccctgccggggcgtaggccggatcattccgctatgtccgttgcgagaggcgacactgcctgaatgcgcatagaacattggaagatccgcttttacgaaaacccatcctgcggcgccaaatggcgaccgcgtagacgaccatgtaccggcagaagcagtcatcagatgatgtttttaacaggtaggaaatgcgcccgatgaaatctccttgaccccaccgcgattagacg

SEQ ID NO: 6468 - DNA, 1411 bp, unidentified
  source 1..1411: mol_type = unassigned DNA; note = element_a022488
  misc_feature 1: note = core
  misc_feature 2..89: note = LE
  misc_feature 90..1133: note = CDS
  misc_feature 1134..1411: note = RE
  misc_feature 1176..1406: note = bridgeRNA
caatggaatggacgccccaccttaaacggcattgatatgtcaaattggggtggcgtatcaatcctttttcatcgacaggagtgtccaccatgaaagttacaaccgttggcattgatctggcaaaaaacgtgtttcaaattcacggcgtcagtgaattcggcaagccccttatcaaaaagcaattgcggcgcaatcaaatggccgagttcttcgtgaacttgccaccttgcctggtcggtatggaagcgtgcggtagcgcccaccattgggcccgcaagctgcaggcgatgggccacactgtcaagctgatggcggcccaatttgtcaagccgtacgtcaagacaaacaagaatgatgcggctgatgcagaggcaatttgcgaggctgtgacccggccgaacatgcgcttcgtgccgatcaagaatgttgagcagcaaagcgtgctgttgctccatcgtgcgcgccagggattcgtgaaggcgcgtaccgcccaggccaatcagattcgaggcatgctgagcgagtttggtctgatcattcccctgggcatcaggcatatcgcaaaccatgtgccagaactcatcgaagatgccagcaacgtgctacccggatcatttcggctgctcattgagcgtttgttaaatcaccttaaggagttggaccgccaagtcgatgaactggagtcgcagatcgtagcgtggcatcgtcaaagtgaagccagcagcaaattggcacggatacccggcataggtcccatcactgctagtgcgctggtggcctcactgggagatgccaagagcttcgatagcggcaggcaggtcgctgcctggctgggtctggtgcccaagcagcactccagcggaggtaggcagaacctgttggggatcagcaaacgcggcgactcgtacctgcgaacccttttgattcacggagcacgctctgtggtgttgcgtgcgagtctaaagagcgatccgaaccgcacgtgcagttggatcaatgacgtcgtcaaccggcgtaacaagaatgtggcggcagtggcgctggctaacaaaaatgcccggatcgcctgggcgttgctaacacatgacaggcgatatgaggccgggtacatcgcttccaaggccagcgcctgaagaaccaactatgggacagcagtaataacgacaccgggagaacgaaaccaccgattgcacaggcaatcatgaagttgatggcgaaccaggtcagaccgtggttggcaaagcccgctgaagtacaggcactttgagtgcatgaaggcgatggggcactaaccagcgaattccatcagggacggcggcattgccgcaaaagagtccgaatgtacggctgcaatctttaccttttagtcatcacatgaattgaatgcttggcataccggggcgtccatgta

SEQ ID NO: 6469 - DNA, 1254 bp, unidentified
  source 1..1254: mol_type = unassigned DNA; note = element_a022b17
  misc_feature 1..2: note = core
  misc_feature 3..208: note = LE
  misc_feature 209..1132: note = CDS
  misc_feature 1133..1254: note = RE
  misc_feature 12..185: note = bridgeRNA
cttatctgttcggaatctggcagtttaggtgtcgagagccggcgtgggctgccgtcagagcctggatctcagcgatcgccatgtagcttggtacccacgccggattctcccttgattcgcccgaacagttgcccgagatgacactcgaaacgataagactgggcaggcgagggagctctcgacatttctagcctagcggagatttcccatgagcggaatcgggatcgatgtgtgcaaacactttctggacgttgcggtttttcgaggccaaacccgtcagttcaccaacaccgcaggcggtcatcggaagcttgtcgattggctcaagacgctgtcggtgcggcaggtggtgctggaggcgaccgggggctacgagttggcagcgctggatgccttgcatcacgccgcactgccggtggcgcgcgtcaatgcgcaacgggcacgcaacctggccaacggtttgggactggccaagaccgaccggctggacgcggccatgttggcctgcatggccgagaagatggagctccatcggtatgttccgctggagccctggcagcgcgatctgggcgagcatgtacgtgcccgtcggcaactggtcgaactgctgaaagcagcaaggcagcagttgctgcaggttgcggaaaaagcgctacgaaggatcctgcagggcaacgtgaaccagcttgtgcgcagcgtggcgcggctagacaaactgatcgccgggcagctgaagacgctgctcatcgagcaaccgcacctggccgcgttgaagacgctcaaaggggtcggtccggtgctgctggccgtgctggtgtaccggttaccggagcttaggacgctcagcggaaagcagatctcccgattggttggcgttgccccgctctcgcgcgacagcggcgcgacgcgtggtaaacgggggatcggcggaggccgagccgatatccggcaggcgctgtacatggcggcgatgtcttcggctcggcacgagccaggtctgcgcgatttttacagatcgctgcgcacacgcggcaaggaaggcaaggtggccctcgtggcggtgatgcgcaagatgctggtcatcctcaatgcgcgcgtgcgcgatcaaagagccgccatgcaccccgcctgagcgcactcggcagccgtgagtaaccgcaaaagcgtgccagccagcggccggcacctaccgatgaacacgcccgaaggaaaccgatcaacggtcgcggattgaggtcctgaccaacacagttg

SEQ ID NO: 6470 - DNA, 1530 bp, unidentified
  source 1..1530: mol_type = unassigned DNA; note = element_a02ec3d
  misc_feature 1..2: note = core
  misc_feature 3..240: note = LE
  misc_feature 241..1416: note = CDS
  misc_feature 1417..1530: note = RE
  misc_feature 3..217: note = bridgeRNA
cttgtattatagagtagtagttattaaagcccctctccaagggctgtgctacactgtaagggatgctgtggattggtgttcacctcctaccacaagatggttccagaaaggttccaaccacagccctttgcagttttgttaatcagttaaataccgccagacggttgatgtagaacaaggctacaaggcaaagtgttctgtgggtgcagcatcataatcttaccgccggaggtcttaaatatggtttctattggcattgatgtctcaaaggacaagcacgactgtttcatcctcagctcggagggcgaagtccttgcggatgcgttcactgttcctaacaacatggaggggtttaccaccctgctcgaaagaatccaggactgtaccacacctcaagacaaaataagagtagggcttgaggcgaccggacattacagctacaacctactcgggttccttcttgacaacggtctacccacctatgtcttgaaccccttgcgcaccaatctgtaccggaagagtctcagcctgagaaagaccaagaccgaccgtgttgacgcacgaacgattgcgactatgcttatgtccgatgtgggcctcaaaccctacacggatacagcataccacaacgacgagctaaagtcactgacaagataccgctttgacaaggtgaaagagcgggccaagctgaaaagctctgtttccagactggtctgtatcctgttccctgaattggaaaagctggtgcctaccctccacatggtttctgtctacgctttgctggaggagtttccgggagccaagcagattgccggggcacatctgacgcggctgaaaacacttttacatggcgcctccagaggccgctatggacgggatatggccgtggaaattcgggatgcggccaggaactccattggctccagaatgccagccaaatcgttggaactgagacataccatccatctcatacgggaactgaacaccgagattgaagaaattgaagcggaaatccaagccattatggatgagatacattctccgattacgaccatcccaggcattggtcaccgcatgggagccatgatacttgccgagactggtgacttctcccggttcgagtctcctgataaactgctggcctacgccgggctttcgccatctacctaccaatccggccaactcaaaaactgctatgcccatatggagaaacgaggctccagatacctgcgctacgccatcttcaatgccaccaaatatgtctgcctgtgggatcccacctttgccgcatatctcgccaagaagcgagcggagggtaaacactacaatgttgccatctctcatgctgccaaaaagctggtgcggctcatctttgctttagagaagtctgggcaaccttactgcttggctgcgtaacttactcttaatagccagcttgggggcctaacggacctctgctttgttataccctttttgaaccatctgcttttgaccaccattcaatttaggggttgacttttaatagttaat

SEQ ID NO: 6471 - DNA, 1589 bp, unidentified
  source 1..1589: mol_type = unassigned DNA; note = element_a03654c
  misc_feature 1..2: note = core
  misc_feature 3..261: note = LE
  misc_feature 262..1470: note = CDS
  misc_feature 1471..1589: note = RE
  misc_feature 12..281: note = bridgeRNA
ctattacaataaatattggttggaagtccagcatccagctgggctttttttcatctcatgcctaagctacaataaagggagcaactggctgaccaatcactccttgggcctctatgtccgcaaataagactgtcagccatccccttattgcagcgttcgatttaagcaggttgagccgtagagttcgtgttaccaaatagattgaatcggcaatgagtaaaagatggataccggttgcaaattcgtattggaggtagggatatgaactctgttggcgttgacatttctaaaggcagaagcacggttgcagtcatgcgtccctttggagaagttgtcatttcaccctttgaagtagatcacaccgccagtgaactgagtacgctggcaaaacgactcaaaagcctgaacggtgaaactcgtgtgatcatggaagctaccggaaactaccatatgccggtagctcaatcgctccatgatgcaggattatatgttaccgttgtcaatcccaaattggtgcatggctacggaaacaacgaattaaggcgtgtcaaaaccgacaagaaggatgccgtaaagctggcaaactacggaattgaccgctggctcgctttgccgagatatgttccggaagaaaatattcggctgttgctgaaaaactgttatcgccagtatcggcaatattccaaggtacaaactgttttgaaaaacaatttgatttctctgctggatactgttttcccaaatgtcaatcgactgtttacaagtcctgttcgcatagatggaagcgagaaatgggtggactttgcagcagaattctggcattgtgaatgtatatccggacattctgaaaaagcatttacaaacaagtatcaacgatggtgcaaaaaactggggtacaatttcagcactacaaaagcacatagcatctatgccgcagcctgtgagcatattggatgtatgccgaagtgcaataccaccaaacttctgatagatcaggcagtcgcacagcttcgggcaacctccgctgcacttgccgctctcaagaatgaaatgcagactctcgcatctcaacttccggaatattccgtcgtgatgggaatgttcggagtaggcgatacacttgggccgcagctcatggcagagatcggtgatgtgcgccgtttttactccaagaaagcgcttgtagcctatgcgggcattgatgcacctccgaacgattccggcgatgtaatcggcaggcataagcgtatgagtaagattggcacatcgtcgttgcgccggacgcttttccttgttatgagcatttacttgcggtgtgcgcctcttaacgagccgatttatcagttcatggatagaaagcgtgctgaaggcaaaccgtatcgtgtctacatgatggcatccgcaaataaatttctacgaatttattacgccgccgtgaaagaatatttggatgctttagaacaggcttaatacttatatgtagttgaccagccgccattttttttgaaatgcgcaacggcttagattggtgtatccttttttcagatgcttaattttttgaatattacccttgacttttgttagcaggt

SEQ ID NO: 6472 - DNA, 1368 bp, unidentified
  source 1..1368: mol_type = unassigned DNA; note = element_a0392df
  misc_feature 1..2: note = core
  misc_feature 3..75: note = LE
  misc_feature 76..1125: note = CDS
  misc_feature 1126..1368: note = RE
  misc_feature 1104..1355: note = bridgeRNA
tgttggggtggacggccccgcggcatctcgtgccaaggtttggttgtcagcatccgaacctgaaggaccgtccgcatgaacctcaagcgcattggcctcgacacgtccaaggccgtgttcaccctgcatggcgtggaccaggacgagaaagcggtcctgcgccgcaacatgaggcgggccgagatggaggcgttcttcgccaagctgccgccgacgcttgtggctctggaagcgtgcggcggctcgcaccattgggggcgccagctggcggcgatgggccacacggtgcagctgatcccgccgcagtacgtgaagccgttcgtccggcgcggcaagaacgaccgcaacgacgccgaggcgatcagcgaggcggcggcgcggccggacatgccgagcgtgccggtgaggtcggccgagcagcaggccgaggcgatcgtgctctcggcgcgcgagctgctggtccggcagcggacgcagttggtcaacgccgtgcgtggccatgccgccgagttcggcgtggtggcggccaagggcaccagccaggtgccggcgctgctcgaagccgtggcaaccggggaagcggtgccggacgcggccaaggggatgctggcgttcctgggcgcccaggtggtccagctcgatggccagattgcagagctggatcgacgcatgaagcagcagcacaaggccaacccggtcagccagctgctggccgaggtgcccggcatcggcccggtcaccgcgctgagcttggcgctcacgatcgaccccggccggttcacctccgggcggcatctcgcggcgtggcttggcctcgtgccgaagcagcactcgacaggcgggcgtcagcgcctgggcggcatcagccgggccggtgacgagcggctgcggcaactgctggtggtcggcgccatggcggtgatccgctttgccaagccgggaagcaagagcgcctcggcttggctgctagcattgctggagcgcaagccgcgcaagctcgcggcggtggctctggccaacaagatggcccgcatcgtgtgggccatgatggcgaccggggaagcgtatcggggtagcaagagggctgccgcgccggcggccggggctgccgccgcggcggcctgacccgctcgcaggtgcctgggtgcaaagaacgctgcaggagatgatgatcggtcgatccgacgaacgaggaaccccgcttggtgcacaggcatcccgatgccgcgtccatgttttgggcttgttcgcggaacccatctgggccagcggtcagcgtgccgcgtcaaaggccggacacatgaccgccgtcgcaccgctcgtcagatcatgcagcagaccccttgcacccaaggggccgtccacaca

SEQ ID NO: 6473 - DNA, 1471 bp, unidentified
  source 1..1471: mol_type = unassigned DNA; note = element_a0461b1
  misc_feature 1: note = core
  misc_feature 2..172: note = LE
  misc_feature 173..1456: note = CDS
  misc_feature 1457..1471: note = RE
ccgttaccttcttcgtagcccggctcctgttgcaggatgagggtgtgttggccggtcggccctggcatggctcttgcccccagtcacaaatgatccgggggggtgttgtcaccagggccggcttggcggcagttgatcgctgatagaggcacgacgacgggtccttcgtaacgtggatgccgacatctgccgtcggccagccagcacgcacaattggcttgcgcacaaggaagcgggtgttgcggtgattctggatcagcaggacgtggacgtattcatcggcctggacgtcggaaaatccggacatcatgccgtggccctggacaagtcaggcaagaagctcttcgacaaggccatgcccaatgacgaggcacggttgcggcaaatccttgccgacttgtccgggcacgggaagatcctgctcgtggtggaccagccggccaccgtcggcgccctgccggttgccatcgcccaagccacgggtgcggccgtcggctacctgccggggctggctatgcgccggattgccgacctgcacccgggggaatccaagaccgacgcccgggacgcggcgatcatcgccgaagctgcccggagcatgccccacacgctgcgctcgatcgccttggcggacgagacgctggccgagctgggagtgctctgcgggtttgatgacgaccttgccgcgcagatcaccgccacctccaaccggatccgcgggctgctgacccagatccacccggccctggaacgcgccctcggcccgcacctggaccaccctgcggtggccgatctgctcacccggtatccgacaccggcagcgctgaaggctgccggccgcggacaggtgaaggcccggctgaagaagcacgcgccgcgcgcggcggaacgcctcacggacgcggtcttcaccgccctcgcggaacagaccgttgtggtcaccggcaccggtgccgccggaatcgtcctgccgaagctggccgagcagctgctgtccttgcggcgccagcgcgacgagatcgccgcccaggtcgaggctttggtggaggcccaccctcttcaccaggtcctgacctcgatgcccggcatcggcgtcaggacctgcgccagaatcctcaccgaagtggcctgcaaagagttcgccagcgctgcccacctggcctcctatgccggaatcgcaccagtcacccgccgctccggaacctcgatccgcggtgagcacaccagcaggcgcgggaacaagaaactcaaacgcgccctgttcctctccgccttcgccgccctgcaccacccgccttcccgcgcctactacgaccgcaaacgcgccgagggcaaacgccacaaccaggccctcatcgccctcgcccggcgccgctcggacgtgctcttcgcgatgctccgcgacggcaccctctaccaggatcccgaaccgggaaagctgccctcgacagcttgacgaaaaccatagagg

SEQ ID NO: 6474 - DNA, 1340 bp, unidentified
  source 1..1340: mol_type = unassigned DNA; note = element_a04a096
  misc_feature 1..2: note = core
  misc_feature 3..81: note = LE
  misc_feature 82..1089: note = CDS
  misc_feature 1090..1340: note = RE
  misc_feature 1077..1321: note = bridgeRNA
tgttggggtggatggccccctaccggcatcttggtgccaaactggcggctgtcaggagccacccaacaggagccatccgccatggaggttaagacgatcggcctggatctggccaagaacatcttccaggtgcacggagtggacgccgccggcgaggtgagcgtcacgaagcggctgcgtcgcagccagatgctcgaattcttcgccgggctgaagccctgcctggttggcatcgaggcgtgcccgaccgcgcactactgggggcgggaactcacgtcgctggggcacgacgtccggctgatcccgccgcaatacgtgaaaccctatgtgcgccggagcaagaacgatgctgcagacgccgcggcgatttgcgaggcggttgcccgcccctccatgcgtttcgtccccctcaaggacgagatgcagcaggcagcgctgatgttgcatcgggtgcgcgacttgctggtacggcagaaggtacagctggtcagcgcgatccgagcccatgccgctgagttcggcgtgatcgaggcaaagggtccgcagaatgtcgcgcgcctgctcgccgcggtcgaagccagtggggtgcctgacctcgcgcgccagcttatccgcgtgctgacagagcaactcgacgcggttgaggatcagattgccgaggtcgatcggcgcatcgtcagctggcacaagagcaacgaaaccagtcggcgcctcgccggcgttcccggcattggaaccatgaccgcaacggccatcgccgcgacggtcccggacccgtcggtgtttcgcggaggacgcgagttcgccgcgtggctgggtttggtcccgcggcaaaattcgtccgggggcaaagcccggctcgggaagatcagcaagcaaggcaacgagcatgtgcgacggctgctaatcatcggtgcacaggcggcgctgctgtgctcgaaagaggtcaaggccaacgcctgggtgcagggcatgatggcgcgacgaccgcgcatggtcgtggtggtcgccttggcgaataagatggcgcgtatcgcgtgggcgctcatggctcggcgaacgcaatacggagtcgcagtcgccgcttaggcggcgactgccggccggggggcagcgaaggcagaggagcaagatggcgtagtcggttgcaccgacgggttgggcaaacctggatcatagcgggggctttgagcccgcgagattgttaaggacccaactcgcggaacccatcagggccagcggtcgtgctgaccgcacaacaggccggacacatgaccgcaggcaacccgctgcatcagattgtcatccactgctcttgaagcccgggggccatccacaca

SEQ ID NO: 6475 - DNA, 1420 bp, unidentified
  source 1..1420: mol_type = unassigned DNA; note = element_a05c035
  misc_feature 1..2: note = core
  misc_feature 3..82: note = LE
  misc_feature 83..1111: note = CDS
  misc_feature 1112..1420: note = RE
  misc_feature 1211..1415: note = bridgeRNA
tgatgtgatggacgctcccatttacggcgtcaatgcgccagaatgaaatttcaagataatcattcacaaaaggagcgtccagatgaagtgtaaaatagtcggtatcgatattgcaaaaaatgtctttcaagtctgccagcttggtgaagataacaaggttatttcaaacaagaaaatacctcgtgcaaagctactagatgccttgcgacagttgccggaatcaacactggttgccatggaagcctgtggtactgctcaccattgggcacgacagcttcaagagatgggactggaagttaggctgctcccagcccagcacgtaaaggctttcactggccgccagaaaaatgatgccattgatgcgctgggtatttgcgaggcggcatttagtccaagaatacactttgttcctgttaaaacgctagagcagcaagacatcaaagcgttacgttgtgcgcgtcaacagtgggttgatcataggaccgctctgggtaatcagattagaggtcttagcgcagagtacggtgttattttcccgcgttcacttgcccagcttcgacgtcaattacctttggctgtggaggatcagagaaacggtttgagtagcatcatgagagagcgattgcgcgaagcttatcaagagctgtgcgactacgacacgaagattgcaagagtcgatcgccagttgcatacgctatgtcgcgaaaatgctagctaccaaaggctaatggaaatacctggcattggcccgattattagtgccgccctgataagcgagcttggtgatggaagccaatttagcaatggtcgagaaatgtctgcctggtgcgggttggttcctcgtcagcatagttcgggtgatcgcacggtatcgctgggcatcacgaaaaatggcaataaacacttgcggaccttgttgatacacggagcgaggtcggtcgtgttctgtcgcaagacggaaggtgacgcccttagtcgttgggtaagtcggctagttgagcggcgaggaaaacacaaagccatcgtagcgctggccaataagctagccagaatttgctgggcggttatccgctccgagcagagctataaacacaacagagcgtttgcataacgatgaagatgacaatgaatcaagttcttgatgagtagatacattgctcgttaaaggttgatggaaaaacagtaagcagataacggattatgttgcccctgagtttgcgatcacagatgaaataacggtcaaaccgacttcacaagagcctgaaagtgaacagggtctgtaaagaccgacaaagtgaaaaggtggtgaagtgcggatctcatcttggcgcggagatatcacgatctccactaagacgccggatatatgttagccgaccgctcctttcaactgggttgcaaatacgggagcgtccatata

SEQ ID NO: 6476 - DNA, 1919 bp, unidentified
  source 1..1919: mol_type = unassigned DNA; note = element_a081272
  misc_feature 1..3: note = core
  misc_feature 4..121: note = LE
  misc_feature 122..1405: note = CDS
  misc_feature 1406..1919: note = RE
  misc_feature 1577..1835: note = bridgeRNA
gagcattcctgtaatgaagaaatttgaggattgaacaaaaaagagccctcttggtattatacgaggtgtcccgagctgcgcagcgtaaggacccttaaattagaaccaaggaggactcaacatgaattatactcaaaatcaaaaaatctcgcaaatcacaccatcaacgttaattatcggtattgatattgccaaagataaacatgtcgcacgtgctcaagatgatcgtggattagactttggaaagcgtttgatctttgaaaatcgaatctttggctttgaagccctcgttgagtgggtaaagcaacaccaagaaaaacacaagaagaatcacgtcatttttggcgtagaaccaacaggacattattggaagagtcttgcttactatctaacggcaaaaggttacgactttgtcgtcgtgaacccaatgcacgttaagaaaagtaaagaacttgatgacaattctccaacgaaaaacgatacgaaagacgcaaaagtgatcgcccagttaatcaaagatgggcgatactctgtaccaaacctcttagatggcatatatgcggaactaagagaatgcgtaaaaattcgagatcagcttactgaacaattaatgatcacagaaggtcgcattcaaaatgtgattcaacgctactttccagagtttttcgatgtgtttggagattgggaaggcaaagccgctctctgtaccctaaagctgtttccgttcccctctgatattcataaaaagacaccagagagggttcttcaagaatggaaaccgtatgtccaacgaggagttggcattaagcgcgcaacgaagcttgtagaaacagccaaaaagagcattggaattgaagtaggcttgaaatttgccaagtgtgaactgaagaatcttattgagcagtatgagctttttaagcggcaattagaagagttggatcaggaattagaagccatcgttgaaacattacctggtgcccaacaaatgatgaaaattccaggcttaggggcggtgactgttggattattctttgcggaagttggggacatttcaaagtactctcatcctcaacaattagtgaacttagcagggctatcattacgtgagcacagttcaggtaaatttaaagggcaaacaaggattacaaagcgaggaaggaaacgattacgccgagccttatatttagcgattcgtccccttgtcgcccataattcaacatttaaagccctgcatcactattacaccaaacgccctgaacgccctttgaaaaagcaacaatctttgattgccttgtgttgtaagttactacgtgtgttgtttgtcattggtcaaaaacagtgtgaatttgatggttcaagattaataaaagatattcctcaaatggatggattacaggcagtgtaaccttagaaagcagatcacccaaagtggcttgacacggagcctctgcgggcatggctccttggcgaagcggcgagtcatccaatgattcgcccatggctaaggaagcctaccatgcccgccactccatgtaaagccgtgcatcatctgtatacttacaaataacaaacaccaatagtgcagagtcggagtttattttcaccatacgggcttatgacccagcaaaggagcttatccgacctccacctcatggatacgcaggacgaaggaaggtatggataccaatccggagagacatgggagggttagcgaccgtgagtagcgtggagatttataggcacggtcatactactcaattaccaaactataccagtttggacgttaggatggattatcccctgtaagaaattttaattcgttctacttctatccagtagtactggtgagattactatttggtgttagtgaaatttggagaatacacgagtattagcgagaaaattaaactttattgagg

SEQ ID NO: 6477 - DNA, 1434 bp, unidentified
  source 1..1434: mol_type = unassigned DNA; note = element_a0860ec
  misc_feature 1..2: note = core
  misc_feature 3..163: note = LE
  misc_feature 164..1186: note = CDS
  misc_feature 1187..1434: note = RE
  misc_feature 9..182: note = bridgeRNA
cttgtatcttagaagaagtagtaaaccgtcgcaccctaggtcattaaagaccgctttgtagcatgggtcactacaacaatctccatgacagaactcgaacagtcgcgcttgggcaaaactttaattactgatatttaaagtatacagtccgtatcgggcaaggatgagtgaaatcagggggatgaattcaacacttcttgacaaaatagttaagagtaaaaaaatggaaaatatgaatcaatgggtaggcattgatgtcagtaaagccactctagatgtttatatccgtccaatgggtaaagcattccaactggcaaatacagaagtagaaatatctcatctagtagagcaacttaaatcctacgatttaaatctgattgtactggaagcaacaggaggattagaaacagagctagtaattcaattacaggcagcacttttaccagttgcattaattaatccacggcaagggcgagattttgctaaagccacaggtcggttcgcaaaaaccgacgcaattgatgcacaaattttggcacactttggggaagcaatgaaacctcaggttttagcaattgaatccgaaggagcgcgtcaattatctgaattaattagtcgcagacgacaattagttgaaatgcaaactgctgagaaaaatcgccgtactcgcgctcgtggtaaagctttggcagatattgaggcgcatattgattaccttgctcaacgtctgaaacaacttaatcaagaaattgaggaattggctcaaaataaccaacaatggattgataaagttaatttactcaaaactactcctggaattggtcaagttatttccacaactattgtttcggatttaccagaactaggaaagctaactgccaaacaaatctctcgcttagtagcagttgcacctatcaatcatgatagcggtcaacataaaggtaaacggatgattaatggtggtcgtgcccatgttcgtgccactctctatatgggtgctgttgtcgcaatacgtcacaatcctgttatcaaagccttttatgagcgccttgtcgagcgtggtaaatctaaaaaacttgctctaactgcttgtgttcataaaatgttagttattttaaatgcaatgcttcgagatcatttgccttggcgcatttgtgacaactttcaaccaattgttaacgcttagtcgcactgacatttttatacatcccatctatttagggttttttatccattgttttgctgcccccaccagtgattcagcaactggggaagattgggcggcgacagcggagtgcctggtgggggcacgactatctacgctactaactcaagcaaggtcttgctgcccctacctggcaccgcccaatcagcgaagcggttccccagttgcgtcaacttcttttagcgatcgcttgacaatcaagacagtcg

SEQ ID NO: 6478 - DNA, 1458 bp, unidentified
  source 1..1458: mol_type = unassigned DNA; note = element_a093431
  misc_feature 1..2: note = core
  misc_feature 3..225: note = LE
  misc_feature 226..1437: note = CDS
  misc_feature 1438..1458: note = RE
  misc_feature 7..221: note = bridgeRNA
ctaatgggactcgactggcagccgtagggcatgctggtcccgagccgccgacgggagagcactggcgccgccagggtccatgaaccctagctctagatcgtgcccccgccggtcggtgaggggatcgacggccggtgggatgtcgtgccgaaagagcactgatccattagggcgccgcgtgtcctctccaggctcgaaggatgccgagcgaggaaggaggagggtgtgatctacctggggatcgactgggccgagcgccaccacgacgcgtgcgtgatggacgaggccggcgcggtgctcgcgacgagccgggtaccagagggcgtggagggcgtggcgaagctgcacgagatggcctcgagcttcgccgaggaaccttcagaggtgatcgtcgggatcgagaccgaccggggcctgctcgtcgaggcgctcatcgcgaccggctaccgggtgtacgcgatcaacccgatggcggcctcgcgctaccgggaccgccaccacgtcgccggcaccaagtccgatcccggggacgccaaggtgctcgccgacctggtgcgcaccgatcgccacaaccaccgcgaggtggccggggactccacgctcgccgaggcgatcaaggtcctggccagagctcaccagcgcctggtgtggacgcgggggcgccagacgaatcagctccgctccacgcttcgtgagtactaccccggggcgctggaggtgttcaccgatctgcactcgcccgacgcgttggcggtgctcgccgtggcacccacacctgagctcggtcgggggctgtcggtgagcaaggtccgccgcgtgctcgagcgtgccggacgccagcgcaacctggaccggcgctccgccgagatcgtcgagggcctgcgggcgccgcagctggaagcaccggggatcgtggccgaggccttcggggcgaccgtcgtctcgatcgtggcgatcgttcagacgctcaacaccgagatcgctcggctccaggaagagctcgcgggccgttttgaggtacacccggacgccgagatcctcacgagtctgcctggactgggttcggtcctcggcgcccgggtgctggcggagttcggggatgacccgacccgctacgccgatgctagggcacgacgcaactacgcggggacggctccgatcacccgagcctcgggcacgcgccgcgtcgtgctcgcgcgggtggcgcgaaacaagcggctggccgacgcgatctacctgtgggcgttctcctcgctgcaggcctcacgcggcgcccgagcgttctacgaccgtcagcgcaccgccggcaagacccaccaccaggccctgaggactctgggcaaccgctgggtggggatcctccacgggtgcctggcgcaccgctcgctctacgacgaggacatcgcgtgggcgacccgacaggagatcgcggcttgacaagttagggccgtgggatgt

SEQ ID NO: 6479 - DNA, 1523 bp, unidentified
  source 1..1523: mol_type = unassigned DNA; note = element_a09b6f9
  misc_feature 1..3: note = core
  misc_feature 4..141: note = LE
  misc_feature 142..1407: note = CDS
  misc_feature 1408..1523: note = RE
tttcgtattatcaggtcagccagaatttctggttggccttttttcatggccgttttaagatggcggtagccgggagaacgtgcggcttttaggggcaatgatcccgtcagaaaaactgttctcccactacccccaatgaccatgtttgagctggttgaggcatcggacctcgaatcacaagcgaagctgtgggattggaaccatcgtgggagtgccggctattattcaggaggagatgacatgggaccgattatcggtttggatgtgtcgaaagggacaagcatgctccaagcgtttacggatcggaataaaccgtatggcaaaatcatcagcattgcgcatacgcaggaagggtttgagcggctagggatcttactggaggaattaaaacagataacggagttggagcctgtagtggtgcttgaggcgactgggcattaccatcggagtctggtcgcctatttggagcgtgaaggatatcgtcacttcatcgtgaatcctttgcaatccaaacgtgcaaaaggcacacaattgcgaaaggtgaagacggacgcggtagatgcatggcatctggctgagatgttttaccgaggagacatccggccgcatcgaatgtgggcggaggagatgaccgagcttcagcatcttacgcggcagcatgagtttatgacatccctgctcgtccaggccaagcagaacgccagggccttattggatcaagtgaatcctgcttacgagagtgtgtttcacaacttgttttccacgacctccttgcaggttctgcgccatatgcttagcggcggcactgtcacggtagaaacgattcgggaaacggcaggctcgtcacacggtaaggcgtggattcaggcaaaggcagagcggattcaagcgttaccgcctctaagccattcaagcaaagcgcaacagacggccttgctttgtatggtggaaatggtgctcacaggacaagaacagctacgtcagcttgagactgccattgaggagacggcgctggcgcttccggaagtggaactgctcaagacgattcccggcgtgggagacaagcttgctgcggcgctggcggcagagattggggatgcggcgcaatttaaggatccgaagcagctcgtggcgtatgcgggactggatccgggggtgcacagctcggggaagtttacggccagcagtagccgcatttcaaagagaggctccaaacgcttacgcagagcgttgtacgttgccgtccaatgcgggctcaggaaaggtgtaaacgagcggttaacggcttattacgagaagaaaaggaaagagggcaagccatacaaggtagtcgtgatcgcttgcgccaacaagcttttacatcacgtctttgccatccttgtgaaaggcgagccctacaaagcctaaattccatatttacccagaagcgtccgcgccaacggaggcttctttgtgttgctcaaaattagtatagcagtatctttgccacagtccaatcacttggcttgacaaacattagctgg

SEQ ID NO: 6480 - DNA, 1401 bp, unidentified
  source 1..1401: mol_type = unassigned DNA; note = element_a09bcd0
  misc_feature 1: note = core
  misc_feature 2..224: note = LE
  misc_feature 225..1388: note = CDS
  misc_feature 1389..1401: note = RE
  misc_feature 13..239: note = bridgeRNA
ctacttatctactggtggcacgaccgctgcccggccaggcatggtcgaggtgaccggcggagacgctctcaattcggctgtccacctgcatcttgggtgtggctcagatttggcatgcgccctgccggtcaccgcggcgcggagaggctccagaggggtttgcccagctcaaagtagcgctgccctcccgccgacaccaggtcggagcagggaggacgagacagatgcccaatgtcgtcatcggagtggacccgcacaaacgatcagccaccatcgaggtcatcgacccgcgcgaacgtgtcctcggcaagggccggttcggcactgatcacgacggctacaaggcgatgctcgccgccggccgcaaacacggcgaacggatctgggctgtcgagggctgcaacggcatcggccggcatgtcgcccagcgcctggtcgctgacggtgagacggtcgtcgacgtgccgacgaagttgtcggcgcgagcacgggtgttcgctaccggtcagggccgtaagaccgacccggtcgacgctcacagcgtcgccgtggccgcgttgcgcacggcaggtctgcggcaggtgcaggccgatgacaccacggtggcgttgcgactgctggtcgaccgccgtgaccagctcggccggacccgcaccgaagtcgtgtcccggctgcatcacctgctgctcgaactcattccaggtggggcgaagaagttcctgtccgcccagcaggcccgcgccctgctcaataccgtccggccgcgagacctggtcggcaagacccgccgctggctggcgtccgagttgatccacgagctcgtcacgatcgacaagaaaatcaagctcgccaacgccgaactcaccgacctggtcgcctccaccggcagcaccctgcaggaactcaccgggatcggcccgtccggtgccgcccggctgatcggcgacatcggtgacatcgcccggttcgccagccgcggccacttcgcgtcctggaacggcaccgcacccatcgacgcgtcctccggcgaccagaaccgccaccgtctgtcgcgtgccgggaaccggcgcatcaaccgggccctgcacatcatggcggtggtccagctccgtcgtgacaccgaaggccgccgctactaccggcgcaaactcgccgacggcaagaccccgatggaagcgatgcgagcgttgaaacgtcgcctgtccgacatcgtctacaagcggatggtcgccgacgcgaaacggatcgagacgggcccgggaggacatatgggggcgactctgcaatccagcgcggccgacctcaaccccatgatcgacacttcggagaagtcacttcccggacccgccgaaacccaccatagaacagacctcgcagccgcctcttgacacagaggggtgc

SEQ ID NO: 6481 - DNA, 1604 bp, unidentified
  source 1..1604: mol_type = unassigned DNA; note = element_a0a3ff7
  misc_feature 1..4: note = core
  misc_feature 5..307: note = LE
  misc_feature 308..1594: note = CDS
  misc_feature 1595..1604: note = RE
ctcactggactaccttcctgacgtcatcgcttccagatgaggcggtgatgcaccccgggtgccgccaggtcactgccctgctcgcttgacgccaaggacgtccacgatgagatctgcaggatctggtggttgcccgggacgtgtggaccgtcgatagggctgtgcgccaagaccgctgctgagcatcagcgtggtcgcgagcgccgatcagtgagcgaaccggcagacacgtcccggcaccgtgagatatcgcgacacccgaagaaatgggtgcctccccactgattggagcagcgaggaggctgacgtgaagtctgccagcaaaaccccgaccgaatccatgagtagccaacgttctgtgaccctgcccgagaccgcgcccaacgacgtgaccgcgggcatcgactgggcccgtgacgaccacgccgcctgcatcgtcaacggacgcggccgcaaggtcgccaccacgacggtcgagcacaccgcaagcggcctgcgtgaactggtcggcttcctgcgccgtcacggcgtcgacgaggtcgcgatcgaacgacccgacggacccgtcatcgacacactgctggccgccgggctgagcgtggtggtgatctccccgaaccaggtcaagaacctgcgcggccgctacggatcggccggcaacaaggacgaccgtttcgacgcctacgtcctggccgacaccctgcgcaccgaccggacccgactgcgcccactgatccccgaccgcgacgacacggtcgcgctgcgacgcgcctgccgtgcccgcaaagacctcgtcaaacaccgcgtcgcggtcgccaaccagctccgtgcccacctgcgcaacgtcttcccaggcgccatcggcctcttccgcgacatcgactccgagatctccttgacgttcctgacccggttcgacacccaagaccgcgccgactggctcaccccccaacgcctcggcggctggctgaccaaacagggctactccggacgcaccgaccctgccgtgctgcacgcccggctcctggacgcgcccaggggcgccaccggcatccacgccaccacccaggctgcgatcaccgcgagctacgtgacgctgctgctgactctggtcgagcagatcaagatcctctcgacccagatcgaccggcagctcgacgcacacaccgacgcgcacatcttcaccagcctccccaaagccggacgcgtccgcgccgcacgcctcctggccgagatcggcgactgccgagccagattccccacccccgaatcgctgacctgcctggccggcgccgcaccctcgacccgccagtccggcaaacaccgagccgtcgggttccgctggtcctgcgacaaacaactccgcgacgccgtggtcgacttcgccgccgacagcagacacgccaacccctgggccgccgactactacaaccgcgccagggcacgaggccacgaccacgcccacgccgtacgcatcctcgcccgagcctggctccacatcatctggcactgctggcaagacaacctcgcctacaaccccgaaacccaccgcgcactccaacgcgtcatcacccaacagaacaaagcggcttgacatagggctt

SEQ ID NO: 6482 - DNA, 1436 bp, unidentified
  source 1..1436: mol_type = unassigned DNA; note = element_a0af2c6
  misc_feature 1: note = core
  misc_feature 2..89: note = LE
  misc_feature 90..1133: note = CDS
  misc_feature 1134..1436: note = RE
  misc_feature 1198..1434: note = bridgeRNA
taatggaatggtccgccccacttcccaagcggccgaaatggggccaagatggtattttctataccctctcaacagaagcgaggcagaccatggcaaacgatcatacaaacaccgacaatgtcgtcaaagtattgggcattgatttggctaaacaaagcttccatttatacggtgtcgatgttgccgggcagcgcgtcatcaacaaaacgctcagtcgcaagcaactggccgctttcgtggccaatctgcccccttgtctgattgggctggaagcgtgtggcggagcccaccattgggcgcgccgttttagcgcgttcggccatacggtgcgcatgatggcgccgcagttcgtcaagccctacgtcaaatcgaacaaaaatgacgcggtcgatgcagaagccatttgtgaggcggtacaacgccccaacatgcgttttgtgccgaccaaggggatcgaacaacaagacattcaaagcctacatcgggtgcgtagccagctggtgtcccggcgcaccgcgcaagccaatcaggtgcgcggtctattattggaatacggcctggtgatcccgaaaggcattcatcatgtcaggaaagccttgccggcgcttctggaagattcggagaatgccttatccgccttattccgggaattgctcaatgaactttatgatgaaatggggtatttggatcaacgcattgcgacgcttgaacggaaattagcggccatcagcgctcagcatgaagactgccaacggttgatgacgattccgggcgtggggctactaaccgcgaccgcgctgctcgcggccatcggcgacattagcgtctttaaaagcggtcgggaactggcagcctggttagggttggtgccccggcagcattccaccggcggcaagccgacgctattaggcatcagtaagcgtggcgatgcctatttgcggacgttgctgattcacggcgggcgctcggtttcgcgggtggcacacaagcacgaggacaagcatcatctctggatcagcgacatcaagcgtcgacgcggcgaaaatatttccaatgtcgcggtggccaacaagaatgcccgcattgcctgggcattgctgaccaagaaagaaaattatcgggcggcagcatgagggccatatcactcttcaaaaggggaagctcttcctgtcgagccaaacagtgaaacgggtaaacatcagcaacgaattgcggagataacattcaagtgatggcataaaaggtaacacctgcattccaagagcctgctggggtctcgggctcatttgaagccgtagacctgatgaggtgggaatgcgcgaattccatcagggccggaagtcattgagcacttcatcataaggccggatatatgggcgcattatttctttatgtcacatgtgaattttttcttgcaatacggggcggaccatata

SEQ ID NO: 6483 - DNA, 1457 bp, unidentified
  source 1..1457: mol_type = unassigned DNA; note = element_a0c3f81
  misc_feature 1: note = core
  misc_feature 2..110: note = LE
  misc_feature 111..1136: note = CDS
  misc_feature 1137..1457: note = RE
  misc_feature 1189..1403: note = bridgeRNA
gaatgaaagggacttccccgtcccgaggctacgacggatgccgcaaatcggtatcggcgtaccatgatcgagccttaatcctccgtcaacgtcaaatgcaggagaagtgcatgaacattgccactgtgggaattgatcttgcaaaaaatgtctttgccgttcacggcgtggacaaggccggaaaagccgtcctgatcaagccgcgcgttatgcgcgatcaactggcggcgctcattgcacaacttccgccgtgcctgatcgggatggaagcatgctccggcgcgcatcattgggcacgagtcttccagcagagcggacatacggtaaggctgatggcgccgaagctggttgcaccgtaccgaatgtctggcaagcaaggtaagaacgatgcggccgatgcagcggccatttgtgaggccgtgacgcgtcctaacatgagatttgtaccaatcaaggacgaacatcaacaggcggccctttgccttcaccgcactcgccaaggctttatcgaagagcgcactgcgacctacaatcgtgtgcgtggtctgctatccgagttcggggttgtgttgccgcagagcccggagaagttgcgcagtaacatcgcgagccgcatggaggcgctgccaggttgggcggctcgctgcattcgcgatatgctcgaacatatcgatcgactggaagcgcgtctcgacgaatacgatcgtgccattagtcaactggcgcgccaagacgagcgcagccgccggctcatgcaattgcgcggcatcggaccgacctcggccagcgcattgcttgctactctcggtgccgcccatgacttcaaaaacggtcggcaggttgcggcatggcttgggttgacgcctgcgcaatatagcagtggcggtaaagccaggctcggaagtatcaccaaagccggggaagcgtatgtgcgtacgctcctagtgagtggtgcacgtgccgtgatgtcaaatctccgggataagcaggacaagtttagccggtggatccgaggcctcgttgagcgccgtggatactggcgcgcggcgatcgcgattgcggccaagaacgctcggatggcgtgggcggttctgaagtacggtgacgcgttcaagcaagaagctttgcaagcctgagctgcttcaaggcgtcgttcacatagaccgtctctactaccgcgatcaatatcatgaacagatagaagatcactttgcgctgccaacagtgatgtgaagtgggttggacccgcgcgggggatacctgttagacccactggggtatttgttcccgatacatgaattaggtcctcgcgtgcgtctttcatcagggtccgggcgattagcccaacatgaccgtttgtagtatcgcagtccttcaccttctcacaccacaccggcaaagcaacaagcaacaccaggaactccatcgagcttgcgcttaatggggaagcccttgta

SEQ ID NO: 6484 - DNA, 1358 bp, unidentified
  source 1..1358: mol_type = unassigned DNA; note = element_a0c96c1
  misc_feature 1..2: note = core
  misc_feature 3..74: note = LE
  misc_feature 75..1103: note = CDS
  misc_feature 1104..1358: note = RE
  misc_feature 1079..1348: note = bridgeRNA
tgatgatgtaaccgccctccgacgacctcaatgtgcgaaggtgggtctccatgggtccacacaggagagcggttatgtcgaagattgtcacagtcgggctggatgtggcgaagaatgtgtttcaggtgcacggggctgacgagacaggccgcgctgtgttgcgtaggaagctgcgccgagatcatgtgctttcgttcttcagccagttgcctcggtgtattgttgcgatggaggcctgtggcggggcccatttctggggtcgtgagattggccgcctgggtcatgaggtccggttgatctcgccggcctacgtcaagcccttcgtgaagcgtcagaagaacgatgctgcggatgctgaggcgatctgcgaagcagtgacacgcccgacgatgcgctttgttccggtaaaaagcgaggaaacgcaaggcgcagcaatgcgcttccgcgtgcgcgaacttctgatccggcagcgaacgcaaatcatcaatgccttgcgcggccatctggcagaattcggacaaatcgtaccgcaaggtgcagccaacgtatcgcggctggttgcaatcatagaaagtccggaaagcgacctgccagcggatgcgatcaccacgctgggtgtattggtcacggtgctcacgaaccttgaggcggggatcggtaaacttgatgccgagatcgcacacagagccagggagaatgaagtggcgcggcgcctgatgacggttccgggcatcggcccactgattgccacggcgatcgcagtcctggctccgccgccgcagactttccgtaaagcacgcgactttgcagcctggcttggcctgacaccccggcagcattccaccggcggcaagcaacggctcgggtcaacgacgaagatgggcgagcgctctctacgacgcctgctgatcatcggggccaatagtgtcatcataaagcggcgcgtccatgccgaagcgcgacccggcacttggttgggcgcaatgctgacgcgcaagccgccactgctggtgcgggtcgcactggcaaacaaaatggcgcggatcgtctgggctttgatggttcgaggcggcgtctaccagtctccggccgcagccgcgtaagcgtcttcggtcgcgagggcgtcggagcaaaagagggcaaggagtcgtttggcgcaacggtcgtgagacgggatcgggacaaccagcttgcaacagagtgcctttgagcacgcggctctgatgtggacccgatctgcgaacaccatacgggcccgcggcatgttgatcgccgcatcagaggccggatacatgtcagcacccgacaacgcgtcaaaacaggctaaaataccctcttgcgcatggggcggttataca

SEQ ID NO: 6485 - DNA, 1282 bp, unidentified
  source 1..1282: mol_type = unassigned DNA; note = element_a0d8b69
  misc_feature 1..2: note = core
  misc_feature 3..271: note = LE
  misc_feature 272..1267: note = CDS
  misc_feature 1268..1282: note = RE
  misc_feature 66..217: note = bridgeRNA
cttgtatgttgccctcacaccagtcaattgagatctaagctcgctggtgcggacatacgaagatgtgtttctgggggagaccgatcgctcctaaaggcaggacttgctcctgaccttgtctgtagagaggtccccccgcctcattgcccaccacgaagagtatcgagaagccgacaagtcggacttcgcattacaaggttgcagtggcatgaagttcgaggtcaggggaaccaggatgcatttctaacccagttcactcggagttgaaagcatgagcatgcatgtcggtttggatgtggggtctcgcacgaccgccatgggctggcgcaacgacggccgttttgcaggggcctgcaacatcgaccaaacacccgccgggcgcaaagcagcggtcaacaggttgctcgagctcaagcctttatccgtagtgatggaggccaccggcatctattacctggatttggccatggagctcaccgcggcgggtttgcccgtttcggttatcaacccgaagagctttcataactttgccaagctgatgctgaaaaacagcaaaaccgatgcgatcgatgcccagttgctagccgaatacggcgaacgcatgagcccaaaattgtggacgccgcccacgaccatacagttggaactgcgggctatcggaaggcatatcaatcgtttgacgtgtcatcgcacccgagccaagaacgagctgcatgcgctgaaagctactcaaacaaccgtgaaaatgctgattgaagacgaagaagaagccattgaagcttttgacaagcgaatcgagcgtttcaggctcgcaggtcgggcgctgatcgacaactgcccgacgctaagcgcccagtttgggcacatgatcgcagcgccgggcatgggcgaaatttcagtatttgcggcactggctgaattgacgaccttgccagtgacacttaagtccgcgcaggtcagccgacatgcaggactcgatgtgcggcttacgcaatcaggtaccagcatcgataaacctgggcggataagtaagggcggaaacacctacctacgttcagcgatgtacatgccagcgctgactgccatacgttgcgacagcaacgtgaaagccttttacgaagcgttgatcgggcgagggaagagaaagatgcaggctatcgtcgccgtcatgcgcaaatacctgaccggcttgtgggcctgcatgcgagccggcgaagatttcaatacggccaagcttttttgcgcaaaagatctcgcaaaagcttgaccgtgaacagagtat

SEQ ID NO: 6486 - DNA, 1536 bp, unidentified
  source 1..1536: mol_type = unassigned DNA; note = element_a0e45c6
  misc_feature 1..2: note = core
  misc_feature 3..242: note = LE
  misc_feature 243..1163: note = CDS
  misc_feature 1164..1536: note = RE
  misc_feature 11..217: note = bridgeRNA
cttgtattatagagtagtagtaattagagcccctctccaagggctttgtgctacactgtaaaggatgctgtggattggtttgttctcctaccacaagatggttttggaaaggttccaaccacagccctttgcagttttgttaatcagttaaataccgccagacggtttatgtggaacaaggctacaagagcaaagtgttctgtggatacagcatcacaattttgccgttggaggtttttatcatggtaatttctgttggtatcgatgtagccaaagacaagcacgactgcttcattctcaactcggaaggcgtagtcttggctgacgtgttcaccattccgaataacatggacggcttcacctgtctgctgcaaagaatccgggattgcactacgccccaggacaaaataaaggtaggacttgaggcaaccggccattacagctacaacattctcgggtttcttcttggcaacggtctggccacctatgtcttgaatcccttgcgcaccaatctgtaccggaaaagtctcagcctaagaaaaacaaagactgaccgtgtggatgcacgcacaattgcagctatgcttctgtccgacgtaggcctcaagccctacacggacacagcatatcacaacgaggaactaaagtcactaaccaggtaccgttttaataaggtgaaagaacgcgctaagctgaaaagctctgtttctagattggtatgcatcctgtttcccgaacttgaaaagttggttccgactctccacggggcttctatctatgctttgctagaagaatttcccggtgccgttcagactgcaggtgcgcatctgaccaggctgaaatctcttctgtcagatgcctccagaggccactacggacgagacatggcggtggagattcggaacgctgccagaaattctatcggctccagaatgcccgcaaaatctctggaattgcagcacaccatccggttgatccgggaactggatgctgaaattgaggaaattgaagcagagatccaagacattatggatgaaatgcactctcccattacaacgatccctgggattggctaccgcatgggagccatgatcctcgccgaagtcggcaatttttcccgctttgaatctccagataagctgcttgcctatgccggtctctagccctccacctaccaatccggacagctcaaaaactgctatccccacatggaaaaacgaggctcccggtacattcgctacgccatttttaacgccacaaagtacgtttgcctttgggatccaacattcattgcttacctcgctaagaagcgggcagaaggcaaacactataacgttgcaatctcccatgcagccaagaaattggtgcggctcatctttgccttagagaggtccggacagccataccatctggctgcgtagtttactcctcatagccaaccggggtcttaatagccccctgctttgctataccctttttgaaccatctgggcctaaccaccaccattcattttcgggattgacttctaatgttaat

SEQ ID NO: 6487 - DNA, 1605 bp, unidentified
  source 1..1605: mol_type = unassigned DNA; note = element_a0e5ffd
  misc_feature 1..2: note = core
  misc_feature 3..275: note = LE
  misc_feature 276..1472: note = CDS
  misc_feature 1473..1605: note = RE
  misc_feature 12..295: note = bridgeRNA
ctactataatatatttgacgggtaaatccatggcaagccagccgtggtttacacgcacttgttacttaggctataatgaaagcagtgattggactgacgttgacctccttgggacatcacgcccgtaaataagactgtcatccatgctttcattacagcgttcgattttgcaggtagagccaaccatatacgctcgcatcactcagtagacagaataggtaatgagtaaagtgtggaatcacccgatcacaaattctataataggagagatgtttatgaacgcagtaggtatcgatgtatccaaaggcaagagcatggttgttattgtgcagccttttggaattgtcgtggcagaaccctttgaggtttcgcatgacgggcaatcgctgagcgtgcttgtagagcgagtgaagcgattgcccggcgaaacgaaggcggtcatggagtacaccggcacatattatgaaccaatagccaacgcgctccacaacgccagtatatttgtttccgtagtcaatccgctgttaattgacgactacggtacaaatcgtgtaagaaaagtcaaggccgataaaaaggacgcgtttaaaatcgcaaattacgcccttgataaatggactcagcttcgtgagtacataccggatgaggatacgcgtaaaacgcttaaagtccttaatcggcagtatactcagtacaacaaattgctcatcatgcagaagaacagtctgattgccctaattgattcctgtttccccaccgcaaatacattcttcttatctcctcgaagggaatccgacggtcacgaaaaatggatcgatttcgtgctcaagttcccgcacattgattgcgtttccaagctctgtctatcagctttcaaagccaaatatcagagttggtgtaaagccggtcactacaaatacagcgaatctaaagcggctcagattcacgcctattcaagaacgcaggtgagctcgctgccaattacgggcactacaacgaaagctgtagaattatccgcagcaatgattaattccacgcttgaaacgctcgctgcgatcagagccgaaatggacaagctcgcgtcaacgctcccggaatacgaaaccgttatgagcctgtacggcgtaggttgcattatgtgttcgcagcttattgccgagattggcgacgtaaaacgcttaaaacactccaaatcgctcgtcgcaatggcgggcatcgacccaccgcccgatcaatcggggcagcacgaccctaaatcccgaagcatatccaaacgcggctctccgctgctgcgtaaaaccctttttcagatcatgcaggtgatcattcaaaagcagcctgtcaacgagcctgtttaccaatttcttgaccgcaaacgtgccgagggcaagccgtaccgagtttacatgattgccgcagcgcacaagttcctaagaatttattacgcccgcgttatggaagcggtaggctgattattttcaaccaatacggcatatttctgctgtcgaaaaaattcggcttcggcggctcttttgctataccctttttgctattgtgaaagtttgatgaaatcttcactttaccccttgacatttatttgcaggt

SEQ ID NO: 6488 - DNA, 1446 bp, unidentified
  source 1..1446: mol_type = unassigned DNA; note = element_a0e7f8f
  misc_feature 1..2: note = core
  misc_feature 3..121: note = LE
  misc_feature 122..874: note = CDS
  misc_feature 875..1446: note = RE
  misc_feature 1195..1399: note = bridgeRNA
agatggggtattcggcttgagccagcctccgaacgacggagtgaatgtgctgtccctcgagctgaaggtgtaacgtggccctattggacctaaccacgaacctcacgaaaggacgcgcagcatgaaatattatgccggactcgatgtgtcggtgaaagagacctccatgtgcattgttgatcaaacgggcaaaatctgccgcgaggtgaaagtcaccagccatcccgacgatctcatcgtggtactgaaggatcctgcctggaacatggagcggatcgggcttgaggccgggcccctgtcgcaatggctgtttgaaggtctggccagggccggcctacccgtgatctgcatcgagacccgccacaccaaggcgtttctaaaagcgcaaccgaacaagagcgaccgcaacgacgcgcgcggcatcgcgcagatgatgcgcgtgcacttgtatcgggcggtgcatgtgaagacgctgaccagccagaagcgtcgagcgctgctgacggcgcgcaagctcttgcaggacaaagcaatcgccattgagaacgacctgcgcgggctgctgcgcaactttgggctcaaggtcggcgtggtcggatccgcgaagttcgaggcgcgcattcgcgagctcgtcgagggcacccttgacctggtcgagattgtcgagcccttgcttgacgcgcgccgcaagctgcgggagcactttgcgaccctgcatcggaagcttttgatgatcgcgcgggacgatgaggtctgccgactgctgatgacgatcccgggtgtaggtcctgttgttgctgtggcctatgccgcgacaatcgacatccctcagcggtcaaaaactccaaggcagtgggaccgatcctgggactgacgccagtactcaaccagtccggtgagagtcaccgcgtcggccgcgtctccctgtgcggcgacggcatgatgcgaaccttgctttacgacgctgcacaggttcttctcaatcgggtggcaaagtggtcgtggctgaaggcatgggcgatgagcgtcgccaaacggcgcggcctgcaaaaagccatggtggcgctggcccgccgtctggcggtaatcatgcatcgcatgtggagcgacggcactgaattctgctggtccagggagaaactcccggccagcgcctgactggcattcgcaatcgagatcgccgccgaggctggacgcatacggtcgccggcggaaagatgtcccttgcgggacggagcataggcgagttcgcaccacaggctgttcccgggccattgtcctggcttgagggacgcgccggagattgttccgcttgttccatctgatcccatcgtggaagggccagcgagtgccgattccggagagaagcgcgagcccgtaaggacacatctgtagatgtcgatgacataagctggaagtgcttgacctcgacacgccgaatagaga

SEQ ID NO: 6489 - DNA, 1495 bp, unidentified
  source 1..1495: mol_type = unassigned DNA; note = element_a0f6037
  misc_feature 1..4: note = core
  misc_feature 5..264: note = LE
  misc_feature 265..1476: note = CDS
  misc_feature 1477..1495: note = RE
  misc_feature 1..247: note = bridgeRNA
ccccgttacctttttcacgtcccgccgaccgcaggttggtgggagccaggtcgcctggtccggcatgactcaagccccctgtcgcaggcctgatccggggggtgttgtcaccgagcccgggtggcgtcggtggaccgctcatagggacaaggcaaccttctgtgacgaagtcatcgtctcgccgtaacgtggatgccggcagccgtcgccagacctttgtgaccaggccgaacagctcatcgactcaccgagcgaggtagggcattgggccccgaatacgcggtgttcctgggtctggacgtcggcaagggcgaacaccacgcctgcgccctggacccctccggcaagaagctgcacgacaaaccgctccccaacgacgagcagcggctgcgtgccctgttcacccagctcagcagacacggacgggtgctggtggtcgtcgaccagcccgcctcgatcggcgccctgccggtcgcggtcgcccgagccgagggctgccaggtcgcctatctgcccgggctgaccatgcggcgtctggccgatgtgcatccgggcaacgccaagaccgatgcccgctatgccttcgtcatcgccgacgccgcccgcacgctgccgcacactctgcgacgggtcgactcgggtgaggaggccctcgctgagctggaggtactggtcgggttcgatgacgacctggccggggaggcgacccggctggtcaaccggatccgggggctgctggtcaccgtccaccctgctctggagaaggcgatcggcccgcggctgcaccacccggccgcactggagctgctcatcacctatggcggcccggacggcctgcgggccgccacagccgaccagctgctggccaccaccaagcccctcgcaccgcgcatggccggacgcctggtcgaggcggtcaaggccgcgctggacgcccagaccgtcgtcgtcccgggcaccactgcggccgcgaccgtcctaccgcacctggcccggtcactgcgatcggtccatgaccagcgcaaacaggtcgcgatcggggtggaggagatccttgatgcgcaccctctcgccaaggtcctgatctcgatgcccggcctcgggatcaggaccagcgcacggatcctgctggagatcggcgacatctccgccttcgccacgcccgggcacctggccgcctacgccggcctggcacccgtcacccgccggtccgggtcctccgtcaagggcgaacacccgcccaagggcggcaacaaggccctcaaacgcgccatgttcctggccgcgttcgcctcgctgtcggacccgctgagcagggcgtattacgaccgcaagcggtcggagggcaaaaagcacaacgccgccctcatctgcctggcccgccgccgctcagacgtcatctacgccatgctccgcgacaagcagccctaccaaccctcacgaaaagccagcgttcaagtgccccaagccgcttgacgaatcccatagggacacc

SEQ ID NO: 6490 - DNA, 1399 bp, unidentified
  source 1..1399: mol_type = unassigned DNA; note = element_a0f8dba
  misc_feature 1: note = core
  misc_feature 2..100: note = LE
  misc_feature 101..1144: note = CDS
  misc_feature 1145..1399: note = RE
  misc_feature 1162..1397: note = bridgeRNA
taatgggatggtccgtcccgcttctctaacggcatcgcaatgtgccaaaatggatatgtccggtaagggcagtcattaaacaaaaggagcgagacgaaccatggataaatatagcgacagggaagtgatcaaggtagtaggtattgatttggcgaagagtatttttcaccttcatggcgtggatatgcacggaaaggtggttatgcgcaggaagttgagccgcgacaagctgacgacattgatgtcaaggcttaccccatgtctggttggcatggaggcatgcggaggatcgcacgactgggcacggaagctgatgtccatggggcatgatgtacggttgatgagcccgcagtttgtgaagccatatgtgaagagcaacaagaacgatatggtggatgccgaagcgatttgtgaggcagtgcagcgaccgaatatgcgctttgtgccgatcaagggagtcgaacagcaggacatccagagtttgcaccgtgcgcgtagtttggctgtatcgcaccgaacggcgctggtaaatcagatgcgcggcctgttgctggagtacgggatgccggtggtgaagggggttgcctcattgcgtaaggcattgccggagatgctggaggatgcggataacggattgactcccatgtttcgggggctgctgtcaggtcttcaggatgagctacaccggctgaatgagcgcattgctgcctacgatatgcagatcaaatgcctgagcgagcagagcgatgcttgccgacgactgatgactatacccggcgttggcccgatgactgccactgcgctggtagccgcggtagctgatgcgaaagtgtttaagagcggacgtgagatgtcggcatggctggggctggtgccaagacaacactcgacgggtggcaagccgaagcttctgggtatcagcaagcggggcgacacctatctgcgcaagctgttgattcatggtgcgcgagcggcactgcgctttgcggatagaaagcaggacaggcgaagccgctgggtcgtagagcttgaagtccgacgaggcaggaatattgcagcagtggctctggccaacaaaacggtgcgtacagcatgggtgcttctctgcgggagtgaagaatacaaggcggctacggcagcctgatcacaaacgaaacgatgatttcaacggattgcgaagattgagtgagatgatggcgacaaaggcggacagctgcatccccggaaacctgttcatggatagggctgagaaagccgagagattgataagtgcggggatgcgcggatttccatcagggccagaggcaatagagcctcgaacaaaggccggatatatgtatgcaactttcctttgctgcccatcaaacctttttccttgcaatgcgggacggaccatata

SEQ ID NO: 6491 - DNA, 1594 bp, unidentified
  source 1..1594: mol_type = unassigned DNA; note = element_a100f59
  misc_feature 1..5: note = core
  misc_feature 6..237: note = LE
  misc_feature 238..1557: note = CDS
  misc_feature 1558..1594: note = RE
  misc_feature 76..231: note = bridgeRNA
gaaacgcccatgcgcccaggcaggggctcacacgtgacggatggaaaaccacatattgtaatccggtcactttaagcctgatatgggcagtgaaggctgacaagtttctgggactcttgatcccgctaattgaaacaagccaagatcccccgaatacgggactgcgtcattgaacgcgcatgggaaattatcccacataagggaataatcatctgcccatatcaggcagagacgtatatgaaaaaacgaagagatagagtttgcggagcagatgtccataaagacttgattgtggccacaataactggcgatgatgtgccgccagttcaagagaattttgggacaacaaaatccgagcttaagagattccggaactggctggttgccaacaaatgcgaacaggtggcatttgaagctactggcgtctattggattccgatttatgatgccctgagttcaaccatcgatacaattgtagccaatcctttgcagataaagaccatcccaaacgacaaatcggattcaaaagactcgaagcgcatcgcaactctgtgcttaaatggtcaaatcaagaggtctagggttttttccaatgaagaccgcgatctcagaaccctaacgcgagccagatccgggtatgtcaagacacgtactcagttccggaatcggatacataaatatctttcatcaagcggcattaaactcagttcttgcatggacgatatattctgcaagtccggcagatatatcctgaacggtctggctgacgagaaacccatcgaagagatcttgaaaggcataccctccggaaagatcaggaagaagcaagacctgattagcgcagcactttccaatggtctggatgatacaaacagaatgcttgtaagagatgcgctggaactccttgacaatctcgaatctaaaacagagaagctaagccttgtggtcctgaaaaagattcagcaaaggagcaaggatctggccatagttatgtcgattcctggaattggattcatatcagcatcggtcgtgctgtcagagattggaaattaccgtgattttcagactccggaccagctcgcaaaatggtgtggcctcaatcctggagaaaacgaatccgcaggcaaaaagaaaaaatgtggaatcacaaagcgcggttccaagcacatcagagttgtgcttgtccaggctgcccagaccatatcaagaatgaaaaatacaaggctgaccagattcttccagaggttgagcaaaaagaaggagcacaatgtagcgattatcgctgtggccaggaaactcatctgtctcatttatcatcttctgatcaaccaggagttgtatcaagaagatgaatgcaggaagaggagatcgagtcaggataagtcctgccacgcaccttcatttcaggaggatcatttgacagatagggtcgctgcaattgtggatgccttttatcacctaaatgatcgtggccggaagaatgcccttatgcgtgagattgcagacatttctgatatcaaggtcggccagaaaaggccatctcagggaggtgaataatcgcctctcgttttcggttttatgtggttttccatgg

SEQ ID NO: 6492 - DNA, 1554 bp, unidentified
  source 1..1554: mol_type = unassigned DNA; note = element_a104ba6
  misc_feature 1..2: note = core
  misc_feature 3..118: note = LE
  misc_feature 119..1243: note = CDS
  misc_feature 1244..1554: note = RE
  misc_feature 1274..1502: note = bridgeRNA
agtcacaatggaacgaccggctccgattcgcagcgtaccgtagtacgcgaacgtaggttacgctgcggatcggaccttcaacccgtagcgcagagctacatgcgaaaggagccggtcgatgcacaagtacatctgggtaggactcgatgtccacaaggtgacgatcgccgtggcggtcgccaagggtgaggaagtgccccacagcctcggcaccattcccaacgaccccgacgccatcgccaagctgatgcgcaagctcggcccgtcggcccggcttcgcgtctgctacgaggccggcccctgtggctacgtcctctatcgacagctgacggcgatggggatcgactgcgccgtggtggcgcccacgctggtgccggtgcgtgccggcgatcgcgtcaagaccgaccgccgggatgccctcaagctcgcccgcctgctgcgcagcggggagctcacggcggtcgcggtccccgacgaggctcacgaggcgttgcgcgatctcgtgcgcgcgcgagaggctgcccacaaggatctccgccgggcgcgccaccgcctccagaaattcctcctgcggcagggtcaccgctgcccgctgcgcacgaaggcctggggcgtgcggtacctggcgtgggtgagcgggctgcacttcgcgcacgcgccgcaaagcgtcgtgcaccgggagtacctggccgaggtcgagcgcctggcggagcgccgcacgcggctcgaccgcgagctggaggtggcgctcgcccaggcccccgcggcgatccagaccgtcgtccgcgcgctgcaggtcctgcgcggcgtggcgttcgtgacggccgtgaccgcggtggccgaggtgggccagtttcgccgcttcacgcgcgcccgccagctcatggcgtacagcggcctcgtgccgcgcgaatcctcgagcggtgacaccgtctggcgcggggcgatcacgaagacgggcaacgcccacctgcggcgcgtcctgatcgaagcggcctggcagtaccgccaccagccgcgcgccgggatcaccatccgccagcggcgcaagggacaagcggccgcgctctgtgcgatcgccgagaaggccgaccaccgcttgcacctacgatatcggcgtctgctcgcgcgcggcaagagcaagggcaaggtggtgacggcgatcgcgcgcgaactgctcggcttcctgtgggcggtggcggtccacgccgagaacgggtcgacgatgccggccgcagcgtgagcccaggagagcaagcgcagccgtgacccacatcgagcggacccagcggccagcggtcaagcgcggcaacggcgcggagcatcctcgtgcgctcctatgcgaccaggcgacgtcctggactcgcgctgctagtccgaggcagctcccgacgcattctgagcatgcggtgtctcgctcgcgagacgtgatccgcggatatcagactgattcaccgtcgcgtgcgccctctcgaccgctgcccggttggcctgcagggaaagcaaggaggagagaacagggatccgtcggaacttgacaggtcgttccatatc

SEQ ID NO: 6493 - DNA, 1272 bp, unidentified
  source 1..1272: mol_type = unassigned DNA; note = element_a10b7cc
  misc_feature 1..2: note = core
  misc_feature 3..229: note = LE
  misc_feature 230..1090: note = CDS
  misc_feature 1091..1272: note = RE
  misc_feature 19..241: note = bridgeRNA
ctgacttgttgaatgccggccaggacgccagggtctgcagcccgtagcgtccagggtgccggccgtctggctcgcaggctccttgccacccgatggggttggctcgctgatagcgtgccggagcgcggccggcacccgccgtgacgtggctcgacagaggcgtgtgcccacctgaagtcaggctgcccgtcgcgggatcgtccctatccgccgcgacgaaaggccaccggtgatcaccatcgggatcgaccctcacaagcgcaccctgaccgccgccgcgctggacccccatagccgcctgctcggccagctgcggctggcggccagcagccaggccgcctcccagttgttggcgtgggcagccgcctggccagaacggcgctgggcggtggagggcgccagcggcctgggccgcgggatcgcccagctgctggtcgccgccggcgagcaggtcgtggatgtgccggccaagctggccgcccgggctcggctgctggggaccagcagcgctcgcaagaccgacctggccgacgccgcttcggtggcggccgctgccatccaccaccggcagttgcgcccggtcgccctcgaggaccacacggtgaccttccggttgctgtctgaccgccgcgacgacctggtcgccgaacgcacccgcactctgagccggctgcacgtgctgctggccgacctgcagcccggcggggcagcccgtgagctctcggccactcgagccgccgccctgctgcgcaagatccgtcccatcaccgccgttgacatcgagcggaagcggatcgctcgcgagctgttggcggatgtgcgccgcctggaccggcaggtcaagacggccagccaggccatccgcaccgcggtctgtgagcacggcaccaccctgacccaggtgtatggggtcgggtcggtgctggcggccaagctgctgggccacaccggcgacatcacccgcttccccgaccgcgaccacttcgccagctacaccggcaccgcccccgtcgaggcctccagcggcgacatccgccggcatcgcctgaaccggggcggcaccgccagctcaacacggccttgcatgtgatcgcggtctgccagatccgcgaccccagccccgggcaagccttctaccagcgcaaactagcccaggccaagacccccgaggaggcccgccggagcctcaaacgacatctcgccaacgtcatctacagccacctggtcaccgaccaccgccaccgcacccaggcctgttgacacacagaggcg

SEQ ID NO: 6494 - DNA, 1664 bp, unidentified
  source 1..1664: mol_type = unassigned DNA; note = element_a10d7f3
  misc_feature 1..2: note = core
  misc_feature 3..259: note = LE
  misc_feature 260..1543: note = CDS
  misc_feature 1544..1664: note = RE
  misc_feature 12..193: note = bridgeRNA
ctggtaaaataacaacacgggtaattgatgtgatgccatagatcaactgatataattgagattagccataggtgacaaatgaacgggttgcttggtgggtattcgagagaaattacccgtgttttagactgttctgccatctgctggattgttcaatgtgtcagttggttgggtttggctcgtgtcaattacccgtttcacatgccagcaaattgctgtccggctatgggtggcagtcaccaaatcaaggggggataccatggctcatacaacaatcatcggtattgatgtcagcaaaaactttgctgacgcatgtgcgatttctgcacagggcgaggttatgctggagaccaaaattttttatgataccgtaggcttacagcactttttgaagcagcttgaccagcttgctggtgagcagcgtcactgcgctgttgccgtaatggagtcaacagcacactatcacagaatcctggaaacgtacctacgccgctcaggtattgatgttgtggtcattaatccgctccagtctgggagcatgaaaaacttggagatcagaaaaatcaagaatgaccgcactgatgccaaacggatcgcccaactctatctgttcaagatgcttcgaggtaatgccgtagattccatccttgtcggagccttgaaagacctcacccgccaacggtcggatattatctctgagcgggtaaaattctccaataagctgactgcgctgctggatcagggttttcctgggttccgcaaggtcttttccagcttgcgtacaaagtctgccttggctgttcttgcccgcttccctgggccggaggagatatgcggcgcaaaccgcattgatattgcaaaaaccattgcatttgcggctggaagaaatacagaatccgcctatgcagtgaagaaagcgaaccatttgcttgatatagcagaacaagccatgcagcttcaagtcgagcgcggctctttcaaaacgcttattactctgtttgctgagatgctgatacagatacagcgtgcagcagatcagatagagcgccagatttttgaaacagcacaatgcgaccgaaccttttggagccaggtggagttgctcacaagcatccccggaatcggccaatatgctgccgttgtcattttggctgagattggtgatttttctcgtttcaagaaggcgaagcagttggtcgcctttgccggtatagaccccgccgtgaagcaatctggcacgagcgcatacaagcacaacaaaatcagcaagcgcggttccccttacctgagaaagatactggatacctgcacacacgttgcggcccataagggcagaaatcaacaaccggccaacccaattttagctgcatattatgaagaaaaacgctctgtaaaacccgctaacgtggctcagtgtgcctgtatccataaaatgctgggatatattttctctgtcctccgaaaccagaaaccatttgagctgcgttcacccgaggaacatctggctttgatgcgttccaaaactgctgatatcgccgcataaatcatcgtgttcataaacggtgaggggcgacgaagtcctctatctatgagggcttgctttgctatgcccgcatggaaaaatctttctcatcttttcttttcttgacaaattcgtagttggt

SEQ ID NO: 6495 - DNA, 1385 bp, unidentified
  source 1..1385: mol_type = unassigned DNA; note = element_a115a78
  misc_feature 1..2: note = core
  misc_feature 3..51: note = LE
  misc_feature 52..1131: note = CDS
  misc_feature 1132..1385: note = RE
  misc_feature 1131..1375: note = bridgeRNA
tgatgatgtggacgcccccgctcacggcatcaagtatgccaagctgcggcaatgctcgcgaatcaccgcgaagaatggagcgccacaatgaagatcgcgacgatcggcctcgatttggctaagcacgcttttcaagttcatggtattgatgcagaaggaaacgtcgttgtacgcagagcgctacgccgcaaagaagtcctgttgttcttcggcaagattgacccttgtctcgtcgggatagaagcgtgcgcgacggctcatcattgggcacgcgagattgagcggttcggccatgtggtgcgtttgatgcccccggcctacgtcaagccgtacgtcaaacgcaacaaaaacgacatgactgacgccgaggcgatttgtgaggcggtgacgcggcccacgatgcgcttcgtttcggtgaagtcagcagaacagcagtcggttctgatgctgcaccgaacccgcgcacttttagttcgccaacggacaatgttatccaacgcagtgcgagctcatttggcagagtttggcatcgttacaacacagggcgttcagaacgttatcgggataatccaaaagctcatggcacagcccgccgacgaggaactaatccgcgagcgagagctgctccccgagctggtccggatcgtccttggtcccgtcttgtcagcgctcctcgatctcgcggtacgcatcaaggtcctggagaacgaaatcgttaaatggcatcgtgctaacgcgacgagccgtcgtctagaaacaatccccggcttcggtgccatgacggcgtcggcggtggcggcgaccgtctctgatccgtcggtcttcgcatcaggccgagagtttgcggcctggattgggcttacgcctcgccaaaactcatcgggagggaaggaacggctcggtgggatcaccaagatgggcgacgcatatatccggaccttgcttgtcgtcggcgcgatagcagtcatccggtacgcgaggaatgacagctcgacgaaatcggcttgggtgcgccggctgttggaaaagaaaccagtgcgtgttgtagcggtcgctctcgctaacaagatggcgagggtcgcgtgggcgctcatgatgcgaaaggagaattatcgcgctgcccaagcctaatcgaacgggcggctgagttcgtagactcaattgggaagggcaatcgagacgtgatgcaaaccggccaggccggggattggaaaagcccgtggagaccagcgccgaagagcgcgatggcgtgatttgggatccgatccgcgattatcatcagggccagcggccaaaccggtcgcacacaaaggccggacatatggctgcaaccgaccgatttgcggaaacgtcaagaaagtccttgccacgggggcgtccacata

SEQ ID NO: 6496 - DNA, 1319 bp, unidentified
  source 1..1319: mol_type = unassigned DNA; note = element_a11ac69
  misc_feature 1: note = core
  misc_feature 2..64: note = LE
  misc_feature 65..1087: note = CDS
  misc_feature 1088..1319: note = RE
  misc_feature 1083..1313: note = bridgeRNA
taatgagatggtccgcctcccctaatctatacttagggcagactattaaatgaggagagttatcatgtctactattaacattcttggaattgatataggaaaatttacctttcaccttattggccacgattcatctggtcgagaaatttgccgtaaaaaattaagccgtccaaaactcattcaatttatttctactatcgagctaacaactattgctatggaagcctgtggaggctgtcattggttagcaaggaagtgtcaagagtttgggcataaagtacttctaataccaccgcagtatgttaagccttatgtcaaaacaaacaaaaacgacttcatcgatgctgacgccatagctgaagcagcgactcgaccatctatgcgctttgtaaccgtaaaacctgaatcatctcaagtgatttcagttattcagcgcatacgctcaagctatttaaaagacagaacagcctgcatgtcacggattggagcaactttattagaatttggtatgagctttccaaagtctcacgccaagatgaaaacactattccagtggttagcagagcatggtgagccaataccaccgatgttacttttagaactaagagaccaccatgattattatttgaaacttaatcagcttattttgactcaagataaaaagctgaaagaaatagttgataatgatgaacgagctcaactactcaaaacgatccctggagttggaactctaacagctagccgttgcatatctgatataagtaacgctgctgattttaaaaatggaaggcatttagctgcttggcttggcttagtacctcgtcagttttcaacgggaggtaaaccaacattactcggtataagcaaacgagggaataaaggcttacgagagctattcattcacggtgcaagagctgttcttgttcggccagaaaaagcagtagccgtttttggtaactggatattagaattactatcgagaaaacattttaacgtcgtggtaatcgcgttagcgaacaagctagcacgtatcgcgtggtcagtactttcaaccaaacaagcattcgaagttagagtgcaagcctgatttgcaaatgatgataaagatgacacaacggttagaccactggattgaaaacctgtggggcggaacagcaacataatttagtatgcttactcgcttttgaggacaatctagcgcggatctcatcgtggagctgggcctagtgtattaggtaaccaaaaaagactccgaatacattagcgcaaaccaactagttatcaatattattacttgcaatattgaggcggaccataca

SEQ ID NO: 6497 - DNA, 1303 bp, unidentified
  source 1..1303: mol_type = unassigned DNA; note = element_a12526a
  misc_feature 1: note = core
  misc_feature 2..263: note = LE
  misc_feature 264..1256: note = CDS
  misc_feature 1257..1303: note = RE
  misc_feature 53..253: note = bridgeRNA
cctttgtattgataaagataattttaagactattactattgtttgaacgggggggtctggggggtgttaaaaactaaaaactttgtggagaacgttactataaaaggcagggtgaactttggccccttgtgattttccgagaataaagccccgtattagtccctgccttttatgattgcccaaggcccaactagaatgatcgctttgcttcaacaaaggtaattggcaaaaggcaatttattgtttacttaaaggacaaacgcatgaaaagctggaatgttattttaggtgtcgatgtttcaaagttaacgctcgacatcagttgtgctgaacagaatttacacattaaaattgacaattgctcgaaaggatttagtgagtttataaaatggtgtaaaaccaaccacatagatctgaaagaaaccttagtagtaatggaatataccggtggttatgaataccggcttgttcaattctgtgattcgaagtctattgctttttgccgactgcccgggatggaaatcaaacagtcaatgggtatggtcagagggaaaaatgacaaggcagattcattccgtatcggacgttacggcgaagaaaagagagatcggctaaccccctcaaagccgctggataataacattttaacacttaaacagttactgtcgttccgtaaaagactggtgcgggaaaaggctggcttacaaagcacttcgaaagagcgcgagcacatgtacgatgtaaagaaaaccgatactatcatgcatatcgcccaggcaaaaatgaaagcagacgagaaatatataaaggtggtagaactgcagatcagagaattgatcaaaagcaataacgaactgcttcaaaattaccggataataaccagtattaaaggaattggagaaataaacggatggatgaccatagctcacacggaaaactttaccagctttccagatgcccgaacatatggtgtatatgttggtgtgatcccatttggttatagttcaggaacaagtataaaaggccgaaaacgagtcagtcatttagcgaacaaagaactgaaatctgaattgacccaagcagctaaatctgctgtaatacacgataaggaattgcacgactatgctaagcgcaagcttacaaacaagagttatggcctggtactgaacaacgttaaattcaaactgatccttagaatgttctccttagtaaaaaggggtgaaatgtatgtggataactacaaaagatcagcctaaaaaaaacatttttgaattaaatttggatatatggcaaacctagaata

SEQ ID NO: 6498 - DNA, 1497 bp, unidentified
  source 1..1497: mol_type = unassigned DNA; note = element_a125899
  misc_feature 1..2: note = core
  misc_feature 3..253: note = LE
  misc_feature 254..1477: note = CDS
  misc_feature 1478..1497: note = RE
  misc_feature 6..228: note = bridgeRNA
ctaatgggagtcaccggggtggccgtagtgcagactccggtccggtaacggccagcgggtgagtactagttcaaccgggcagttgatgccttgattcagaccgtgcccccgctgggcgtgaggaggacgtgaccgctgatggggtggcgtgcccgctcgttgtggcgtgagcactgatccattaggtcgccggtgttctcctcgctcgttgccgctcgttgccgtggacgggttgtcgagctgtggagggtctgtgctgttcgttggagatgactgggctgaagatcaccatgatgtggaggtgcaggacgagacgggtcgacggttgggacgggcccggttgccggagggcgtgtccggtgtggcccggttacacgcgttgatcggtgagcatctggttgaggacgccgaaccggatcaggtcgcgatcgggatcgagaccgatcgggggccgtgggtgcaggcgttgatcgccgccggctatgtggtgtatgcgatcaacccgcggcaagtcgcccggtatcgagagcgacatggcacctcgggtgcgaagagcgacgctggggacgcgcacgccctggccgacatggtgcgcaccgaccaccaccagttacgtgccgtcgctggggacagtgagcaggcccaggcggtgaaggtggtcacgcgagcgcatcagacgctgatctgggatcggcagcggcacatgctgcggttgcgtgcggcgctgcgggagttctttcccgccgcgctggaggctttcccggagctgatcgcgccagacacgctggaactgctgagcaaggcacctgatccggaccgggcggctcgcctgtcactagcgcagatcaccagcgtgttgaagcgagctggccgccgacgggtggaggacagggccgccgcgatccaggccgcgttacgcaccgagcagttggcccaaccacccgcggtggccgcggcctacgctgcgacagtgcggtctctggccagtgtgatcgccgcgttcaataccgagatcaccgtcatggacgagcaggtgagcgcgtgttttgggcaggcccgggacgctgagatctacctatcccaaccaggtatggggcagattctggccgcccgggccctgggcgagttcggcgacgacgaacaccgttacgccaccgccaagaaccgcaagaactacgccggcaccagcccgatcacccgtcagtccggcaagaagaccaccgtgctggcccgcttcgtccgcaacaaccgactcgtcaacgctctacaccaacaggccttctgcgctctgaaagcctcccccggtgcccgcgcctactacgaccaactccgcgcccgcggcatgagccaccacgccgcactgcgccaactggccaaccgcctcgtgggcatcctccacggctgcctcaaaacccgcaccccctacgacgaacacaccgcctggacaccccccaaccacgaccaagctgctgcttgacaacaaaaaacatggggtgt

SEQ ID NO: 6499 - DNA, 1624 bp, unidentified
  source 1..1624: mol_type = unassigned DNA; note = element_a12d997
  misc_feature 1..3: note = core
  misc_feature 4..257: note = LE
  misc_feature 258..1493: note = CDS
  misc_feature 1494..1624: note = RE
  misc_feature 8..232: note = bridgeRNA
gttcgtattataaggtcagccagataagaaaatatttctggttgaccttattttatatggtcttattataacagtagccaaagtagaacgtctctgcccgtggggcttgaccccgtcaactaaaccgttcgccccctacttgtagaaacatgattgaggctggttgggacgtagatctcgtataacaagcgaagctgtgacactgcatggaggattaggggttactggcaaatgactagtctaggaggagattcagaatgaatccagtcgttggtctggatgtttcaaaaggggaaagtcaagttcaggcatttttagataaagtcaaaccatatcgtaagagctttaaagtttctcatactgttgaggggcttgattcacttgtagcgtttcttgaggatgttaaaagagagtctggaaaaaagccttcagtcattttagaagctactgggcattatcaaactccagtcgttcactacttggaagagcgtgggtatttattgattatcatcaaccctttgatttcatataaggcaagagggtcaagtttaagaaaagtaaagaccgatgccattgatgcctatcttctctgtgagttgttctataaggaggagttagaaccatataaaaagcgtggggttcagttattaaaccttcgtaatctgacaagacaacatgaaaatataacgggcgttataatccaaacaaagctgcaatttcaggcagtgcttgaacaagtgtttcctgaatataacggggtttttggagatttatattctgtggtgtcactcttaactctttcagagtttccttcttcagaagacattctgaaggcaagtgaaaaagccattacagacaagatatttgagttatgtaaaagtagatctatcaaatgggcaaatgaaaaagccattcagcttaaagctgcggcagcccgtaacccttttgaaaagactgtttatcagagtcatattttaagcctaggtatgtatataaatattcttcttcagtacaaagagcatctatcaaagttagagacagagatagacgctctcgctaaagaaattgaagaatatactattatcaaatctatcccaggcattggagaaaagatcgcggcaacgattatttctgaagttggggagatagatcgatttaataatcctaaaaagcttgtagccttcgctggagtggatcctagtgtattcgaatctggtaagtttacagctaccaagaatcgcatcacaaaacgaggatctagtagacttcgtcatgcattatatatggcagttcgctgtgccattcgtgattgtcgcaagaagaaaacgactgatgaaattatccctcgcaacaaaaaaatgcgtgagttttacgataaaaagcgtgaagaaggaaagccttttaaagtggctattatcgcttgtgtaaataagctcttacattggatttatgccttattaaaaaataaaacaactttccaagatatagtttaaaaactatgtctaactaaataactcaaaactttccatccgagagaaaacggaaggttatttggtatgcgctttttagtatatcatctatgattttaatcttttattgaaaaatattgacaaactattagctg

SEQ ID NO: 6500 - DNA, 1402 bp, unidentified
  source 1..1402: mol_type = unassigned DNA; note = element_a13575d
  misc_feature 1..2: note = core
  misc_feature 3..79: note = LE
  misc_feature 80..1123: note = CDS
  misc_feature 1124..1402: note = RE
  misc_feature 1120..1389: note = bridgeRNA
tgttggggtggacggcctccgtacggcatcacaatgtgccagagtgaggttgttggaaacccaaacgaggagaccgtccgtggagcaaattatccgaattggcatggatacgtcaaagcatgtttttcaattgcatggtgtgaacgctgccgagcagccggtgttgcgcaagaagctgcgccgctcggaaatgatagcgttttttgagaagcttcccgcaacaatggtcgcgatcgaagcctgtggcagttcgcatcactgggcccggttgctgggtgggcttggccatgaagtaaagctgatcgcaccgcaattgtcgaagccgtacgtgaagcgcggcaagaatgacgcagcagacgccgaggcgctttgcgaggcgatgagtcgcccgacgatgcgtttcgttccggtgaagagcgccgagcagcaggcatcattgatgctgatggggatgcgcgacaggctggtccgaaacagaacgcaactcgccaacgcaatcagaggctatgcggccgaattcgggctcacagcggccaagggcatgtgcaaggtcgagccgttactcgatcgcatcgccagcgatcctgccgtgcccgcgctcgcgcgggaactcttcgcgtcccatgccatggaatatcggcacctggaggaacagctcgacgaaatcgacgcgaagctgatgaagtggcaccgggccaatgagtgcagtcgtcgtctggcgcaaattccaggcgtcgggccggtcggggctgccttgctgatgatgaagaccccagcgccggagctcttcgcatccggtcgccagtttgcggcatggatgggtctgacgcccaaagaccattcgacggcaggaaagagcaggccaggcatcatcacccgggcaggcgacgagacgctgcgatgcacgctcgtggtcggagctacatcgctcctgcagcatgtgagggcggggcgcggaaagaacggcacgccctggctgcttgagttgctcaagcgcaaaccgcccaagctggtcgcggtcgcattggccaacaagattgctcgcattgcctggaagatgatgatgaccggtgaagcttatcgcgcaaacacgtcaccgccggcccaagcatgcgcagcttgagatcagtcagtcacggcgagcatatactgacgctgccgtgctgatctggtgcctgaacttgcaggaatagcagatggtgtgatcaatcgatccaaggcttgtgacaatccgttaataccaatggccttcaaaaaggtcgtcaggttgtttggaacacttgccgcggaaaccatcttggccagcgcccatgtgcggacgcacccaaaggccggacatatggacgcaagcgattagatcaaatcactgccaacaccttgcagggaggaggccgtccacata

SEQ ID NO: 6501 - DNA, 1219 bp, unidentified
  source 1..1219: mol_type = unassigned DNA; note = element_a13bf5e
  misc_feature 1..3: note = core
  misc_feature 4..232: note = LE
  misc_feature 233..1204: note = CDS
  misc_feature 1205..1219: note = RE
  misc_feature 21..200: note = bridgeRNA
cttgtatattgatttcggtcgttcacaatgcggccacaatgggtgcgacagaccgattcctccttggtccgagcttcgccgagaccgtgataaagcacgagtcgtcgcgcccaccctctggaggagcccgaacggttgccggggccgctagcttcgctggcgagcccgtatccgcaaggtcgggcctaccacgagaacaagcgcagcaagaaaaaggagaaggagaagccccatgaggagccccacccacgaactcgactccgccgcccacgcggggatagacgtctccaaggagcgtctggacgttcacctcctgcccaagggcgaggccttcgccgtcaacaacgatcccgagggcatcgacgcgttggtcgagcgactcctccaaggagagcgccccgagctggtcgtcttggaagccaccggtcgttacgagcgtccggccgccacggccatcgccgccgccgggatcgccgtggcggtggtcaaccccaggcaggccagggatttcgccaaggccaccgggcgcctcgccaagaccgacaagatcgacgcccagatccttgcccgtttcgcggcggccatcgaaccctctccgagcgtactgcccgatcaggaagcccaagctttgcaggcgatcctgaccaggaggcgccaactgattctcatgctcgtctccgagaagaaccgcctggccatgtctcccgagcccgtcgccaggcgcatccatgcccacatccgctggctcgagaaggagctcgaacgcaccgaccgggagctcgacgaggcggtccacgagagcgaggtttggcgctgtaacgaacaactgctgaggagcgtgccgggggtgggacccgtgctcgccaggacgcttttggccgagctgcccgaactcgggaccatcacccacaagcgcctctcgtccttggtgggcgtcgctcccttcaaccgcgactccggaaagattaggggcaagcgcgaagtatggggtgggagggctccggtgagggcgaccctgtacatgggtgccctggtcgccacccgccacaaccctaccctcaaggagttctacgagcggcttttggctgcaggcaagcccaagaaggtggccttggtagcgtgcatgaggaagctgctctccatcctcaacgccgtgatgagggatcgtgctaattggaggtgtcctcatgtcctaaccccttgactttcaagacggttg

SEQ ID NO: 6502 - DNA, 1364 bp, unidentified
  source 1..1364: mol_type = unassigned DNA; note = element_a14a052
  misc_feature 1..2: note = core
  misc_feature 3..84: note = LE
  misc_feature 85..1119: note = CDS
  misc_feature 1120..1364: note = RE
  misc_feature 1115..1350: note = bridgeRNA
tgatggggtggacggcccttgctcccagcttcgagcgcgtaaagtggtcgttgctgaaagccgagaatgaggggagccgtccacatgcagaaaatctccacgataggtcttgatctcgcgaagcactggtttcaggtccacggtgtcggcgatgaagggcaagtcgtcattcgtcggcgacttcgacgcggcgaggtgatcggtttcttcgcatcagtggagccgtgcctggtcggcatggaggcttgcgcgacggcgcaccactgggctcgccaactggcctcgctcggacattgtgtgaagctgatgccgccgggttacgtgaaggcctacgtcaagcggaacaaaaatgatgcagccgatgctgaggcgatctgcgaagcggtaacacggccatcgatgcggtttgtgccggtgaaaaatgccgaccagcaatcggtgttaatgctgcatcgagcgcgcaatctgcttgtccggcagcgaacgatgctgatcaacgcgctccgagcgcacatggccgaattcggcattatcgctccgctcgggccgcgtcacgccgaacatctgctgaccgctatcaacgatgacgagactgaactgcccgatcttgcgcggtcgatcctccggctgatcgtggcacaactgaacgatacgacagccaagatccgcgacatcgagcgacgcttagtcaaatggcatcggcagagcaaagtgagccgattgcttgcaaccgtgccgggagttggtctgatgggcgcgagtgcaatcgcggcaaccgtttccgatccgtccttgttccgatcaggccgggaatttgccgcctggctaggtatgaccccgcggcagaactccagcggcggcaaagaacgattaggacgaacaagcaagcgcggcgacaaatatatccgcagcctacttgttgccggcgcggtcgccgttttgcggcataggcgcaatcgaacgaccaaagacgccgcgtgggtccgcgaactattggctcgcaagcccactaagcttgccgcagtcgcactggcaaacaagaccgcccgcatcatctgggcggtgatggcacggggcgacggttaccgctccaaagagatcatggtgcaaccggcgtaaccgccgcttggccatgtagaatgtgagggtgaagaggagttgatggcgagcggtcgagcgcagatcgggaagacccgtaaaaatcaaggcgcaaccaagcgcgtaatcttgatagggacccgatcggcgaactccatcagggccagcggtcattgcgccgcaccgaaaggccggacatatgactgcacccgaccatatcgccaactccgctttcggagcccttgcaggcgggggccgtccacata

SEQ ID NO: 6503 - DNA, 1479 bp, unidentified
  source 1..1479: mol_type = unassigned DNA; note = element_a14e198
  misc_feature 1: note = core
  misc_feature 2..261: note = LE
  misc_feature 262..1464: note = CDS
  misc_feature 1465..1479: note = RE
  misc_feature 9..238: note = bridgeRNA
cgttatgttcttcgtggtcctgcaagagggccgctggcctctcgggcccggcatgactacttgccccctgtcgaccatgacctggggggtggtgtcaccgggcccgtgaggtgtcgtcggagacgctgatgagaggtccgaccaccgcctgaccgggcgcaacgcccggccgtctgagggcggcaggtctgcataacgtggatgcgcgagcacgacaccgacccccgaggccggcacccggaacttcccagggaaggcgaagtggtcaacaccgaagacgtgggcgtgttcctcggcctggacgtcggcaagagcttccatcacgggcacgggctgaccccgtccggcaagaaggtcttcgacaggcaactacccaacagcgaaccgaagctacgggcactgttcgacaagctcaccagcaagttcggcaccgtcctggtgatcgtggaccagccggcctcgatcggcgctctgcccttgaccgtcgctcgggacaccggctgccgggtcgcctacctgcccggccttgcgatgcgcaggatcgccgacctgtatccgggcgaggccaagaccgacgcgcgtgacgccgcggtgatcgcagacgccgcacgcaccatgccgcacaccctgcgcacgctggagctcaccgaccagatcaccgccgagctgaccgtgctggtcggcttcgaccaggacctggccgccgaggccaaccgcaccagcaaccgcatccgcggcctgctcacccagttccaccccagcctggaacgcgtcctgggcccgcgcctggaccaccccgccgtcacctggctgctggaacgccacggctccccgcaggctctgcgcaaagccggacgccgcagactggtggagaccatcagacccaaggcaccgcgcatggcggcccgcctgatcgacgaagtcttcgacgccctggacgagcagaccgtgatcgtcccgggcaccggcaccctcgacctggtgatcccctcactcgcccgatccctggcagccgttcaccagcagcgacaagccctggaagaccagatcgaaaccctgctggaggcccaccctctttcccaggtcctgacctcgatgccgggagtcggagtcaggaccgccgccgtcctgctggtcaccgtcggcgacggaaccagcttccccacccccggccacctcgcctcctacgccggcctcgcccccgcgaccaagtcctcaggcacctcgatccacggagaacacgcaccccgaacaggcaaccggcaactcaaacgcgccatgttcctctcggccttcgccgcactccacgaccccgcctcccgcacctactacgacaaatgccggacccgcggcaaaacccacacccaagccctactccgcctcgccagacaccgcatcagcgtcctgttcgccatgctccgtgacggcaccctctaccaacacagacccccacgcaccacttgaccaaagacatagagg

SEQ ID NO: 6504 - DNA, 1386 bp, unidentified
  source 1..1386: mol_type = unassigned DNA; note = element_a14e2e0
  misc_feature 1: note = core
  misc_feature 2..87: note = LE
  misc_feature 88..1119: note = CDS
  misc_feature 1120..1386: note = RE
  misc_feature 1160..1381: note = bridgeRNA
caatgggatggactccccctcacctcggcatcttgagtgccagactgaaggtgcgaaccgcagtcatcgatgagaaggagtccacacatgaagcttatgcgcattggggtcgacctggccaagaacgtgtttcagatccatggcgtcgattgtcacgagaagccagtctggcggcagcgcttgccgcgcgagtgctggcttcaaacgatgctggagaagatcgaaccaggttgtgagatcggtatggagagttgtggcggtgcccatcattgggcgcggcaacttgagactcgtggatttcgggtcaagttaatcgctccccagttcgtcaaaccctacgttaagagcaacaagaacgacgccaacgatgccgaagcaatctgcgaggcaatgagccgtcccagcatgcgtttcgtggcgatcaaaacggtcgagcagcaggacattcaggcgacccatcgcattcgtgccggattgattgagcaacgtacggcaaaagccaatcagatccgtggactggtcgctgagtacggtctagtcgcaccgaaagaactgctctcactgcgtcgagcaataccgtgctggctggaagatgcagacaacggtttaacgctgcgttttcgacatctgctggatggcttgtggggcgatctgcgcacactagatgaacgcgtgagagagcttgataccgagatatccgtgatcgcggcaaatgagcctaacgctctatgtttacagcagctgcgtggtgtcggcccgatgatcgccactgcactcatcgctgccatcggtgacgcccgacagtttgccaatggccgacagtttgctgcttcgctgggattaacgccgagacaacacagctccggcggcaaagatcgactgctcggcatcagtaagcgcggcgatgcctacttacggacactgatggttcacggcgctcgatcagcgttacgtacggccaattccaaagacgaccgacttagccagtgggtcgtccgcctggccgaacgatcgcatgccaacgtggcagcaatcgcgctggccaataaaaccgcgcgcatggcttgggcaatgctgcgtaacggcaccaattaccaaccggatcgggctgcggcctgacccaccaaccagcacgctcagcaagagagtaaccgtcacccacgattgcgaagcaacctgaacgatggcaaaccggtcgaaccggcgctggaaaacccctcaaatgtccatgtgcgagaagcacgtagaagcgattgggagcccgcgcgcgaatagcccatcatggccctgcatcgaagcgatgccgaagtcagaggccgaatatacgtgtgcagtcggcacgggcgccaaagagaagggggcttgcaatgagggggagtccatata

SEQ ID NO: 6505 - DNA, 1613 bp, unidentified
  source 1..1613: mol_type = unassigned DNA; note = element_a14f94b
  misc_feature 1..2: note = core
  misc_feature 3..274: note = LE
  misc_feature 275..1492: note = CDS
  misc_feature 1493..1613: note = RE
  misc_feature 14..294: note = bridgeRNA
ctactacaatgtatttatggttaataccccttacagccagtaaggaattacccatcttgttgcttaagctgttagaatgagtaaggcaataggtctggccgcccctttctaggacttggcgtccgtaaaacagtcagccaaccagccctcattcgcagcattcgttttacgcaggttgaaccttatggcgttcgtgtgatacccagtagattgaacaggcaatgagtaaatctggtattgaccattgctaatacattacaaaggagtatctgttatgaacgctgttggtattgatgtttccaaaggtaagagcactgtcaccatccgcaggcccggtgacgttgtcgtcatgtctccccgtgacatcccgcacacacagtccgcaatcaatgacctaatcggtctgatacggggccttgacggggaaacgaaagcctgcatggagcacaccggcaggtactatgaaccggttgccacatggctctctgatgccggtatctttgtcagtgccgtaaaccctgtgctcatcaaagacttcggggatgattccctgcgtactcccaagaccgacaaggctgattcccaaaaaatcgcacgttatacccttgaccgctgggcgaaactgaagcagtatggaatcatggataaagcacgcaaccaattaaaaaccatgaaccgccagttcggcttctatatgaatcaaaagactgccatgaagaacaacctcattgccctgctcgaccagacctatcctggcgcaaatgacttctttggcagccctgcacgcagcaacggcagccagaaatgggtggatttcgtccatacctactggcatgtggactgtgtccgctccagatcactggatgcctttacggagcattaccagaactggtgcagacgcaaaggctataactttagtgcctccaaagcagaggatatctatcggctttcctctgacataatcgccgtattcccaaaggatgacagcacgaaactgttgatacggcaggctgtggcaatgcttaactccgcctctgaaacagtcgaatccctacgcctaaaaatggatgaggctgcgtccacgctgcccgaataccctgttgtcatggcaatgaatggtgtcgaccccaccctcggcccacagcttatggctgagattggggatgtgacgcgtttcacgcaccgcggggcactgaccgcttttgccggtgttgacccaggaaaagatgaatccggacagcacatccgtaaaagtgtgcctaccacaaagaaaggctctccctatctgcgcaagaccctcttccagatcatggacagtcttatcaagcgttcccccgtggatgatcccgtttatgctttcatggacaagaagcgggcacagggcaagccttattacgtctacatgactgccggggcaaacaagttcctccgcatttattacgggcgggtaagggaatatctttccgcactggcggaagccgaaaatatctaaacaaacgtccttgtttttcatcagaccagcgtactgcggtggtctgtttgcggtacttatttttcaacctgtataaaattttcaaagttcacaaatttctgcttgactttttatttgcaga

SEQ ID NO: 6506 - DNA, 1512 bp, unidentified
  source 1..1512: mol_type = unassigned DNA; note = element_a17deb7
  misc_feature 1..2: note = core
  misc_feature 3..208: note = LE
  misc_feature 209..1492: note = CDS
  misc_feature 1493..1512: note = RE
ctaatgggggctggcgagtcggccgtccggcagactcgctcctggtagccgccggcgggtgagcacttgtgttccgccctggacgtcgagtcctgttgagagatcgtgcccttgctggtggccgggaggatgaatcgctgatgggatgtcgtgcccgccgactggtggcgtgagcactgatccattaggtcgctgatggttctcccgcgtgctgccgggcgtggtcgatgtcgagacgggagaagcgcgagtggtgctgttcgtgggtgatgattgggccgaggagcatcacgatgtcgaggtgatggacgcggccggtcagcggctggccagggccagattgcccgagggtgtggccggggttgccaggttgcacgccatgatcgccgagcagctcggccacgaggtcgacgaggcggaggtgctggtcggtatcgagaccgaccgtggcccgtgggtggccgcactgatcgcggccggttacagggtgttcgcgatcaacccgttgcaggtgtcgcgctatcgggaacggcacagcgtctccggtgcgaagagcgacgcggcggatgcgcacatgttggccgacatggtccgcaccgatgctcaccagttgcgtccggttgccggtgacacggccgaggcggaggcggtgaaggtggtgtcacgggcgcacaagacgctgatctgggaacgcacccggcacacgcagcggttgcggcaggcgctgcgggagtacttcccggcggcgttggaggttttcgacgacctggatgcggccgacacgttggagctgctggccaaggcgccggacccggcatcggccgcggcgctcacgctggcgcagatccgtggggcgctccatcgggctcggcgtcgtgacgtcgatgagaaggcggcccggatccaggcggtgctgcgtggtgagcacctgggccgcgccgaggtgatcactgcggcgtatgcggccaccacccggtccgcggcagcaatcttgggcacgctgaacgagcaggtcaaggtgctggagagccaggtcgatgcgaattttggtcagcacccggacgctgagatcatcctgtcccagccgggcatgggccggatcctcggcgcccgggtgcttgccgagttcggcgacgacccggcccgctacaccaccgctaagaaccgcaagaactatgccggcacgtcaccgatcacccgtgcttcggggaagaagaaggccgtgctggcccgattcgtgcacaacgaccggctcgtcgacgcgctgatcagccaggccttctccgcgttgcaggcctcgcccggcgcccgcggctactacgaccagcagcgtgctcgcggcgccgggcacaacgcggccctgcgccaactcgcgaaccgtctcgtcggaatcctgcacggatgcctgaagacccgcaccccctacgacgaggccaccgcctggtcgcaccaccacgccaaccacaccggacaagaagcgatcgccgcttgaccctcgagctcctgggatgt

SEQ ID NO: 6507 - DNA, 1389 bp, unidentified
  source 1..1389: mol_type = unassigned DNA; note = element_a18389c
  misc_feature 1..2: note = core
  misc_feature 3..132: note = LE
  misc_feature 133..1134: note = CDS
  misc_feature 1135..1389: note = RE
tgatatcatgaaaaaggctgcagagctccatcgggtttaaaagagccctaaaaggctaattgggatatacccaataaggttctcatccatataatggatggaacaataacccttaactaaggagatgcagccatgaatgagtatatcggaattgactttcacaggcaaagctcgtacatcacaaggatggataaggaaggaaatattctggagcagttgaaagttagaaacagggaagaggaattgggggcatttcttgccaagcatattgaagagtcaaagatcgcaatagaggcaacaggaaactggtactacttctatgaattaatcgaggaaaagcaaccagatgttgttctagctcatccattaaagaccagggcaatagcaagtgcaaggataaagacagataagatagattctgctacaatcgcacacctacttcgcagtaatctcctgccaacagcatacatcccacctcgcgaggttagagatgtaaaggagatcttaaggtatcgagcatcattggtatcgcttcgggtggctatcaaaaacaaagttagggccatcctctccaaaaatggaatagtgcttaactataccgatatattcggaaagaaggcgatgatatatcttaaagaccttgagataagatcctgctatcggcgggaaatggatggatatatcatgcttgctgaaactctaaactttctcatagatgagacctcgcgtaccatcagggagatggtggaggataaccccaaggcaatgctacttaccacgatgccgggaataagctattattctgcccttctgattttagctgaaattggggatatcaagagattttgcgatgcacgtcacctttgctcatatgccggccttgtgccatctacctatcaaagctcagataggacaaggcatggtaagataacaaagcagggctcgcgttggtttcgctggatattagtcgaagtatccactcacgccattaacagctcaaagaagtttaagtcgctttacatacgggttgctaaaaagcatggcaaaaatacagccagggtggcggtagcaagagagatgctaaaggtaatcttttacatgctcaaatacaatgagccttttaaaaatggctaaagtttttggctaaaaggaaatgccggccatctccaagtgaggcatggcccgggtatcgaggcccacgatttgattgagaggccggccatccaacgatatattgtgccgaatatcgagcacggataggtgactgaccttttggtccgctttttagtgagaccctctgttggatgaagtgaatatagaaagaatttgatggctagttatagttaaaagcaaatatgcatattactaattgacagcctttttcatagg

SEQ ID NO: 6508 - DNA, 1580 bp, unidentified
  source 1..1580: mol_type = unassigned DNA; note = element_a185b52
  misc_feature 1..3: note = core
  misc_feature 4..248: note = LE
  misc_feature 249..1451: note = CDS
  misc_feature 1452..1580: note = RE
  misc_feature 8..227: note = bridgeRNA
gttcgtattatatagttcagccagaactttctggttgaacttttttcatatgaatttaatctatcagtagccagggtagaacgtaaggggcagtgggacaaatgatcccgtccgctaaactgttcaccccctacttgtagaaatatgtttgaggctggttgggactgagatctcgtataacaagcgaagctataatactacttggaggaaataggggtactggtgaatttatcagaggaggagaaagaatgaacccagttgtgggtatagatatagccaaagaagaaagtgaagtacaggcttttttagataaaggaaagccatatggaacaagtttttcgattaagcataaccgtgaagagttggaggagtttatctatttcttaggagagatgaaggcaaagactgggcagatgcctgtcattatattggaatcaacaggacattatcatacacccgttgtgcaatgcttagaagagaatgacatactttatatcttattgaatccaatcatttctcatcaagcgaagaaggccagtttaagaaaggtgaaaactgacgcatatgatgcatatcaactgtgtgttctctattataaagaagagtttgaacctcaaaagaggagaggaattcagctcttaaatcttcgaaatctatcgagacaacaagaaataatgacgaatatgtatgtggaggcaaaattgcattttcatacgattttagatcaggttttccctgaatacagaaaggtttttggagatcttttttcgaaagtatctttatcggtattaaaggaatatcctacctcggagaaggttctaaaggctggcaaggaagaactagaagataaaatacgagaacattgtccaagtcggtctgtacagtgggctaaagaaaaagcaagaaagttaattcattcagcttctcagaatccttttcagaaagtgcaatatgaaagccatcttatcaatcttagtatgtatatcgatattttatttcactaccaaggacacctaacggatttagagagccaaatggtatccctggcaaatgaaatagaagaatataagattatccaatcgattcctggtatcggtgaaaagattgcggcaacaattatttcagagattggggaaattgatcggtttaatcaccctaagaagctagtggccttcgctggagtcgatcctagtgtccattcatctggaaagtttactgcgaacataaatcgcataaccaaacgaggttccagtaggctaaggcgtagcttatatttagctgttttatgcggaattagaagatctagaaataaaaagcttaaagagttctatgatagaaaacgttcagaaggagaaccttcgaaagttgccattgtagcttgtatcaataagctgcttcattggatttatgctttattgaaaaagaaccagaatttcctagatatagcttaggaaatggtatttatccaacataagaaaaaccttccaaaaagaaactggagggttatttggcatacccaaaaacagtatagcatataaaaaaatgaaatatacagagagatattgacaacctattagctg

SEQ ID NO: 6509 - DNA, 1385 bp, unidentified
  source 1..1385: mol_type = unassigned DNA; note = element_a188283
  misc_feature 1..2: note = core
  misc_feature 3..84: note = LE
  misc_feature 85..1113: note = CDS
  misc_feature 1114..1385: note = RE
  misc_feature 1087..1372: note = bridgeRNA
tgatggcgtggatgcccctcccgacggcatctcaatgtgccattgtggtgagtgttaaagccatcacaaaaggaaggagcatccatgtccgaagttactataatcggtgtcgacctggcaaagcgcgttttccagcttcacggtgcccacgctgacgggtcggttgcatttcgtaagaagctgtcgcgggggcagctgattgcgttcgtggcacagcagcccaaatgcctgatcgctatggaggcatgtgcgacggcgcatggctggggtcgggcctttgaagcactggggcacgacgtgcggttaattccgccgtcctatgtgaagccgtttgtcaaacgccaaaagaacgatgttgccgatgcagaagccatcgtggaggctgcaatgcgtccgaccatgcgctttgtggtagtgaagactgaagatcagcaggcccgcgccatgctgtttcgcacccggcagatgtttgttggtcagcgcactcagatgatcaacgctttgcggggccaccttgccgaacacggactggttgcggcgcgggggcctgcccatctcaagcagcttgtcgatgcgctcgcagataatgacacgatgctgcacattgaggttcgtgaacttggccggatgtatctcgagcagatcgaggaaatgaatgcgcgtgttgcagagcttgatgcaaagatgagatctgcggccaagaaagcggacttggtgcgtcgcgcacagacgatgccgggcgtgggtcctgtcacggcgcttgcgatcgagacgtttgccccagacctgaccaccttcaaacgcggtcgcgattttgccgcgtggcttgggttggtgccaaagcagcactcgaccggcgggaaggccaggctcgggaagacctcaaagatgggtcaacgcgacatccgtaccctcctggtctctggagccatggccgttcttcaggctgtcgagcggttcaacacaccgaacaatggctggctgaaacgcctgctgacccgcaagccacgcatggtcgccgcaattgcgctggccaacaaaatggcccgtggtctctgggccatgattacgaaacacgaggattaccggaatccggcggcgacgatggcatagcgaagactgcgtgttacggcgtcccggtaagttgggagtgtgaggaggtcactgaacagtaagggcaaaggatcgatcagatccgggtcagagaaagcagcatttgtgcaggagccatcgagctcggtttgttgatatgcttttgatccgcgcatcgccataccggcccgcggtcaatatatcaccgcatacagaggcctgatacatgaccgcacccgatcacacgcttgcaccgttcaaaaatcacttgcactaataggggcatccataca

SEQ ID NO: 6510 - DNA, 1681 bp, unidentified
  source 1..1681: mol_type = unassigned DNA; note = element_a18cc87
  misc_feature 1..3: note = core
  misc_feature 4..239: note = LE
  misc_feature 240..1445: note = CDS
  misc_feature 1446..1681: note = RE
  misc_feature 54..229: note = bridgeRNA
cttatacattaaactagtgctagggcctcttgagtgaggacctcagcagggttatacttgctagatgaggacaaccagggaaaggctacttcctcctcacggcgcgaccgataaaagaagagcgctcttccctggcctgttcctggaccagattgatcatgagagggtcgtgcttcgagcacctgagtataaggacacaagggtccaggatatccttcgtttgagaaaggagaaataccatgtggtatgctggactggactgggcggactctcaccatgatgtggtggtgattgatgatgcaggtcgccaagtcgcctcgcgccgagtagcccatagtgccgaagggctggccgaactgactgcgtttttgcgtcagatcgccccactggatcagattgcgtgcatcgtcgaaactaatcaaggtctgctcatttcgacgttgctggaagcaggatgtacactctatcccgtgaatcccaagacgattgatcgccgccgcaacgcttctggtgccaagacggacttgattgatgcctacctcttggcaaaaacagggcgcagcgatctgcccgatctgaggaaattgactcctgatagtgcgagtatccaggaactgaaagctctgacgcgcgatcaagagagcttggtacagagtcaaacgcgggtggtcaatcagctgactgcctgcctgaaagcttactatccggtcgcactgcagttgtttagtaaattgcagcaacgctctaccctgctcttcttgcagacctatccaacccttgagggagcgcggcaggcttcggtcgaggaaattacgagagtcctcaaagaagctggacacccgacggcaagcaaagtcgctccaaagatttgctccgtgctgcatcagccacagttgcatgccgatgggattaccacgcgcaccaagtcgcgactgatgctggctctggtagcccaactcttgcctctgattgagcagatcgcggcctatgacaaggagattaccgacctttttttgacgcatgaggacaacgaagtcttcagcagcttgccgggtgcgggcaagcgtcttgcgcctcgaatgctggcagaatggggtgatgatcgtacccgctacactgcaagtacgagtgtgcaagccctggcgggaacggctcctgtggcatttcaaagtggcaattatgccaaggctcacaaacgttacgcctgcttgaaaccaatgcgcaacgtcttgcatcaattcgcctggcaatccaccaggcaagaagcctgggcgttggcctattacaagcgaaaaagaggggaaggcaagagtcacagtatggcggtccgagctctggcgaatgtgtgggtgcggatcatctatgccatgtggcatgagcgcaaaagctatgagacaacgacctttgagcaggcacaacatcggcatgcatccagagccgcctaaaaacttctgaacacgctgactcctttcaaacggagcaaaaaaacagacgtttttttgggtttcaacgaggcatgcccatttgagaccacgcacgcgagaagctgtcaagggaagcgaagcggcttgacagcgacgagcagcgtggtacacttgctcatgcctggttaaaatcatttcttctcctcatttcttctcttgttacaaactggtcatcatcggacttgacaatagagggt

SEQ ID NO: 6511 - DNA, 1556 bp, unidentified
  source 1..1556: mol_type = unassigned DNA; note = element_a18ea9e
  misc_feature 1..2: note = core
  misc_feature 3..253: note = LE
  misc_feature 254..1432: note = CDS
  misc_feature 1433..1556: note = RE
  misc_feature 3..230: note = bridgeRNA
cttgtataatgaacatatagtgaaaattcattatacttttcctttcttaaagatttttactataattatcataagacgctgtggattagtattatcacctatagctagactattttaattgaggatctaaccactgtcttatgcttatttgttaattagttagataacgcatgacgttttatatagagcaaggatacatttagcataggatttgtggaacatagcgaattaatactacaaaggagttgtttctatgatttttattggtattgatgtagcaaaagacaaacatgattgctgcattataaattcagatggtgttattcttaatgattctttacgtatacccaattgtcgtgaaggctttgaatcactatattcttcaatactttcattcctgcccaatagggatatttataacgtaaaaataggacttgaatcaacaggtcattatagcactaatctccaaaactttttgtactctaaaggtttcaaactcacaattcttaaccctttagctacaaatcttttccgtaaggcccaaacccttaggaaaactaaaaccgataaaacggatgcattagttattgctaaaatgctcttttctgatgatacaaaatcctatttaccagtatcataccaaattcaagagctaaagtcactaactagacacagatatcgtttaattggttatcgttccaaattaaaattatcaataactaggctagtagatatcattttccctgaattatctaaatacgtttggtcaattcatcaaacgtcttcttatagcctcctatcggagcttccaggtccaaaggatatagctgactgccatctaactaagcttactaatattttaaataaagcttctagaggcaaatatggtaaagagaaagccatcgctttaaaagaagctgctagcacttctattggaaccaatactagggctttatcttttgaacttaaacaaactattaggttaattcaatcagttcaagctgagattaatgctttagaccttcaaataaaagaaattgttacagagattgattctcctataatgagcattccaggaatctcatataccttagcagctataatattagctgagataggagatatagaaagatttactaagccagctaaacttctagcttttgcaggattagatccatcaacatatcaatctggtaaatacaaagcttctcatacaccaatggttaaacgtggctcttcgtatcttcgttgggctatacttaccgcttcgagaattgtttctataaaaaatcatacttttgctgagtatctagcaaagaaacaggcagaaggtaagcacttttatgttgctatgagccatgttgctaaaaaactaatacatgtaatatttcatcttttgaaaaccaataccacatttgttccgcaaatgtaagctatatttttaaatctaatatttttttaaagcaatttttgattgctctatttgccatgctcttttttattaattaaataattataaaaatcttttaattttatattgacttcatatagttagt

SEQ ID NO: 6512 - DNA, 1364 bp, unidentified
  source 1..1364: mol_type = unassigned DNA; note = element_a19a6bd
  misc_feature 1..3: note = core
  misc_feature 4..74: note = LE
  misc_feature 75..908: note = CDS
  misc_feature 909..1364: note = RE
  misc_feature 1075..1351: note = bridgeRNA
tgatggggtggacgccccccgacggcatcgatgtgccaaagtggagacgttgaaaccacttaaaggaggcgtccatggtaactgttagcacaattggcttgaatttggccaagaacgtatttcaggcgcacggtgcggatgcgggtggcacggtcgttttcagaaagaagttgcggcgagatcaggtgcttgggttttttgccgttcaaccggcttgtatcgttgcgatggaggcgtgcgccagtgcccactactgggcgcgcgaaatcgcaaagctcggtcacactacgaggctgattgcggcccattacgtgaagccgttcattaaacgccagaagattgatgcagctgacgcggaagcgatctgcgaagctgcgcaacgcccgactatgcgctttgtgacaatcaagagcgaggagaagcaagcatccgccgtcgtgttccgaacttgcgatctgctggtgcgccagcgaacccaggtcatcaatgcgctgcgcggtcatctcgccgagtatggcgacgtcgtgcgacacggcccggcacatgtcgccaaactcatcgcacttgtgcaagatacccgatgcgatctgccagaggcggcgcgcgcgattcttacgatcttggtcgagaccctgcaggcgctcgaggccaagctcaaagtacttgatgccgagatcgcaaggcgggccaagcaggacgacgttgccaggagactgatgacgatcccgggtgtaggcgcagtggttgcgacagcggttgaggctctcgcgccgccaatggaggtttttagagcggggcgcgactttgccgcgtggttaggcttgacgccattgcagcgctctaccggtggcaaacagcgcctcggcaagatgtcgaagatggcgagcggacgctacgcaggcttctgattattggagccagcagcgtggtccgccaagcggtcagccgcggcgccccggctggctcctggctcacgcgcatgctcgccaagaagccgcgaatgcttgtgattgtcgcgctcgctaacaagatggcgcgtatcgtctgggcgcttatggtgaggggcggaatttatcggactccgaccgcagccgcgtgagcgggattgcggatctgaggcggtcgaagatgtgagaaggtcgccggagggtatggcgcaacggtcggtgagacgaggtcgggaaaaccagtccaggttatatgtgccttgagcacgggaagttgatttggacccgatccgcttactcccatacgggcccgcggcatgtgaaaagccgcatcagaggtcggacacatgtcagcacccgatcacacgccgcaccatccaataagattcttcttgcatcgaagggggcgtccacaca

SEQ ID NO: 6513 - DNA, 1437 bp, unidentified
  source 1..1437: mol_type = unassigned DNA; note = element_a19e10f
  misc_feature 1..4: note = core
  misc_feature 5..226: note = LE
  misc_feature 227..1423: note = CDS
  misc_feature 1424..1437: note = RE
  misc_feature 10..199: note = bridgeRNA
ttccctaccctgtagcgagcccaggcgtatagcctacgggctgcccggggggccgggtatggttcgcgtatttctgccgctcgacggctcgattggaatcgtccgcccggccccctcggacgcctcgatcgctaatagggatcggcgacgagaagatcgcttcgtagggaagggccggcgggacgtccgagggcaaggaccgtaaaccagagacacgggggtggagatggaggcggcgaagccaacaacgtgggtgggcgtggacgtgggcaaaggcttccactgggcagtggcggtaggcactgagggggagaccctgctctcgcgcagggtcgacaacgacgaggccgacctctccgcgctcgtcgaagaggcacgcgccctggcggacggcgagccgctctgggcggtcgaccagcccggaggcggcgcggcgttgctgctgacgctcctttgggaacgcggccagcgggtactgtacatcccgggcctcgcggtggaccgggcccgcgacggcttcaggggcgaggccaagaccgaccgccgagacgccctcgtcatcgccgagcaggcgcgcatgaggcgcgacctcaagcggctcgagcccaccgacgagctgctcgccgagatgaggctccttctctcgcgtcgccgcgacctggtggccgatcagagcagggcgcttcagcggatacgggacgccctgctcgcgctgttcccgggcctggagcgcgccctgccggacatgcgttacaggggcgccctcgagctgctgtgccgctaccagacacctgccgccatccgccgttccgggcgcaagcggatcgaggcgtatctcaaggggcggggtgccaggaacgccgccggcctggctttggcggcagtgtcggccgccaaagcccagaaggcgaccatgcccgccgaggggatcgccgcttccatcgtcgccgacctcgcccgggaggtgctcgatctcaaggagaagatcgccgccttcgacggagagatcgaggtgcgcttctgcgaccacccgatggccggggtgctcactagcctgccgggcatgggggtgctcctgggcacggagttccttgttacagtgggagaccctcacgatggcttcgccggccccgaccaactcgccgccttcgccggcctggcccccgcggcccgcgactccggcaagaagacgggcaacaaccgcaggatgcgcggcggcaacagggctctcaagcgggtcttctatcaagcggccttcgcgagcctccgtggctgccccgcgtccagggcgttctacgaccgcaaacgggcggaaggcaagaggcacaaccaggcgctggtcgccctggcccgcaggcgggtcaacgtcctgtgggcgatgctgcgagacggtacagagttcgaccccgtcctcgccacttgacaacatcatagaga

SEQ ID NO: 6514 - DNA, 1487 bp, unidentified
  source 1..1487: mol_type = unassigned DNA; note = element_a19fa01
  misc_feature 1..2: note = core
  misc_feature 3..240: note = LE
  misc_feature 241..1467: note = CDS
  misc_feature 1468..1487: note = RE
ctaatgggaggcgtcgggtcagccgggaggcagactcgatgtccggtagccgcggacgagtgagcactcccaccccctggaccggtgagtcctagggtcagaccgtgcccttgtccgtggtcgggagatggacggctgatgggatgtcgtgcccgccggggtcggcgtgagcactggtccattagggcgctgagttctcccgcgggctgctgacggagttgcggtggaacggaggcgggtgtgctgttcgtcggtgacgactgggcggaagatcatcacgatgtggaggtgcaggaccagcacgggcgggtgatgcgcacggcgcggctgcccgagggtgtggacgggatggcccgcttgcatgagctggtcgccgggttcctggctgatgacgccgagcctgctcaggtggtggtgtgcatcgagactgatcgtgggccgtgggtgcgggcgctggtcgcggccggctaccaggtgttcggggtgaacccgaagcaggccgcgcggcatcgggagttggtgtcgctgtcgggggccaagagcgacaaaggcgatgcgcacgccttggctgacatggtccggacccgccgtcatcagctgcgtccagtggccgccgattccgacctcgccgaggcggtcaaggtggtgtcccgggcgcaccagacgctgatctgggaacgcacccgtcacatgctgcggctacgcgcggcgctgcgggagtacttccccgccgcgctggatgcctaccagccgctgacactgaccggggtcgacaccctcgaactgctggccaaggcacccaccccggaccaggcggccacgctcaccctcacccagatcagcacggttctcaagcgggcccgccgccgcccgatcgcagacaaggccgccacgatccagcgggcactgcgcaccgcgcacctgcgccaacccgaggtcgtcaccgccgcctacgcgggcaccatcggcgccaccgtcgcgatcctacagaccctcaacgctcagatccgggccatgcaaggccaggtcgaggcgcattttggccagcacccggacgctgaggtctaccgcagccaacccggcatcggcgtgatcctcggcgcccgggtgctcgcagagttcggcgacgcaccagggcgctacgccgacgccaaagcccgcaagaactacgccggcaccgcacccatcacccgtcagtccggcaagtccaagaccgtccacgcccgcatcgtgcacaacgaccggctcgtcgacgccctgcacacacaagccggcgccgcgatcctgcacgaccccgcggtccgcgcctactacgacgagctgcgcgcccgcgacatcggccacaacgccgcgctacggcagatcggtaaccgcctcgtcggcatcctccacggctgcctcaaaaccgccaccctctacgaccagacaaccgcctggtcgcaccgggcccaacccgtcgctgcttgacatccaagcgcctgggatgt

SEQ ID NO: 6515 - DNA, 1397 bp, unidentified
  source 1..1397: mol_type = unassigned DNA; note = element_a1a88e4
  misc_feature 1..2: note = core
  misc_feature 3..212: note = LE
  misc_feature 213..1193: note = CDS
  misc_feature 1194..1397: note = RE
  misc_feature 41..218: note = bridgeRNA
cttgtattagcgcgaagcattacactggcctcgttccatgaggaatggcccagcccgggcggccgcccaggctgggccgccgatcgatcggatcgatgcccaccgaagccttcaaggactgtcttccgtagcaagatcgcgatcggcgcttcaccgagacccggatggttgaaggaaccgagggttcgcatcacaagggagggtcgacgaagatggcaaagcgtatcacgatctgcgccgggatcgataccggcaaacggaagctcgacgtcgcgctcgatggcagcccggagcagctgcaggtcgacaacacgcctgagggttacaaaatactgtcggattggcttcggcagcatcgcgtcagacgtatcggcatcgaggcgagtggcggctacgagcaggccgttgttgccgagttgcggcgtaaacggtttgtcgtagtgatgtttcagccggcgcaagtgcgcgcctatgcaaaattccacctgcagcgggccaagaacgacaagatcgatgcggctctgattgcggcctgcaccgccgcggtcaagaagatccacgctccgccagatccgcgactgctgccgttcgccgagcgcctgacgatgatcgatcaacttggcgaagatatcgcgcggctgaagacccggctcgagagctgccgcgatccgcgtatccagcagacctggaagcaagatgtcgccggtctgaacaagcgcgagaggactgagttcaaggccctggtggcagcgatccgcgagcatcgcgacctcgccgagcggctcgatctgatctacagcgtcggcggcgtcgggctgtcgacctcggtcgccatcctggtgcgcatgtccgagatcggcaagctcagccgtgagcaagccgccgcgctggccgggcttgcgccctatgacgatgatagcggcaagcatgtcggcgcccgtcacatcgatggcggacgcgaacggctgcgtcgcgcgctttataccgcggccttgcccgcatcctttcgctggaatccgcagctcatcgccctctaccaacggctgatcgccgccggaaaggggcacaagcgcgcgctcatcgcctgtgccaggaagctgctcattttcgtcaacaccgtggttgctcgtggtacgccatggcaggatcagccgcctccactcgccgtaatgacctcgatcccggccaggtgacctcagtttctttgttcgactgaagcaccgtttcttcgtcccgacctgccagcaccacgacgtcgcgcgcagacgccgtcaaggatggtcgtcgctccgatgacgccacacactccgctgttgccagaccacgccttgacggcggcgagcacggcgtcatcctgccaattgtcgggggccgatcacccccgaatctaatggttg

SEQ ID NO: 6516 - DNA, 1438 bp, unidentified
  source 1..1438: mol_type = unassigned DNA; note = element_a1ab989
  misc_feature 1: note = core
  misc_feature 2..130: note = LE
  misc_feature 131..1156: note = CDS
  misc_feature 1157..1438: note = RE
  misc_feature 1194..1435: note = bridgeRNA
atgggatggacgcctcccttctcaccaaggtgaaggtgactgcttaagagtggaccctccgggccgacggcatcaaagtgcccaaggcgtggtagaccagggtctccaccaggcaaccggagggtccgagatgaacgttaccaagaacgtggtcggtgtggacatcgccaagcgggtattccaggtgcacgaggtcgatatgacgacgggtgaaatcgtgagcgtgcaactcaagcgcgagaaattcctgaatcatttcgtcaaccgggcggcatgcctgatcggcatggaggcatgcggtggcgctcagcactgggcgaggcgactgatcgcgctgggccacattgtcaagctgctgccggccaaacgggttcgaccctttgtcggcgggaacaagaacgacgtggctgatgcgagggcgatctggacggcggtccagcagccaggcatcaaagcggtcgccgtgaagacagaagcgcagcaagcagtgctggcgatgcatcggatgcgccagcaactggtgaagtttcgcaccgcccagatcaacgcgctgcgcggcttgttgaccgagtacggcgaggtgatgccgcaaggccggcacgcgatagccaaggcgctgccggaagttctggcatgcctggcggatcggttgccaacgatgttgatcgagaccttgcgcgagcagttcgcacggatcggtcagcttgacgagcaggtagccgaaatcgagaggcggctgcagatctggcagcggcaggacgaagcctgtcggcgcatcgcggagatccctggcgtcggcctgctaaccgctacggcagcagtggcgacgatgggcgacgcgaaagccttcacatccggacgcgagttcgcggcctggctgggtctggtacctcgtcaggtcggaaccggcggtcgggtcaagctgttgggcatcagcaagcgcggagatacctatctgcgtacgttgctgatccacggcgcccgcgtggtgttggcgcgcagcaaagagccatccgagtgggccatgaatctggctaagcggcgcccggtcaacgtggcggtggtagccatggccaacaagacggcacgcacgctgtgggcactcttggctcatcagcgagcgtaccaacccgggtatgtgagtcagccggcgtaagtcggcggcacacgcgacttccacttcaacccaaggagggtctgctgaaaagttgcgcaaggtacgtgaagaagtgatggcaaacaggtcggaccgtgatccgccaagcctgatcagagtttagggttttgagccctttagggaaatgaggcacgggtcagcgaattccatcagggccagcaggtatctgacctgcatcaaaggccggatataaaactgcagtcgtttcctgttccgacatcacctcaaagtggactttgccaaacgggaggcgtccatata

SEQ ID NO: 6517 - DNA, 1442 bp, unidentified
  source 1..1442: mol_type = unassigned DNA; note = element_a1b100f
  misc_feature 1..2: note = core
  misc_feature 3..230: note = LE
  misc_feature 231..1427: note = CDS
  misc_feature 1428..1442: note = RE
  misc_feature 10..223: note = bridgeRNA
gctctaccttctgagttgggttgatcgagccactcgtaaggttgggtcgcccaggggtgctgggtgtggctatcaggcggctgccgtctcgtggctgtccaggcttcgccgcccggcaccccacgacgactcggccgccgattaggaagtgcgaacaagtcgctgtgtagagcaatgccggcgaggtcgtccgtggtacgaacagcacgaacacgcacgtcaggagcgcgatgagccggatatgggcggggatcgacagcggcaagggccaccaccacggcctggccctggacgccgagggcaagaccctgctgtcgcggcgggtggccaacgacgagcccgagctgctgaacctgatcagcgacgttctggccctggccgactgcggccaggtgacctgggcgatcgacatgaccggcggggagccggccctgctgctgagcctgctgatcgcccacggccaggaggtcctgtacatccccggccgtctggtgaaccgggcgtccgacggctaccgcggcgagggcaagaccgacgcccgcgacgcctacgtgatcgccgaccaggcccggatgcgccgtgatctgcagccgatccgccccggcgacgaggccgcgatcgagctgaagctgctgaccgggcgccgggccgacctggtcgaggaccgcacccgcgccgtcaaccgcctgcgcggcaccctgctgggcatgttcccggccctggagcgggctctggacgtgaccaacaccggcccgctgaagctgctgaccgagtaccagaccccggccgcgctccgccgcgtcggcgtcgcgcggctggcgaagtggctggccaaccgcaaggtccgcaatgcaagagccttggccgagacggcagttgaagctgccgggcggcagtacacctccgtccccggggagaagaccatcgccaggctggtccacaccctggccgagggggtgatggccctaaacgagcagatcgccgagatggacaagctcatcgagggccggtttcgcgagcacgaactcgccgagatagtccagagcgttcccggaatcggcgcgatcctcggtgccgagttcctagccggcgtgggcggcaacctggacggattcgcctccccggacgccctggcggccttcgccggcgtcgcccccgcgccacgcgactcgggcaaggtcagcggcaacctccaccggccgaccgtctaccaccgacgactccaacgcgtcttctacacctcggcgttggtgagcatccgctgcgatccgaactcgcgaacgttctacgaccgcaagcgcgccgaggggaagaagcacgtccaggccgtcatggccctggcccgccgccgcgtcaacgtcctgtgggcgctgatccgtgaccgtcggtgctaccacgtcacacccccagtgaccgagacggcttgacaacgacattaggaa

SEQ ID NO: 6518 - DNA, 1366 bp, unidentified
  source 1..1366: mol_type = unassigned DNA; note = element_a1bb22d
  misc_feature 1..2: note = core
  misc_feature 3..214: note = LE
  misc_feature 215..1177: note = CDS
  misc_feature 1178..1366: note = RE
  misc_feature 42..220: note = bridgeRNA
cttgtattagcgcgctgggttagactggccctcgttccgtgaggaatggcccagctcgggtagccgcccgggctgggccgccgatcgatcggatcgatacccatcgaagtccttgagggctgtcgtacgtagcaggatcgcggtcggcacttcatcgggacccgtatggttgaacgaactttcaggttcgcatcacaagggagggtcgaggaagatggccaagcgtaccacaatctgtgccgggatcgataccggcaaacggaagctcgacgtggcgctcgactgcagctcggagcagctgcaggtcgagaacacggcggaaggttacaagacgctgctggagtggcttgggcgccacaaggtcaagcgggttgggatcgaggcgagcggaggctatgagcaagcggtcgtcgcggagctgcggcggaagcggcttggcgtcgtggtgttccagccggcgcaggtacgcgcctacgccaaataccgcggacagcgcgccaagaacgaccgtatcgacgctgcactgatcgctgcctgcaccgcggcggtgaacgagatccatccggcacccgatgcaaggttctcggccttggcggtgcatctgacgctgattgagcagatcggagaggatatcgcacgctgcaagaaccgactcgagagctgtcgcgatatgcgcatccagaagctctggaaggaggacatcacccacctggtcaagcgcaaacgcgccgagttcaaggctctggtggcagcgatccgcgagcatcgtgatctcgccgagcggctcgatctgatctacagcgtcggcggggccgggttacccaccgcggttgccatcctggtgcggatgccggagatcggccagctcagccgcgagcaggccgcagcacttgcaggccttgcgccttacgatgacgacagtggcgaacacaccggcgctcgtcacatcgaaggtggacgcaaacgcctgcgccgcgcgctctacgctgccgcgctggcgggatcctttcgctggaatccgcagctcatggcgctctacaaacggctgattgccgctggcaagggtcacaaacgcgcgctggtcgcctgcgccaggaagctgcttatcttcatcaacgccgtggtgacccgaggcacgccctggcaagccgatgcgccagccgctcaagcggcctgacgcgtttctttgttcgatcggggcgccgtttcttcgtcccgacctgccgccacaacgacgccgcgcgcagcggacgtcaaggatggccgtcgctcaaatgccaccacatcctccgcacacgacaggccacgccttgacgaccgcgagcacggcgtcagtctcaatggcaatcgggcgttctaatggttg

SEQ ID NO: 6519 - DNA, 1382 bp, unidentified
  source 1..1382: mol_type = unassigned DNA; note = element_a1bba7c
  misc_feature 1..2: note = core
  misc_feature 3..298: note = LE
  misc_feature 299..1114: note = CDS
  misc_feature 1115..1382: note = RE
  misc_feature 1088..1369: note = bridgeRNA
tgatggagtggatgcccctcccgccgagccagcggcgtggcagaattgccatcgcagaatgggctgcggacaacaggaggaacgacatgaacaacgtcaccatcattggcatcgatctggcgaagcgcgtcttccacgctcatggcgctcacgccgacggcggcgtcgcattccggaagagaatggctcgctctcaggtcctcccgtttttggcccgacagccaacctgtgtggtcgcttggaggcctgcgcgagcgcacacgaatggggccgggcaattcgggagctgggccacgaggtgaggctcatcccgcccagctacgtcaagccttatgtaaagcgccagaagaacgacaccgccgatgccgaggccatagctgaagcgggatctcgaccaacgatgcggtttgtggcggtgaagacggaagagcagcaagcgaggtcgatggtgttccggacgcgcgacctcttggtgcgccagcgcacgcaactgatcaacgccttgcgcggtcatcttgccgaacacggcgtcatcgcaccgcaaggtccggctcacctgaaaaccttggctgccgcgattgatgccgccgcatctacgatgccccaactggttgtcgacgttggtcgcgtctacttggagcaggtcgaccggttgagctgcgaagttgccgagctggagaaaatcctccgccgcgaagcccagtgcggggaggatacacgccgccttcagaccatgccgggagtcggcccgatcacggccatggcggtggaagcgtttgcgcccccaatgtcgaccttcaagcgcggccgtgactttgccgcttggctcggacttgtgcctatccagcactcgaccggtggcaagcagcggcccggccgaacgtctaaaatgggccagcgggacatccgacggttgctgatcatcggcgcaatgtccgtcatccagtgggcctcccgccgcggtgcgcggccaggatcatggctcgcccgaatgctggatcgcaaaccgctgatgctggttgccatggcgttggccaacaagatggctcgctcggtatgggcgatgttgacaaagaaagaggattaccgggatcttggcagcgcggcagcatgagcatgcactcggcgactgcgaggccatgatgggcggcatgtgaggaggtcgtgaacgtcaagggcaaatgatcggtctgatcgggatcaggaaatgcaccgaggctccaagagcgaaaagctcgtcgagttgatttgcgcctgatccgcgtatctccatgacggccagcggcacctccgacgccgcatcacaggcctgacacatgaccgcacccgatcacatgctcgaagacgcgaaaggcacttgcatgaaacggggcatccacaca

SEQ ID NO: 6520 - DNA, 1574 bp, unidentified
  source 1..1574: mol_type = unassigned DNA; note = element_a1c01cb
  misc_feature 1: note = core
  misc_feature 2..187: note = LE
  misc_feature 188..1444: note = CDS
  misc_feature 1445..1574: note = RE
  misc_feature 6..223: note = bridgeRNA
tcgtattataaggttaaccagtcatttctggttgacctattttttataggttctatgattaaagtagccggggtaggacgatctggcccgtgggacatcgatcccgtccgcaatactgtccaccctctacttgtagaaacatgtttgaggctggttgggactcagatcccgtataacaagcgaagctatgacactacaagtgatgaagaggtgcactggcaaatctattaaatggagcgtgatttatatggatcctgtaattggcttggatgttgcaaaaggtgaaagccaagttcaagcctttttacaaagaaaagaaacgtataagcaaagttttaaattcacacacgatttactaggtcttcaaacatttcataacttttatcaagaagtagaaaaggtctctggtcagcctccggctgtaatctttgaatctaccggacattaccatgaacctgtacttcaatttctcgaggataaagatatagcttattatttggtcaatccagtgatttcctttgaagctaggaaaactaatttacgccaagtaaaaacggataaagctgatgcatttcatttaggtgagctttattataaagaagaccttgaaatctatcaaaggaaaacgaataaagcccttaatttgagacttttaacaagacagcacagtgctttaacagatagttatgttcaaataaaacttcaatttcaagtggcattggatcaagtattcccagaataccattgtgcttttagcgatttgtatggaaaattatcattaaatactttatcgaattatccaactgctatagacattcataaagtcgctgatgagaagttagctgaagagatgagtcaatttggagtcaggcgctctcatgcatggtttttagacaaagcgcagcaattaaaagaagctgcaagacgcaatccctatcaatctcaaattagccatggacaactggtcagtctgcgtatgtatattcagatgctttttcaatatcaggagcatttatcagagttgttaacagaaataaatgcgctttcaaattcttttgaagaatacagattaatccaatccgtacctggtattggagataagattgcggcaacaatcctctccgaaattggcgatatcaaccagttcgagcatcctaaaaaacttgtagcctacgcaggattggatccatctgtttttgaatcaggtaaatttaaagcttctatcaatcggattacgaaaagaggttcatcaagactgcgacaaacgctttacacagctgttcagtgtggtttagccaaaggacgaaataaaaaactaattgctttttatgatcgtaaaagaaatgaaggcaagccacataaagtcgctctaattgcttgcgcaaacaagcttgttcattggatttatgccatgttaaaacgtcaagaagtctttgtagattaagtgtaatttgcttcaaattcctttgttttttttccttttaatcaaaaggtttatttagtatgttcaattttagtgtaacatgttttttagaaactttttagccttaattattgacagctattagctggta

SEQ ID NO: 6521 - DNA, 1513 bp, unidentified
  source 1..1513: mol_type = unassigned DNA; note = element_a1c56c7
  misc_feature 1..2: note = core
  misc_feature 3..238: note = LE
  misc_feature 239..1300: note = CDS
  misc_feature 1301..1513: note = RE
  misc_feature 15..187: note = bridgeRNA
cttgtatgtttcgagatgaggcgtgaggatagggtcacgctttggcggagaggccgttcccacccgaggccagcctcggctgagcctgcttgaaagatcggccgccgtccctctctttatacgccgtggagaatcgaaggccttttgagcctgcatgttcaaggtcggcgcaaagagtaagcccgttcgcgcggacagggacggctgctgaggctcatcctagcgcccagggaggcttatgagcaagcaagtgatttctaccggcaagcccgccatctcagacaacaagttaaccgatcccgggcaggcaagcgtgttttgcggcatcgacgtcagtcgagagactctggccgtggcggttatcgcgctggatcaatccattgagcagcgcgagtttttcaacacgattggcggccacaaggcattgctcgtttggctgggcaagcgcaaggctttggtgcgggtttcgctggaggccactggcatttattcgttggacctggcgctcgcgctcgatgcggcggatggcatcgaggttgcggtgctgaatcccaagatggtcaatcgttttgcgcaaacattgcggcgctcgaagacggaccgggccgacgcgcaggtgctgaccgagtacagtcggcgaatgccgtttcagccctggcagcggcccaggttgatggctctccagttgcgagccgttacgcgccagatcgagtcgctcaccgttcagcacacgcgggagcagaatcgcctgcacgcctccgaggggtctgaagccacgccacgctgcgtgattcatgatctgcggcaatcgatggcgggactgaagcggcgcatcgaaaaactgcgccgtgaagccatcaagctgctccagggcgacgatgaaatgaggctgcgctttggcctgctgatcgccatgccgggcatcggcgaggtcagcgccctgcacttgctgggcgagctggctacactggcgccggagatgaaggtgcgccagtgggtggcgcatagcggactggacccggcgcatcgggaatcgggcagctcggtgcacaaggccgcccgcatcagccgcgctggcaaccggcatctgcgccgcgccctttatatgccggcgttgaccgcggtgcgctggaacccgcacctgaaagccttttacgaggctctgctagcgcggcataagcgcaaactgcaggcactgatggccgtggcgcgcaagctgctgcacgccatctacggcatcttcaaaacccgaacaccttacgacggaaagaagctgtttccgcagttagatatagcataagcgctacaatcgcctcaccagacgaaacggaagctggctctgctgggaagcaaccatgccgagggataacctggtgggctcatcctgacgatgaaccaagggccgggcaggagatcctcgctcggccccgacatacatcggagggatagacccactatgccttgaaaatccaatccatcccctacaggcaatgcttgacgtgcaagagagaat

SEQ ID NO: 6522 - DNA, 1388 bp, unidentified
  source 1..1388: mol_type = unassigned DNA; note = element_a1c93cf
  misc_feature 1..2: note = core
  misc_feature 3..88: note = LE
  misc_feature 89..1117: note = CDS
  misc_feature 1118..1388: note = RE
  misc_feature 1091..1374: note = bridgeRNA
agatgggatggatgccagccttttccgacggcatcgcaatgtgccaagatcgtggatcatcagccacgcaagggaaggacaagcatccatggaaacagttactatcatcggcgtagatttggcaaagaacagttttcagctgcatggagcatcgacggatggatccgtcgtgttccgcaagaagctgacgcgtcctcagttccgccagttcatggcggatcatccaccttgcatcgtagcgatggaggcgtgtggaagtgcccactactgggcacgccagatggtcaggttcggccatcagccgagacttctttcccccggctatgtcaaaccgttcgtcaagcggcacaagaacgacgcagcagatgcggaggcgattgtcgaagcggcacatcggccgacaatgcgctttgtcgagccgaagaccgagggacagcaatctcgcaccatcgttttccgaacccgggaacagctcgtcaaccaacgcaccgaattggtgaacgcgttgcgcgcatacctatatgaacttggctatgttgtgccgcaaggcatcggtcatttacggcgtctggcagagattgttgaggacgagaacacggaactgccggacctggtgcgcgaaatctgcagggaccttttgaaccggatagcgggaatgaccgcccggcttgagacactgaagaaaacgatcgacgcgctgtccagggaggcggaaacatcgcatcgtttgcagaccatgcccggggtggggcccatcgcagctcttgccattgaaacgtttgcgccgccaatggaaactttcaaacgtggccgcgattttgctgcctggcttgggttggtcccattgcagaagtcgaccggaggcaaacaaaggttgggcaagatctcgaagatggggcaacgcgacattcgacgccttctcatccttggtgccatggccgttgtacgatgggcttcccagaaaggtgtgcccgagggctcgtggcttgcccgaatgatagcgaagaaaccgcgtatgctggtggctatcgcgctggccaacaagatggcgcgaggcatctgggccatgatgacgaaatgtgagaactaccggaatccggtgatggtggctgcatgatcactcatgagcgcatctgaagccggtacgtcggagatgtgaggaggccaagaaccgaatgggtaaatgatcgaacagatcgggatcaggaaaaccagtgtttgaatgagagctcctgcgctcgtccggcagatttggacctgatccgcgcatcaccatcccggcccgcggcatgtgaatggccgcaatcgcgaggcctaacacaagttcgcgcccgatcacatgctcaaacggtcagagttttccttgcaaaacggctggcatccacaca

SEQ ID NO: 6523 - DNA, 1627 bp, unidentified
  source 1..1627: mol_type = unassigned DNA; note = element_a1ce1fc
  misc_feature 1..2: note = core
  misc_feature 3..283: note = LE
  misc_feature 284..1504: note = CDS
  misc_feature 1505..1627: note = RE
  misc_feature 13..309: note = bridgeRNA
ctactacaatatatttatggttaatatcccttacagccagtaaggaattatccatcttgttgcttaagctgttagaatgttaagagcaatcggtatagcggatacctccttgggctccgcgcccgtatttaagtctgctaaccagctcttcattcgcagcgttcgttttatgcaggttgatccaccttccaggtgcgttcgtgtcacaccacagtagattgaatatgcaatgagtaaaactggtacaaaccaattgcaatctattacaaggagtgacttttttatgattatgaatgcagtaggtatcgatgtttccaagagaaaaagcacagtagcagttcttcgacctggtggtgaagtccttatgaaaccttttgatatttcccatcaatccgctgactttcaaatactaaccagaaaactgaaagatctggatggcgaaactcgcattgtcatggaatgcaccgggcactactatgaaccagttgctcgtgaattatcacaggcaggtcttttcgtaagtgcagtgaaccctcagatcatcaacaactttcaggggcagaacaatcctctccgtaaagttaagacagataaggccgattcggtaaaaatcgcgcgctatactcttgacagctgggcgaatttgaaacagtatactcttatggatgaattacgttcccaactcaaaacgatgaaccggcagtttgacttctacatgaagcataaaactgccctgaagaacaacctgattgctctcatcgatcaaacctatccaggtgccaacacctattttgacagtcccgccagagatgacggcagccagaaatgggtggattttcttgctacttactggcatgtggactgtgtccgtaaaatgtccctgaatgcctttacagaccattatcagaaatggtgctgccgcaagaagtacaacttcagcaaagcaaaagctgaagaaatctatggaatagccaaggaactgattcctgtacttccaaaggacaattttactaaacgtattatcaggcaggccgttgcacaggtaaatgctgcttcacaaaccgttgaagaacttcgtgcccttatgaatgaaactgcttccaaactgccggaatatccgattgttatggaaatgaaaggcgttggtccatcacttggacctcagcttatggctgaaatcggcgatgtgacacgtttcacccacaaaggagctgttaccgcatttgctggcgttgatccgggcgtaaacgattcgggagattactctcagaaaagtgtacacgcttcaaaacatggctcgccagtgctacgtaagaccctgtttcaagtcatggatatcctgatcaaaacaaagccagatgacgctgtatattggttcatggataaaaaacgcgccgaaggtaaaccttattacgtctacatgaccgccggtgccaataaatttttacgagtgtactatggaaggataaaagaatatctttccacacttccaaagtcgaattaataacatttcataccttttttctcagaccggcatatgatggcggtcttattgtaatacctattttttcaacctgtataaaattttcaatgttcatcaaaataagcttgactttttatttgcagg

SEQ ID NO: 6524 - DNA, 1377 bp, unidentified
  source 1..1377: mol_type = unassigned DNA; note = element_a1d52d2
  misc_feature 1..3: note = core
  misc_feature 4..44: note = LE
  misc_feature 45..1118: note = CDS
  misc_feature 1119..1377: note = RE
  misc_feature 1148..1366: note = bridgeRNA
atgatgctgtagacggcgcctccaccggcacgagagtgccaaagatgggggcgccggtagggctcccacgattcggaggagctaaccatgcaagctgttacgacaatcggcatcgatattgccaagtcggtattccaggtccacggcgtcgatgttgcggccaggtggttatccgccgtcaattgaagcggcgctacgttctggcttttttccagaagctgccgccctgcctggtcggtattgaggcctgcgcctcgtcacaccactggtcgcgcgagctgcaggccctcggccacaccgtgcgattgatgccgccggcctacgtcaagccttacgtcaagcgacagaagaacgatatggccgacgctgaggctatctgtgaagcggtcacaagggccaatatgcggttcgtgccgaccaagacgcccgagcagcaaagcgggctgatgcttcatcgcacgcgccatctgctgatccgccagcagacctccgtgatcaatgcgatccgcgctcaccttgccgagtttgggatcgtcgcgccgctcgggcgtaagggcgtcgaggaactgctgggtgtcatcgccgatccgagcgacaaacgagtgtccgatgtggtgcgggcatgccttgccgcgctgggcagccaattgctcagcctcaaaaagcagatcttggattttgatcgcatgatcatggcatggcaccgctccaatcaaaccagcaagcgcctcaactgcattccgggcgtcggtccgctgctcgccaccgcgctggtcgcaagcgtggccgaccccaaagtcttccgatcgggtcgcaacttctcggcctggatcgggctggtccccagacagtactcgagcggcggccgggacaggcttggcagtatcagcaaacagggagaccgttatctgcgtagcctgttcgtggccggcgccttcgccgtcatccgctatgccaagctccatggcaccaagtaccggccttgggtcgcagccttattggtaaggcggccgaccaaagtcgccgccatcgcgcttgccaacaagcttgcccgaatggcctgggcgttgatggcgaggggcgagcgatacaaatatccagccgggctgagggtctgacgagatcgcgccgggcagccggcacgatgtgaaggttgggagggcgaacagcacgtaatgcagagccggtcgatccggcgatcaggacaacccacttgggccatcgcattcttgaatgcgggtttgtgaccgggacctgatccgcggagagcattatggccagcggtcatgtgaaccgcacgcaaaggccgaacacatggctgcaccgaccaaccctgcaacgtgaagattctacttgccaacatggagccgtccacac

SEQ ID NO: 6525 - DNA, 1149 bp, unidentified
  source 1..1149: mol_type = unassigned DNA; note = element_a1dbf50
  misc_feature 1: note = core
  misc_feature 2..208: note = LE
  misc_feature 209..1135: note = CDS
  misc_feature 1136..1149: note = RE
  misc_feature 15..191: note = bridgeRNA
cttgtgtctggcttttgccctagggtttggggtgagagcggggtgcgggacgccgctgttgcgcagtgctcgaaagcacgggtaggagcaagggcgcccgcaccccatcaccaagccaagcccgaacagttgtgcgagttagccgctcggatctcacaagcgtgggccagctggtgtgctctccagaccagtctaggggagaaaaccgatgtcggcattcgtgggaattgatgtggccaagggcagcctggccgtggcggtaattccgggaaacctcggatttgaggtgagcaacgatgccaagggccatgcccggctggttcggtggctcggcaatcaggcggtaacccggatcctgcttgagtcgaccggcggatatgaaagtgcgctggtcgaggtcttggccagccgctgggctgtggtgcgggttccgccccatcgggcccgggccttcgccacggccatgggcaagtccgccaagaccgacccgatcgatgccttgatgctggcccgcatggccgcggtcaccgagggtccggccgtgaccccgccgaccccggcgcaggcccggctccaggcgctggtgcggcgtcgaggccaggtagtcgctcatcgcgacgatgagcgccggcggctgcatcaggccaatgatgcttttgtccgtcaaagcttgcagcggcagatcaagcatttgcagggcgaaatcgcccggctcgaccgggagatcgaggcctgcgtgcctgattgcggcgacgagcgcgcggccaggctccgggccgtgcccggcgtgggcgccgtcaccgtggccaccctgctggccttcctgccggagctgggccagctggagaaccgtcagatcagcgctctggtcggattggcgccctacaactgcgatagcggaaagcaccaaggcgtacgccgcatccgcggcggacgcggcgcagtgcgccgcgtcctgtacatggctgcttggagcgccgtgcgccaccagccagacttcaaggcccgctacgaagcgctgcgagccaaggggaaatgcgccaaggtcgccttggtcgcctgcatgcgcatcctggcaatccgcctgaacgccatgatcagggatcagaccgactggagggtccacccggcctgagcaagacagttgct

SEQ ID NO: 6526 - DNA, 1652 bp, unidentified
  source 1..1652: mol_type = unassigned DNA; note = element_a1dc6e5
  misc_feature 1: note = core
  misc_feature 2..269: note = LE
  misc_feature 270..1520: note = CDS
  misc_feature 1521..1652: note = RE
  misc_feature 13..289: note = bridgeRNA
cctgttactatatatttgccccttgatttatggcagccagccataggcatgggacatctcgttgcctaaactgttagaatagagaggtaatggtctgaccttcatctccaagggcttttacgtccgcatgaaagtcagtcagccatcctcctattcgcagtgttcgatttgtgcaggtagagccattgcgttcgtgtcatcaaacagatagaaccggcaacaggaaagatggtctttgtccattacaagttcagtacaggagtgattctatgaacgcagtaggtattgatgtttccagcaggaaaagcacagttgcggtgctccgtcctctgggagaagttgtttgcttgccttttgatgtgactcacgatatagcagggcttgcttcactggctgagaagttgaaggctcttgacggtgaaacccgcgtcgtgatggaacacacagggcgttactatgaagcggttgaaaaagcgctgcacgaagcagggttctttgtctgcgctgttaatccgcttctcatcaaggagtacggtgctaattctctgcgccgcgtaaaaactgataaggctgatgccgtaaaaattgctcgttacgcgcttgataattgggctgatttgcgcgatttcacccccatggatgcaattcgctacgatctcaaaaccctcaaccgccagtttcagcttgcctctaagcagcggacggcctctgctaataatctgattgcacttctggagcaatcctttcccggcatccgaaagtgctttgacagcccggtgcgcagtgatggaacgcagaaatgggttgactttgcgcattctttctggcatgtagactgtgtgcgcaagcagcccttccctgccttttgtgagcgttaccgaaaatggtgcaagcgccacgcctatttctttaagttgagcaacgctgaagaagtatacacccttgcgaaacgcgctgttgttctgacaccaaagtcaaaggtcgtgaaagtgcttgtgcaggaagctgcaaatcagctcagcagtatttcgcgctcagtggaagtctatcgtgcggaaatggatcggcttgctgctatgctgcctgaataccccgttgtcatggcaatgtacggcgttggaaagtcctacgggccgcagcttatggcggaaatcggcgatgttcgccgctttgaacggaagcaggctctcgttgcctttgctggtattgaccccatgcctaaccagtccggagacaaaaacgtcagaagcaacaaatcttctaaacgaggctctccctacctccgcaaaaccctttttaatgtcattagaacttacctgcaatgtgctccccaagatgaacctgtgtttcagttccttaaccggaaacaggcggaaggcaagcccttctatgtttatatgcttgcagcagccaacaagtttctacgacgctactatgctaagctgcgagattattttgcctcgctgaaccctctccagccagtagatcccattcccaccatcctgaaagcaaccctctgacatcacttccttttttctctttttaagccggcactttgtggtggcttatttgtgctgcacttctttctccccaccttctgccaaattttcttgcagcaagtcccatttggggcttgactttttctttgcagg

SEQ ID NO: 6527 - DNA, 1333 bp, unidentified
  source 1..1333: mol_type = unassigned DNA; note = element_a1e7554
  misc_feature 1..2: note = core
  misc_feature 3..257: note = LE
  misc_feature 258..1319: note = CDS
  misc_feature 1320..1333: note = RE
  misc_feature 27..230: note = bridgeRNA
ccgacttatgttcgtgagagcggcacgtggtcgggttagctgcccgtaatgtgccgtagcagaccggaagggttgactcctgaggttcctgtcacccccatccagcggggttgactttgcgggggtttgtcgccccttccggtctgcgttcgcggagtgactggagagaggcgtgaccccaagctgctgtgagaggtacttgaagtcggattgtcctccgcggatccccatcccagcagagaagggaaccgtcctccatgatcgtcatcggcatcgatccccacaagtccacccacaccgccaccgcggtcgaccccgtcaccaacaccgatctcggctcgatccgcatcgacgccaccctcgccgactacaagacgctgatcgcctgggccaaggcctggccacagcgccagtgggcagtcgagaatgccgaggggctcggacatcacctggcgcaatggctagtcgtcctcggggagatggtcctcgacgttccggccaccgccaccgcccgggtccggcaactctcccgcggcggccggcgcaagaacgaccgcatcgacgccgccgcggccgcgtgtgtggccgccctgcagggcgacgcccgaccggtcgtccccgaaggcccgaccgacgtcctggccttgctcgacgaacgtcgaacaaacttgtgcaacaatcgcactcgcatcgccaatcagctgcacgcgttgttacgacagttgctggccggcggggcgccaacctccttgactgccgcctcggccacggcactgctgcggggcttccgtgcccgcagcgaggtggaccgaacccgcgtcgggctgtgtcgcgacctgatcgccgacctccggcgcctcgacgaccggctcgcggtgaacgagaaacagatgacccaggctctcgacgagcacggcacccgtctgcgggaggtcgacgggatcggtccggtgaccgccgcccgcttgatcggccgaaccgggcgcgtcagccggttcccgaccgccgcggccttcgcaaactacaacggctcggcaccggtgcagatcgccagcgccgacactgatcgccaccgcctgtcccggtacggagaccggcaactcaacagtgcgctctacacgatcgcgatggtccagatccggatgcctgccagcaccggccgcggctactacgacaagaagatcgcagagggcaagagtggccgcgcagcgaaccgcagcctcaagcagcacctgtccgatcacgtctggcgcatcatgctcgccgacgaaaaacgcagccaccgacaacgcgaggaagaatccgaaagggctgcttgacaaatagagaggca

SEQ ID NO: 6528 - DNA, 1472 bp, unidentified
  source 1..1472: mol_type = unassigned DNA; note = element_a1e7d6b
  misc_feature 1..6: note = core
  misc_feature 7..223: note = LE
  misc_feature 224..1429: note = CDS
  misc_feature 1430..1472: note = RE
  misc_feature 11..224: note = bridgeRNA
ttccttagggttgtaggggtctgggattggatgtcctggatgctcaggacggtggggtgtggctaatgcgttgttgcaacggttgttgcttgaaaggaatggccgccccgccgttttggacggtcctggccactgattgagatctgacgcgtgattgatgacgctgctctaaggacctgttggcggggttgtccttggggactgcaacgtcaggagtagcggtatggccgaaacggaccgggtgtgggtgggtatcgatgttggtaagtccacgcatcatgcgtgcgcgatcgatcacgccggaaacgtggcgtggtcgaagaagatcccaaacgaacaggctgcgatcgaagcgttgatcgctctggccggtgggactgctcaccgggtggtgtgggggattgatttgacctcgccgccggcggcgctgctgatcgccacgctgctgagctccaaagctgcggtggtgtatgtgccgggccgcacggtcaatacgatgagtcacgcgttccgcggtgaaggcaagaccgacgccaaagacgctcgcgtgatcgccgaaaccgctcggctgcgacgagatctgtccccggtcgtacccggcgacgacctggtggccgaattgcggtcgctgactgcataccgctcggatctgatggctgactgggtgcgtggcgtaaaccggctgcgttcgatgctcaccgccatcttccctgccctggaagccgccttcgactactcgacccgcgctccgttgatcctggtgtccaatatgtgcaccccagctgaaatccggttggcgaaaagaactggagtgattaagcaccttcggaaacgccaggcgtggcccaccggaatcgaggtgatcgctgacaaggccgtcgctgccgcagcagggcagacgatcacccttcccggcgaagccggaaccgccgggctcatcaaacagctcgcagcgcggctgctggatctggatcgccagatcaaggacattgacaagcagatcaccaagaaattccgtgagcatcccagcgccgccatcatcgagtcgatgcccggtatgggaccacatctgggtgccgagttcattgtgatcaccggcggcaacatggccgcgttcaccaacgcgggccggctggcatcgttcgccggattggtgcccgtgccccgagattcggggcgtatcactggcaatctgcaccgacccaagcgctacaaccgccggttgcgccgcgtgttctacctcgcggcactgtccagcctcaagatcgaaggcccctcgcgagctttctacgatcgcaagagatccgagaaccgtatccacacccaggccctgcttgccctggcacgccgccatgtcgatgttttgtgggcactgctgcgcgagaaccgaacctggcaaccccagcaaccctcggccgcggccgcctgacccactcactaagcgtccttaccgcttgacacgctcattgaga

SEQ ID NO: 6529 - DNA, 1618 bp, unidentified
  source 1..1618: mol_type = unassigned DNA; note = element_a1f1dd0
  misc_feature 1..3: note = core
  misc_feature 4..541: note = LE
  misc_feature 542..1486: note = CDS
  misc_feature 1487..1618: note = RE
  misc_feature 8..224: note = bridgeRNA
gttcgtattataaggtcagccagatatttctggttgatcattttttatttggttttattatagcagtagccagggtagaacgtaactgctcgtggggcttgaccccgtcaactaaaccgttcgccccctacttgcagaaacatgattgaggctggttgggacttagatctcgtataacaagcgaagctatgacactgcatggaggattaggggtaactggcaaactatgattctaggaggagattaataatgaatccagtcgttggtctggatatttcaaaaggagaaagccaggttcaagcattcttagataaaggcaaaccatatcgtaaaagttttaaggtgactcatactttagaaggtctgaatgaccttgttatatttttagaggatgtaaaaaacgaggctggtatgaagcctacaatcattttagaagccacaggacactatggtgctcctgtcatacatcatttagaagaacgaggatatttattgattattattaatccgttaatttcataataaggcaagaggatcgagtttgagaaaagtaaaaacggatgccattgatgcctatcttctttgtgaattgttctataaagaggaattagagccatataaaaagcgtggcgttcagttattaaatcttcgtaaccttacaagacaacatgaaaatataactggcgtaatgattcaaactaagttgcaatttcaggcagtccttgaacaggtatttcctgaatataaaggggttttcggagatttatattctaatgtttcactattaactctttcagagttcccttcttcagaagatattttgaaagcaagtgaagaatccattacagacaaaatatatgaattatgtaagagtaggtccattagatgggcaaatgaaaaagctttacaacttaaagcagctgcagctcgtaatccttttgaaaaaacagtttaccagagtcatattttaagtcttgatatgtatataaagatccttcttcaatacaaagagcatctatcaaagttagagtcagaaatagatgccctcgctaaagaaattgaagaatatagtattatcaaatctatcccaggcatcggtgaaaagatcgctgcaacgattatttctgagattggtgaaatagatcgatttaataaccctaaaaagcttgtggctttcgctggagttgacccaagtgttttcgaatcaggtaaattttcagcgaccaagaatcgaattacaaaacgaggttcaagtagacttcgtcatgcattgtttatggctgttcgttgtgcaatacgggattgcagaaaaactaaaacagacgatacaatcattcctcgaaacaagaaaatacgtgaattttatgataaaaaacgtgaagaaggaaaaccttttaaagtagcgataatagcttgtgttaataaactcttacattggatttttgccttgttaaaaaacaaaactacgtaccaagatttagcttgataagtaggtacaactaaatcaaacaaaaccttctaaatacaaactttaggacggttatttgtcatgcacttttttagtatagcatgtgcctattaaacttttaacagaaaattattgacaaactattagctg

SEQ ID NO: 6530 - DNA, 1351 bp, unidentified
  source 1..1351: mol_type = unassigned DNA; note = element_a1f741c
  misc_feature 1: note = core
  misc_feature 2..71: note = LE
  misc_feature 72..1103: note = CDS
  misc_feature 1104..1351: note = RE
  misc_feature 1105..1341: note = bridgeRNA
tatgggatggcccgcccctcttccccggcatcggatataatgtcggtctttgaagcggaaggagcgagccgatgtctattgcgatccttggagttgatttgggcaagacctcttgcagcatggtcggcgtggacgggcgaggcaccgtcgtcatgcgccgatcgctgcggcggcagacgttgatcgactatgtggcgaggctcccggcctgcatcgttgcgatggaagcctgttgtggcgcgcatcatcttggtcggctgtttgccgctcgggggcacgaggttcggctcatgtcgccggagtacgttcgcccctacgtcaaggcccagaagaacgacgaccgcgatgccgaagggattgccgaagccgcgtcgcgcccgacgatgcgctttgtggaactcaagagccaggagcagttggacatccagaccctgcaccgggcgcgttcacgcctggtggccgagcggaccggcctgatcaatcagcttcgcgccatcatgctggaacgcggggtgatctttccggtcgggcgacgcaagcttgagcagggcgtcgatggcttgcttgccaagggtgacggcaccctgtcgcctcgcatgagccgattgatcgcgcagatgcgggcggagtggagagagctcgacgcgaagatcgaggcgctgaacggtgagttcgtcgagatggcgcgcagtgacgccgccatgcgccggctgacaacgattccaggcgttggcgtcctcaatgcaacggcgctcgtggccgcggtcggcgatgccagcagcttcggcaaggctcgggatctaggcgcctggcttggtcttgttccccgccaacacacaacgggcggaaagccgcggcttctcggcatctccaagcgcggcaacacctacttacgcacgctgctcatccacggcgccagagccgccttgccgtccctgtcgcaaggcgacacgccgctcggacgttggctgaaggcgatgatcgaacgaggcgtgcaccgcaatgtcgtcgtggtggcgctcgccaacaagctggcccgggtcgcctgggccaccttgcgcaaggaggcgtcgttcgagcgcggttaccccgtcgcagtgtaatcagatcggctgcgtgctcccaggcgcgtagcccacgaggtttgcaggaaggatcgaagatggcctgacagtcgatcggcgtttggaaagcccggtgaatgaagtggcacgcgatgccgtggacattatgaggctccagacgcgcggatgtccatcttggccgtgggctcgcccacgagaccgtatacgttggcgcagactaatcagatcatccgaaaatctcacttgcaaacggggcgggccatacg

SEQ ID NO: 6531 - DNA, 1472 bp, unidentified
  source 1..1472: mol_type = unassigned DNA; note = element_a1fa572
  misc_feature 1..2: note = core
  misc_feature 3..48: note = LE
  misc_feature 49..1206: note = CDS
  misc_feature 1207..1472: note = RE
gaggtggcatgaaagaggccgcgcccgttgagagaacggatcactgagatgcagatgatgatcgagggacagtcacacttccagcctttcggcttatcctattggggtttcgaagatctcaataagggagttggaagcatgactgcctcttatgaataccatatcggggtcgactaccacaaatcctacagccacctggtggttcaggacagcagcggcaagacgctgagatccggccgggtgaagaacgaccgacagtcgctcggcgggtttctcgaacgctatcgggagaactcgcatgcggttgtcgaggcgacgcgcaactggatggtgatgtacgactggctcgacgacatttgtgatgatgtcgttctcgctcatccgctgaaggtcaaggcgatcgccgacgccaagatcaagaccgacaagatcgacgcgacggtgctggcacatctgctcagagccgatctggtacccgaagcctgggcgccaagcgagagatcgcgggaccttcgcgtcgcgctgcgcgagcggatgttttacgtgcgcctgcgcacgatgaccaagaaccgcatcgtcacggtgttcgaccgctatccggagcagacggcgcaattgaagaagcttggcgacctgtttggcaaggccggccgcgtccagctggctcaagtgaacgtgtctgagatcgaccgcatccagattgaccgtggtctcgccttcatcggcgacatcgacatgcggatcaaacagtcggaagcaacgatccgggcgatgaccaaggccaatgccaacgtcaagctgttgaagacgatccccggcatcggcgagttcttcgcccggctgatcgatgcggagatcgacgacatatcgcggttccgccactcgaagaagcttgccgcctatgccgggcttgtgccgtcgacccattcctccggcggcaagaccttccacggcaagatcatcaagcagggcaacaagtggctgcgctgggccttcgtcgaagccgtcgctcctgccatcgccagcgatccacagctgcgcgcccaatacgagcatctgaagatcaaaggaataaacaaggcgcgggtggcgattgcgcgcaagcttttgacgatcaccttccagatcctgcgtgaccagcgcgcctacgagccgcgcggcgaaagcaccatggaaggcgcgtcgacgatatcccggttgtcctgatggcagtctagcgagcccggtagaactgggttgcgcttctcaaggagaatgggaaaccgggagccgaacgccactctgtgaccgaagccagaagcggcatcaggtcacgcattggagaatggttcaagaaccgaaggacggaaacaacctgtccagcggaaggaagagactttagccgatcggcacgaacgccggtcaagaaccaaccgaacccaaggaaaagccgccaaatgcaggtgttttgccccttgagttctttcattgga

SEQ ID NO: 6532 - DNA, 1377 bp, unidentified
  source 1..1377: mol_type = unassigned DNA; note = element_a1ff7ce
  misc_feature 1: note = core
  misc_feature 2..73: note = LE
  misc_feature 74..988: note = CDS
  misc_feature 989..1377: note = RE
  misc_feature 1131..1367: note = bridgeRNA
tatggaatggcccgcccctttcccccttgtagagtaatctgccgggggccaacggaagaaagggaggcaggcaatgaagacagagatcgcggttttagggattgatctgggcaagaacagctgcagccttgcgggactggatgggactggtgcggtgatcaaacggcggcggatgcgaccggagaccgtggtgacgttcacgaaggagttgccgccttgcgtgatagcgatggaggcgtgctgcggcgctcatcatcttgcccgtcttctcgcggcgcagggacacgacgtccggctgatgtcgccggaatacgtgcgcccttatgtgaaggcgcagaagaacgatgatcgcgatgccgaggcgattgcggaggcggcaacacggccgacgatgcgttttgtgtccatgaaaacggaggagcagcttgacatgcagaccctgcatcgggcgcgtgaccggctggtcggtgaacggacggcgctgatcaaccagctgcgagcgatcctgttggagcgcggggttacggtgccgcaggggcggagcaagctcgagcggtccctgatcgagatgttcgatggcgatgaagccgagccaccggcgacattgacgccgcggctgcgggcgctgattgccgacatgcgggccgaatggcgtgagctggatcggcggatcaccgcttttgaggacgaatttgtcgctcgcacgcgcgaggacgaagcggcacgccggctgatcagcattcccgggatcggcgtgatgaacgcgaccgcgctgattgccgcgatcggcaacggtgagacgttcagccggggccgcgatcttgctgcctggcttggtctggtgccgcggcagatcacgacaggaggccgaccgcggctggtcgggatcagcaagcgcggcaacaagtatctgcgcaagctgctgatccatggtgctcgcgccgctcttcccagtctgttgaccagctcaacgccgctcggcggctagctgcgcgggctcaccgctcgggtccacaagaatgcagtggttgtcgcactggccaacaagctggcgcggatcgcttgggcggtactgagaaacggcggcacgtttgatgccaagtccgcatcagggatggcatgattagccggctaatgatctcgctaacttgatcgccggtcatgatgtttgcgggtggtggaatgaagatggcctgacagtcgaccggcgcttcgggaacctgcttcaaaaaatggcgcgcttgatgccgtgaattttatgaggaccggatcgcgcggatctccatcttggccgggagcttgctccgaggccggatacgttgacgcagactggtcagttcatcgaaaataccacttgcagacggggcgggccatacg

SEQ ID NO: 6533 - DNA, 1441 bp, unidentified
  source 1..1441: mol_type = unassigned DNA; note = element_a1ff9c5
  misc_feature 1..2: note = core
  misc_feature 3..150: note = LE
  misc_feature 151..945: note = CDS
  misc_feature 946..1441: note = RE
  misc_feature 1207..1440: note = bridgeRNA
aaatgtaatgaacgcatcccaccactttaacacggtgcaaaacgatgaatgaaagcaagggactggaaggtgtggagccttgcagatttccggcatcattgtgcccaatacgggatgcataaagctccctcagactggagactccacagcatgaaatatacaccggttggcgttgatatcgcaaagcatctgattcaggttcacttcatcaatgagcacacgggtgaagtggtggataagcagctacgcagcaaggattttctgacgttcttcagtaaccgggaaccctgcctgattggcatggaagcctgtggaagctctcagcactgggcgcgtgagctgaagaagctggggcacaaagtccggttattgcaggcccgattcgttaaagcattcgtcatgggcaacaagaacgatgtgatggatgcccgcgctatctggatggcggtacagcaacccggtaaggcaatagccgtaaaaacggaagaacagcagtcggtactggttctgcatcgttcgcgcagacaactggtaaagttcagaaccgcgcagattaatgccctgcatggcacgctccttgagttcggcgaaaccatccacaaaggccgggctgcgctggacagagaactaccggcagctctggagcggatgaaggcgaagctgccgccgtatctcatcaccgtgctggaagaccagtacaacaggttaagtgaactggattcgctgatagatggtctggaaaaacagcttaacagcgtggtgcggcagagtgaaacctgtaaacggctgatggaaatccccggcgtggggccactcatcgccacggcagcggtcgccactatgggagaagcctcagcgtttaaatcaggacggagtttgcagcttatgtcggtctggtgccaaaacaaaccggttcaggaggcaaagttcgactgctggggataagcaagcgtggtgatacctacctccggacattatttatccatggggcaagggcggcagcattactgaccaaagagcccggtccatggataacagaactgaagaaacgacgtccgaccagcgtagccatcgtggcgatggcaaacaagctggcacggacagtatgggcgatagccgcccatgaccgtaaatacgacaagaatcatgtcagtatcagaccgtattaatcgctgataccgataaacattaactcttaaaaaagggtgaatgctgaaaggttgctgtggcggccagcgtgatgacaaaaacaggtaagaccgggactcactaaacctgaatgctgtcttgagcttaaagctcgctaaggaaataaggcgtgagtcagcgaattacataggggctcgcagctgtcaggctgcaaaaagccggatataaagctgcaacctacctgtcaatgtcagaatactggaagccgttgcaaacgggatgcgttcatata

SEQ ID NO: 6534 - DNA, 1454 bp, unidentified
  source 1..1454: mol_type = unassigned DNA; note = element_a207568
  misc_feature 1..2: note = core
  misc_feature 3..202: note = LE
  misc_feature 203..1426: note = CDS
  misc_feature 1427..1454: note = RE
  misc_feature 16..174: note = bridgeRNA
cttatatgatggaccggggttcatggagctcgttggttgaggaccgaccctgcccgatccctcggaggatcagggagagactgtcccgtccaacgagagaacggcctgaaggttcaataggaagtggtccccgtgaggaccgatataaggcgaaccggctgttcacgctccaggctccacactgcataaacgaggaggacccgtgcgctactacatcggggtggactgggcagatgaggaggatgcggtgtgggttgcgaacgacgccggtgacaagatgctgagtcgcaggttcgcccatacggtcgcggcccggagcgaatgggcgcggtggctgcgggagcgccaagccgagggcatcgagctctgggccgccatcgagcggccccatgggcggattgtcgacttcctgctggatcacggcgtcgtggtctaccccatcaatcccaagagcctggatcgggcccgtgatcgcttccgcgtcggcgggagcaggagtgatcccttcgatgcgaaggtcctggccctctttctgcgcagcgatcatctccagctccgtcctctgcgccccaactccgaggccgcgcaggaactccaggggctgacccgcgactaccgccgccaggtccacctgcagacccggctgctcaatcagctcaccgcgaccttgaaggagtactacccgcgcgccctcgagctgggggaggacctcactgccggctgggcgcaggccttcctggcgcgctatccgacccccgccgccgccgccgcgctgaccgagccggactggcaggccttcgcccacgcccaccggctcagccccacccgcaccgcggccctgtgggagaccctgcagcagccccaactgccgttgcccgctcatgtcgtgcgcctcaaggcccggctgctccaggccctgctgcgcgaactggcccccaccctcgccaccatcgccgagtaccggcaagcgatcgacgattttttcgccactatgccgacggctgagatcgcccgctcgctgcccgtcggcaagtccggcacgaccgtccccaccgtctgggccgaactcggggaccacgccgaccgctgggcctccttccgtcacctgcaggcctacgccggcagcgtcccggagaccgactgcagcggcaaacaccacgtggtcaagttccgcttcgcctgtaaccccgccctgcgcgacgccatgcaccaactggccttcctctcgctgcctcatagcctctgggcgcgcgcctattacgatcgctatcgcgagcggggccacacgcaccatcaggccctgcgcgctctcggcgctaagtggctcaaaatcattttcgtcatgtggacccgccacgtgccctacagcgaaacgcatcacctggccaccatggcacgccaacacctacaccagacggcggcctaaacttttcacttgacaccccataggaagt

SEQ ID NO: 6535 - DNA, 1379 bp, unidentified
  source 1..1379: mol_type = unassigned DNA; note = element_a211d83
  misc_feature 1: note = core
  misc_feature 2..89: note = LE
  misc_feature 90..1121: note = CDS
  misc_feature 1122..1379: note = RE
  misc_feature 1153..1374: note = bridgeRNA
caatgggatggactcctcctcactctaccggcatcgatgtgccaaactgagattgtgacatttcagttaacgagaaagaggagtccacgatgaagattaatcgagttggtgttgatttggcaaagaatgtttttcagttacatggtgctgaccgcaaaggcaaacccatctggaagcgtcggttatcccgagcaaaatggttagaagttttatacgacaccgttaaacccgggaccgagatcggtatggaagcctgtgccggtgcccatcactgggccaggcaattaatgcagcggggttacccggtgaaaatcatcccgccgcagttcgtgaagccctttatcaagagcaacaagaacgatgccaatgatgcccaggcgatttgcgaggcgatgggcagacccaatatgcacccggtcaaggtgaagacggttgaacaacaggatctccaggcgattcatcgtatccgggatgaaatcaagagccatcgtatcgccaaggcaaaccagatccgagggttggtcaccgaatacgggttagtggcaccgcaacagttacatgcgctgcgcagcgctattcccgattggttggaagatgctgaaaatggtctcagcttcttgttcaggcaacttctacagggattatggggagacttgcatatgctggatcaacgtatggctgagttggataaacagattgccgtgattgctcaagaagatcccactgccaggcgcttacagcagttgcgcggtgtgggtccattgatcgcgacggccctggtcgccacggtcggagacggcaagcagtaccgtaaaggcagagacatggcggcggctctgggcttaaccccgaggcaacacagttcgggcgggaaagatcggttgctaggaatcagcaaacgcggcgatgcctatctgcgttgcttactggtacacggtgcccgttctgcggtgcgcacggccaaagataaagatgaccgtttaagtcgatggatcatcgatctgcaatccaggcggcacgccaacgtagttgctgtggcactggccaacaagatgacgagaatggcatgggcgatgatgaccaaaggaactgattacaacccagactttaccgcctgctaaatgtggagtgatgaggtgagtatattcaattgacgattgcgaagtaatttgtgtaatggcaaacaggtcgaaccggcatcggtaaaacccgggagtgtctgagtgtgtaacaacacgtcaaagcaatagggaatcggtgcgcgaaaaacccattatggcccggcatcaacgtatgccacctttagaggccggatatacgtttgcagtcgagccaactgccgttaacagattacttgcaaacgaggaggagtccatata

SEQ ID NO: 6536 - DNA, 1323 bp, unidentified
  source 1..1323: mol_type = unassigned DNA; note = element_a2170ae
  misc_feature 1: note = core
  misc_feature 2..65: note = LE
  misc_feature 66..1070: note = CDS
  misc_feature 1071..1323: note = RE
  misc_feature 1089..1322: note = bridgeRNA
aatgagatggtcactccctcttcctgagcactatactaagaacaggctaaattcggagaatcatcatggaaaacattgcacttattggtatcgatctgggtaaaaattctttccacatccattgtcaagatcaccacggaaaagtggtttatcgtaaaaaatttactaggcaaaaactgtacgaatttcttgcaacatgtccggcgacaaccatcgtaatggaagcctgtggtggagccaatttcatggtgcgtaagctgacagaattgggacatacaccaaaactaatctcgcctcagtttgttcgcccgttcgtcaaaacgaataaaaatgactttgttgatgcagaagcgatttgcgaagcagcatcacgcccctcaatgcggtttgttcagcctagaacggtgtcccagcagaccatgcatgcattacatcgggtaagagaatcgctggtcagagacaaggttaaaacgacaaatcaacttcaggcatttttactggaatttggtatcagcgccccaaaaggtccgactctaataaagcgcttcgcagaaatcctggaagcaaacgagctcccaccatacatggtctgtttgctgcagaaattacgtgagcattatgattatcttgtaaaacaaattaaagagttggaaactcagctgcaggcattcctggtcgaagacagcgctggtcagcgattactctctattccctgcatcggccctttgaccgcgagcctcctatcgacccaactgggggatggaaaacagtatggtaacagccgggattttgcagcgtcaaccggtctggtgcctcggcagcacagtacgggaggacgaacgactttactgggtattagtaaacggggtaataaaaagctgcgggcactgctagtacagtgtgccagggtgtatctgcgaacgctggaacaccagtcgggtaaactggcagactgggtcagaaaattattactgcggaaaaataattttgtggtgacctgcgctctggcaaacaaactggccagaatcgcatgggcactgacgacccggcagcaatccttcgaggtatagctattatttttattttaaagcaataagttatctggttttgcgaatactgattattgatgataataacggctaaccggcctgacgaaaaacctgtggttaggaatggcaattaaaatgccgcccaagtttataaggttcaccaggcgcggaactcatcagggtgcgggcatatagcccattcagacgccggatagattcatgcaagccaataatatcttcaaaattagtgttgcaaaaacgggagtgcccatag

SEQ ID NO: 6537 - DNA, 1441 bp, unidentified
  source 1..1441: mol_type = unassigned DNA; note = element_a21c135
  misc_feature 1..2: note = core
  misc_feature 3..228: note = LE
  misc_feature 229..1425: note = CDS
  misc_feature 1426..1441: note = RE
  misc_feature 14..224: note = bridgeRNA
gctctaccttcgttctcgggcttgcctcagccattcgtagggttgtggcacccaggggaaccgggtgtggcttacatgacgctgccgcttgtggctccatgtgcttggccgcccggttccccacgacgactcggccgccgattgggaagtgcgagcaagtcgctgtgtagagccatgccggcgaggtcgtccgtggtatgccagacgagtacgacctgatggagaacgatgagccggatctgggcgggcaccgactgcggcaaggcccaccaccacacgctggtcgtcgatgccgagggcaagaagctgctctcgcggcgcgtgtccaacgacgagcccgagttgctgcaactggtcgccgatgtcctggacctcgcgggtggacgcgaggtggtctgggcgatggacatgaccggcggcgagccgagcctcctgatcaacctactgaccgcccacggccagagcctcgtctacatccccggcttcgcggtcaaccgagcgacggacagttatcgcgggcagggcaagaccgatgcccgcgacgctcatgtgatcgcggaccaggcgaggatgcgcaccgacctccagccgatccgcctggacgaagaggtcgtcatcgaactgcggttgctgaccgaataccggtctgacctggtcgccgaccgcacccgcacgatcaaccggctccgagccctgctgaacagcatgttccccgccttggagcgagccctcgacctcggcaatgtcggccctctcaagctgctgaccggctatcagacccccgccgcgatccgtcgcaccggcgtgaagcggctgacggcgtggctgcgcaatcggaaggtctggggagcccaggcactggctgagacggccgtcgaggccgctgagcgacagcacaccgctgttgccggagagaagaccatcgcgaagatggttcataccctggtcgaggaggtgacagccctcaacgtgaagatcgccgagaccgagaagctcatcgagagccggttccgcgaacacgagctcgcccaggtgattacctcgctgccaggcatcgggccaatcttcggagcagagttcctcgccgccgtaggcgggagcctggacgcctttccgaccgcggatcgcctcgccgccttcgccggcgtcagccccgccccgcgggactccggcaaagtcagcggcaacctccaccggcccacgcgctaccaccgacgcctgcaacgcgtcttctaccagtcagcgttgcagagcatccagcgtgacccgaactcacgcgccttctacgacaggaagcgcgcggagggcaaacgacacacccaggcggtcatcgccctggcccgccgccgcgtcaacgtcctctgggcgctgatccgtgaccggcggtgctaccaagtcacaccacccgtcaccacagcagcttgacgatccgcattgggaa

SEQ ID NO: 6538 - DNA, 1467 bp, unidentified
  source 1..1467: mol_type = unassigned DNA; note = element_a21d7f2
  misc_feature 1..2: note = core
  misc_feature 3..228: note = LE
  misc_feature 229..1446: note = CDS
  misc_feature 1447..1467: note = RE
  misc_feature 7..226: note = bridgeRNA
ctaatggggatcgaccacctcggccactgactgggtgaggctggtcccgagccgctggcaggtcagcactggcggccgcagggtcttgagctctacgactagatcgtgcgcctgccagttggtgaggttggcctggatggctggtgggatgacgtgtcgcgaacactgaaccattagcgggctgctggtcgcctcgggctcgatccggtcgtgacgaggaggttgctggtggggaaagtgttcgtcggtcatgactgggccgaggcccaccatgatgtccatgtcgaggatgccgatggccggagattggcgaaggcccggctgccagaaggggtggaaggcgtcgctcggttccacgagctggtcgccccattcgtcgatgaacccaccgaggtcgtgatcgctaccgagaccgatcgggggctgttcatcggagccatggtggcggcgggctacacagtgttggcggtgaatccgatgtcgacctcccgctaccgggaacgacactcgacttcgggagcgaaatcggatcctggtgatgcccggatcctggccgaactggcgcggaccgatggccacaaccaccggccgatcgccggcgacagcgatgtggccgaggtggtgaaagtgctggccagagcccaccagggtttggtctggacccgccagcggcagctgaaccagctccgttccacgctgcgcgagttctatcccgcggttctcgacgcgttcgatgaactcggctcagccgacgccctggccatcgtggccatcgcccccacccccacgctcgggcggcgtctctcccagtcgaagatcgcggcggtgctgcgccgggccggtcgtcagcgccgggtcgaggaacgggcgatcgagatccagggggcgctgcgcggcgctcaactcgaagcccccacgattgtcgccgatgccatgggcacctcggccagagccctggtggccgtgatcgtcgaactcacgacccagatccgtcagctcgagaccgaactggccgaccgttttgaacagcacccggacgccaagatcatccgctccctgccaggactcgggatgatcctcggcgcccgggtgctcggcgagttcggggacgacccgaaccgctatgccgacgccaagtctcgcaagaactacgccggcacgtcacccatcaccaaagcgtccggcacccgacgggtcgtcctcgcccgctacgcccgcaaccgccgactggccgacgcctgctacctctgggccttcgccgccctcaccgccagccccggcgccagagccttctacgaccaacaccgagccgcaggagacagccaccaccgagccctgcgagtcctcgccaaccgcctcgtcggcatcctccacggctgcctccgccaccacaccccctacgacgaacacaccgcctggggacaccgacagcaagccgccgcttgacgagttagaggggtgggatgt

SEQ ID NO: 6539 - DNA, 1208 bp, unidentified
  source 1..1208: mol_type = unassigned DNA; note = element_a21f31e
  misc_feature 1..2: note = core
  misc_feature 3..193: note = LE
  misc_feature 194..1186: note = CDS
  misc_feature 1187..1208: note = RE
  misc_feature 15..199: note = bridgeRNA
cttgtatctctctcgatatcctgtttagctatcagggtatcagggccggtgatgaacctgtgtcgctcctgaggcttcgagcctgtgacgtagatcaggtctcgccggtcaagtttctcaataaactggatggtatccaagccctttctgaattgaaatgaggctgtatgaacaaggtaagtggagagagcgaatgacaatgatcggaattgatgtgagcaaggacaagctggactgcgcctggatcaacgacagcgccgcccgcaaggtgaaaaacaaggtcttttccaacaaccccagcggtcatcacctgttgatcgcctgggcgatcaagcacagccaggcgcccgtcgaggtcctgcattttgttatggaggccacgggtgtctaccacgaggccgtcgcctatgcgctgtatcaggccggggcgcaggtatcggtcgtcaatccggcgcaaattcacgcccatgccaagagtctgggggtgcgctccaaaacggataaacgggacagtgtggtgatcgcccgctttggctattcccaccagccgcgtctctggcaaccggagccggaggcgatgcgcaccttaaaggccttgatttcaaggctggaagccctggacaaggatatccagcgggaaaggaaccgtctggagaaggcgcagatcgcgcagcccacaggcgaggtcgttgattcgattcggacggtcctgcaacagctgcaaaccgagagacagcggattgaggacctggtcaatcggcatattgaccagcatccgaccctgaagcaggaccgccagttgctggaaacgatccccggtatcgggccgatcctgtcacgcctgatgatcacgctgctgcgcagccgcgcgtttgaatcggcgccgcagtgcgcggcgtttgtcggcctggtgccacgtcaccatgaatccggcaccagcgtgcgggctcgaccacggctgtccaaaacaggcaaccccatgatccgggccaagctgtacatggccgccatcgtctcgattcagcataaccccgatattaagcagcactatgagcgcttgctgaaaaagggcaaggcccggatgagcgccctgggtgcggccatgcggaaactcgtgcatatttgctttggtgtcatcaaacaccaacaaccctatcgtcctcaagcggacttaaatcccgcttgagatcggtggagggagatggtat

SEQ ID NO: 6540 - DNA, 1355 bp, unidentified
  source 1..1355: mol_type = unassigned DNA; note = element_a230c8a
  misc_feature 1: note = core
  misc_feature 2..77: note = LE
  misc_feature 78..1103: note = CDS
  misc_feature 1104..1355: note = RE
  misc_feature 1106..1345: note = bridgeRNA
tatggatggcccgccccttgtatgaaccgttgttgttatcgaaccgacagctgatcggaagaggaaggagtgaagccatggatatttcggttctcgggatcgacctaggcaagaacagctgcagcgtagttggactggattcaaccggcaaggtagtcattcgccggcgaatgcggcgcgagacggtgattgcctatgccgccaaaatgccgacctgcatcatcgcgatggaggcgtgctgcggggctcaccacatgggtcgggcactgacagcgcaagggcatacgatccgactgatgtcgcccgagtatgtgcggccctatgtcaaagcccagaagaatgatgatcgtgacgccgaggcgatcgccgaagcggcgacacggccgacgatgcgatttgtcgagctgaagagcgagcagcaactcgacatgcaaacgttgcaccgcgttcgggaccaattggtcggcgagcgaacatcgctgatgaaccagatcaggagcttgctgctcgaacgcggtcacatcatcccgcaggggcgcgcaacactcgcagtcaggcttggcgaaatgattgaggctgaagaaccggttcttggtgctcggatccaccggctcgtcgccgacatgcgcgagcgctggagatggcttgatgaacaaattgcggccctcgatgcagagttcatggaggaagcacgagccgacgagcgcacctgccggttgatgaccatccccggcatcggtgcgctgaatgcgactgcattggtcgctgcagtcggagatgcccgcacatttggacgtggtcgtgatcttgccgcctggctcgggctcgtaccacgccaggcgactaccggcgggaagccccgcttgctcggcatcaccaagcgcggtagccgatacctgcgcaagatcctgatccagggggcacgctcgtcgttgcccacgatgagcaggagcgacacgcgcctgggagcctggctacgcggtctgctggcgcgggcgcaccccaataccgttgtcgtcgcgcttgctgcaaagatggcgcggatcgtctgggcgctgctgcggcatgaacgcacttatcagccggcgatgctgtcggcgtaatcaagaccagacgaggcactgtgtctcgactgcatgatgtctgcgggtggtgagaagaagatggcctgacagttgaccggtgtcctggaaccctatggcgtaaaatggcactcgatgccggcccctttatgaggactaggacgcgcggatctccatcttggccaacggggtaataccgaaaggccggatacgtttttgcagactgatcagatcatccgacacaaatcgcttgccgacggggcgggccatacg

SEQ ID NO: 6541 - DNA, 1462 bp, unidentified
  source 1..1462: mol_type = unassigned DNA; note = element_a232e52
  misc_feature 1: note = core
  misc_feature 2..109: note = LE
  misc_feature 110..1129: note = CDS
  misc_feature 1130..1462: note = RE
  misc_feature 1150..1379: note = bridgeRNA
gaatggaagggacttccccgtcccgagctagccgcttagcggcgagcggcaacgaagtgccacgatgggagtgtcgaagtctcatcaactcactcggaaggggaagtccatggccattttgtacgtcgggatcgatctcgccaagaacgtttttgcgatccacggagtcgacgagcatggcaaggccgtgttggtgcgccccagcgtgttgcgtgctcggctgcatcagctggtagcggcgctgccgccgtgcaccatcggcatggaggcctgctccggggcgcaccactgggcccggctctttgcagtgcacggccacacggtgcggctgatggcgcccaagttcgtggcgccttatcggatgagcggcaagcgcggcaagaacgacgcggccgacgcccaggcgatctgcgaggcggtgcagcgaccgaacatgcgcttcgtgccggtcaagagccaagacgagcaggcgcggctgtgcatccaccgcgtgcgccaaggcgcggtcgaacagcgcacggccaccatcaaccgcatccgcggcctactatcggagttcggcatcgtgttgccgcagagggcggccaccgtgcgccgcgaggcggcgacccacctggaggagctgcccggctgggccaacaccgccgtcggtgactcactgagcgagctgcatcggctcgacgagcgcatcgccgaatacgaccgccacgtcgtgcacatggcgcgcgaggacgagcgtagccgggccttgatgcagttgcagggcatcggcagcacgaccgcgagcgctctggtctcgacgatcggcaacgcacgcgacttcaagaacggccgccaactcgcggcttggctcggcctggtgcccgggcagtacagctcgggcggcaagacccgtctgggcggcatcaccaaggcgggcgacggttatctgcgaacgctgctggtgctgggcgccaaggccgtactggcggccgcgaggaacaaggacgaccggctcagccgctgggccatggcgatcgaggtcagacgcggctactggaaggcagtcgtcgccatcgcagccaagaacgcccgcatggcctgggcggtgctggccaagggcgagagcttcaagccgctcgaggcctgacacgaaccagccttccgattacccgccaccgcgtgacgaccaagcgttgatgagtcaagggttggacccgcgccgggagagctcgatcatgtcgaggagacaccactcgggtggtctcgtctaacgaatggagccccggcgcgcgtcttccatcagggtccgcagcaacgaatgctgcacgatgaccggttgtagtcccgcagtccgcactcttgtcgctctgagcgcgtcgcatcggcacggtggccgaccgctgaagagaagacccttgatgcgtcgccgcgcgacacatcaacgcctgctatcgcttgacctcgaagggaagcccttgta

SEQ ID NO: 6542 - DNA, 1239 bp, unidentified
  source 1..1239: mol_type = unassigned DNA; note = element_a23417b
  misc_feature 1..2: note = core
  misc_feature 3..225: note = LE
  misc_feature 226..1215: note = CDS
  misc_feature 1216..1239: note = RE
  misc_feature 52..214: note = bridgeRNA
atggtaagtttgcactagaataattaatgaagtaaattagttgataatattaactagaaagaaaaacagcaggagtaaggcagacgctgcgttgatacttaagatatcgccccggattttctccccctgctgttgttttcttccaaatccggatagaacattgttggtaagaacttttaccatgatggatcagaagaaaacgttctttccaaaaaaaaagaattgatgtcaaatttattgaaaaaagtaattggtgtggacgttgggtccaaatttttaacgcttagtttcctggacgatgaaaaaggagaacaggttttgaatttgccaaataatgagcgcagcattttgtcgtttctgtctaaaatctctccaagcgattattgttttgtgattgaggcaaccggaaactacagcagccgcctgcttcacttctctataggaaaaggatttgaaagcaatctgatcaactgtatgtctgtgaaacattttgcaaaaatgaaaaacatcattacgaaaaccgatgcggaggatgccaaactgatcaggaattacggagagatgttccgtccggaattttatgttccaaaaactcaggacattgaatatctggatcaggaaataaagcttcttaatgatctggaagaagaaaagcgtcgttacgcggtaaagctaaaagccttaagattccatcccgttgttaatccttcaacagagaagcattatgaaaaacgtttaaagcaactggagaaagaaatcaaggaagttgaggccagattgccgcagttgcaggatgaggaatttacagaaactaaaaacctgctgcagtctgtatcgggaattggcgaaaagacgtcactccaattaatgactgccacctcaggatttaaaaactttcattcttcaaaatctctggtaaagtattttggtctggctccaagaatttaccaatcgggaaagaaatcttattcaccaggaaaatgccgaacttcaaaaacttatatccgaagtattctctatgtctgttcctggacggcgataaagcacaaccaaaaatgtaaagagctctacttacggctgcttgagaagggcaaggcaaaaaaactggctctgattgccgtatgcaacaaacttctacgaatatgcttcagcgtagtaaaaaacaaaacaccttttcaacaggattttcaaaataaattaaaaatttcaacctgaaaaatttgcagattaacatagaac

SEQ ID NO: 6543 - DNA, 1211 bp, unidentified
  source 1..1211: mol_type = unassigned DNA; note = element_a235e54
  misc_feature 1..2: note = core
  misc_feature 3..212: note = LE
  misc_feature 213..1196: note = CDS
  misc_feature 1197..1211: note = RE
  misc_feature 12..188: note = bridgeRNA
cttgtatcttcgtcttcgtgatggttagctaccgtcacatgaggtgaagtgagcatgtttggagcctgaaggcttggaccttgctgtggagataatgcccttcgcctcgccctcaccagcacagacactgaacggtagccaagggcgtggaccctgtatgtacaaggcaagtgggtgagttggtattgattcctcgattaaggatcaaattgatgttctacctcggtattgatgttgccaaagccaagctggattgctgcctgctggacatgacaaacggcaagcgtagtacgaaggttgttgccaatagccgcgccggcctaaccgatctgttgggctggttgggcaagagacacaccgagccgagccacgtacatgtcgcgctcgaaggtaccggcgtctatcacgagatggccgcgtgtggcctgcacgatgccgggctctccgtgtctgtcgttaatcctgcgcaggtgcgtgcttttgcgacgggaatgggcgtgcgcacgaagaacgacattgtagacagccacgtgttagcgcgctttgcgatgcacgcacggccaatgcgctggagtcctccagcgcccgaggctcgcatacttcaagcactgatggcgcgccatgaagcgcttgcacaagatcttcagcgtgagcgcaaccggcatgagaaagcggaaatcacggctccaacggcgctagtcctgcattcgattctcgagacgatcgagtttttggagcgccatttagccagcctgcaacgcgagatcgatgatcacattgctgcccatccgggcctcaaagcaaacttgatgctgctgcaaagtatcccggcagttggccctcaggtaggccgcacgctgcttgccatcatgcacgcgcgccacttcgattctgcagaacaacttgcggcgtatctcggcctggtgccggtgcagaggcagtcgggatcgtcgatccagggcccttcacgtttatcgaaggccgggccggccaaggtacgggcaactctctacatggcggccgtcgtcgctaaacgctataacccccacatcaaggcattgtgtgaacgcttggcagcgcgtggcaaatccaccatgtctatactcggcgctgcaatgcgtaagcttgtgcatctgtgtttcggcgttctgaagacacgacagccttatcgggcgaactacgtcgcaatcgcttgacgggcaagacggtat

SEQ ID NO: 6544 - DNA, 1414 bp, unidentified
  source 1..1414: mol_type = unassigned DNA; note = element_a239556
  misc_feature 1..2: note = core
  misc_feature 3..85: note = LE
  misc_feature 86..1138: note = CDS
  misc_feature 1139..1414: note = RE
  misc_feature 1179..1390: note = bridgeRNA
tgatgcggtggacggcccccaccgaacggcatggtgtgccaaggtgcgtgctgtcgtggcaacgcatcgagagggagccgcccggatggacgctatcacgattggcctggacatcgccaagtcgagctttcaggtgcacggggtggatgcctcgggcgcggtggtggtgcggcgcaagctggcgcggggcaaggtgctggagttcttccggggcctgccctcggcggtggtggggatcgaggcctgcgggggtgcgcagcactgggcgcggcagatcgcggcgctcgggcaccgggtacggctgctgccggcgcgggcggtgaaggcctacgtggcgcggcagaagaacgacgcggcggatgcggcggcgatctgcgaggcggcgggccgggcggtggtgcgcgaggtgccggtcaagaccgtcgaggcgcaggcgggtctggcgctgctgcgggtgcgcgaggtgctggtgaagcagcggaccatgctggtgaatgcgctgcgcgggcacctggcggagttcggcgtggtggcgccgcgcgggcgggagggggtctcggcgctggccgagcggctatccgacccggcggtgccggcgctggcgcaggcggcctgcgcggccctggtggcgcaggtcaaggcgctggaggcgcagatcctggcgctcgaggcgcggttgcggcagcggcatgcggcggacccggcgagccagcggctggccgcgatccccggcatcggcctgctcggggccaccgcgctggcgctgggcacggagccgggccggttcgactctgggcgggactacgccgcctcgctgggcgcggtgccgcggcagcactccacggggggacgggagcggctgggcagcatcagccgcatgggcgatagccgggtgcgcggtatgctgacggcgggtgccagcgctgtgctcaagcagctcagcccgcgcgagggccagccgcctgcggcgctggcccactccgcgctcggcgcctgggccttgcgcctgctggcccgcaagccctggcgcgtggtgatggtggcgctggccaacaagctcgcccgcatcgcctgggcggtgctgacccgcggcacggcctaccacccggccggccggcccgggccggccgcggcctgacccgagcccatccccgacccagccgcaaggagcttcgggcagcgccagagaggatgtgctgcaggcaagacggtcgcgtcacgcgatcggggacactccgtccgattcagagcgccatcgagcgcgcaggtctgatcagagccccgatccgcgcatcgcagcaaggcccgcggccctgtgcgccgcacctcagaggccggacacatgaacgcagcccgaccccttgcccaggcaacacccgctcaaaccgcttgcccgaacggagccgtccacaca

SEQ ID NO: 6545 - DNA, 1207 bp, unidentified
  source 1..1207: mol_type = unassigned DNA; note = element_a23c9ad
  misc_feature 1..2: note = core
  misc_feature 3..186: note = LE
  misc_feature 187..1179: note = CDS
  misc_feature 1180..1207: note = RE
  misc_feature 12..195: note = bridgeRNA
cttgtatgttgaagctttggatgattagctatctccaagctctaaaatcagtgaggatgtttgaccacgtaatgtttaacattgagctgtagattatcccctgattttactttctctaatactggatggtatccgagcacttagtgatttactaatgatgctgtatgtacaagtggagtcattgatatgagattaaatgttggaattgatgtaagcaaagaaacgctcgatctctgtttattgctaaatcaagccaagagcggcagcaaatttaaatgtttcaaaaacagaaagattgactatttagccatcaatgattggatcttgaagctatctaaatgtcagcctaatgacattgtcattacgatggaatccacagtggtttatcatgaagcaatagccctgtatttatactctatgggcttccaaatctttatttcaaatcctggcaaagctaagaaattctcgcaagcgctaggattaatccataaaactgacaagtcagatgcgtatatgctcgcaagatatggagacgctcaaaatgagcacattcatttatggaagcctgatgatactaatatcaggaatatcaaaacgttaactcgaagattatccgccttagaaaaagatcgtttaagagaaagcaaccgacttgaagcaagtgaaatcagcgatgctcatgatagggttttactctcaattactcgtattattaggattttagaaggcgaaattcaagagattgaaaatgaaatcgataccattatctctgcctgtcctaccatgaaaaagaaccatgatttactcatgagtgtcatcggtataggtaaagtaatgtcccgagagttagtctatttattttcagctaaaaacttttcaacagctaagcaagctgcagcatatgttggcctaacacctaagctaaatgaatcaggttcgtttaaagggagaacgacactgagtaaaattggtccatccagaattcgatcaaaaatatttttagcagcagtcagtgctggaacacataacccagatattaaagcacaaaaaaatcgacttctagccgaagggaaaacaaagatgcaagcattaggtgcagcaatgagaaagctaattcaaatttgttttggggtgataaagaaccaaacaaggtatcagtccgcattagctttaaattaggtttgtactcggttctgagagatggtat

SEQ ID NO: 6546 - DNA, 1398 bp, unidentified
  source 1..1398: mol_type = unassigned DNA; note = element_a241a99
  misc_feature 1: note = core
  misc_feature 2..70: note = LE
  misc_feature 71..1105: note = CDS
  misc_feature 1106..1398: note = RE
  misc_feature 1164..1395: note = bridgeRNA
tactgagatggacccgacgcctcccttcggggaagacactgtcggtccattcattcagatggaggccaacatgcagatcgacattctcgggatcgacttggccaagcgggtgttccaactgcacggcgccatccgtggcggcgcggtcgtgcaccgctcgaaggtcagccggccgggcctcatgcaggcgatcgtccgcctgcaaccacgactcgtcgtcatggaggcttgtgcctcggcgcatcattgggcgcggcagctggaggccagcggcatcaaggtacagctcatcagtccgcagttcgtgacgccgttcgccaagacaaacaagaacgaccggaacgatgccgaggcgatcgtcgaggcagccagccgtccgacgatgaggttcgttgcggtgaagagcgtcgagcagcaggacatccaggccctgcatcgaatgcgtcagctcctcgtgcatcagcgcacggcggtcatcaaccatctgcgaggcatcctgggcgaacgcggtgtcgtagtcgccaagtctcctgcggcgttccacagcgccatgccggcggtgctcgctgccgagagcaacgagctcacggcaacgtgccggggcctgctcgtcgagtcgttgcaacatctcgacgtcatcgagcggcgtatcgaagaagccgacgctcgagtaaggcggttgatgtccagttgcgagctgagccgcaagatcggcgcgatcgaaggcatcggccctttgaccgccactgctgtcgtggctgcggtcggtgacgcgagcgccttcaagaatggcaggcacctggcggcttggctgggcctcgtacccagacagcactcctcaggcggccgatcgcagctccatgggatcagcaaacgtggcgacacgtacctgcggacgctgctgattcatggcgcgcggtcggtgctgcggtggctcggcgagaagcaggacgcgcacagccgatggctccgcgaccttatcgaacgccgcggcttcaaccgagcggcggtcgcgttagcaaataagaacgccaggatcatccaagccttgctcagcagcgagcgtgcataccggcctcgctccctcgtcgcagcaccagcttgaaatctggtcccacattggcgataccagccacaacgaggagaaagtacagagcaccgcgcgggtttgcgatgcgctatgaagtgatgacgaaccggtcagaccagcgtctggagatcctgtattacctctcggctgagcgcttgctcgagccgaactgctgctaagggccggatgcgcgaatctcatcgaggctgcgggcatgcaaagcgctgcccaacaagcaagccgtatacatgtacgcagacaacttcgcatcaccaaaaagcgcttgcaaaaggcgtcgggtccataca

SEQ ID NO: 6547 - DNA, 1566 bp, unidentified
  source 1..1566: mol_type = unassigned DNA; note = element_a24241c
  misc_feature 1..2: note = core
  misc_feature 3..499: note = LE
  misc_feature 500..1435: note = CDS
  misc_feature 1436..1566: note = RE
  misc_feature 3..244: note = bridgeRNA
cttgtatgatgtttttagaagctataacaacatacatcctttctttttctttttcgtggtttaatacattcagatactgtgacttttgattttaatctgtagcttgactactcgacaggagtgtattgccattacttttatctgaattgtatataagctggatgttgccactagtgtttgctcagagtacttatttcaatcaagtctacgatgataattgttggtggatatcacggtatcagactttatgaaagggaggtacaacctcatgatttatgtaggcattgatattgccaagcttaaccaattcgccgctgcaatctattcgtatggcgagatactcattgagccgttcaaatttacaaatgactatgatggcttctttctgctgctttctcatctggaaccacttaactagaacagcatcgtcataggtcttgaatacacggcacactacggtgacaaccttgttcgttttctcatcaacaagggctttaaggtgtgtgttcttaatcccctccagacttcgtctatgcgcaaaaataatgtacgtaaaacgaagactgataaggtcgacacatttgttattgctaaaacccttattatgcaggattctcctcgctatataactctggagaatctggattatatcgaactcaaagagttcggtagatttcgccagaaacttgtgaagcagcgtacacgcttaaaaatacagctgacttcttacgtggatcaggctttccctgaactacagtacttctttaaatctagcttgaatcagaattctgtctatgcactccttaaggaggctccgacaccaaatgccattgcttctatacatatgacctatcttgctcatctcctcgaagttgcttcccacggtcatttcggtaaagagaaggctagagaattaggagttcttgcacagaagtctgtcgatcttaacgacagctctttatctattcaaatatcccagaccattgagcagattaagttattggatagacagttatttcatacagagcttgaaatggcaaatcttgtcacctgcctaaactctgtaattatgaccatccccggtataggctctgtgaattgtggaatgattcttggtgaaatcggcgatattcaccgtttttctgaacccaagaagttacttgcattcgcaggtctagacctttctgtacaccagtctggaaacttccaggcagccaaaactagaatgtctaagcgaggatcaaaagttcttcgctatgccctcatgaatgcagcacataatgttgtgaaaaacaacgctactttcaaggcgtattacaacgccaagaaggctgaaggccgatctcactacaatgcgttaggacactgcgccggcaagcttgtcagagtcatctggaagatgcttactgacaatgtagaatttaacctcgactaagaggtctcggtaccataatcgatagattttgaaaaaaggcttttagagagctttgttaaagttacctttttttacccgaagcagtaaaatttaattttgacctaatttatgcttgacttttcatagctggt

SEQ ID NO: 6548 - DNA, 1507 bp, unidentified
  source 1..1507: mol_type = unassigned DNA; note = element_a2430f6
  misc_feature 1..2: note = core
  misc_feature 3..216: note = LE
  misc_feature 217..1485: note = CDS
  misc_feature 1486..1507: note = RE
  misc_feature 5..209: note = bridgeRNA
ctgatggctctaccttcccttcgcacggtggatcccggcagggagcgcttcgggcgcttgtcccgcgaggactgagatgagacggcgcccctgccgggccccggcgaaggcctgacgcccaggagggtgtggtcccgcgaggactggttcatcagcacgacgcagcgccttcccggtccgccgcgcagaatgtcgccggcggaaggagacactcgcgtgctgggaatcggcatcgactgggctgaagagtttcatgatgtcgccctcggaacagacgagaaaggggtgatcgaacagttccgcattgcccacagccccaacggtgtcgccgcgctggtcgagcgggcgctgcgcctggagccggacccggccgagatccgggtcgtgctcgagacccgccacgggctgctggtcgaggccctgctggatgccgggttcaccgtgctgccggtcaacccggacctggtcgcgcgacgccgtggcccggcgcggaagaaggacgacaccgaggacgcccggatctgctgtctgctcgccctcgaccgccaccagacgttgaagacgctcatcccgcacggcgagctcggcggggagctgcgcgcgatcggccgtgacgacgaacgcgccgcccgcgaccagcgccggctgctcaaccggctccgagccgacctgcagaccacctaccctgctgcgctcgctctcgcgggcacggatctcggcgctccgacggtgctgcggctgctggagcgctggcccacccaggacgagctcgccgcggcctcccgcgaggaactggtcgcgttcgcccgcgccggccgccacggctggcccgaccggttcgccgaccgcgtcaccgaagccctcgccgcgccatcgctgccgacgcgggactacctggtccgggccaaggccgccgggatccggctggccgcggtccaactgttggccctgcacgaggctcgtcgcggctgggaacagcggatgggcgagctcctgctgggcgggcgccgcactggacgtgatcacaccgtcaccgaccccgacccggggaaggccttcccaggcggggacatctacctgagcttccccggcctgggagaccgcctcgcagctcgggtcgccggtgagatcggcgagcacatcgaccagttcgactcctcgaacggtctgcagtgctatgccggtcgcgccccggtcacccgacgctccggaaagagcgacttcgtcgtcgccaggcggatggcgcacaaccgctacctcggcgacgccgtgcaccaatgggcgttctgcagcctcacccagagcggctgggcgagagagttctacgacgccaagatcgctgccaagaaatcccaccacaacgccctgcgcgctctcggcaaccgctggctggagatcctctggcactgcctgacccgacgcgtcctttacgacgaagacctccacgtcgccaaccgcaaccgagccctcggacgagcagcctgacccggaggttgacagagggtgt

SEQ ID NO: 6549 - DNA, 1600 bp, unidentified
  source 1..1600: mol_type = unassigned DNA; note = element_a243355
  misc_feature 1..2: note = core
  misc_feature 3..267: note = LE
  misc_feature 268..1488: note = CDS
  misc_feature 1489..1600: note = RE
  misc_feature 34..287: note = bridgeRNA
ctgatacaatataattgaccgaagaaagtgcggtatttggattagcactttccaagttccgttacctaagctataatggaaaggtatttaaggtctgccggatttctccttgtgcttttaagcacgtcgcaaagactgtcagccggctttccattatagcgttcggtttctgcaggttggacttcgcgtccgtgtaacaaatcagattgaataagtaatggttcttgtcggtcacctttttacaaatccatatctaggaggctacttatgaacgctgtcggtatcgatgtttccaaaggtaaatctaccgtttccatcctgcgccccggcggggaattcgttatttctccgttcgaggtttctcacgatccaagggaactttccgagctcgtcactctcattaaaagcttggacggcgatacaaaaattgttatggagtacactggcaactactatcttcccgttgctctgtttctccgaaaggttggattgtttgtttccgtggtcaaccctattctcgtaaaagaatacagcaacaaatctttaactgtccgcaaaggtaagacagataaaaaagattccgtaaagcttgctgcctttgccttagaccgttggaatgagttaccgctcttttcctcccaatccgatacaagaactttgcttaaatcctttaacagacaatacaaccaatacaacaaacttaaagtcatgctcaaaaacaatctcgtttccattctcgaccagactttccccggagcgaataccttgttcaatactcctgcaagaaaagcagacgggcacgagaaatggattgattttgtgctcaaattcccgcattgcgagtgcgtttcaaagaaatcttactctgctttttccaaaagctatctttcatggtgcagaaaaggcggtttcaatttctccgactcaaaagcaaaggaaatttatgcatttgcctgtaactgcgcaccgtccttagacgattcagagactgctcatatgcttgtttctaccgcaattttgcagcttaatacgctcaatgaaactcttgcctctttacagaatgaaatggatcttttggcaagttctcttccggagtatgatacggtcatgaggttatacggtgttggttctgttctcggtccgcaacttattgccgaaataggtgatgtgtcacgtttctccaataagaaagctctcgttggctttgcaggcattgacgctccgccgttccagtctggcaattttaatccgcaatcccgaaacatctccaaacgcggttctgccgctctgcgcaaaactttattccaaatcatggctgtagttttgcaaaacgcacctgtgaacgagcctgtattccttttcatggacaaaaagcgctccgagggaaaacatttctatgtctacatgatggcgggcgccaacaagtttttgcgtatttactacgcacgtgtcatggaacacttgaactcattgcaagctgctgcttaaaaatcttctttgtcaccgccgttctcccgaacggctttttcccatgcactttttaattcgcaaaaaatcttatttttttctgcttattttcccttgacttttatttgcaggt

SEQ ID NO: 6550 - DNA, 1593 bp, unidentified
  source 1..1593: mol_type = unassigned DNA; note = element_a24e990
  misc_feature 1..2: note = core
  misc_feature 3..249: note = LE
  misc_feature 250..1425: note = CDS
  misc_feature 1426..1593: note = RE
  misc_feature 3..228: note = bridgeRNA
ctcgtattatataaacatagccttcttctttaccttttcaataggttaggctatactgttttaagatgctgtggacttgttgaactttcctcccacatgatgggtatttataggctccagacacagcctctttgttcatttgttaatcagttagataccgcatgacggtttatttagaacgaggttacaattgcaaggagcacctgtggttctataacagtatcaaatacatttcaaaggagattttttatgatttacgtaggaattgatgttgctaaagataagcatgattgctttatcactaactcagatggtgaagtactcttcaaagcatttaccatcccaaataacctggatggtttcaaccttctttatcaaaagattgaatctgttatggaagatgtaagcaaagtaaaagtaggcctggaagccactggacactacagttacaatcttttaggctatctctttgataaaggtttgcccgcctgtgttatcaatccgttacatacaaatctgtacagaaaaagccttagccttagacagacgaaaacggataaagtagatgcccgcacaattgcttccatgctaatgtctgatgtgaacttaaagtcctactcagatatatcttaccacaacaatgagctaaagtcattaactcgttatcgttttaataaagtaaaagaacgtgcaaggctaaaaacatccatttccagacttgtctgtatcttattccctgaattagaaaacttagtaccaacacttcatatggcatctatttatgcgatgcttgcagagtttccaagtgcaaaacatgtagcagatgcccatctgaccagacttaccaatcttctttctgacgcttctaaaggccattatggaaaggatactgccattacatttagaaaagcggcaagaagctctatcggctcaaatatgccagcaaaatctttagaactaaaacacaccattaaactcattcaggaacttaattccgagattgatgaaatagaaaatgaaatcaaaatcatcatggatcaaatccattcaccaatcttaagcattcccggaattaactatcgcatgggggcaatgattattgctgaaataggtgattttaatcgttttgattcttctgataaaatacttgcttatgcaggcttttcaccctctacatatcaatcaggacaacttgatggtgcctatgcccatatggaaaaacgaggttcacgctatcttcgctacgccttatataacgcagcaaaatatgtctgccattgggagccaacatttgcagcatatcttgccaaaaaacgagcggaaggcaaacactataatgttgccatttcacatgctgtcaaaaagctggtacgagttatttatcatctcgaaaaatcaaaccaacaatacatcaaatcagcttaaacatttctaattcaatactcccttttttgagcacctataacgatgctctttttgtcatacagttttcaatgttcaaagaactctcattaagttcaaaatatatctaaaatggatttctgcacattattcaaaaaatatcatttttagacttgacttttaatagttagt

SEQ ID NO: 6551 - DNA, 1507 bp, unidentified
  source 1..1507: mol_type = unassigned DNA; note = element_a26cc71
  misc_feature 1..2: note = core
  misc_feature 3..248: note = LE
  misc_feature 249..1487: note = CDS
  misc_feature 1488..1507: note = RE
ctaatggcttctgccgggtgggtttggcaggctcggttctggtagcggctggcgggtcagcactcttgggctctgatcttcggtgaggtcttgcaacagacggtgcgcccgctggtcgtgaggagatgtgaccgctgctgggatgtcgtgccctgggcttgttgccggtgagcacttgaccattaggacgctggatatctcctccgtgctgctgggttctggtccgggcgaggtgcggaggttgcggggtgttgttcgtcggtaacgactgggctgaagatcatcacgatgtggagatcgtcgacgagcagggtcgcaggcttgctaggaagcggctgccggatggtttggccgggatcactggactgcatacgttgatcgcgcagttcttcccggaggagtgggccgagcttgagcccggtgcggcggcctcgcgggtgaaggtcgggatcgagaccgaccgcgggcagtgggtgcaggcgttgatcgctgccggctatgaggtgttcgcgatcaacccgatgtcggtggcccgctaccgggagcggcactcgacgtcgggggcgaagtcggacgccgctgatgcgcacgtgctggccgagatcgtgcgcctggaccgggctcatcatcgcccggtggccggggactcggagctggccgaggcgatcaagctggtggcccgtgctcatcagagcttggtctgggaccgcacccggcaggtgctgcggttgcgcggggtgctgcgggagttcttcccggcggcgttggaggccttcgctgatttggacgctgccgacaccctcgagctgctcactctcgcaccggatccagaccgcgcggcgcggctgtcgaagtcgaggatcgtggcggcattgcggcgagcaaaccgccgcggtgtggatgacagagccgacgcgaaccactccatgctgcgggcgccggcgctgcgtcaaccggcgcaggtgcaggtggcgttcgcggcgatcgtcaccagccaggtccggctgatcagcgcactgaacggcgagatcgcacagctgggtgaggtggtggccgaccattttggccgtcacccggacgctgagatctacgccagccaacccggcctcggcgtgatcctcggcgcccgggtcttggccgagttcggcgatgaccggacccgcttcgccgatgccaaagcacgcaagaactacgccggcacctcacccatcacccgcgcctcgggcaagaagaaagtcgtgctggcccgctacgcccgcaacacccgcctcggcgacgccgtgcagcaatgggccttcagctcgctgaaaggatctcgcggtgcccgcgcctactacgacgcgcttcgagcccgcaacatcggtcaccaagcagcgctgcgccaactcgccaaccggctcgtgggcatcctgcacggctgcctgaagaccgacaccctctacgaggaaaccaccgcctgggcacaccacctcaccgccgccgcttgacatcgaaaaacctgggatgt

SEQ ID NO: 6552 - DNA, 1537 bp, unidentified
  source 1..1537: mol_type = unassigned DNA; note = element_a275a22
  misc_feature 1..2: note = core
  misc_feature 3..194: note = LE
  misc_feature 195..1421: note = CDS
  misc_feature 1422..1537: note = RE
  misc_feature 3..219: note = bridgeRNA
cttgtattatagagtagtagtttttagtgtccctctccaaggacatgtgctacactgtagaggatgctgtggattggttgcgtgctcctaccgcaagacggttatagaaaggctccaaccacagccctttacagtattgttaatcagttagataccgccagacggtttatgtggaacaaggttacaagagtaaggtgtcctgtggaaccagcatcgaaataaacacactggaggtattcatcatgatttgtgttggaattgacgttgccaaggataagcatgactgcttcatcctcaactcagaaggtgaagtcctggcagatgtcttcaccatcaccaataacgcggaagggtttgacatacttctgcaaaccattcgcagttgctcccgtccggagaacaaaataaaggtagggcttgaggctaccggacattacagctacaacattctcggattcctacttaacaaaggtctagccacctatgttatcaatccgctgcacaccaacctataccggaaaagcctgagccttcgcaaaaccaagaccgaccggatcgatgcgcgaaccattgcgactatgctaatgtctgatgtggacctcaagtcctacacggacacatcatatcacaacgaagagctaaagtcactaacaagatacagatttgacaaagttcatgagcgagcaaagctgaaaagctccattgccagattggtctgtattctctttccggaactggaaaagttggtttctaccctccatatggcatctgtttacgcacttctcagcgaatttccaggggccaagcaggttgcgtccgcacatttgacccggctgacaaatttgctgcatgaggcatccaaaggccgttacggaagggaaaaagcacttcaaatccgggatgctgccagaaaatccattggctccgctatgctggcaaagtctctggaactgaagcacaccatccatcttattggcgaattggacgcggagattgaggaaattgaaacggaaatcgattccataatggaaacgcttcattctcccattacgaccattcccggcattggcaaccgcatgggtgctatgattctggctgaaatcggagatttctccaattttgattccgcagataaaattctcgcttacgctggcctctcgccatctacctaccagtcgggacagcttaccagcagctatgcccacatggagaaacgaggctccagatacctgcgctatgccattttcaatgccactaaattcgtctgtaactgggatccatcatttgcggcctaccttgccaagaagcgaggtgagggaaaacactacaatgtcgccatctcccatgctaccaagaagcttgtgcggttgatctacgcaatggagcagaccaagcagccgtacagacaggccgctgtctaaaccccctgtcacgccttcctcagagcgccatcagcgacgctctgcttgtcataccgtttttgctgtttaggttttcgcaccaccactaaattggaacttgacttttaatagttagt

SEQ ID NO: 6553 - DNA, 1631 bp, unidentified
  source 1..1631: mol_type = unassigned DNA; note = element_a277cf9
  misc_feature 1..2: note = core
  misc_feature 3..295: note = LE
  misc_feature 296..1507: note = CDS
  misc_feature 1508..1631: note = RE
  misc_feature 14..315: note = bridgeRNA
ctattacaataagaattacggtaagaggcacggcagccagctgtgtctttttccgcattgttgccaaagctgatagaatgagagagtattggcctgatgtattcctccaaggactaacacgtccggggaaaagtccgtcagccagcctctcattcgcagcgttcgatttatgcaggttgagccgcctcgttggagccgctgctccgacctggtgcgtccgtgtcaacaaatagattgaatcggcaatgatggaagggctggtcgccaaatcatgatctgataggagtgttgaactatgaacgcagcggggattgatgtttccaaggggaagagcatggtatcggttatgcggcctctgggcgaggtggtggcaaaaccgtttactgtgtgtcacaccggcagtgaactcaaggagctggcagactacttgaaaagcctggacggtgagacgcgagtaatcatggagcataccgggcggtactacgagcctgtggcccagtttctccatgacgcggggctgtatgtcagtgcggtgaatccgaaactgatcaaggactacgggaacaactcgctgcgcaaggtcaagaccgacaaggccgattccaagaaaattgcgaaatatggccttgacaactggggagaactgcggcaatatgcttccatggacacaattcgttaccaactgaaaacgctgaaccggcagcacactctgtacaccaagatgaaaaccgcgatgaaaaacaacctcatcgcccttctggaccagacctatcccggtgtcaacgccctgttcggcagcccggcccgtgaggatgggacgcagaagtgggtggactttgctacgtctttttggcacgtagactgtgttcggggtatgagccagaccgctttcacggagcgttaccgcaagtggtgcaagcgaaaccgctacaatttcagcagcgataaagctgccgaaatctataccggagcgaaagaccagattgccatgataccaaaggacgatctgaccaagcggctgatccggcagacgattgattccctcaatactgtttccaagaccgtggagcagctcaaggctgagatgctgaaactggcatcccagctcccggagttccctgtcgttatgaagatgcacggtgtaggggattcccttggcccacagctcatggcggaaatcggggacgtgacgcggtttgtccacagaggttccatcaccgctttcgccggtgttgaccctggcgctaaccagtccagcgagcgcgaagccaagagcgtccgcacttccaagagcggcccgccagagctgcgcaggacgctgttccttgtgatggacggcctgctgaaatccatgccccaggatgacccggtctaccagttcatagacaagaaacgagccgagggtaagccctacctggtctacatgacagcgggtgccaacaaattcttgcgcatctactacggtagggtcaaagaatatctggcatcgttggaaaccgccgattgaccatcctcgccttgtttccatttgaccggcgtttatacggcggcctttttgtgttgcccttttttcgcctccctgccatgtcctcaaatttatttcattttcctattgacttttcctttgcaga

SEQ ID NO: 6554 - DNA, 1407 bp, unidentified
  source 1..1407: mol_type = unassigned DNA; note = element_a27e43e
  misc_feature 1: note = core
  misc_feature 2..90: note = LE
  misc_feature 91..1119: note = CDS
  misc_feature 1120..1407: note = RE
  misc_feature 1168..1399: note = bridgeRNA
caatgggatggactcctcctcacctaaaccggcatcttggtgccaaactggagttgttatcaaccagtgaaaaggaagaaggagaccgaaatgaagattatccgagttggcgtagatttggctaagaatattttccaagtacatggcgttgatcgtaatgagaagcctgtctggcagcgcaagttaaagcgtgatgaatggctcaaggttttgcttgataaaatcgaaccaggatgcgagatcggtatggaggcttgtggtggtgcacaccactgggcacgaaagctagaggcgcaagggtatacagtcaaattgattgcgccacaattcgtcaaaccttatgttaaaagcaacaagaatgatgctcttgatgcagaggcgatttgtgaagcgatgagtcgcccaaatatgcggttcgttacgatcaagaccgtcgaacagcaggatgctcaggctgttcatcgtatccgtgctgaattgatggcgcaacgcattgccaaggcaaaccagattcgcggccttgtctctgaatacggtatcgttgcaacgaaggaaatatctcacttacgtgccgccataccggagtggttggaggaagctgagaacggtttaacgagccgatttcgtcaactacttcatggtctgtggggcgacttgaaattgttagatacacgagtacaagaactcgatcaagagattgctgcacttgctgaaaatccagttgcacagagattgcaacaacttcgtggagtcggcccaatgatctcaacagccttacttgccacagtcggtgatgcttcccagtttacaaacggtcgacagatggcggcctctctcggattgacgccgagacagaacagttcgggaggcaaagagagactactcgggatcagtaagcgtggcgatgcttatgtccgatgtcttcttgtgcatggtgcacgctctatgattttttcatccaaggttaaaaatgatcgattgagccagtgggtgaagcggattgcaaccacacgccatccgaatgtggccgccgtcgcgatggcaaacaagacggcacgcattgcttgggcgatgatcagaaacggatcagattaccagccagactatgcaacagcttaagaagtagtattgaagatgcaaacgagcattgttaaataaaaggagcagaccaaccacgattgcaaagtaagtcgcttgatggccaacaggtcgaaccggcgctgacaaaacccgacgtgggtcgaggcttaaaaagcccgttataccgatagggagccagcgcgcgaatagcccatcagggtccagcatctaaaatagcgatgcagcaggtagagaccggatatacgtgagcagtcgaacctaccagccagaaaacggaatacttgcaaacgaggaggagtccatata

SEQ ID NO: 6555 - DNA, 1382 bp, unidentified
  source 1..1382: mol_type = unassigned DNA; note = element_a280c91
  misc_feature 1..2: note = core
  misc_feature 3..86: note = LE
  misc_feature 87..1115: note = CDS
  misc_feature 1116..1382: note = RE
  misc_feature 1089..1369: note = bridgeRNA
tgatggagtggatgcccctcccgccgagccagcggcgtggcagaattgccatcgcagaatgggctgcggacaacaggaggaacgacatgaacaacgtcaccatcattggcatcgatctggcgaagcgcgtcttccacgctcatggcgctcacgccgacggcggcgtcgcattccggaagagaatgggtcgctctcaggtcctcccgtttttggcccgacagccaacctgtgtgatcgccatggaggcctgcgcgagcgcacacgaatggggccgggcaattcgggagctgggccacgaggtgaggctcatcccgcccagctacgtcaagccttatgtaaagcgccagaagaacgacaccgccgatgccgaggccatagctgaagcgggatctcgaccaacgatgcggtttgtggcggtgaagacggaagagcagcaagcgaggtcgatggtgttccgaacgcgcgacctcttggtgcgccagcgcacgcaactgatcaacgccttgcgcggtcatcttgccgaacacggcgtcatcgcaccgcaaggtccggctcacctgaaaaccttggctgccgcgattgatgccgccgaatctacgatgccccaactggttatcgacgttggtcgcgtctacttggagcaggtcgatcggttgagctgcgaagttgccgagctggagaaaatcctccgccgcgaagcccagtgcggggaggatacacgccgccttcagaccatgccgggagtcggcccgatcacggccatggcggtggaagcgtttgcgcccccaatgtcgaccttcaagcgcggccgtgactttgccgcttggctcggacttgtgcctatccagcactcgaccggtggcaagcagcggctcggccgaacgtctaaaatgggccagcgggacatccgacggttgctgatcatcggcgcaatgtccgtcatccagtgggcctcccgccgcggtgcgcggccaggatcatggctcgcccgaatgctggatcgcaaaccgctgatgctggttgccatggcgttggccaacaagatggctcgctcggtatgggcgatgttgacaaagaaagaggattaccgggatcttggcagcgcggcagcatgagcatgcactcggcgactgcgaggccatgatgggcggcatgtgaggaggtcgtgaacgtcaaggacaaatgatcggtctgatcgggatcaggaaatgcaccgaggctccaagagcgaaaagctcgtcgagttgatttgcgcctgatccgcgtatctccatgacggccagcggcacctccgacgccgcatcacaggcctgacacatgaccgcacccgatcacatgctcgaagacgcgaaggcacttgcatgaaacggggcatccacaca

SEQ ID NO: 6556 - DNA, 1470 bp, unidentified
  source 1..1470: mol_type = unassigned DNA; note = element_a28bcbd
  misc_feature 1..2: note = core
  misc_feature 3..229: note = LE
  misc_feature 230..1453: note = CDS
  misc_feature 1454..1470: note = RE
  misc_feature 8..232: note = bridgeRNA
ccgttaccttgtgagggccccgatggtcggggtctggtcgctcggccgggtatggctttgttgccctgccatcaatggtccggggggtgttgccgcccggtcgagagacacgcgttgaccgctgatagggacacggcccaggacagtctgaggtctcgtcgtaacgtgggtgccggcatcgggtgtcgcgactgtgaccagcagtgatgcgttcaaggaggacgacatcatggatcccagattcacggtcgtgatcggcctggacgtcgggaagaccgggcaccacgcctgcgccctcgaccccgacggtgagagattgttcgacaagcctctcccgcaggacgaggccgagttgcgcgaggtcttcacaggcctgcagaagcacggagaggtgttgatggtcgtggaccagcccaacaccatcggggcactgccgatcgcggtcgccaaggactgcggctgcgcagtcgcctacctgcccgggctggcgatgcggaaggccgcggacctgtatccgggccggtcgaagaccgatgcccgggacgcgttcatcatcgccgacaccgcccggacgatgcctcataccctccgggccgtcgaccgcgacaacgaggtcctctccgcgttgaaggtcctcgcgggcttcgacgaggacctcgcccaggagaccaccagagcgctgaacaggatccggtcgctgctcacccagatccatcccgccctcgaacgcgtcttcaccggcggcacgctctccaccggcatcgtgctggacctgctggagaagttcgcaggacccaccggactcagaactgccggcagaggcagagttctccggttcgcccgcgcccacgcgcgccgtgatcccgaggctctgatcgaccaggtcttcgcggctttggacgagcagaccgtggtcgttccggcgaccgcggccgtggaactggtgatcccgagagtcgcaggccaggtcaaagagctgaaggagcagcgggcgacagtggcccgggaggtcgaagccatgctggaggacttccctctcgccggggtcttgatgagcatgccggggatcggcatcaagaccgccgcccagatcctcctcgcgatcggcgatgccagcacgttcgagagtgccggccacctcgcggcctatgccggcatcgcaccggtcacgcgacgctccggcacctcgatcaggggcgagttccccgccagatccggtaacaagcgcctcaagaacgccctgttctactcctcctgggtcgcctcgcactccgaccctgtctccaaggcctactacgaccgcaaacgcgccgagggcaagcgccacaacgcagcggtgatctgcctggcccgccgccgatgcaacgtcatcttcgccatgctccgcaacggcacctactaccaaccacccatcaacgtccccagccccgacccagccgccctcgcggcttgactcggaacatagggaca

SEQ ID NO: 6557 - DNA, 1401 bp, unidentified
  source 1..1401: mol_type = unassigned DNA; note = element_a29df3c
  misc_feature 1: note = core
  misc_feature 2..91: note = LE
  misc_feature 92..1129: note = CDS
  misc_feature 1130..1401: note = RE
  misc_feature 1172..1393: note = bridgeRNA
caatgggatggacgcccccaccctcaaacggcatcagcgtgccaaagtggaagtgtttgcagccacttaaacgaggatgggagcgtctgccatgaatattacgactgtcggtatcgatttggccaagaacgtttttcaggtgcatggagtggatgcacgggggaaggtcgtactgcgcaggcaactgcgccgggagcaagtggtacggttcttcgtgaaactgccgccgtgccttgtaggcatggaatcgtgcgcgagtgctcaccactggggccgtacgctcgagcgcttcgggcacagcgtacggctgatggcaccgcagttcgtgaagccgtatgtgaaagcgaacaagaacgatgtcgcggatgcggaggcgatctgcgaggcggtgggccggccgaacatgcgcttcgtgccgatcaagagcatcgagcagcaggggatcctatcggtacatcgtgtccgccagggcttcgtcaaagcgcgcacggcgcaggccaatcagatccgcggcttgctaggggagtttgggctggtgatccggaaagggatctgccacgtcgcccgatgcgtaccggggttgctcgaggatgccagcaacgaactaccgctggcgttgcggcagctgatcgatcgactgacgcgtcatctcaaggatcttgatcagcaagtccgcgagttcgagcgccagatcatcgcctggcaccgcggcagcgagctgagctgcaagctcgagaagatcccgggcattgggccgctcgcagcgactgcactggtcgcctcgattgccgacgccaggagcttcaacaacggccggcaggtatcggcctggctcgggctggtgccacggcagaactcgagcggtggcaaatccacgctcctggggatcagcaaacgcggcgacgtttacctgcgcacgctgctgatccacggagctcgctcggccatcttggcagccaaacgccagagggagaacaagaacgtctggctagccaacctgctcaaccggcgacaccacaacatcgccgctgtagcgctggccaataagaacgtgcgtactgtgtgggcgttacttgcacatggccgcgactttaaacccgactacgtaccggtgcgagctacggcctagtcggacccgataccaacgacatccgcaacagaagatcacaccaccgattgcttaggcgatcacgcagtgatggcaaaccaggtcagaccgtggctgctcaaacccaaaacgtccgcagcacctcgagtgcgaaaaagcgaatgggagccagccagccaatcccatcagggacagcggcacacgccgcagcaaaagtccggatgtacgggtgcaagcttgtcctgcaagccatcaagagctgaaagcctggcaaggttgggggcgtccatgta

SEQ ID NO: 6558 - DNA, 1454 bp, unidentified
  source 1..1454: mol_type = unassigned DNA; note = element_a2a09f9
  misc_feature 1..4: note = core
  misc_feature 5..232: note = LE
  misc_feature 233..1438: note = CDS
  misc_feature 1439..1454: note = RE
  misc_feature 1..236: note = bridgeRNA
ccccgttacctttttcgtggttcctgatcaaggagctgtggtcgccaggttcggtatgactgatgcccccagtcgaggtcatgatccggggggtggtgtcgccgggcctggtggcatcgagggaccgctgaatagggacacggccaccgctgggtaggtctcgtcgtaacgtgggtgccggccatcgatgccctgaccggtgaccacccgcgacggacgaaagacactgtgcatgaccagcagttatggcgtgttcctcggtctggatgtcggcaaaggcaaccatcacgccgtggggctggacccgaccggcaagcggctgcacgacgggccgctgcccaacaccgaagccaagttgcaggcgttgttcgacacgcttgctgttcacgggtcgctgctggtcgtggtcgatcaaccggccacgatcggtgcgctgccggtcgcggtcgcccgcgcggccgggcaccaggtggcctacctgcccggcctggccatgcggcgcatcgccgatctctacccgggcaccgccaagaccgacgcccgggacgcgttcatcatcgccgacgccgcccgcagcctgccccacaccctgcgccaggtcgaccccggtgacgaggccctggccgagctggaagtgctggtcgggttcgacgacgacctggccggtgaagccacccggctgagcaaccgcatccgcggcctgctcaccggcatccaccccaccctcgaacgcgttctcgggcctcgcgtcacccaccgggcggtgctggagatcctgtcccgctgcggcggaccgaccggcatccgcacagccggccgccgcaaagtcaccgccatcgccaccactcacgcgccccgcatgggcgaaaaactggtcgccgacatctggaccgcactggacgagcagaccgtcaccgtcccgggcaccaccgccgccgacaccgtcctgccccgactcgccgacagcctgaaaaccgtgctccagcaacgcagccaggtcgccaccgaggtagaggagatactcgatgcgcaccctcttgcccgggtcctgacctccatgcccggcatcggagtcaggaccgccgcccgcatcctgctcgagatcggcgacgcctccgccttcaaaagctccggccacctggccgcctacgccggcatcgcccccgtcacccgcacctccggcagctcgatcaagggcgaacaccccgcccgaaccggcaaccgcaagctcaaacgggcgttcttcctggccgcattcgccgccctgcacgaccccaccagcagggcctactacgaccgcaaaagagccgagggcaagaaacacaacgccgccctcatctgcctcgcccgccgccgctgcgacgtcctctacgccatgctccgcaaccacacccactaccgaaccccgcaacccaaaaacacgcccgccgccgcttgacaaccacatagggaca

SEQ ID NO: 6559 - DNA, 1570 bp, unidentified
  source 1..1570: mol_type = unassigned DNA; note = element_a2a19f4
  misc_feature 1..2: note = core
  misc_feature 3..246: note = LE
  misc_feature 247..1425: note = CDS
  misc_feature 1426..1570: note = RE
  misc_feature 3..227: note = bridgeRNA
ctcgtattataaagtagtagtgtttatagtccctctccaaggactgtatgctatactgtttggagatactgtggattggtttgtttctcctaccacttgatggtttaagaaaggctccaaccacagtctctttgtatagttgttaatcagttagataccgcatgacggtttatttagaacgaggttacaatcgcaaagagtacctgtggctctaaacagtatcaatttattcaaaggagatttcttatgatttacgttggaattgatgtggctaaagataagcatgactgctttgttacaaactcagatggcgaagtattatttaagccctttaccatctctaataatcgcgaaggttttgacaccttatttcaaagaatctcatccgtttcagaggatttaaccaaagtaaaagtaggactggaagccaccggacactacagttacaatcttctgggatttcttcttgataaaggtttgccgacctacgttatcaatccgttacataccaatctttacagaaaaagtcttagccttagaaagacaaaaacggataaagttgattcccgtaccattgccactatgatgatgtctgacgtgaacttaaagtcctactcagatacatcttaccacaacgaggaattaaagtcactcactcgttatcggtttgataaagtcaaagaacgggcaaagctgaaaagctctgtttcaaggcttgtgtgtattcttttcccggaactggaaaaactcgttcctacgcttcatatggcatccatctacgctttgctttctgaatttccaggtgctgatgccgttgctaacgcacatctcacaaggctttcaaacctgctttctgaaagttctaaaggcagatatgggaaagatactgctgtcatgtttcgtgatgctgcaagaggttctatcggttctcatatgcctgcaaagtctttggaactaaaacacaccattaaactcattcaggaattaaccgttgagattgatgaaattgaagcagccatcaaacgaatcatggatgaagaaatccattctcccatccttaccattcccggtatcagttaccggatgggcgcaatgatcattgctgagattggagatttcagccgttttgattccgcagataagatacttgcatatgcaggaatgtctccctccacttatcaatcgggacagttagataactgttattcccatatggaaaaacgtggttccagatacctccggtacgctctttacaatgccacaaaatatgtctgccattgggatgattcttttggtgcatatcttgcaaagaaacgctcggaaggcaagcactataatgtcgcattatctcatgccacaaagaagcttgtgcgattgatttttgcaatggagaaatccggtagagcatatctgacaacaacttaattattttctgtaaatatctccttttagagtgccagcaatgacactctgtttgtcatgcagttttcaaggttcaaatgtatctgaaatgcatttctgcaattcattcaaaaaactttcattttggacttgacttttaatagttagt

SEQ ID NO: 6560 - DNA, 1487 bp, unidentified
  source 1..1487: mol_type = unassigned DNA; note = element_a2a2a6a
  misc_feature 1: note = core
  misc_feature 2..76: note = LE
  misc_feature 77..1111: note = CDS
  misc_feature 1112..1487: note = RE
  misc_feature 1260..1478: note = bridgeRNA
taatgagatggtccgccgctgtaaacctccgtttgggcggaggatgtaagcagcggttcagaggaggatcatcgatatgcagattcgttcggtaggcatcgacctgggtaaaacgacgtttcaccttgttgcgcttggagctgcgggcaaggtactggcgaagaagaagttcacacagaagcaactgttggcgttcacggcgaacatgcagacttcactgattggtctggaagcctgctctggagcgcattttcttggaagagcactacgcaaccaaggacatgatgtgcgcctgatcgcggcgcagttcgtgaagccgtttgtgaagtccaacaagaacgacttcgtcgatgcagaagcgattgccgaagcggtcgagcgcaagaacatgcgctttgtcccgatcaagacggatgaccagctcgacctgcaagcgatgcaccggattcgtgatcggctggtctcccggcgcacggcggtcatcaaccagatacgggcgtttctgcttgaacgcggcatggtgtttgcgcaaaagccggcgaagctgaaggccgcgatggctgatgttctggagaacgcagagaacacgttgacacctatgatgcgcaacatgatcggcattctgtgggacgagtggaagacagtcgagcagcagatcgaagagctgaccgagaaactcgaacagatcgctgcgagcgatgctggttgctgccgcatccggcagatccccggcattggccccatcgtggcgacggctatcgttgctgccatcggcaacggctcagcattccgcaaggggcgagacttcgcagcgtggctcgggctcgtgccacggcagtactcgaccggtggcaaggcgaagctgcttgggatcagcaagcgaggcaacacctatctgcgtaagatcctgatccatggtgcacgagctgccgcgatgcgcataaaacgagatcgtttcgcgatcggacgatggatgaacgcgcttgaatcgcgagcgccgcgcaacgtactggttgtggccatggcgaacaagctcgctcgtattgcatgggccgtgctctccaccggagaagactatcggcctggcgggaccgcatccgtagccgcctaggttcgttctgagctaatcttgcaacacagcgaaggggaaggaccgcatccgcaaggatgccagagggtaatgctgaccgcgcccaggggcttgggcaccgtctgcgagcaacggtcgagcgcagaccatgccttcgctgcaatcaagcttccacgaagtctgcatcggaacagtaaggacgaaagaacagtcaaaacggcgtatctgaaacctgatcctgataatggtccataacgaccgaccgacttttaaggacagatgcgcagcggaactcatcctggccaggagcacgcggctccatcaaaggccgaatacattgccgcagacttgtcttctcgaacgaactaatccttgcagtcacgcggcggaccataca

SEQ ID NO: 6561 - DNA, 1528 bp, unidentified
  source 1..1528: mol_type = unassigned DNA; note = element_a2a3602
  misc_feature 1..2: note = core
  misc_feature 3..263: note = LE
  misc_feature 264..1508: note = CDS
  misc_feature 1509..1528: note = RE
  misc_feature 16..243: note = bridgeRNA
ctaatggttgttaacggggtcggcccgggttcgggcagacttcgggtttggtggccgccggcgggtgagcacttgttgctcctgaacccctgtgggagttccgatgaaagatcgtgcccccgccggtgaccgagagagttgatcgctgatgggatgtcgtgcttgtccctggtgggcgtgagcactggttcattaggtcgccgatggttctctcgtacggccgccgatgttgaccatgaccaacatcgagcctgggaggcgcgttgctgttcgtaggagatgactgggccgaagaccaccacgacatcgagctgatggatgcctctggcaggcggcttgccagagcgcggctgcccgagggcgtggccgggatggcccggctgcacgcgctgatcggcgagcagctcggtgaagacgccgacgagaccgccgagcaggtggtgatcgggatcgagaccgataagggcccatgggtgcaggcgttgatcgctgccgggtaccgggtgtgtgcggtgaatcccttgcaggcttcgcgataccgggaacggtacgggatgtctggcgccaaaagcgacggcgccgatgcgcacatgctggccgacatggtgcgcaccgattcccaccagctgcgcccggtggccggcgacagtgccgaggcggcagcgatcaaggtggtgtctcgtgcccacaagagcatgatctgggagcggacccggcacatgcagcggctgcggcacgccctgcgggactacttcccggctgcgctcgaggcgttcgaagagctgaccacgcccgatgcgctggaacttttggccaaggcaccagaccccgcgtcggcggcgaagctgacgctcacccagatccgcacggcgctgaaacgagcacgtcgacgcggcgacatcgacaccaaagcgggcaagatccaggccgccctgcgcgccgagcacctcggccagcccgccgtggtggcacaggcgtacgcgaccaccatccgcgctgccactgccgtgctggccacactgaacgagcagatcaagaccctgcaagggcaggtggagcaacattttggccaacacccggacgctgagatcgtcctgtctcagccgggcctggggcccattctcggtgcccgggtgctcgccgagttcggcgacgaccagcaccgctacaccagcgccaaagcccgcaagaactatgccggcaccagccccatcacccgcgcctcgggcaagaagaaggtcgtcgccgcccgctacgttcacaacgacaggctcatcgacgccctgctcagccaggtcgtccccgccatgaccgcctcgcccggtgcacgagccctctacgacgagctgcgagcccgcggcaccgaccacttcgcagcatgcagacacgtcgccaaccggctcgtcggcatcctgcacggctgcctcaagacccgcacccgctacaacgaggaaaccgcctgggctcaccgctcggccaaaccagaggaatctgcggttgcggcttgacattcaaactccagggatgt

SEQ ID NO: 6562 - DNA, 1815 bp, unidentified
  source 1..1815: mol_type = unassigned DNA; note = element_a2a69a7
  misc_feature 1..3: note = core
  misc_feature 4..114: note = LE
  misc_feature 115..1398: note = CDS
  misc_feature 1399..1815: note = RE
  misc_feature 1489..1756: note = bridgeRNA
ggagcattcctgtagtagtcaaaaatgagctttgtcaaaaagaagacctcacgttacaatttgaaaggactgttggccaacagaatccaatcaaaataacggaggtcatccccaatgaattttacacaaaacgagaagctaaagcaactatctgaaagaagtattgtgatcggagtggacatcgccagcgagcttcattatgccagggcatttgactggcgaggagtcgagctgggcaaggtcttcaagtttgaaaacaacgctgaaggattcaaggatttccatgcatggattgaacgtttaaaaaggcaagcacaaaaggaatgcatagtggtaggcgcagaaccaaccggtcattactggtttagcctggcatcttacctaaaagagcaaagtattaagctggtcctcgtcaacccgttccatgtaaagcgtagtaaggagcttgatgacaaccaccccagcaaaacggatgctaaggatcccaagaccatcgctaagctggtcatcgagggcagatacaatgagccctatatcccggaaggaatctatgcagaactgcgaatagcaatggcctgtaggatgcgcatccaaaaggaattgaacagtataaaaaatcgcattcagcggtggctgaagatctactttcccgagcatgaaacggtatttggaaagtttgatgccacgagtagcatgctggtattgcaagttgctccgctacctaaggacattgaaaggcttggagtagaaggaatcaaccgaatttggagagacaacaagttgagagcagtgggaatgaaaagggctaagagcctgtatgaagctgctcagaagagcattggttgcaccgaaggagagtcttgttcccgaatggaaattcagctattactccaagactatcacactaaaacggcacaatatcaggcagtcactgaaaccattgatgggttgtgttgtcaaatccccgaagtagccaagttacttgaaattaaaggtgttggccttgttactgtggcaggttttctctccgaagttggggatatcaagcgttttaattctccaaagcaaattcaaaaacttgcgggcttagccttgcgagagagtagctcgggtaagcacaaaggacagaccacgatcagcaagcgcggccgcgcacgactaagggcgattctatttcaggcagtaatgccactcgtcgcaaaaaacgcagagtttgcagagatacacaactactatacgaccaggagtaagaaccctctgaagaagaaacaatcgttaattgccttaagctgtaaactgattcgggtgttctacgccatattaacaaagggtacagactatgacccgaagaagctcattacagacatacatcgcccagctgagtatttagctgcgtaagaggaatagtagcgaaaccataagaaacaaacgatctttgggttaaagcgtcaccccagaagcgaataatctaggtaacctagcaagacaaaagagctggtagtcagtcgcatagttcaccattagagcaaagactcggttgaggagcataactgacacccaatcatggataggtggaacgaaggaatttagggcaggttttaaccttgaccctgttagacatgggaggtttaccaccgtgagaataatgggtttacaacggccaacatatgccaaaaaagcagacgtttgctttgctatacccaaattctctgaattaggcattctatgcgaattctatccgtggtgagctagtttgtttggtaaggaattctatgaaaaagcgagatattcaaagaaaatcaaaagatattatag

SEQ ID NO: 6563 - DNA, 1906 bp, unidentified
  source 1..1906: mol_type = unassigned DNA; note = element_a2a7393
  misc_feature 1..6: note = core
  misc_feature 7..274: note = LE
  misc_feature 275..1216: note = CDS
  misc_feature 1217..1906: note = RE
  misc_feature 97..271: note = bridgeRNA
gtattaaccctccatgcttaacaaagcacaaccatagatgaaaataaattttcaagttgcaagaaactagttttttggtaaactaaaattaacagggtcaaaggttgatttaatgctgatggattaatacctcgtgaattaacctaacttgattacctttgagcacaaccaattgtcgccccatattaaggcaatatgggaacagcacgggtgttaagtttcttatttttctcaggtaatcaaccctgtaataaatttaacaggagtgaagaaaatgcaggatttactagaagtttgctgtggactagatgttcacaaagaaacaatagtggcttgtttgcttaaaggttctgtcaatgatgaaaagccggaaaaaacgataagaacattttccactttattaaaagaccttgaagaattaaaaacatggcttgaaacagaaaactgtcatcatgttgccatggagagtacagggatatactggcaacccgtatataacgtactcgaaagtgcttttgatggtaacatatcaatcatagtagctaatgcaaaacatatgaagaatgtacccggtaaaaaaactgatatgaaagatgcagaatggattgctactttattaagagctggtcttttaagtggaagctttattcctccgcaagaaattcgagaattacgcaaccttacgagatatcgcaaaagcataattgaagagatatcttctcaaaaaaatcgtatagagaagcatttacaaagctgtggatttaagctttcaaattttttgacagatatatttggcgtatcaggtagagcgataatagaccatatagcagagcatggaagtataacagctaaagaagttgaaaattatgtaagagggagagcacgcagtaaaatagaagacataaagctatcaattaatggtagaatgaataagcatcaaagagaatttttaaagcttttactcaatcatttagatgaaacgtataaacatctttatgagatagaagagagtattaatgctgagattgaaaaatacaagagacagattgaacagctagatggaatacctggcatagatgtaacggcagctgctgcaataattgctgaaataggtacagatatggataaattcaagactgcagagcacatttgctcatgggcaggattaagtcccggtaataatgaaagtgcgggaaaaaaaagtccactcgagtaacaaaaggaaacacttatataaagaggatactgtgtgaagtagcatggagtataacccgcataagggattcatatcttgccacatggtattggaaagtaaagcagcgccgtggtacaaaaaaagcggtagtagcacttgccaggaaaatattagttatcatttatactatgcttaaaaataacactgactatgatgaaagaattttcgatgaagtgcgaaagaaacaggaaataattcgcgttaaacggattattaacgaagctcgcaagttgggtttagaagtaacagtgtcccaaatttaagtagtataattagataactttacaaaaattcccagctgatgcttttaaagcattggtttaatatttattaccttttttctggctggatgtttaagcctatgcagttgtcaatgttcaaaattctccttttagatagtctattttcgtgttaactttagtactcttttgtcccctatccgcttttctagtttggacattattacgtcgtggtttactctgtcaaagaacttttctaagtccatatctacaacccatgtgtatccttcatttatgtatgcttctgcggcttttattgcgtcttttgcactgcgtcctggtctgaatccataactgctatcagaaaatgtatggttgtagactttatttagtatttgggctattgcttgtt

SEQ ID NO: 6564 - DNA, 1192 bp, unidentified
  source 1..1192: mol_type = unassigned DNA; note = element_a2ab710
  misc_feature 1..2: note = core
  misc_feature 3..211: note = LE
  misc_feature 212..1189: note = CDS
  misc_feature 1190..1192: note = RE
  misc_feature 40..193: note = bridgeRNA
tcctttagatttgtataaagaaaaaagtaatattttagaataagagaaaagtgcttaagtaaactattgccctactcagagtacaactcatcgttcgattcagacttaagcactcttttatcaaaaactcagatagaaattcgggattaaaacccattattaaggagttgagttcatgataaatttctctttaattgattaaaacaaatgtatggaaaaagtttttattggaattgacatcagtaaatcaaccctggatatttgtatccgtaaaaatgcggtgacagaacattgccagatcaataacagctctaaggatatcaaaagatttttaaagcgctatgcggataatgcggataccattgtggctatggaaaatacaggacggtataactttgagctttatgaggtgctcagccgtatgaagcttttggtatatgttatcaacccccttcatctcaagaaaagcatcggacttttaagaggtaaaaatgataaaatcgacagtcagagaatctgtctttttattgagaaaaactacatggacctggcaccctgggtctgcaaatcaccggatatccaaaagctcagcctgcttaatgcagaacgcaggcatagggtaaagatacgatcaggcttatcaagacagatgaaggatctggaattcctgaagcatcacacagatcaggacatcctgaaattgaatcaggaaatgatcttattgatcgataagcagattaaatctattgagaagaagatcgtagaaattattgaatgtaacgaaatattaaaggatcaatatgaaaggatccagactattcccggagttggaaaggtattggccagcctgttacttgttaagaccaatggctttactgaaatacaatcagccaggaaaatggcatgttattcaggtgtggttccctttgaacaccgctcgggatcatccatttactacaaacccagagtctctaccatggctgataaggatttaaaaaagattttacatctggcagctttaagctctataagactaaaaaacgatcttgctgtatactatcagagaaaagtcctggagggaaaaaataagatgtccgtattaaatgcaatcagaaacaaaataatacaccgggtttacgccattattaaaaataattcagtgtatgaaaatcgtttgcatatgtcatagaaa

SEQ ID NO: 6565 - DNA, 1222 bp, unidentified
  source 1..1222: mol_type = unassigned DNA; note = element_a2abd3c
  misc_feature 1..2: note = core
  misc_feature 3..310: note = LE
  misc_feature 311..1207: note = CDS
  misc_feature 1208..1222: note = RE
  misc_feature 12..196: note = bridgeRNA
cttgtatcttgctccctgggatggttagctaccattccatgagagacaggtgagtttctttggctcccgagggacttaaccctgttccgtagaccaaacccctgtctctcacctctgacgccatcgcggacactggacggtagcctagggctgattgaccctgcatgcacaaggtaagtgggcgcagttggcatactttcttgtatgagggggtatgaacgatgatctatctgggtattgatgtctccaagctgaagctggactgcacgttgttgctggatccagagaacgacaagcgcaagacaaggttgtgcctaatagtcgggacggagtgcacgaactggttcgatggtgcgccaagcacggggtgggggccgaccaggcccatgccgtgctggaagccacgggcccgtatcacgagcaggccgccacgacgctgcatgacggcgacatcgcggtgtcgatcgccaacccggccagcgtgcacgacttcagtcgggcaatggcgatgcgctccaagacagatgcactcgatagcctggtgttggctcgttatggcgtggcgatgaggcctggtgcttggcagcccccgccggcacatgtgcgcgagctacgcgccttgattacccagctggacgcgctgtccaaggatcggctgcgcacgatgaaccgccaagagaagatcgaggccagttcggcctcggagctggtagagcgttcgatcagtgacaccctgagcttctacgacaaggagatcgctcgcctggagaaggccatcgatgaccacatcgaccggcaccctgacctgaaggacgacaccaagctgttgtcctccatccccggggtcggcccgaaggtggccagaaccatgctcagggtgatgcgtacgcatcagttcaagtgcgccgaggatctggcggcatatctgggcctggtgccggtgcggagacagtcgggcacgtcgctacgcgggcgcagccgcatgtccaaggcaggtcccgctgatgtacgggccaaggtgtatatggccggcgttgttgcttccaaacacaacccccatgtgcgggcgttatatcaacggctgctggcggcgggcaagaccaagatgtcggcgctggctgcttgcatgcgcaaggtggtacatctgtgcttcggtgtgctcaagacgcggcagccttacagacctgactacgctttttctacttgacggccaagacggtat

SEQ ID NO: 6566 - DNA, 1354 bp, unidentified
  source 1..1354: mol_type = unassigned DNA; note = element_a2b9f76
  misc_feature 1..4: note = core
  misc_feature 5..95: note = LE
  misc_feature 96..1103: note = CDS
  misc_feature 1104..1354: note = RE
  misc_feature 1128..1342: note = bridgeRNA
atgatggggtggacggcctccggcggcatcgagatgtgccattctggagatctgtccaaccagaacaagggagaccgtccgtgggtgagattagcatgttcgcgatcgatatcgccaagagcgtgttgcaggtggctggggccgatgcttcgggcaggctggtgttcaacaaggcgcttcggcgaggtcaggtgctggccttcttcgccaggcaggcgccggcggtgatcggcatggaggcgtgcgggtcggcgcactactgggccagggagctgaaagcgctgggccatgaggtgcggctgatcccggcgcagtacgtcaagccgttcgtcaagcgcaacaagaacgacgcgcgggacgccgaagcgatcctggaggcgatgcagcggccgaccatgcgcttcgtgacggtcaagagcgtcgagcagcaatgcgaccgggcggtgcacagcgcgcgcgatcttctggttcgccagtcgacgcagctgatcaacgccgttcgcggcctggcctatgagatgggcatcgcctcggccaagggggccgcgggcatgacctgcctgctgcagctgatcgaccatgccgacagccgcatacccccggcgctcttgcccatgctcgaggccctggcggcgcaatggcgcgccctcaaggcgcagatcgatcgtctggatcgacacctgcaagccctggccagggccaatccccaagctcgccgcctgatgaccattcccggcgtgggcccggtgaccgcccatgccgtggtcgccgccatcggcgatggcaggcagttccgcacggccagggacttcgccgcctgggtgggcctcacgccaagagggttcgggaccggtggcaggcaacgcaccggtcgcatcagccgggccggcgacgacgctctgcgacgcctgctggttctgggcgccgcctcctggctgcgtcaggtcaaggccaagccagagaagggctcggcctggttcaaaggcgtcctcgccagaaggcccgtgcgggtggccgtcgtcgccctggccgccaagaacgcccgcatcgtctgggcggtcctcacatcgggtcacgattatcgggcccccgccgcggcctgacggccaacgctaaagcccccacagcgtaaggagccatgagcaaccacggcaaaatggtcaggacctgggtcgggacactccgtaacgtcatcgcgccccgagcgcgtggccatgatcggaacccggtccgcgatacccctgagggccagcggccaagacgacggccgcatcaacaggccgaatacatgaccgctccagactgtccgccgaaaccgctcaacgctctcttgcccaaagggggccgtccatac

SEQ ID NO: 6567 - DNA, 1587 bp, unidentified
  source 1..1587: mol_type = unassigned DNA; note = element_a2ba378
  misc_feature 1: note = core
  misc_feature 2..255: note = LE
  misc_feature 256..1389: note = CDS
  misc_feature 1390..1587: note = RE
  misc_feature 6..229: note = bridgeRNA
tcgtattataaggtcaaccggaaatatgatatttttctggttgaccttatgttttataggttattctttaggtagtcggggtaggacgtaagcgcccgtgggacttgatcccgtccgtaatactgtccaccccctacttgtagaaacatgtttgaggctggttggggcactgaccccgcataacaagcgaagctatgacactacaagatagacaggggttaccgacaaatctactaaaaggagatgtgataaattatggatccagtgattggcctggatgttgcaaaaggagaaagccaagttcaagctttcctggcaagaaagcagcctttcgggaagacctttaagtttaagcatgataccaatggtatgagtgatttttttatattttacaaagaagtggagttccaagctgaatctaaaccggttgttgtgtttgagtcgacaggacactatcatgaacctattttacagtaccttgaggaaagaaagattacttactacttagtgaatcctgtagtttcttacgaaacgaaaaaaattagtcttcgaaaagtaaagtcagacccagccgatgcgaaacacctgtgtgaaatgtattacaaagaggacttagtagcctatcatcgaaaatgtgttcaaacgatgaatttgagaaatttatgtagacaacacgattctttaacacgtaactatgtacaactgaaacttcagttccaaacgatattggatcaagtattccctgaatataaaggagtttatagtaatttatacgcacctctttccttaaaaacgttactcctctatcctacttctcatgaagtattaaaggttccaacggatgaattagctaaggagatgcatggactaggaggaaagaggtcgtatgattggttttatgaaaaggccttgaagttaaaagaagcagcagaacgaaacccctttaagaaaacgctgtatcaaagccacttggttacactaaaaatgtatattcaaatgattcttcaacaacgagagtttctgaacgtacttgagcaggagattgagacgttagcgaaacaatttgaggtgtatgagattcttacatccatccccggagtaggtactaaaattgcagccactctgatttcagaaataggggatgtcacacaatttagtcaccctaagaaactagtagcctatgcaggacttgatccaagggtataccaatcaggtaagtttacagctacgataaactggataaccaaaagaggatctacgaagctacgtcagaccatctattcagctgttcagtgtggactaaccaataaccggaatgtgaaaattcgagagtattatgacaaaaaaagaagtgagggcaagcctcacaaagtagccatcatagcttgagccaacaagctattgcattggatttatgccatattaaagcataagcaaatatataccgcataaacccatacaaataattacacaacttacaaaaaattcaattataaatattgaagcttctttgtgatgcacatttttattataccatctttaatctagtatgattacttaaaaagtattgacttatattagctggta

SEQ ID NO: 6568 - DNA, 1329 bp, unidentified
  source 1..1329: mol_type = unassigned DNA; note = element_a2bbfc5
  misc_feature 1: note = core
  misc_feature 2..70: note = LE
  misc_feature 71..1111: note = CDS
  misc_feature 1112..1329: note = RE
  misc_feature 1110..1317: note = bridgeRNA
ctatgtatggactcccccaacccagtcacctaggttggaggtcgaccaaaaccataaagagagtccatacatgtcctattcaactacagtcggggtcgatctcgcaaagaacgtcattcaggtctcggtcgtgtccggccgcggcaaagagcttttgaaccgctcgctgacgcgcaagaagttttcggagtttctgggcaagcagaagccagcactggttgcttttgagtcgtgtgcgactgcgcactactgggcgcgtgccgcagtgcggcacgggcacgaagcgcgcatcattcccgcgaaggcagtggcgccgttccggcaggggcacaagaccgacagcaacgatgccctggctgtggccgaagcggcgcgtcgaccgaacatcaaagaagcgccgatcaagacggtggaacaacagggcctgcaggcgatcctgcgcgcacgggatcggctgatccaggagtgcatcgcccagtccaaccacctgcgcggcatcctgctggagttcggtatcgccatcccgcagggctttgcggcactgttgcgcacgctccccgaggtcctcgaggacggcgacaacgagctgccggacttctaccggcccacgctgcaccgcctgtaccaccggatgctcgaacttcgacaagacatcgacgcgatgaccaaggaagtcgggcagctggtgaagacccacgcggtctgcagccggtttacggcactcgaaggcgtcggcccgatcggtgcgatgtcgttgcatgccacgatcggctccggtgcggcgttcagcaaaggccgcgaggcgtctgcttatgttggtctcacgccacggcagtacagcagcggcggcaaggccaatatcgtgggcttgagcaaacgggtcggcaatcgcaaattgcgttccgtgctgatccagggtgcgttagcctacgtgtatcgcatgaaggaaccgcgctccgccaaggaccgctggttgaaggatctcgttgagcgagcgggaccgcgccgagctgcggtcgcgctggccaacaagaatgtacgaacggcctgggcgatggtgacccaaggaactgaataccaacgtcgagcgcaactggagatggctgcctagaacgtcctgcaaacagaaacctcgtatcagattaagatatctgctccggtcaaacctgcaccgctttgaggcctaaagagcccactgacccttagaggaaccggagtgcgcatacatagagggccaggagatagcgtctccaactaaaggccgaatatacaaacgcgtctgaaccctgatcgaaagtaactgtttgctagactgggggagtccatata

SEQ ID NO: 6569 - DNA, 1429 bp, unidentified
  source 1..1429: mol_type = unassigned DNA; note = element_a2bd322
  misc_feature 1..2: note = core
  misc_feature 3..336: note = LE
  misc_feature 337..1146: note = CDS
  misc_feature 1147..1429: note = RE
  misc_feature 1182..1382: note = bridgeRNA
agatggggtaatcggccggcccaacttgtggatagctgaagattttgggtgctgcgcttcaggctgatggtgaaacgaggtcggtggtgacggcctcaagcatcagaaggagaagcgcagcatggaccattttgccggactggacgtatcggtcaaggagacgagtgtctgcattgtagatggtgcgggcaggattgtgcgggaagtgaaggtagcgagcgagcctcaagctttgccgaaggttctgaccaggcctaccgcttcaagcggattggactggaagccggaccgttatcgcaatggctgttcagcgctcttgctgaagctgagttaccggtggtctgtgtcgaaacccggcacatgcaggcggtgctgaaggcgcagatcaacaagaccgaccgcaacgatgcgcgcggcatcgcccagatgatacgggcgggactttatcgcccggtgcatgtgaagacgctgcgcagtcaaaaactgcggatgctgctaacccatcgcaagcttctgcagtccaaggcgattgcaatcgagaacgatctacgcggtaccttacgtaacttcggcctcaaggtcggcatggtcggaacggcgagattcgaggcccgcatccaggagcttgtcgagaacttccccgacttgggggtactggtcgagccgctgcttgtcgtgcggcgggctctacgcgaacaaatcgttctcctgcaccgccgcttgctggccatcgtgcgagaggctgaggtgtgccggcgcctgatgacgacccccggtgtcggcccggtggtggcgctgacctatcgcgccaccgtcgacgtgcctgcccgtttccgaaaatccaagtcggtcggggcggtgtttgggctgacgtgctccaagtatcaatcgggcgagatcgattggagcggcagaatatcgcgctgcggcgacgagatgatgcgggtgatgctctacgaagctgcgcagagcatgctgcattcgaagagatggtcctggctcaaggcctgggctatgcaaatcgccaggcgccgcggaatgaagagggcgatcgtggccctggcgcgtcgattggccgtgatcatgcatcgcatctgggttgacggcaccgagttccgctggaccagggaagtggcagcagcgtgagggccctacaggatcaaatccgatagaagaaacatcgagatccaccgagcggtggaagggtgtccctcgcgggacgatggatgaggtgagttcgtatgtccgcttggacctaccgtcgttcgacggcaaggccgccacttagattgttccacctcgtcttcgaaccccatgatggaagggccttttgtgccgattccgaagagaagcgcgagcctgtgagcgacatcgacactgcagtggtgcaaagtctgaaagcgcttgaccccaaacggccgattagaga

SEQ ID NO: 6570 - DNA, 1393 bp, unidentified
  source 1..1393: mol_type = unassigned DNA; note = element_a2c58a2
  misc_feature 1..2: note = core
  misc_feature 3..129: note = LE
  misc_feature 130..1155: note = CDS
  misc_feature 1156..1393: note = RE
  misc_feature 1175..1355: note = bridgeRNA
acatggggtaatcgcgggagcgcgtcgccccgactgccgtcaagatctcggagggcggctattctccgatacgatggaaaacgggctcacgactgattgccgggcccaagcatcgaagggagaacagccatggaagaacatatcggccttgacgtgtcgatgaaagagaccgccgtttcgatccgccggggaggtcagcgcgtatggagggggaagtgcgtcaccgacccggccgcgattgtgacgctcattcgcaaacgggcaccgggcatgaggcgtgtcgtgttcgagacgggtccgctctctgtgtggctctatgacgcaatcagcgccagggggctgccggcgatctgcatcgacgcgcgtcatgccaaggctgcgctcgacatggcgcagaacaaaaccgatgcgaacgatgccgacggtctggcgcatcttgccgaggtcgggttctttcgcgcggtgcgtgtgaaggggttcgacagcatgctgacacgaacgctcgtcggggcacgtaaccagttgacccggattaccacccagctttcgaacccaatccgaggcgtcatgaagacattcggcttgctcgttcccgcgggcaagggaagcaaattcgagcggaatgtgcggaatcttctcgtggggcggacggaactcgctgctatcgttctgccgttgctggaggcttggcgcagcattcgcagccaagtggcggacctcggaacacagctcgtcgcgacggcacgccaaaaccccgactcgcgcctcctcatgtcgatccccggcatcggtgcggtgaccgcaaagtcctttgtcgccgccatcgaggaccccgccaacttcaggaactcacgatccgtcggggcctgggtcggcctgacaacgcgccgctaccagtctggcgaggtcgactatgatggccatatctctcggcgcggcgaccggcatctacgctggctgctctacgaagctgcggcgatcatcctgacccgcgtcagggccgaaagcagcctgcgcacctgggggctcgggctgcgcgaaaggctcggcttcaaacgcgccgccgtcgccgtggcccgaaaacaggcggtgatcatgcatgcaatgctcaagacgggcgcgatcttcgatccgcaagccggagccgcgacctgaagtccagcggacagcgttcgggttccgaacgtttgaggcgttcctgccgggacgtgggccgggcctttccgttgatggggttgcaccgtcgatcaggcagagtgcgtcatccacattgaaggcccctcccgcgaagccccaacatgcggcggctctgtgccgaccgcggagacaaccatgcatccgccaggcgcacattcaggcgaacaggacttggcgcaacaagagcgattagaca

SEQ ID NO: 6571 - DNA, 1197 bp, unidentified
  source 1..1197: mol_type = unassigned DNA; note = element_a2d679e
  misc_feature 1..2: note = core
  misc_feature 3..230: note = LE
  misc_feature 231..1004: note = CDS
  misc_feature 1005..1197: note = RE
  misc_feature 29..206: note = bridgeRNA
cttgtatggtttctctgcaggtccaaactggacttgtcagggtggagggggcaagcgcggcttccggccttacggcacggactgtgggagatttccgcccccacccttctcatcaaagcgccgatagagaatccatcggcggagcctgccgctcatgaccgacgaaatgttgcaagccagcgttcgatgagccctgacaagtgaaactaccttagcttggagggtgaaacatggcaaagcccattgagccaatcagggtcggtatcgatgtcagcaaggccgagctggtcattgcccgcagtgactcgaagagtctggagaagattgccaacacgccacgagccatcagccgctggctgaagacgctgccttgcgggacccagctagcgttcgaggccacaggcgcctatcaccgcaccttggcgtcgctggcgcatcagcttggctttgcgctctatctgctcgatggttatcggctcaaccggtatcgcgacggcattggcaaccgcgccaagaccgacccggctgatgcccggttgatcctgcgctacctgagcaaggaactgagcgagctcaagccctgggtgccacctcacgaggcgttctatcgcatccagagcctgctgcgacgccgggcttcgctcgtgcacacccgcgtggccctgacccagagcctgggcgatgtacctgagctcaagaacgcatccaggcgcctgagcaataacatcaaggacatcgaaagattgatcgagcgccgcctcaaagaggccatggctgaagtgggctggcggccggatacccagcgctgcaaggccattgaaggcatcggcgatctcacctcggtagcgctggctaacaccttccaccgaggcgaattcaagagcagtgacgccttcattgcctacctgggtatggacgtcagagtacgagactcaggcaagcaggttggccgccggaaacctgaccaagaaaggggacccagaactgcgacgcctcttgtataacgccgcgatgtcggctcgtcgaacaaaggcctgggctggccagtatgaaacctatctcggccagggactgaaaacgacccaggccttggttaagctcgccagaaagctggcccgaattgccttcgccttgatgaaaaatcaatcaatgtatcgaccgaaagtaccggttacctgttgtgctgcaccatagaat

SEQ ID NO: 6572 - DNA, 1753 bp, unidentified
  source 1..1753: mol_type = unassigned DNA; note = element_a2d772a
  misc_feature 1..2: note = core
  misc_feature 3..285: note = LE
  misc_feature 286..1554: note = CDS
  misc_feature 1555..1753: note = RE
ctggtatactgttatcgatgaaataaaaaacatttcatcgaggatggtgtacggttgtgccggttctgaaaacattgtaacatagaactatcatgcggggctgaaagtggcaaaattgcttgctaggtttccgatttggaagttaccaacagtgtagaccgtccgttcgcttcgtaaaagaatcaatgttttggttggttgggccggcacagccgctacccgtatcaaaaacgcgcctgttgcttttgcgaagaagcgaaactgtcccgggaaggagcgatgtatatgaattttggaccagtagtggggatcgatgtcagtaaacgtttcagcgacatgtgtattctgtcaccagacaatcagattttcgcacaaacaaagatttatcacgatagtacatctatgaagcgcgctgaggctttgttgaaaaaggctacagaagcctttggcggccgtccggctgttgtcatggaggccacgtcacactaccacttgattctgtttcagtttttctcggactgtggatatgacgtgcttgtggttaatcctctccagagcagttccatgaaggatttttctatacgaaagagaaaaacagacaaagtagacgcattgaagctggccatgctgtatcgcaccaaaaccctacgtccatcgcagatcccgcaatctgcgattcgtgctttacggttgctttgccgggaacgagtagagcttctgaatgatgtgactcggtataaaaaccgactcactgccttcttggatcagattttccctggatacgataaggtattctcggatgtgggcagcattacgtcgcgtgccgtcttgtcacactttccaactccggccatcttgctggcgtcagacgagtacgaacttgttgaagtaattgctactgccagcaaatcaggatacaagtttgccaaaaagaaggcagaagcgcttataaagacggcggaaacagccaaggttctggggattcacacttgtgcggatgaaagcatgattttgtctattattccagtgctgaacacattgtcagacagcgtgacgtacttggaacagtcgattggaaatttgttggcgcaagtaaaaaccgttcgtaaaaacgtagaattactgcaaaccatccctggtgtagggcctcactctgcctcacttattatggcagaaatcggcgatatctcgctcttcaaaaagccaaaacagctcgccgcttactttggattggacccctctgaacggcaatctggtacatttcgagggacaaagaacaaactgtcaaagagaggctctccatatgcgcgggccgctttgcatatggcagtagttaacgcagtgttcaagcacgccaacgctcctgcagctaatcctgttttatctggctactatgaaaataaatgtaaaaccaaaccggcaaaagttgcgcttgccgcatctatgcataaattgatctttattatcttcgccgttttgcgcgaccagaagcctttcgagttgagaactcctgaacaacacgcgagagaacagggttttattaaagttgcttaaacccacttgtgaattgtgggccctgaaatcaaagcagggtctattttgttatgcctaaattggcatggggcagcttttgctgcccttgttttctgcttagcgtaagtggctgacagagtcaagagcggcgaagccgtggtgcaaaccatctactcttgaccctgttggccacttatgctattgactttgcttaattggt

SEQ ID NO: 6573 - DNA, 1350 bp, unidentified
  source 1..1350: mol_type = unassigned DNA; note = element_a2dd961
  misc_feature 1: note = core
  misc_feature 2..232: note = LE
  misc_feature 233..1072: note = CDS
  misc_feature 1073..1350: note = RE
  misc_feature 1118..1348: note = bridgeRNA
taataagatggtcacccctccctttaagcggtacgctggtaggttatttttctttcaggagaggccatcatggaaaacgttgcgctcattggtatcgatctcggcaaacatcctttccgtattcattgtcaggacaagtcaggtaacgtacttctgtgcaaggagtttacgcgtacaaagctaatgtagtttctggcgatgtgtccgcccttgcttgttgttatggaagcctgtgccggtgctcattttatggtacaccgtgtcagcgacatcggctatgaagcaaaacttatctctgcaattcgtgcggctgtttgtcaaaagtaataagaatgactttgtcgacgccgaagcaatatgtgaggctgcatcccgaccatcaatgtcctttgcccagcacagaatagaaggtcagcaggtgatgcgagcgtggcatcgagtcagagaatctcttatcagaggcaaagtgaaaacgatcaaccaaatccacgcttttttactggaatttgtggtcagcctgccaatcggtgatgcagtaataaaacggctgtctctggtactggctgagcacgagttttccgaatatctgagccgttttttggtgaagttacatacccactatctttaccttgttgagcaaataacagcgctggagttagaattaaaccactcaatcaaagtcgatgatgcaactcaactcattatgacaatacccggagttgggtcgattacagccagtctgctcttatctcaactcggtgatggtaaacaattttcattcagcagggatttttcagcttccacaggacttgttccacggcaataccgcactggatgtaaatcgattctgctaggtatcagaaagcggggtgataaaaatctacgtcgtttactggttcagagtgcccgttcattcatgatgcgcttggaacatcagcaaggcagactggccgaatgggtcaggggacaactcagtaacagacactcgaatgttgtcgcctgcgctctggcaaacaaactggcacggatagcttgggcaatcacgactaatcacaatgaatatcaggcttgatatatgccgcgctgaatcaatagattgattgttaagtagttaaacagcagttacccatccggttttacgcagactgattattgatgacatgaacggcatatggactgatgagaaaccttatacaacaaatggctcactgaagccgaagggctttataggttcattaggtgcggaactcatcgtggcgcgggcatccttgcccatatagacgtcggatagatttaagcacgtccataattaataaaaatcagcgttgtaaaaatgtgggtggccataga

SEQ ID NO: 6574 - DNA, 1447 bp, unidentified
  source 1..1447: mol_type = unassigned DNA; note = element_a2e584e
  misc_feature 1..3: note = core
  misc_feature 4..84: note = LE
  misc_feature 85..1158: note = CDS
  misc_feature 1159..1447: note = RE
  misc_feature 1198..1399: note = bridgeRNA
agatggggtattcggcctgccgccgctttccccaaccctcggagaaggcgctgcgcttcaggttgatgatagacgtggtgtggattgaaacagccacagcatcagatggagaagcgcagcatgaagcactatgccggtctggacgtttcggtcaaagagacctcggtgtgcattgtcgacgaagcgggcgcgatctgctgcgaagggaaggtgccgagccatccggaggatctggcgcggttactcagggatacagcctggcggcttgtccgggtcggtctcgaggccgggcccttgtcgcaatggctgttcagtgggatggcggaagccggattgccggtggtctgcattgaaacccggcacacgaaggcgttcctcaaagcccaggtcaacaagagcgaccgcaatgacgcccgcggcatcgcccaaatgatgcgtgtgcagctattccggcccgtgcatgtgaagaccctgaccagccagaagcatcgcgccctgctgacggcccgtaagctgctgcaggagaaattcatcgccatcgagaacgacatccgcggcctgctgcgcaacttcgggctcaaggtcggcgtcgtcggcgtgctcaaattcgaccaacggatccgggagcttgtcgagggcttgcccgacctcgtcgaaatcatggaaccgctcctggcatccaggaaacagcttcgcgaggcgttcatggcactccaccgcaggctgctcgcgatcgttcgagatgacgccgtctgccggcggttgatgacgatacccggcgtcggtccggtcgtatcgctggcgttccgaagcaccatcgacagtccagcacggttcacgagctcaaaggctgtcggcccagccttggggttgacgcccgtgctgcatcaatcgggagagagccaccggctgggtcggatctcgctgtgcggggacgagatgatgcgtcacctgctctacgaagccgctcaggtcatgctgacgcgagcacagacatggtcgtggctgaaggcctgggcgatgagcatcgccaaacggcgcggtcagcaaaaggcgattgtcgcgctcgcccgccgactggcggtgatcatgcatcgcatgtggatggacggcacggagttccgctggaccagggagagcataccggcttctgtctgacgggtttccgaagcctcccgtcgcacgagaaggaaatcttgagttccgccagccggcggatcgatgtccctcgcgggacgatggatggggtgagttcgcctgggctcttgtgccggtcgcccgacacgtgatcaggacgcgcgtcagattgttccaccccatcttcctgatcccatgctgggagagccaaacggctgatcccgaagagaagcgcggatccgcgagcgacagcaaccgacggaacggcggatcgcctgaaagcgcttgacctcaaccggccgaatagaga

SEQ ID NO: 6575 - DNA, 1417 bp, unidentified
  source 1..1417: mol_type = unassigned DNA; note = element_a2ebacc
  misc_feature 1: note = core
  misc_feature 2..65: note = LE
  misc_feature 66..1103: note = CDS
  misc_feature 1104..1417: note = RE
  misc_feature 1192..1411: note = bridgeRNA
taatgagatggtccgccgccgggttagcataaacggctcggcagtttacatgaggaggatcatccatgaacatcgcatcgatcggcatcgatctgggcaagactacctttcacctggttgcattgggagagcggaacaagattctgctgcgcaaaaagttctcacgttcgcagttactggcctacaccgcaaacctgccggcttcgttaatcggactagaggcatgtgcgggagcacactttgtaggaaccgcgctgcgcgaacagggtcaccaggtgcggttgatcccagcgcagtttgtgaagccttaccggaagtcgaacaagaacgatttcctcgacgccgaagcgatcgccgaagccgtaaccaagcagaacatgcgctttgcgcagctcaagacgcaggagcaactcgactggcaggccatgcaccgggtgcgggatcgactggtgcagcgtcgcaccgcgctgattaatgagattcgcggattcttgctggaacgcggtatcactttcgcggcccagcctatccacctgcgcaagaacctgcccacggtcatcgaagacgccgaacaaaacctgagcccgcgcctgcgctggctgctggatcgcgtgtggcaggagtggaagcagatcgagaccgacatcgaggcgatcaccgaggagattgaacgcatcagtaatgaggatgcgcgctgccggcaactccgccagatcccagggttcggcccactggtctccaccgccactgtggcggctatcggcaacggggctgcttttcgtcgcgggcgcgacttcgcggcttgggttggggtcgtgccacggcaatactcgaccgggggcaagcagaagctctacggcatcagcaagcgcggcaacgtgtatctgcgccgcatgctgatccacggtgcccgctcggtattgtttcgcgtcaagtacgacaccggaggattcgggcagtgggtgcatcgactcgcccaacgtgctcccagcaataaggtcgtggtggcaattgcgaataaactggcgcgcatcgcctgggccgtgctgtccagcggcaaagactatcgccatcagccactactgcagccggcggcggcttgatggccgtggaaaagacgctacgcttggaaagcacaaaacgctttccactcttccaccgccacgacgacgggggttagaaagagttctaccaatctgctgaggagagaagaagacgaaacgaacagcccaatggcgtgccggaaaacctggtggcgaaaatgcgtccctggtggccgagggatttataaggaccgacacgtgcgtatcatcatcgagtgcccggagattactctccacttagaggccggatacatttacgcggactgtcccttcgttaacctcaaccctcttgcagtccggcggcggaccataca

SEQ ID NO: 6576 - DNA, 1507 bp, unidentified
  source 1..1507: mol_type = unassigned DNA; note = element_a2edc06
  misc_feature 1..2: note = core
  misc_feature 3..216: note = LE
  misc_feature 217..1485: note = CDS
  misc_feature 1486..1507: note = RE
  misc_feature 5..210: note = bridgeRNA
ctgatggctctaccttcccttcgcacggtggaacccggcagggagcgcttggtgcgcttgtcccttgaggactgaggtgagacggcgcccctgccgggccccggcgaaggcctgacgtccgggagggtgtggtcccgcgaggactggttcatcagcacgacgcagcgccttccccggccgccgagcatgctgtcggcggcggaaggagaacggaccgtgctgggaatcggcatcgactgggccgaagagttccacgatgttgccttcggaacggtggagaaaggagtgatcgaacagttccggatcgagcacggcccgagcggcgtcgccacgctgatcgagcgggcgctgcgcctggaaccggacccggccgagatccgggtggtgctcgagacccgacacgggttgctggtcgaggcgctgattgacgccggcttcgcggtggtcccggtcaaccccgacctggtcgcccgccgtcgcggtccggcacgcaagaaggacgacgccgaggacgcccgcatctgttgtctgctggcgctggaccgccacgccatgctcaagacgctgatcccccacggcgacatcggcggcgagctgcgcgcgatcggccgcgacgacgaacgcgccgcccgcgaccaacgccgactgctcaaccggctgcgcgcggacctgcagaccacctacccggccgcgctgaccctggccggtagtgatctcggggcgcccacggtgctgcggctgctcgagcgctggcccagccaacccgagctcgccgaagcctcccgcgaggacctcgtcgcgttcgcccgcgctggccgccacggctggcccgaccggttcgccgatcaggtcgaacacgccctcgctgttccgggtctgcccacccgcgactacctcgtgcgcgccaaagccgccggcatccggctggccgcggtgcagctgctcgcgctgcacgacgcccgccgcggctgggagaagcgcatggccgaactgctgctcggcgggccacgcagcggacgtgaccacaccgtgaaagaacccgacccggggaaggccttcccaggcggggacatctacctgagcttccccggcctgggagaccgcctcgcagctcgggtcgccggtgagatcggtgaacacatcgcacagttcgacacacccaacgcccagcagtgctacgccggccgcgccccggtcacccgccgctcgggcaagaacgatttcgtggtcgcccgccgcctggcccacaaccgctacctcggcgacgcggtgcaccagtgggcgttctgcagcctcacccgcagcggctgggcccgcgagttctacgacaccaagatcacaacagggaaaagccaccacgccgcgatccgcgcgttgggcaaccgctggctggagatcctctggcactgcctgaccaagggcgtcgcctacgacgagaacatccacgtcaccaaccgcaaccgcgccctcggacgcgccgcctgacccggtggttgacagagggtgt

SEQ ID NO: 6577 - DNA, 1415 bp, unidentified
  source 1..1415: mol_type = unassigned DNA; note = element_a2f7ac4
  misc_feature 1..2: note = core
  misc_feature 3..92: note = LE
  misc_feature 93..1127: note = CDS
  misc_feature 1128..1415: note = RE
  misc_feature 1175..1413: note = bridgeRNA
cgatgagatggtctcctcccctcctaatcggcgtcgcgatgcgccaggatagggaaggagaatttcctatcagaacagagtgggaggagaccatggcaaagcttacaacgattggcattgatctcgcaaagaacacctttgcactgtatgggctgggcccgagagggcaatgcggctggaagcgcaaagtgcggcgcaagcaactactggagcatctggtgcggttggagccctgcacggtcgccttggaggcgtgtggcagttctcactattgggctcggcaaatccgggacatgggacaccaggttgagcttttgcccccacaacacgtcaaagggtatctgcgaggccagaagaacgactacaacgacgcccaggccattgccgaggcgagcgaacacgggcgaatccgcccggtgccgatcaagggcgctgagcagcaggatgaacagatgctgcataagctgcgccggggtgtgagcacagagcgaactcggataagcaatcagttgcgaggactgttagccgagtatggtgtgatcattccccaaggaatagcggctttacgccgggagctaccgctcgctctgggggacgccgagaatggattgactgaccgggcccgacagttactgaatcgtcagtatgagcgatttctggcggttgaggaggaactggcctggtatgacgagcaggtgaagcgaatggcaaaacaggacgagacctgtcagcgcctgcaagcgataccgggtgttggtgaggtggtcgctagtctgctgaaaggctggatgggtaatggtcgccagtttcgccgaggcagagacgctgcggcggcgctgggactgattccccgtcaaaacagcacgggcggcaaagacatactgctggggatcagcaagcgaggtgatccgtatatgcgagcccagctggtccacggcgcccgagcggtggttgcccgggctgacaggaaggccgaccggttgagcctatggatccaacggctgaaggccgaacgagggttcaacaaggctacagtggcactggccaacaagttggtccgcattgcctgggtgattatcgcccgaggcgagtgttatcagccgtcggagcaacggttggctggatgagtgaatgaaatagacaaacgacacgaagtaaacgagtaaggaagttaccttccctcaggttgcgagggtcgaagcgattgatggcataacaggtcaaaccggcctgccgaaaacctgactaatccgagggcccgagaggccgttaggtcgataaggacggtaggcgcggatctttccatcaaggccagaggcgacaaagccgcctcatcaaacaggccggatatacggacgcaaacctgtccctgacatcgactgctgagaccttgcaaacggggaggagaccatata

SEQ ID NO: 6578 - DNA, 1393 bp, unidentified
  source 1..1393: mol_type = unassigned DNA; note = element_a2fad1e
  misc_feature 1..2: note = core
  misc_feature 3..85: note = LE
  misc_feature 86..1120: note = CDS
  misc_feature 1121..1393: note = RE
  misc_feature 1161..1379: note = bridgeRNA
gatgaggtggatggctcccgctcacggtatctaggtgccaaggtgtgaaggctgtcaggcgttcacaagcaaggagccacccgtcatgaagattactacgattggcctggatttggccaagagcatttttcaggttcacggcgttgatgcgatcggtgaggtcgttgtccgcaagtctctgcgacgggcgcaaatgctgccgttctttgccaagttgccttcgtgcctggtcgggatcgaggcgtgcggcacgtcgcatcactgggcgcgtgagctgatcaaactcggccatgaagtgcgcctgatgccgccggcttacgtcaaaccgtatgtgaagcgcgggaaatccgacgctgccgatgcggaagcggtttgcgaagcggtaaggcggccgacaatgcggtttgtgccggtgaagtcgcctaagcagcaggcggcgctgtcgatgcatcgcacgcgcgatctgctggtcaagcagcgtacgcagatagtcaacatgatccgaggcatgcttgctgagtttggcatcgacatcgccaagggactcggacgggcgctgctgatggcgcgacggatcgtcgatggtgaagcaccagacgtgccgattgaagccgcgaagatggtcggcatgctgtcacagcaggcgctcgacatcgacgctcggctttgtcaaatcgatcgcgatctgctcgtttggcaacgtggcaacgatgtcgcgcggcgtctcatgacgatccccggcatcgggccggtcggagcgacggcacttgccgcatcggtcaccgacccgcatcagttccgttcggggtggcagtttgccgcctggttgggactgacgccacttcagaagtcgagcggcggcaaagagcggctcggccgcatcactaagatgggcgacaagtacctgcgtaagctgctcattgtcggcatgacctcacttgtgcgccgtgcaaagtccagtcccgagaagattgatccacggttagccaatctactcgcgcgaaagcccgtgcgggtcgcgaccgtcgcgatggcaaacaagacagcacgcaccatctgggcaatcatgacacgcggcgaaatctatcgtgccggccaccggccagtactggcggcataagtcaggcaatgcacgaatagctgaagaggagatcagcttcacgaggttgcgagagcgatgcgacgtgatggcaaaccggtcagaccggaaacagggacaacccactcgatgtccaaggcatcatagcctgcacaacagaatgggaccttgttcgcggactccatcagggccagcagtcccaatcgactgcatcaacaggccggacagaagactgcatccgaccaatgccaccgcgccaatttatctcttgcaatgcgggagccatccacagag

SEQ ID NO: 6579 - DNA, 1438 bp, unidentified
  source 1..1438: mol_type = unassigned DNA; note = element_a31af5a
  misc_feature 1: note = core
  misc_feature 2..95: note = LE
  misc_feature 96..1130: note = CDS
  misc_feature 1131..1438: note = RE
  misc_feature 1199..1433: note = bridgeRNA
taatggaatggacgcccacttcccaatacggcatcaaagtgccaaagtagtggctgcgcttaagcaatcactaaacatggaaaggggcatccgaaatgaagattacgacaattggcattgatttggcaaagaatatttttcagattcatggtgtagaccagtatggcaaaactcaggtgcgcaagcaactcaagcgtgccgagatgtccccttacttcgccaacctgcccgcgtgccttgtcggcatggaagcctgcggcagcgcacattactgggcaagaaagcttcaaggctacggccacaccgtcaaactcatggcgccgcaattcgtcaaaccttatgtcaaaaccaacaagaatgacatggccgatgccgaagcgatctgtgaagcggttgcgagaccgaacatgcgctttgtccccatcaagaacgttgagcagcaagccatcctctctgtgcaccgggcacgacagggttttgttaaagcccgcaccgcacaggccaaccagatacgcggcttgctctccgagtttggcatcgtcatcccgcagggtatccactccgtgatgaaacagattccggacatcctggaagatggtgagaacgatttgccgggcaccttccgccatctgatttcacgtttggcagacaacctgaaagaaatggatcaccaggtagacgagctggaaaaacagatcaacctgtggcacaggcagaatgaggccagccgtaagctgggcgatatacctggcatcggcccgatcacggccagtgcgattgtggcaaccgtaggcaaggcacaagagtttaagaatggccgtcaactcgcggcgtggatgggtttggtaccgagacagaaatccagcggtggcaaacagaatttgctgggaatcagcaagcgtggcgatacgtatctgcgcaccttgatgatccacggcgcgcgctctgtcattcgctatgccgaaagcaaagcagcgccggatagctggctgaggaagctgatggacaggcgcaataagaacatcgcagcggtgggcttggccaacaagaatgcccgggtcatctgggcgctgttggcacatgacagaattttccaccctgattacacaccggcagcggccgctgtgtaatcagggcggttgaataaaaccagttaaacagtttttaacagtagcaagttataaccgagttgtagacgttgtactaccgattgcataggcaatcatgaaatgatggcgagacaggtcagaccgtgagtgagtaaatccgattagcttcacgagcaaaaagctcgataacgtgatgggtactcactcagcgtattccatcagggacagaagcattgcgcttcaatcaaagtccggatgtatggctgcaatctttacctattctcaatattgtgaattgaacgcttggcaaaaaagtgggcgtccatgta

SEQ ID NO: 6580 - DNA, 1594 bp, unidentified
  source 1..1594: mol_type = unassigned DNA; note = element_a31eeef
  misc_feature 1..2: note = core
  misc_feature 3..171: note = LE
  misc_feature 172..1473: note = CDS
  misc_feature 1474..1594: note = RE
ctcgtatgataaagttaggttttttaggaaagggatttacctataaacccgtgagtatctagttatatgagatactgatatttgtagatagagtggtaccggtcacccccttgaatcttgtattcggttgaaagattggtacctctgtctaataagtaatttacgaatgagttggatgttgatggctttcttagtattcttcgtatctcttacgaggtagtagcacttattagttcagaggagcacaaatactatctaatacttatcaaaataggagtgtatacgatgttgtatttaggtattgatattgccaaacataagcattatgcatctattatggattccaatgggaatcctgtggaaaaaccattcccagtctataatcataaaaaaggaggtcaggcattattaacaaaaatatatcaacacattgatgctccaactgaaattaaaattggaatggaagctactggacattactggttagcgttatattcctttttgttagaccatgggttctcagtgattgtactaaacccaattcaaacgaacgcttggcggaaaggaacagagattagaaaaagaaaaacagatgccattgatgcgacaatgatcgctgatattattaggtttggtaactttttagaaacgcctcttgtagatgaaaagatgtttgccctcaaacaactcagtcgctttcgtaattctctcgtaagtagtatgggggatttaaaacgtaaatcgcttgtcgtattagatcaaacatttcctgaataccaaaagatgttctcagacgttttcggtaaaacttccacacaacttttactggaatacgcttctcctagtgactatgagcaagtatctattgacgatttaacccaaataatcgaacaagcaagtcgtaaccgactaggaaaagaaaaagcgcatcaaatcattgaatctgcctctcattcatttggtattactttcggtaaagaagcattttcatttcagctaaaaatgttaatggagcaaatacactttattgagattcaactcaaacaatgtgaagaacaaatggaccaactccttattgaattggatactccaataactacagtacctggcattgggcctattttaggtgccactatacttggcgaaattggagatataaagcgatttgataaaccttcaaagctcgtcgcttatgcgggcatcgatgcctctgtatcccaatcgggccaatataactcgactagcatgtcaatatcaaagcgtggctcttcccatctacgtagagcattatttcaagctgccgttactggttataaatatgatccaatcttgaaagccttttatgaaaagaaaaaacagcaaggaaaacattattatgtttgtatctgtgccgtagcaagaaaattgtgccatatcatttacgctattttaaaaaacaataaaccttatcaagtccctatccatacgtcctaaaaatcaagttactatcttgattttttttagccttttttcaaggcttatttggtgtgctcttttttcaacgatcacttccatcgttgattctgtttttcatccttgacttttcatagttggt

SEQ ID NO: 6581 - DNA, 1205 bp, unidentified
  source 1..1205: mol_type = unassigned DNA; note = element_a3210b5
  misc_feature 1: note = core
  misc_feature 2..213: note = LE
  misc_feature 214..1179: note = CDS
  misc_feature 1180..1205: note = RE
  misc_feature 34..203: note = bridgeRNA
tcttaagtttgtaatctattaaattagagtattaatcagaaagaacaaaagagagaaataagattagtatacacggtgaagctttagacttcgacaacattggtaatcctctctcttttcctactaagatttcgttcagttctgtgagactttagatctcgatttcaagttgttgaaacgtcagtagttcgttctttccaaatttcaattcttatgaataaatataaagaaatttatggaatcgacatcagtaaagatgtctttgatgtttatggttcagagactggtcataaccagtttaaaaatgatgagcaaggatttaaaagttttctaaagcacttgccagaggggtctatagtagttatggaagctacaggttattatcattacagattagcccaatttttatacaaatcaggtgtgtctgtttcggtagtaaatccgttgtcagtaaaacgttttattcagatgaagctagctaaggtaaagacagataagagtgatgctaaagcaatatgcgaatatggtatggtgaatgaagttccgctttacacagccttaacagatgttcaaagtgagtgtttacaattgtttagattgttagataattatttaaagaaacgaacccaaaccaagaataagaagcatggcgaggaagttttaggtattccgtcaaagtatgtttataagtcgttacaacgggatttaaagcacttggataaagagataaaaggcatagacgcacgattgttagagttagtaaaacaagaccaacaagctcaattaaccttattaaaaagcataccagggatgggtgtaaaaaccgcattgtttttaatagtagtaaccgatgggtttaagaagtttgaaacagcatcacaattatgtagttatgtaggcatcacgccaaccatacgagaatctggaagcagtgtaagaggtaggagcaggattagtaaagtgggtaacaaaaaactgcgaaatttactgtttttatgttctttttcagcatgcaagcacaataaggcttgtagagagatttatgaacgaatagtggctaaaggaaagagtaaaaaattagcattaatagcagtatcaaataagttgctaaaacaagcttttgccattgcgaaaagtggacgaccttatgatgaaaactttgtttcaaaattagcttaaaattgcttgttttttaactcagttct

SEQ ID NO: 6582 - DNA, 1427 bp, unidentified
  source 1..1427: mol_type = unassigned DNA; note = element_a322813
  misc_feature 1..2: note = core
  misc_feature 3..169: note = LE
  misc_feature 170..1330: note = CDS
  misc_feature 1331..1427: note = RE
cttgtataatgattttatccataactccattatggcaatgatcagggaatactgtgagttctttgtgggtcaatccaccgtatatagtatgtatatcccttttcatattcaagtataaaaataatgtatattgtgcaaatgcaccgataataagcaaggctgttggaatatggaaagggagagtgtgaactggtctggaggttatatgatatatgttggaatagatatagctaaaaagaagtttgattattgcattataaacagtgaaatgaatttaataaaaaggggaatactgataaacaataactatggcttcagtgaatttctaaagataataaagaattatagaaatataaaaataggaatggaatcaacaagtatataccatgtgaatttatacaattatttaatagaaaacagtcgcagtgcaataatattaaactctctggagacaaaattattgaagagttcaaggataaggaagaataagacagataaaatagatgcagaagcaatagcaaaatatattatcatacgtaaaaacaatataattaccatggataaaaatactgagaatacttacacaaatcttaaggaatacgtatacacatacataagaataaacaggaaaataacaatggcaaagaaccagttaatagtagatatggatctattataccccggattaaccgcggtggccaatgttaattccaaatatttcatggaaataataagcaacatagatcaaatcattgaaaataattataaaataaaatatatcagtgacagtaaacacagtgaaataagaaatatcttaataaacagcaatactaataatgcagtcaaatacgacatagatataaacattgaaacactggaattattgaacaagcagttaatgaaaacaaaaaatatcatagaagatgagtataatagtatggattccaaaataaagacaattccaggaatagggactataacaggttctataatattgtcatctataggagacataaacaggtttgattctattataaagctaagggcctattcaggtatggatccagtggttaaacaatctggggattataatattacatcaaaaatatcaaaaaggggaaacccgttaataaggtatgcactgtatttatcaactgtatctgctattagatttaatccagtaattaaaagatattacacaaggaagaagaatgatggcatgaaaggaaataagctattaattgcgtgttccaacaaattactgaatatcatatactccgtattgaagaataataaggattttgaagatcctctgaataatataaattaaaaaataattaaagaaaatacgtatttttgaatatcaatagcgtaagctatagaagttatgaatatttatatgtaaaaagtaaaattaatatagtata

SEQ ID NO: 6583 - DNA, 1629 bp, unidentified
  source 1..1629: mol_type = unassigned DNA; note = element_a32cda1
  misc_feature 1..3: note = core
  misc_feature 4..262: note = LE
  misc_feature 263..1183: note = CDS
  misc_feature 1184..1629: note = RE
  misc_feature 8..234: note = bridgeRNA
gttcgtattataaggttagccagaatgctaaatatttctggttgaccattttttatatggctttattatatcagtagccagggtagaacgtaactgctcgtggggctttgatcccgtcaactaaaccgttcgccccctacttgtagaaacatgattgaggctggttgggacatggatctcgtataacaagcgaagctgtgacactgcatggaggaattaggggttactggcaaattactagtttaggaggaggagatttagaatgaatccagtcgttggtctggatatttcaaaaggggaaagtcaagtacaagcatttttagaaaaaggcaaaccgtatcgtaagagttttaaaatttcacatactgttgatggtcttatttcacttgtgctgtttcttgaggatgtgaaaagagagtcaggaaagaagccatcaataattttagaagctacggggcattatcaaacaccagtagttcattacttggaagaacgaggttatttattaattatcatcaatccgttgatttcctataaggctagaggttcaagcttaagaaaagtaaagacagatgccattgatgcttatcttctctgtgagttgttttataaggaggaattagagccttataaaaagcgtggagtccagttattaaaccttcgcaaccttactaggcaacatgaaaatataacgggagtgatgattcaaacaaagcttcaatttcaggcagtgcttgaacaagtgtttcccgaatataaaggcgtttttggagatttatattcggtggtgtcacttttaactctttcggagttcccctcttctgaggatattttgaatgcaagcgaagaagtaattacagacaagataaatggtctttgtaagagtcgatcaagcaggtgggctaaggataaagcgattcaacttaagggtgcggctgaacataatccttttgagaaaacagtttatcagagtcatattttaagcctcggtatgtatattaaaatgattcttcaatacaaagagcatctagcaaagttagagtccgagatagatgccctcgctaaagatattgaagaatataatataatcaaatctatccctggtattggagaaaaaatcgctgcaacgattatttcagagattggagagatagatcgatttaatgaccctaaaaagctttagcattcgctggagttgatcctagtgtctttgaatctggtatgttttctgccacccaaaaccgaattactaaaagaggatctagcagacttagacacgccttgtatatggctgttcgttgtgcgattcgtgattgtcgtaaaaagaaaacaaccgatgaaatcataccccgcaataaaagaatgcgggaattttatgataagaaacgtaatgaaggaaagccttttaaagtagctgttattgcctgtgtaaataaactcttacattggatatttgcccttttaagagatagaactactttccaagatatagcttaaaaactaaatctaactaaataacacaaaaccttccaaaatgagactcacggaaggttatttggcatgtacttttttagtatagcacgagatattttaagtttttattgaaaaatattgacaaactattagctg

SEQ ID NO: 6584 - DNA, 1096 bp, unidentified
  source 1..1096: mol_type = unassigned DNA; note = element_a32fb7a
  misc_feature 1..2: note = core
  misc_feature 3..292: note = LE
  misc_feature 293..1069: note = CDS
  misc_feature 1070..1096: note = RE
  misc_feature 12..187: note = bridgeRNA
cttgtatctttcaattgccagccgatttgaagtcggcgaggttaaggacggaggttagcccgctctccactagggtcaatgaacccgtaaatgagcaaggcgcggcctccgtccgattgtccgaatgcccgaaaagtcgcaagggccgattcagcccgcatctgcaaggatgggtcatggacgaacctcgctgcgtcacaacttgcgtcggtatcgatgtgtccaaggttcgtctggatgtgcatttgcgcccgtcggacgagtcgaacgtctcgcggcgctcgacgtgtcaatgatcgtgctggaagccaccggcggctttgaaacgacggtcgctgccgcgctggccagcgcgggtctaccgctctctgtcgtcaatccgcgccagatccgggactttgcacgcgccctcggcaggctcgccaagacagacgccattgacgcgaaggtgatcgcgctctttgccgagcgcatgaaaccagaggcgcggccaatctcctcgccgcaggcccaaaaactgggtgaacttgtcgccagacggcgccaagtcgtcgagatgatcggtatggaagccaaccgaaaacggcgcgtcgcggacaagcgtctgatcaagaaaatcgaacgccatatcggcttcctggaaaaggaactcgccgatatcgatgccgatatcgatgctgctgtgcgggccacgccagcctggcgcgaaaccgaggatttgctgacttccgtccctggcgttggacccgtcatagcgagaacgatcatcgctgatctgcctgaactgggctcgcttgatcgccgcaaactcgcggcgctagtcggtgtcgcgcccttcaatcgcgactccggcgcatggcgcggcaaacgcatgatcagcggaggacgaaccggcgttcgcaacgtcatgtacatggccgccctggtcgccatccgatggaaccccaccatcaaagccacttacgaaagacttctaaaaaacggaaagccaaaaaaactcgccatagtcgcttgcatccgacaactcttgaccatcttaaacgcgattatccggaccaaattaaaatagcaaaacgcttgacaggaaagacagtcg

SEQ ID NO: 6585 - DNA, 1453 bp, unidentified
  source 1..1453: mol_type = unassigned DNA; note = element_a33ebf2
  misc_feature 1..2: note = core
  misc_feature 3..71: note = LE
  misc_feature 72..1109: note = CDS
  misc_feature 1110..1453: note = RE
  misc_feature 1224..1444: note = bridgeRNA
taatggcatggtccgccgcttttacccagccgggagctggagggtataaggagcgtagaaggaggagtgccatggaactgttcacgctgggtattgatttgggaaagacaacatttcatttagtaggaatgaatcaacgcggagacgttgtggtgcggaagcgtttctcccgcacacagttgttgtgcttcaccgcgaacctgcaagtggagttgattggcatggaagcttgtggcgggtcacattttctgggccgagccttgcgtgagcaagggcacgaagtgcggctgatcccagcccagtatgtgaagccttatgtaaagacgaacaagagtgactacatcgacgcggaagcgattgccgaagccgtgggacggccgagaatgcgcttcgttcccatcaagagtgacgatcagctagatctgcagtccttgcatcgggtacgcgaacggtgggtcatgcgccgcacagcggtcgtcaaccagattcggggactactgctggagcgcggcatcaccctgcgcaagggacgccgttatgtggacgcggcgctgcccgggatccttgccgataccgactccaagctgtctggctcagtgcgtgtgctgctgatggaactcaagctggaactggagcaacttgccgataagatcgagcggtccgatcagtctatcgagcacatcgcccgggagaacgaagcatgtcaacgtctagttgctatgcctggaatcggcccagtaacagcaacggcgttgattgcgacgatcggcaacggatcagctttccgcaaaggtcgcgatttcgccgcctggctgggtgtagttccggaagagcactcgactggaggcaagcagacactctggcagattcccttgcgcggcaaccagtatctacgcagactttttgtacagtgcgccagggcggtgatgcagcacaagaccaagcagtcatcgggattgagtgcatggctggtgcaactcacggcacgaacgcatcacaacatcgccattgttgcactggcgaataagctggcacgcatggcctgggcagtactgacgaagaatgaggtctatcggccaccgattttagtcgatgctattgctggctgactggcctgcagatgacgcctggacgaagaccaggcttggaaatcgctcgacgcgattcccacatccgcagaccagcgacgactacggggcgaatgttttaaaagatttatcttttcctgccaggtctgctggcgaagaaggagatggcaccacggtctaaccgtcgctctggaaacctgctttgagtaaaggtctttgaagaccgcgaagttaattaggaacagagcgaagcgcattccatcctggcccggagtgactgattgctccaacaaggccgtatacatacgcgcagaccctgtttgccacacttcaacttcgcttgcgacaaagcggcggaccataca

SEQ ID NO: 6586 - DNA, 1327 bp, unidentified
  source 1..1327: mol_type = unassigned DNA; note = element_a343620
  misc_feature 1..2: note = core
  misc_feature 3..284: note = LE
  misc_feature 285..1073: note = CDS
  misc_feature 1074..1327: note = RE
  misc_feature 1093..1325: note = bridgeRNA
ttaatgagatggtcactccctccttcctggaactatgctgaggacaggctttcattcggagaattatcatggaaaacattgcgcgtattggtatcgctctgggtaaaaactcttttcatattcattgtcaggatcatcgcggaaaggctgtttaccgtaaaaatttacccggccaaagttgagcgaatttttagcgacatgtcctgcaaaaaccattgcaatggaagcccgtggtggttctcactttatggcccgtaagctggaagaattggggaatttcccaaatgctgatatcaccacaatttgtccgcccattcgttaaaagcaacaaaaacgatttcgtcgatgccgaggccatctgtgaagcggcgtcgcgtccatcaatgcgtttcgtacagcccctaacggaatctcagcaggcaatgcgggctcttcaccgtgtccgtgaatctctggttcaggataaggtaaaaacaaccaatcagatgcatgcttttttgctggaatttggtatcagcgttccacgaggttctgcagttattagtcggctgagcactattcttgaggacaataatttacctctttatctcagccagttattactgaaactacaacaacattatcactatcttgttgagcaaattaaagagctggaattccagttgaaacgaaagctggacgaagatgaagtaggtcagcgtttactgagcattccctgtgtcggaacgctaactgcaagcactatttcaactgagattggcgacgggaagcagtatgccagtagccgtgactttgctgccgcaacagggttggtacctcgacaatacagcacgggcgggcgaacaacattgttgggcatcagcaagcggggcaacaagaagatacgaaccttgctggtccagtgcgccagagtatttatacaaaaactggaacaccagtcaggcaggttggccaactgggtccgggagttactgtgccggaaaagtaactttgtagtgacctgcgctctggcaaacaagctggccagaatagcctgggcactgacaacacgacagcagacttacgaagcataacagcaaatacacctgtttaaacaatcactcatctggttttgcggatacggattattgatgatatgaacggctcaccggcctgttgaggaacctgtaaaacggaaaggctcactgaagccgtgaaatttctggaggttcatcaggcgcggaactcatcggggcgcgggaataaaatcccattcagacgccggatagattcaagcaagcccacttatcgtcaaaatcggtgttgcaaaaacgggagtgaccataga

SEQ ID NO: 6587 - DNA, 1276 bp, unidentified
  source 1..1276: mol_type = unassigned DNA; note = element_a345986
  misc_feature 1..2: note = core
  misc_feature 3..195: note = LE
  misc_feature 196..1176: note = CDS
  misc_feature 1177..1276: note = RE
  misc_feature 22..201: note = bridgeRNA
cttgtattatccttcccgtgcagagagaaccggccagttctctctgccatgcagtccacatgccgtacccggcctcaggttcataacctgtgttgtagatttatgcagtgggctgccgttctccacaagtgacaaaccggacagtatcatggaccggttttcccggtaatccgcattcacaaggttggtttcactatggaacaggaacttcattttatcggtatcgacgtctctaaagctaagctggatgtcgatgtgctgcggcccgatggccgtcaccgcagtaaaaaatttgctaacaccctgaagggccacgatgagctgctccgctggctcaacagccatcaggtcgcgcctgcccacatctgtatggaagccaccagcatctatatggaagacgttgccgcgcatctctgcgatgccggattcacagtctccgtcatcaaccctgctctcggtaaagccttcgcgcagagcgaaggactgcgcagtaaaaccgatgccgtcgatgcccggatgctggcggagttctgtcgtcagaaacgcccggcagcctgggaagccccgcatccggtggagcggtcgttacgggcgctggtgctgcggcatcagtcgctgacggacatgcacacgcaggagctgaacagactggaaaccgcgcgcgaggtgcagcgcccgagtatcgacgcccatctgctgtggcttggtaccgaaattaagcgcatcgaaaagcagataaaggagctgacggatgatgacccggatatgaaacaccgcaggaaactgctggaaagtatcccgggtatcggcgaaaaaacgtcggccgtgctgcttgcttatatggggctgaaggacaggttcgggaaagcgcgacagttcgcggccttcgccggtctgacgccccggcagcatgagtcgggcagcagcgtgaggggaatgagccggatgagcaaggcaggtcatgcctcgctgcgcagggcgctgtatatgccagcgatggtggcggtgagtaaaaccgaatggggacgggcgttccgtgaccgtctgtccgggaatggaaagaaagggaaagtgataataggtgcgatgatgcgcaagctggcacaggtggcgtatggcgtgctgaagtcgggtgagccgttcgatgtgagcagacacctgaccgtaacagcgtaataaaaagagcgggagataacagcgcctgacggcgctggggttgctgtgcctgcaatccggaataccggaacattaaaatgcttgcaggcgataacagtat

SEQ ID NO: 6588 - DNA, 1414 bp, unidentified
  source 1..1414: mol_type = unassigned DNA; note = element_a349804
  misc_feature 1: note = core
  misc_feature 2..62: note = LE
  misc_feature 63..1097: note = CDS
  misc_feature 1098..1414: note = RE
  misc_feature 1181..1405: note = bridgeRNA
taatgagatggtccgccgccgagtaggatgactcggcagttcacatcaggaggatcatcgcaatgcatatcgcttcggttggcatcgatctgggcaagaacacctttcacctggttgcattaggagagcgcagcaagattctgcttcgcaagaagttctcgcgtgcgcaacttctggcttacaccgccaacctgccatcctctttaatcggtctggaggcaggtgcgggagcgcatggtttggcatctgtgctgcgcgagcagggacaccaagtgcgactgatcccggcgcagtttgtgaagccttatcggaaatccaacaagaacgacttcctggatgccgaagcgatagctgaggcggttaccaaggagaatatgcgcttcgtgccgatcaagaccgaggagcagctcgatgtgcaagccatgcatagggtcagagatcggctggtacagcgccgcaccgccctgatcaacgagattcgcggattcctgctggaacgcggcatcaccttcgcggtgcggccgatccatcttcgcaagaacctgctcgcggtcatcgaagatgccgagcagaacctgagttcgcgtttacgctggctcctcgaacgcttgtggctggaatggaagcagctggagagcgacatcaaaaccatcacagaggagatcgagcgcatcgccaacgagcatgcactttgccggcggctacagcagattcccggattcggccccctggtctctaccgcgactgtggccgccatcggtaatggagctgcctttcgccgcgggcgtgactttgccgcctgggttggcgtggtgccacggcaatactccaccggaggcaaacagaaactgctcggcatcagcaagcgcggcaacatctatttgcgtcgcatgttgatccacggtgctcgcgcagtgctgtttcgcgtcaagtacgacaccggaggattcgggcaatgggttcaccggctgatgcagcgtgcaccgcgcaacaaagtcgtggtcgcaatcgccaacaaactggctcgcatggcctgggcggtactgtccagtggcaaagattatcagcaccagggtttgcagatgaacgcagcctaattggccgtggaaaagacgctgggcttggaaagcacaaaccgctttccacttttccactgccacttcggctgactagagagagtgccaatcaagttctgcggaggagagaagacgacgaaacaacagtcccacggcgtgccggaaaacctgctggtgataatgcgtccctagtgaccgtgagatttatcaggaccagcacgcgcggatcatcatcgaggcccggagagcgactctccaccaagaggccggatacatttacgcagactcgttgcttcgctcaacttcaaacctcttgcagtcaggcggcggaccataca

SEQ ID NO: 6589 - DNA, 1409 bp, unidentified
  source 1..1409: mol_type = unassigned DNA; note = element_a34bc12
  misc_feature 1: note = core
  misc_feature 2..90: note = LE
  misc_feature 91..1125: note = CDS
  misc_feature 1126..1409: note = RE
  misc_feature 1179..1401: note = bridgeRNA
caatgggatggacgctcccacctttaacggcatcgtagtgtgccaaagtggagatgcgaatcaaccacttgaacagaaggagcgtccgatatgaaggttacaactgttggcatcgatctggcaaagaatctcttccaggtccacggggtaaatgagttcggtaaagtggtcatcaagaagcaaatccggcgtgaccaattggcagagttctttgtaaatcttccggcatgcctgatcggcatggaggcctgtggtggcgctcatcattgggcacgcaagcttcaagggtttggccacactgtcaagttgatggcaccgcagtttgttaaaccgtatgtgaagacaaacaagaacgatgcggcagatgccgaagctatctgcgaggccgtgacccggcccaacatgcggtttgtgccgatcaagaatgttgaacagcaagcagtcttggcattgcaccgggtccggcaaggctttgtccgagcgcgcacggcacaggccaaccaaatacggggcttgatggctgaattcgggttgatcattccacagggtattggctatgtcacagcccgcgcgcccgcgctaattgaagatgccagtaatgatctgccaggtgcatttcggattctcgtgcaaaggctgctggatcacctgaaagagctcgaccgtcaggtcgatgagctggagtcacaaatcgtcaaatggcaccgccaaagtgatgccagtagcaaactggcacatgtaccaggcatcgggcctatcactgccagcgcgctggtggcgtcgttgggagatgcgaagaactttgacggcgggcgtcaggtcgcagcttggctgggtctggtgccaaagcagcattccagtggaggcaaacaaacactcctgagcatcagcaaacgtggtgacacctatctgcgcactctattgattcacggggcacgctcggtgatttacagggcacaacaaaagcccgacgcctgcacttggatcaatggagtggtcagccgacgaaacagaaatgtggcagccgtagcgttggccaacaaaaatgcgcgcatcgtatgggcattgttggcacacgatcgagagttccggtctgactacacgaccaccaatgtggccctgtagtcagatcggttgtttgcaaagatagagaagaaccaagcagggagatttgaaccaccgattgctcaggcaatcatgaagtgatggcaagataggtcagaccgtggttgacaaagcccgtgccggacgaggcacctagagtgcgtgtatgcgatcgaggcgtcgaccagcgaatcccatcagggacagtgacccaaagtcacaacgaaagtccgaatgtacgggtgcaatctttaccttcgatccgtcatgaattgaaagcttggcaaaccgggagcgtccatgta

SEQ ID NO: 6590 - DNA, 1101 bp, unidentified
  source 1..1101: mol_type = unassigned DNA; note = element_a3506ff
  misc_feature 1..2: note = core
  misc_feature 3..308: note = LE
  misc_feature 309..1091: note = CDS
  misc_feature 1092..1101: note = RE
  misc_feature 1..162: note = bridgeRNA
cctgtgtaattgtgctgtgtcatattgggtgcgggcgggagaccgttgggccccaggtttaaagaccgagagccggcacgggtccccgcccgctttgacaaacacctgaacagttgcgcgaggccgctcgagacggacctcggatcacagggacaggcccatgaccctatcaccgacctggattggaatcgacgtttcgaaagcctggctggatatcgcctcttccggcggggagggcgtgcagcggattgctaacacgatggacgccatcgccgcattcgccgccacgctggagcgggagggctctcgtggtgctggaggcgagcggggtttacgacaagagcttgcgcgccggactggcgctggccgggatcggccatgtccgggtcaatccgcagcgggcccgtgactttgcgcgggcgagcggccggctcgccaagaccgatgcgctcgatgcggccatgcttgccgaaatgggccgggccctgcgcctcgtggccgacccgctgcccgaggccggacgcgagcggctcggcctgctcagccgccgccgcgaccagttggtggccatgcgcacccaggaaaagcagcgccggatcgagataaccgattccttcatcggcgccgacctggaccggcacatggccggcctcaaccaggccatcgccgccatcgaggtcgaaatccagaaccagatcggcagcgatgccgccctggcacaggaccaggccctgatccgctcggtgcccggcatcggcccggtcaccgcctctgtcctggccgccctgatgcccgaactgggccgacgctcgggcaagcagatcgccaccctggccgggttggccccgctcaacaacgatagcggcctacggcgcggacagcgctccatccgcgggggccgccgccgcgtccgccaggccctctacatggccgccgttgcatccttgcgaacacaatcgcctctcaacgccttctaccaccgtctgcgccaggccggaaaaccacccaagcccgccctcgtcgccctcgccagaaagctcctcgtcaccatcaacgccatcatgaaaacccgaacaagcttcgcaacctgaattacagttg

SEQ ID NO: 6591 - DNA, 1608 bp, unidentified
  source 1..1608: mol_type = unassigned DNA; note = element_a353085
  misc_feature 1..3: note = core
  misc_feature 4..181: note = LE
  misc_feature 182..1480: note = CDS
  misc_feature 1481..1608: note = RE
tttggtacaatataaccatagcttgcagccggtaccaacggcagaatttacaagctatgcttgtttttagtataatgagaaggtaatggtctgacggaaactccttagaacttagcgttcgctttagaaagtgtcagccgccttcttgttatacagattcgattaagcaggttgtcccggtatgaaaaccgcgttcgtgtcactaaccaaaatgaatcgtaataagctttgtgcggaaacattacacatcctacagaaagaaggaatgtctatgattagcgtcggtattgatgtatccaaaggtaaaagcacggtttgcattatgaaaccttacggcgaagtattaaagccgccgtttgatatgcttcactctatggaagatatacttaatctcatcaagctcattaaatcctacgatgaggaggttcgcgtcatcttggaagataccggacactaccacttacctgtagtaacactgcttgtagaaaacggtatctttgtctgccgcgtaaatgccttgcgtatgaaaaaattctgttctcaaagtattcgccgcgcaaaaacggataaaattgactctgctcatatcgcagtttttggtcttacatactgggaggaattatctcccgtactgccaaccgatgatgtttatctcgaattaaaattactcgcacggcaatattatcaaactgtttctatccttgtaaaagcgaaagtaaacctcagcaatttgctcgaccaagttatgcccgacattcaaaccgtcctgcaagacaatccttgccatcatagactcacagattttgtcgtgcgttactaccattacgggcatatccttgaaatgggtaaaagtaaattcacttccgattattgcaaatgggcaaaaaaacaaggataccgtatgtgcgaacgctcagcagagaaaatctttgctttggttcaaaacggtatccccgcgcttcctaactctcccgtcactaaggttgtagttgtggaagctgtacgaatgcttcaccaaatcgaagcatctcgtgataccattttagcacgaatgcaggactttgccaagaccttgcccgaatattctgttgtaagagaaatgccttgtatcggtgatactcttgctccccgtattattgctgagattggagatgtgcgccgttttaaaaacaagcattctctgattgcctatgcaggtattgacgcaccgccgtatcagtcgggagcatttaacgctgtcgaaagacatatctcaaaacgcggtaacagttaccttcgtaagaccggctatgagattatgcagagccttatccagcataaaccaataggcgactctgtctacaattttatacagaagaaacgccttgagggtaaatgtggtaaagaagctatgattgccggacttaacaaatttctgcgcatttactatggcaaagttaccgagctttacaatgatattgataagcaactaactgcttaaatatccattaatgtctttctctgttaggcggcaaagcaattctcttaccgcctgtttgctatacacttttctactttgaaaaatttttatatcttttttcatttcacctcttgactttacttagcagg

SEQ ID NO: 6592 - DNA, 1371 bp, unidentified
  source 1..1371: mol_type = unassigned DNA; note = element_a355da7
  misc_feature 1..3: note = core
  misc_feature 4..39: note = LE
  misc_feature 40..1113: note = CDS
  misc_feature 1114..1371: note = RE
  misc_feature 1109..1357: note = bridgeRNA
tgatggggtggacggcccccgaccagacggcatcgcaatgtgccaggatggtgctgtcaggcaacctatcaacgaacaggagccgtcctcatacaggttacaacgattggcctcgacatcgccaagaacgtctttcagatccacggggtggatagtgacggacgggtggttcttcgcaagaaggtccggcgcgacaaacttctcaccgtgtttggcactttgcccggctgccttgtcggcatggaagcctgcgccacatcccatcattgggctcgcgagttggagagattgggccatcaggtcaagctgatgcccccggcttacgtcaaggcctacgtgaagcggaacaagaacgacgcggccgacgccgaggcaatctgcgaggccgtcacccgcccaaatatgcgcttcgtggcgatcaagtcggccaacgcccaaagcatcctcatgctgcatcgggcgcgtcagcttctggtccggcaaagaaccgcccaggtaagcgcgctgcgtgcgcaccttgcggaatatgggatcatcgcccccaaggggagaacccatgtccgcgacctgatcaaggtcctgggccaacaggatgccccgcttccagaactggcgcggcagaccttgttactgattgccgagatgatcgatgggctcagccagcagatccgcaggatcgagatggaactgctggcctggcatcggacgcatcccgtctgccagagactggaaaccatccctggcatcggcttcatcaccgccacggccctggtcgccacgatcaatgacgccaccgtcttccgatccggccgccaattcgccgcctggctgggcttggtgcccaagcagaactcgtccggcggcaaggaacgaatgggcggtatatcgaaaatgggagaccgctatctgcgccatctcttggtcgtcggcgccaccgccgtcgtccgctacacccggcgaaaagccaccaccgtcagcagatgggccaaccagcttctggagcgcaagcccgcccgcctcgtcacggtggcggtcgccaacaaggtcgcccggatcgtctgggccgtcatgacacgggacgagacctaccgcctggaacccgtcggcgcatgacgccgcaacgacaggcttaaccagtttgggcaggagagagcgacatccctgatgatgaccaggtcaagccggggatcgggacaacccgcctgattcaacgcgcacagcagcgcggcattttgattgggaaccgatccaccgacaccatcatggccagcggcctgcaagccgcgtctcgtaggccggacacatgaatgaacctgaccagagcatcatcgactgtcggaaactccttgcccaacgggggccgtccacaca

SEQ ID NO: 6593 - DNA, 1380 bp, unidentified
  source 1..1380: mol_type = unassigned DNA; note = element_a35e535
  misc_feature 1..2: note = core
  misc_feature 3..245: note = LE
  misc_feature 246..1109: note = CDS
  misc_feature 1110..1380: note = RE
  misc_feature 1086..1367: note = bridgeRNA
tgatggagtggatgcccctcccgcctctgccgcgatggggcagattggcaatgctggcaatgtcacagttaggagaaatgatatggacaacgtcaccatcatcggtatcgatttggcgaagcgcgtcttccatgcccatggcgcccgcgccgacggctgtgtcgcattccggaagagattgacgcgggctcagcttcttccgtttctctccgcccaaccgagctgcgtagttgcaatggaagcttgtgcgagtgcccgatgattggggtcgtgccatcggcggtctcggccatgacgtgcggctgatccctccgacctacgtcaagccgtatgtaaagcgtcaaaagaacgatacggccgatgcggaggctattgctgaggccgcatctcggccgaccatgcgcttcgttaccgtcaaaaccgaggagcaacaagcgagatcggcggtcttccgcacgcgtgatcttcttgtccggcagcgcacacaattgatcaatgccttgcgtgggcatcttgctgagcacggtgttgttgcgccacagggcccagcacacttgaagactttggccgccgcaatcgctgacgccagtcaatcgctacctattttggtgcgtgacatcggcaacctctatctcgaacaaatcgagcaattgagccgaaagatcacagatctcgagaaggtgctccgtagcgaagcccaacgcggggtggaaacgcgtcgccttcagaccatgccaggtgtcggaccgataaccgctatggcaatagaggccttcgctccaccaatgaagaccttcaaacgcggccgtgactttgcggcttggttggggttggtccctgtccagcactcgaccggagggaagcaacgacttggtcgaacgtcaaagatggggcaacgagacatccgcaggctgctgatcattggcgctatggctgtcatccaatgggcatcgcgccgaggagcacaaacaggatcttggttgcacagaatgatagaacggaagcccattatgctggtcgcgatggcgctggcgaacaagatggcacgctcgatctgggccatgttgacgaagaatgaagattaccggaatccagtcgtggctgtctgatcaatcgatcgcgcagctataggactggataagcaggcatgtgaggaggtcgtgaacgtcaagggcaaatgatcggttcgatcgggatcaggaaatgcaccgaggctccaagagtggaaagctcgttaagttgatttgcgcctgatccgcgtatctccatgacggccagcggctgcatcttatgtcgcgcgaaaggcctgacacatgaccgcacccgatcacatgccggaaatgttcgaaaaccgcttgcatgaaccggggcatccacaca

SEQ ID NO: 6594 - DNA, 1584 bp, unidentified
  source 1..1584: mol_type = unassigned DNA; note = element_a37e5fc
  misc_feature 1..3: note = core
  misc_feature 4..262: note = LE
  misc_feature 263..1468: note = CDS
  misc_feature 1469..1584: note = RE
  misc_feature 25..233: note = bridgeRNA
tttggtactataaaagtgtaatagttaattactattaagtaattgattattgcacttctttttattatgattgaagtgattggataacgtaggtcttttagagataaagttctcgtcataaaaagtgttatccaaccttcacataatatattcgtttaagtaagttgagtttgaaatagtactcgtgtcaacaaccaaaatgaggatatgtagaggagttggaaccaatcaaaataaaaagaagaagaagggaaaaagaaaaatgaagtatggagttggaattgatgtatcaaaaggtaaaagtacagtagctatattaagtattgctggtgaagtaattgaagaaccttttgaaataaatcatgatattaatggtttaaatttattggaagaaaaaataaaagatattcccaaagaagatttaaaaattgtaatggaagaaacaggaacttaccatttacccatattaggctatttattagataaggattattttgtagtagcagaaaatgccttaaaaatcaaaaaatatcttgatcgaggaattagaaaagctaaaactgataaaaaagatgcatataaactagctgaatatgcatgcgataattggtataaattgaataaagtaagagaaagtgatgaaatatatacaaacctaagatttttatccagaagatacttaagtaatatttcaattcaaactactcaaaaagttaatttttcaaatctatgtgatttattatttcctggttattatcaactgttagatgaaaatatatttatattaggtttagaaatatttaaaaaatattatcatccagaacttgttttaaataaaaaacaatctcaatttataaatgagattgataaattagcaaaaaagttaggacataaaggtgcaggtataaccctagcaaaaaagatatacaatttagcaacccagacaataagtccatatcctaacaataaatattcacaactttcagcgataagttgtgcagatgaattaattttaacaattaaaacatctaatgaaattatatcaaatatggacgaacttgcaagagaattaccggaatattatgttataagtgagatacctggagtaggtagaaaattaacttcgagagtaattgcagaagttgaagatataagaagacttaaaaatgctggttcattgattgcatatgctggtttagatgcaccaccatatcaatcgggacaatttgaagcaattaatagacatatttcaaaacgaggaaataagtatttaagaaaaacaggttatgaagtaatgaaagcaataaaaagcagctgtaaattggataatgagttaaaatcttatattattaaaaaagaaaatgaaggtaaattaaaaaaagtagctaaaatagctggattaaacaaatttttaagaatgtattatggaatagtaaagaaaaagtataaagaattgaatatatggtaaattgtttaaataagattttaaaaaagacctatcttaggtctatttagtcgtgtctaaaatttgataaaaaataaattaaaaacagtttataaaaagtattgatttttattagtaag

SEQ ID NO: 6595 - DNA, 1359 bp, unidentified
  source 1..1359: mol_type = unassigned DNA; note = element_a3857c6
  misc_feature 1: note = core
  misc_feature 2..73: note = LE
  misc_feature 74..1099: note = CDS
  misc_feature 1100..1359: note = RE
  misc_feature 1121..1356: note = bridgeRNA
taatgaaatggtcacccctcaccctgcgaaagctacactttcgcagggtgtttttaattcggagaccatcaccatgagcgatttggcactggtcggtatcgacctcggcaaacacaccttccatctgcacggccaggacaaatctggtcgagagctgtttcgcaagaagctttcacgacagcagatgatgcggttcttcgccaacctatccgcttgcaccgtggcgatggaagcctgcgctggtgcgcatttcgtagcgcgcgagctaagagccatgggccatcaagcgaagctgatttccccgcagtttgttaagccgttcgtcaaaggcaataaaaacgacttcatcgatgcgcaagcgatctgcgaggccgcttcgcgcccgacaatgcgctttgtttcccccaagaccgaagcccaacaaaccctttcagtattgcaccgcctgcgcgaatcgctgatccgcgaccgcacgaaggccgtcaatcagatgcatggattcctgttggagttcggtatcagcctgccgcaggggctggccgtcatgaagcgcctgtctgatgtgctagccgagcacgagttgcctgttcggttaacaatgctgctacagcgtttgcacgacctgctcgtctacttagacgagcaggtcaaggggcttgataaagagctagctggccaacttgctgacgatgatctgggtagtcgtttgctgagcatgccgtgcgtcggcccgatcaccgcgagcctgctggctgtagaaatgggtgatggccagcaatacggttgcagtcgcgacttcgcagcgtccgtcggactggtgcccagacaatacagcacgggaggacgggcgaatttgctcgggatcagcaagcggggtgacaagaacctacgacggcttttggtgcagtgcgccagggtctacatgcagcgtctggaacatcagaaaggcgctctggccaactgggtgcgcagcctgctgatgcgacgtcattccaacgtagtcgcctgcgcgctggccaacaagctggcacgcatagcgtgggcaatcgccgcgcaccatacacaatacgaagcagggccagacgcgctgaacacctgaccctgcggttgtgccatatcacgattcacctttcaggttttgcgatagctgatcaacagatgaaatgaacggcctaccggcctggcgaagatcctgacagtgaaaccggctagctacataagccgagtaagttcttaaggttcgtcaggcgcgaccctcatcgtggcgcggggcataccccaactagacgccggatagatttaagcaagccaaaaacttcatccgttaaacagtattgcaaaaaatggggtgaccataga

SEQ ID NO: 6596 - DNA, 1564 bp, unidentified
  source 1..1564: mol_type = unassigned DNA; note = element_a38669d
  misc_feature 1..2: note = core
  misc_feature 3..200: note = LE
  misc_feature 201..1421: note = CDS
  misc_feature 1422..1564: note = RE
  misc_feature 3..221: note = bridgeRNA
ctcgtattattatgtgtagccaatctttacctgttcttggtaaatggctatgctgttatggatgctgtggatcagtgtttctctcctaccacgtgatggtttcagaaagggtctgaccacagcctcctgctactttgttgatcagtcagataccgcatgacggtttatgtggaacgaggatacgaaagcagcgagtccctgtgggtccggcagcatcgaataattttatggaggtgatccccatgatcatcgttgctgttgatgtcgcaaaggataagcacgactgctttatcaccaacacggatggcgaagtcctttttgattccttcgtcattcagaacaatcaggatggttttgaagacctgtttcagaagatatgctctgtgaccgattcaccacagaacgtaaaagtagggctggaagcgaccggacactaccatctcaacctgcttggctatctccttgataaaggtttccccacctgtctcatcaacccgttacaaaccagtcttttcagaaaaagtctaagctttagaaagacgaaaacggatccggtagacgcccgagcgattgcgagacttctcatgagcgatcggactttacagccctactcgctcacatcatatcagaatcaggagctgaagtcattaacccgttaccgcgccgataaggtccgtgagcgtgcaaagctgaagtcttccctcgccaggctggtcgtgatcctcttcccggaactcgaaaagctggtaccgatactgtatatggcgaccatttatgatcttcttcacgaattccccggagcctcgtatgtcgcctctgcacatctgactcggctgtctcatctcatttccgagtcttccaaaggacgctatgataaagagaaagcccttgaaatcagagaagcagcccgccattccattggctctgtatctccagccaaatctcttgaactgcgccacgcgatcgatcacatccgctttctggatgatgagatcgacgaggtcgaagcgcagatctttgcccttctggataaagacccgcccaggatgctggacatccccggaatgggtccccgtatggcagctgtcattgtcgcagaagtaggtgactttaaccgtttttcctcgccggataagcttctggcctatgccggactttctccttcgacttaccagtccggacaactgacatccacgtacgcaaagatggagaaacggggctccagatatctacgctgtgcgctgtttaatgcaacgaagtatgtttgtatgtgggaccctgtgttcaaagcatatcttgcaaagaaacgcgctgaaggtaaacattacaatgttgccatttcacacgctgcaaagaaactggtacgcctgatctatcatctggagacgaccgggaaatcataccgctcgaaagcagcctgatcttctcatatatcctgttcctcagagcaccctgccggatgctctgtttgtcatgcagttttcaatgtcctgaactctatcaatcctgcaaggcaggaaatgattacaattgtgaatttcgaccttgacttttaatagtcagt

SEQ ID NO: 6597 - DNA, 1151 bp, unidentified
  source 1..1151: mol_type = unassigned DNA; note = element_a38dc17
  misc_feature 1..2: note = core
  misc_feature 3..200: note = LE
  misc_feature 201..1139: note = CDS
  misc_feature 1140..1151: note = RE
  misc_feature 14..206: note = bridgeRNA
cttgtcttatgacatttgtgtccgttcgggtcagactggggccgctgccgggagttaccgctcccggcagcggcgagggtaggaccgtgacttcgcaggcgcatgggcgccgatcctgagtgaggtcaccctcgtctttcccatcggcctgaacggatacaggggctttgaggcccgcatgacaagcagaggcaggaaagatgacacagattaccattggggtggatgtttcgaaagacactcttgatgtccaccttcatcctgacggtacgcaccgtcagttcaccaatgatgataccggctatcgggcgatactcggctggattgcaggccggcctgttgcccgcctcgtgtttgaggcaaccggcgcttaccaccgggcctttgagcgcgtgatgggacaggctggaattgctctgtgcaaggtcaacccggcacgcgcccggcgatttgcagaggccacaggccaaagcgccaagaccgaccggatcgacgccgccatgctggcccggatgggggctgttctggagccggagacgcgcgcggcgccttcaaaaacagcgtgtgatctcaaagaactgcacatgatgcgggccgccctcgtgaaggacaggacggcggcaaagaaccgggcgggaacgcttaccctagcgcttctcaaacgccagttacgccagagactggtggcaatcgaccgccagatccggcagatcgagcaggccatgcacgcactcattgagaccgaccctgagcttgcccgcaagcgggacatcctcatctcaatccccggcattgccgaacgttctgccttcgccctgctcacaggcatgcccgaactcggcaatctcaacagccaggctgcaggcgcccttgcgggaaccgcgccgcgaacgcgtcagtcaggcaaatggaccggcaaggcgttcgtgcagggcggccgcgctcatgtccggcgttccctctacatgccagccctcgccgccgcccggttcaacccagacctcaagcagacctacaaaagtctcacaggcaggggaaagccccccaaactcgccctcaccgcaatcatgcgaaagctcatcgtcctcgcaaacaccctcatccgcgataatcgaaaatggaccccacaacatcattgaccaacacggata

SEQ ID NO: 6598 - DNA, 1392 bp, unidentified
  source 1..1392: mol_type = unassigned DNA; note = element_a39ce54
  misc_feature 1..3: note = core
  misc_feature 4..84: note = LE
  misc_feature 85..1122: note = CDS
  misc_feature 1123..1392: note = RE
  misc_feature 1141..1379: note = bridgeRNA
tgatgcggtggacggcccctgagcggcatcggtgtgccaagctcgtggctgtcgaggacaacgagctgagaggcgccgtccgccatggagattatcacgatcggtctggatatcgccaagcgagtgttccaggtgcacggggttgacgcatcgggcaaagcagtgattcggcggaagctaaggcgctccgaggtgctggctttcttcgggaagctgccgccctccctggtggggatcgaggcctgcggcacggcgcaccactgggcacgcgaaatcggggccttggggcatcaggtccggctgatgccggccagctatgtgaagccttatgtcaagcgcggcaagacggatgcggccgatgccgaggcgatctgcgaagcggtgacccggccgtccatgcgcttcgtgccggtgaagaccgccgagcagcaggcagtgctggtgctgcaccgcacccgcgacctgctggtgcggcagcggacagggctggtgaacgccctgcgcggacacatggccgagttcggcctcatcgctccccaggggatcagcggtgtggcagacctcatggcactgcttttgggtgaggacgaaaccgggctgccggcattggcgcgacaggcgcttcgtaccctcgtggcgaagctggagacgctggaccaacggatcgaggcggtcgaggccgcgatcctaacttggcacaaggacaacgaggcaagccgccggctcgccgccatccccggtatcgggccgatcacggcctcggccctggtggcgaccgtgaccgatccgtcccagttccgctccgcccggcagtttgccacctggatcaggctggtgccgaagcagaacagcagcggaggcaagcagcggcagggaggcgtctccaagcagggcgatcgttacctgcgccgtctgcttgtactcggtgccaccgcagttttccgccatgcccgaaccaagcctgcagcggtggcgggctggctcaagggcctgctggaacgccgcccggtgcggctggtctcggtggcgcaggccaataagacggcgcgcattgtccgggcgctactggccaagggcgacagctatcgcgcgccggcaccggcgcggatggcggccgcataggcgccgaggagagcttcctgtcagctctcgccgcggctgacgagcggtgagggcgatggtggcgtgatggcgaaccgttcgaacccgaggctcggcagaacccgttaagtgtcacgcgcccctgagcgcgaatgactgagtgggagccaggccgcggattgcatcagggccagcggtcatggaggccgcacgaacaggccggacacatgaccgcacccgaccgcggcgccggaggtcacatcgcccttgcatcgaggggccgtccacaca

SEQ ID NO: 6599 - DNA, 2075 bp, unidentified
  source 1..2075: mol_type = unassigned DNA; note = element_a3a5c14
  misc_feature 1..3: note = core
  misc_feature 4..227: note = LE
  misc_feature 228..1502: note = CDS
  misc_feature 1503..2075: note = RE
  misc_feature 13..200: note = bridgeRNA
ttccttaccttgttgctcgggcggtttcggcgcagtcgtagtgtgtcgatcgtccgaggacggcgggtatggcttccgtgttttcgccgctgtgacggctcgtgaagaatggccgcccgccgcccacccgatggttcgaccgctaattgagagaagcgaacagatcgctgcgtaaggaaaagtcggcgtgaccatcaccaccacctgaagttgtgaagggagcggccatgccgcagatctgggcaggaatcgacgcggggaaggggcaccatcactgcgtcgtcatcgacgcagacggcgccaagctccactccgcccgcgtcgccaacgacgaggcggcgctgctcgaactgatcgctactgtgaccgatctcgccggtggcgacgagtgcctgtgggcgatcgacctcagcagtgggggagcagcactgatcctcgggcttctcaccgcccacgatctgccggtcgtctacatccccggccacgccgtgcaccacgccgcgaaggcatacaggggcgacgggaagaccgacgcgaaggacgcggcgatcatcgccgaccaggcgcggatgcgccgagacctgcaactgctgagcgtcgcggatgagacccggatcgagctgcgcgcgctgaccgcgcaccggagggacctcgtctgcgaccgaacccgggccataaacaggcttcgcgggcatctgctcgagtacttccctgcgctcgagcgagccttcaactactccgccagccgcgcctcgctcctcttgctcaccggctacgccacgccggacgcgatccggaagatgggggagtcgcgcctggcgcggtggcttcgcgcgcagggctgccggaccgcggtcgcgaccgccgcgaccgcggtctccgcggcgaagagccagcagagcgtgctccctggccaggcgatcgcggcggaactcgcccgccgactcgcactcgatgtcatcgctcttgaaagccgtatcgcggagattgaccagctcatcgccgcatgtgtcgagtccagccgtgccgctgagctcctccgctcgatgccgggcttcgggccgctactcgctgccgagttccttgcatcgaccggcgctgacctcagcgtctacgtcagcgccgaccgtctcgccggcgttgctggtctcgccccggcgccgcgcgactcgggcaagatcagcaccaatcaccaccggccacgccgctatgacaggcggctgctgcgtgcctgttacctcgcagcgatggtcagcgtgcagcaaaagaccgagtcgcgagtcttctacgaccgcaaacgcggcgaggggaagtcgcacaagcaggccatcctcgccctcgcgcgccgccgcctcgacgtcatctgggcgatgttccgagacgaccgcagctacacgcccccgccttcctttggggctgactttggggaaaatacaacagcgccgatcgccccaaaggaatctcaaacgactcgctcgacgccatctctcctcgcagcgtgagcttcgcgttccttgcttcagctacgactgaccgctgaagcggactcctccgtcctcgcagaacacggtcttcgtcgcatcgccctccatacaggcgccatcgacgaggttccgctccccgagcggctcccgtagctccacggagaccggaacgaggtcgttcccttggcagttcgccgcagcattcccattcgcctttacatccactcgaacggcgacctcctccgcgctgtacgagaccacgggcggcaacgtctcacccgtgactccagatgcgcactcgagtcgactcaccaagaggtcgatgcggtcgctctgggcagacacggctgatgggtcagcaagtgcccacgtcgcagtctcgcctcctgcggctgcgcatccggacgatgagagagcggcgacgatcatcgcggtcaagaacagcgttcgacgagtgggagacatgcatccagagtccaccactctccgcgcactcaccagctacgtcgacggcggctgcgcgctgtcgctagagcgaccggacggagccggtcggaggagcctgcggcgctgttgacaacctgattgaga

SEQ ID NO: 6600 - DNA, 1361 bp, unidentified
  source 1..1361: mol_type = unassigned DNA; note = element_a3c1768
  misc_feature 1..2: note = core
  misc_feature 3..79: note = LE
  misc_feature 80..1117: note = CDS
  misc_feature 1118..1361: note = RE
  misc_feature 1128..1346: note = bridgeRNA
agataattggactccctcacccttaacgagtgaggtaatataaaagttactacacaaatatattataaagagtcctaatatgtatcgtaccaaagttggcgttgatttagcaaaagaagttattcaagtttgtatttatagaaacaaaaaggtgcagtcaaatattgaaatgacaccgaacgaatttctttgttggctagttaatgcaaaacccgtcacgataatatttgaagcgtgtggtacatcgaattactggaagcagaaagcgatttcggcaggtcacgatgcgcgtttaatttcagcaaaattagttgctacagttagacaaaatcaaaaaacggataaaaatgatgcattggctattatccaggcagcatcattacccgatgttatttttattggtggtaaaacggttgagcagcaacaattacaaaccattaagcgcttaagagagcttgctgtaaaacaccaaggtgcctgtcagaaacaattagtgtctttattattggaattgaatattcgtatttctaatcgaaaaggcggtattatcagtgcgatagacggagtattagaagatgcaacgaatggattgtcagcagaatgccgtattgcaatagatacagctaaagtgtatttgaaagtatcgattgaagcggttcagcactatgatgattgtttagaaaagtcagttactactcatgctgattgtaaaaagctactcaagcttgaaggtgttggcaccatgaatgcgattaatctatatctcgcactaggttgctccgacataggcgtattcagtaaaggtaaagacgcttcagcctgtattggtttgacgcctattcaacattcttcgggtggttttgttaaattaggctcgataggaaagcactgtaaaaatagcatgctaagaagccagttaatttgtggtgcaatggctgcggtgaatcaagcggttatacgagaagccaaaactagaaaagatgtttggcttaaagggcttgtagaacgacgaggtaaaaagtgtgcagcggtggcacttgctaacaaaacggtaagaacagctttcgcgatgctaacacaaggtacagaatataaagctgaattattggcagcttaaaaataattgaatagaaaaatgtagtttaaaagcgttcaaacaacaaaaatgcaaaacgaagataaaaatcagcaggccaagacagtccttaacatagagcataaagctcgtaccctagatttgtcagcctgttcgcgtaaatatcaaagagccagagatagcttctcatttagagctcgtacataagtacgcatttatttcttcaagtatttatttttgttgttgacacgggggagtccacata

SEQ ID NO: 6601 - DNA, 1271 bp, unidentified
  source 1..1271: mol_type = unassigned DNA; note = element_a3cd16d
  misc_feature 1: note = core
  misc_feature 2..226: note = LE
  misc_feature 227..1267: note = CDS
  misc_feature 1268..1271: note = RE
accttatatttgcatttggaaaagttttcgtacttttgcactaaaattctaaattacaaaccaaaagacagaaaaagagggagcagcaggacaaccaatcgccctgaagagaaccaatctaggcccttattttggctcctgccgctctttttgatccatcaacccagataagaatttgcgctaaggcggtaaggtttttaggcatggtcaaaaatccctcagtttcttgtcagaaaaaaatgcaaagatattgaaaaaaactgtaattggaatcgacatcagtaaaaaaagcttggactggtgtgtgattgacggcaaggaagtggttgattaccataagaccacaaacgaaatggatgctattgtgaaaaagatggcggagatactcagcaatggggatagagacatcatggatgttctcgtgtgcgccgaatacacaggacgttatatatacccgttggtgcttgcgtgctacaagtgcggtgtggacctttggctggagagcgggtacaatatcaaatgcgaggcacgcaaggagcgggggaaagacgaccgcaccgatgcacgacgcatcgcggagtatggccgtaagaaccaggacgacgcgcgcatatatcacctgccggcaaagagcatcgccacattgcgcgacctgatttcggaacgtgcactctattgttctcagcgggccgcgcataagggtcagctgcgagatgagcgccagtatatggatccgaaagcgtacactgcgcgtgcgatacggcagctgtccttagtgaaagaactcgaccgccttgtggaagaggtggacaaaaacatggccgagataatcgcctccgacccggagttgcaacgacaaaaggagctgctactcaccatccccggtgtcggtatcatctgtgcgactgcccttatcgcagtcacagccggattctcgcttttcgacaacggacgagagctatgttgcttcgccggtctggccccatttgcctatacttcaggcaccagcatccggtcggcgaaaagggtgtctgggcgagccgaccacgaactcaaggctttgctacatatgtgcgccttggttgccgcaaccagacggaaaacaggccatttcgccgaatactacaaacgcaagatagccgaaggcaagaataaaatgagcgtactcaatgctgtacgggcaaaacttatgctaaccgcctttgctgtagtgcgcaacaacagaccttacgaagaaaatttcaaaaataattttgtcaaatcataagaat

SEQ ID NO: 6602 - DNA, 1337 bp, unidentified
  source 1..1337: mol_type = unassigned DNA; note = element_a3cf414
  misc_feature 1..2: note = core
  misc_feature 3..80: note = LE
  misc_feature 81..1118: note = CDS
  misc_feature 1119..1337: note = RE
  misc_feature 1093..1322: note = bridgeRNA
agataattggactccctcacccttaacgagtgaggtaatataaaagttaccacaccaatatattataaagagtcctgaatatgtatcctactagagttggcgttgatttagcaaagaaagttatccaagtttgtatttataaaaacaaaaaggtgcaatcaaacattgaaatgacaccggaagcatttctctcttggcttattaacaacaaacccgtcacgataatatttgaagcctgtagttcttctaattactggaaacaaaaagcaactgaagcgggtcatgatgcacgtttaatttcagccaagttagtctctgttgttagacaaaaccaaaagaccgataaaaacgatgccctggccattgtgcaaacaacgttcatgcctgatgtcactttcattggtggaaaaaccgttgaacagcagcaattacaatccattaaacgtttaagagaattagccgttaaacagcaggacgcttctcaaaaacagttaatcgctttactgtttgaattaaacattaaaatatcaagccgtaaaggcggtatcatttcagctatagaaggtgtcttagaagatgctactaatggtttatcagctgaatgtagaagagctatttttctagcaaaagaacatttaagaggcttgtttgaatcggctcgtcactatgatgattgtataaataaatcggttgccgcccaccctgaatgtaaaaaactcatgaaattagaaggcgtaggtcctatgaatgcgattaacctctacattgcacttggttgtgcagaaataggaacgtttaacaaaggaaaagatgcttcagcgtgtattggtttaacccctatccagcattcatcagggggagtggtaaagttaggctccataggaaagctctgtaaaaatagccgtttgaggagccaattagtatgcggtgcaaccgcagctgtccaacatgccgttaaacgaaaagcgataactaaaaaggatgtttggatacagggcttagtcgagcgtcgaggtaaaaagtgtgcagcggttgcattggccaataaaacagtaagaacggctttcgccatgctgacacaaggaacagagtacaaagctgagttactcgcagcctaaaaagagtacaaacaacaaaaaatgctgtaacgaagataaaaatcagccggtttagtcagtagccaactaagagcttagcgctcgctttatagatttgacaatcggttcgcgtaaatatcaaagagccagagatagcttctcaatgtagagctcgtacataagtatgcattaatttctttgtatcaacttttttgttgttgacaagagggagtccacata

SEQ ID NO: 6603 - DNA, 1502 bp, unidentified
  source 1..1502: mol_type = unassigned DNA; note = element_a3e37fa
  misc_feature 1..2: note = core
  misc_feature 3..243: note = LE
  misc_feature 244..1482: note = CDS
  misc_feature 1483..1502: note = RE
  misc_feature 7..236: note = bridgeRNA
ctaataagagttgtcgggtccgccgtacggcggacttggctgaaggtggccgccggcgggtgagcacttcttgctcctgggcttcgagccctgacgaaagaccgtgcccctgccggtgaccgggagagttgatcgctgctgggatgtcgtgcccgccgcttgcgtgagcaccgtgtttattaggtcgctgatggttctcccgctggctgctgacatgtttcgacaacgttgacgggagcgcgagtgcggctgttcgcaggtgatgactgggccgaggaccatcacgatgtcgaggtgatggaccaggccgggaaggtgctggcgaggaagcgcctgcccgagggcgcggccgggatggcgcagctgcacgcgctgatcgggcagttcgtgcccgaagacgacacggacggcacggaagtcgtgatcgggatcgagacggaccgcggcccgtgggtcgcggccctgatcgccgcgggttacacggtgtacccggtgaacccgctgcaggcatcgcggtaccgggaacggcacggcgtgtccggcgccaggagcgacgccggcgacgcgcacatgctcgccgacatggtccgcaccgactcccgccagctgcgcagcgcggccggggactcgccggaggcggcgggcatcaaggtgctggcccgcacgcacaagacgatgatctgggagcggacaagggcggtgcagcggctgcggcaccagctgcgggagtactttcccgccgcgctcgaggccttcgacggcctcgacgccgccgacacgctcgagctgctcggcagggccccggagccggcccgggcggcgaggctgacgcgcgcgcaggtcagcgcggcgctcaagcgcgcccggcgccggaatatcaaggacaagaccgacgcgatcctggccgcgctgcgcagcgagcagctcggccagcccgaagcgctcaccctggcctacgcggccacggtccggtcgctgatcgcggtaatcactgtcctgaacgagcaggtcaaggccctgcaggggcaggtggaggagcattttggccgtcacccggacgctgagatctacccgtcccagcccgggataggcaaggtcctcggcgcccgggtcctcggcgagctcggcgacggccccgcccgttaccgcgacgggaaagcccggcgcaactacgccgcgaccagccctcttacccgcgcgtcggggaagaagaaggtcgtcgcggcccggttcatccacaacgaccggctcgtcgacgcgctcaacgcctgggccttcagctccctgaacgcctcgcccggcgcccgcgcctactacgacgagctccgcgcccgcggaatcgaacataacgacgcactcaggcgactggccaaccggcttgtcggcatcctgcacggatgcctcaagacccgcaccctctacgacgaggccatcgcctggggacaccgccaaaacctccctcaatcttccgtagcggcttgacacttaagctcctgggatgt

SEQ ID NO: 6604 - DNA, 1432 bp, unidentified
  source 1..1432: mol_type = unassigned DNA; note = element_a3ee30f
  misc_feature 1: note = core
  misc_feature 2..112: note = LE
  misc_feature 113..1171: note = CDS
  misc_feature 1172..1432: note = RE
  misc_feature 1142..1371: note = bridgeRNA
gaatgaaagggacttccccgccccgaactagccgcggtattgcggcgaccggcaacgaagtgccacgatgggaagtgcgaaatctcatcaactcgttcgaaaggggaagtccatggccattgtcactctgggaatcgatctcgccaagaacgtgttcgccgtgcatggcgtcgacgcgacaggcaagccggcgctggtgcgcccgagcgttccgcgcggcaaactgctggagctgatcgcctcgatgccacgctgcttggtgggcatggaagcgtgctctggcgcgcatcactgggcgcggctgttccgggcgcacggccacacggtcaagctgatggcgccaaagttcgtctcgccgtatcgcctgtctggcaagaaggggaagaacgacgctgccgacgcagcagcgatctgcgaggccgtcacgcggccctccatgcgcttcgtgccacccaagagcctgcagcagcagtccgagctgctcgtgcaccgcgcccgtcaaggctttgtgcagcagcgcaccgccaccatcaatcgcatccgcggcctgctgtcggagttcgggatcgtcctgccgctcaaggcgtctactgtgcggcaggaggcgatgcgccagctggaggatctgccgggctgggccaacacagtcgtgggcgacttgctcagcgaggtgagccgcctcgacgagcgcattgcgcagtacgaccgccacatcgaacagatcgccaaagacagcacgccggccgggcagctgatgcagcttcctggcgtggggcctacgacggccaccgcgctggtggccatgatcggacgcgggcaggagttcaagtgcggccgccagctgtcggcctggctgggactggtgcccggccagtacagctcgggcggcaagcagcgcacgggacgcatcaccaaggccggcgatccgtacctgcgaatgctgttgatctgggcgcccgatcggtgctgcaatcggccaagcaccgcgacgatccgctcagtcgatgggccgtgcagttggaggcacgtgcgggctactggaaggccatcgtggccatcgccgccaagaacgcgcgcatgtgctgggccgtgctggcgaggggagagagtttcaagctgccggcgtgaccgtcgacagctgttgtttcaccgcgtgatgtgcaagcgttgatggtgtgaaggttggacctgcgcggggtgtacctgttcaactccgggaggcggcccctggtcgtcctcggctaacgattgaggtccccgcgtgcgtctttcatcagggtccgcagcaactgaactgctgcattaatgaccgtttgtagtttcgctgtccgcatccttcgctccgtcgctgcaccgatcgcacatgctcgctcgctacatgccgttgacggcagggagagctattcgcttgaaaggtggggaagcccttgta

SEQ ID NO: 6605 - DNA, 1255 bp, unidentified
  source 1..1255: mol_type = unassigned DNA; note = element_a3f02d6
  misc_feature 1: note = core
  misc_feature 2..87: note = LE
  misc_feature 88..981: note = CDS
  misc_feature 982..1255: note = RE
  misc_feature 1022..1247: note = bridgeRNA
taatgggatggtcgcccctactctaaccggcatcccggtgccaaagtggtgaatgcaacttcccacttaatgagagaggcgaccgagatgaagattacgacaattggtatcgatttggctaagtctgtgttccaagtgcatggtgttgatcaacgaggcaaaccggttgttctaaaacgactgagacgtaagcagatgctgccgtattttgcacagctgtcgccttgtctcgtcggcatggaagcttgcggaggagcccgctactgggcaaggaagctgcgggcacaaggacattcggtgaaactcatggcaccgcaattcgtcaaaccgtatgtaaaggcaaataagacggacgcggcggatgccgaggcgatctgcgaggctgtcactcggccaagtatgcggtttgtaccgatcaagaatggagatcagcaagccgtactctcactccatcgagttcgacagggtttcgtcaaggcgaggactgcacaagcaaatcagattcgaggactgttggccgaatacggcatcacgctaccgcaaggcatcagccatgttgctaaccgattaccggagatcgttgaagatgcagaaaacgatcttcccggtattggaccactgacagccagtgcgttgagtgcatcgatcggtgatgcaaaatgcttcaacaatggccgtgagttagctgcctggttgggtctggtgcccagacagcattccagcggtgggaaatcgatactgttggggatcagtaaacgtggagatgcctaccttagaacgttgatgatccacggtgctcgctcggtgatacgagtggcagaacgcaaaacagcaccgaccgatagttggtcgactgcaatgatgaagcggcggcacagcaatgtggctgcggtagcgagagcaaataagaacgctcgagtggtgtgggttctgttggtccacgggcgagagtacagcccggattacaaacagctggcgtaacaccgaaccactataactaaccactaaacacgaggagcattccacgattgctcaggcaaacaagaagtgatggcaagacaggtcagaccgtggcgggtcaaacctatttcacacaaggagcgaagagctcgagaggctgtaaaggcacctgccagcgaattccatcagggacagaggcagttagcctcgatctaaagtccggatctatggcggcaatctttacctgctcaccatcgccaattgaatgcttgacaacccgaggggcgaccatcta

SEQ ID NO: 6606 - DNA, 1213 bp, unidentified
  source 1..1213: mol_type = unassigned DNA; note = element_a3f966d
  misc_feature 1..2: note = core
  misc_feature 3..211: note = LE
  misc_feature 212..1198: note = CDS
  misc_feature 1199..1213: note = RE
  misc_feature 12..187: note = bridgeRNA
cttgtatcattatttccgtggtggttagctcccatcacacgaagtgaagagagtttgttactcctcttaaggcatagaccttgttataaagatcaaacccttcacttcacttctcaccaacataaaactgaacggtagccaagggttcgaccctgtatgcacaaggatagtgagtgagttggtaattctattgtaaattgagaacataaagatgtattacctcggaatcgatgtcgccaaagccaagctggattgctcgtttttactggatgaaaccggtcttaaacgtaaatccaaaaaagtaaccaatagccaagctgggttcagtgaactattaacctggcttgccaaacaaggtattgagcttacggagcttcacgtcacaatggaagctacggggggttatcatgagcaagccgctcaagccttacacgatgcaggtgttgcggtttccatcgtcaatccggcccaaataaaggctttaggaaagaccctagccatacggactaaaactgacgcagttgacagtttcttgatcgctcgttttggcttgctatgcaaacctgatgtttgggttccttcagctccagaagcaagagcgcttaaagctttgctcgcccgccaggaagctatttctgaagacctacagcgtgagcgtaatcgccaagaaaaagccagcatttcgactactccagagcgtgttcagaaatcgcttgatgacagcattcattttctgcaaacccagttaaaacaacttcaacaagagatcgatgatcatatcgacaagcatcctgctttgagagaagacttaggtttgctaaaaagcattcgcgcgattggcccacaagtcggcaaagcgatgctttctgtgatgcaaacccattcatttaaaacggccgaacaactcgccgcttacttgggcctagtgcccgtagaaagacaatccggttcctctgtattgggccgctcccgactttctaaagcaggttctcctgaaatccgcgctaagctttatatggccgctgttgtcgctatacgctataacgcacacgtcaaagctctatacgaacgtctacgcgcgcgcggtaaatccgctatgtcggctctgggcgcttgcatgagaaaactggttcacctgtgttttggcgtgcttaaaacacgtatgccttaccaagaaaattatcgaaatattgcttgacttggaagacggtat

SEQ ID NO: 6607 - DNA, 1368 bp, unidentified
  source 1..1368: mol_type = unassigned DNA; note = element_a3fac09
  misc_feature 1..4: note = core
  misc_feature 5..78: note = LE
  misc_feature 79..1113: note = CDS
  misc_feature 1114..1368: note = RE
  misc_feature 1086..1357: note = bridgeRNA
atgatggggtggacgccccgccgacggcatcaatgtgccaaaaagtggaggtgttgagcaccacttagggaggcgtccgtgtcgaaagctatcacgatcggtttggatatcgccaagcatgttttccacgctcacggcgtggacgagcgtggtctaacgttgttcagcaagaggatcagccgaggtaaggtgcttgagttcttcgcagcccagccgcgttgcaccgtcgcgctggaggcatgtggcggagcgcatcactgggctcgtcaactcattcagcttggtcacgaggttcgtctaatcccgccggcttacgtaaaaccgttcgtgaagcgacagaagaacgacgcgatcgatgccgaggcgatttgcgaagccgcgcagcggccgagcatgcggttcgtggccgtgaagagcgaagagcagcaggcggcgggcctggtgtttcgaacccgtgacttattggtgcggcagcgaactcagctcatcaatgcggtccgtggacacctcaccgaatatggttgggtcgcgcccaagggaccgtcacacgtagcgatgcttggcgggttgatcgaggaagaagagatggccaattcgcttcccgaagcggcgcgcgccatgttccgattgatgttagaccagctcgcgggccttaatggcaaaattacagatcttgacaaagagattgcgcagcgcgctcgccaagacgaagtatcacgcaggctgatgaccattcccggcattggcccgatctccgctaccgccattgccgccctagcaccaccagctgagacctttaccaaaggacgtgacttcgcggcctggcttggtctcacgcccgttcaaagatcgacgggcggcaagcagaagctcggtggcacatccaagatgggcgaacgcacgcttagacgcctcctcatcatcgggagcagcgctgtcgtgcaacaggccagcaaacgtggtgcgccaaggggttcgtggctcgaacagatgctggctcgcaagccgcgcatgctggtaactgttgcgcttgctaacaagatggcgcggatcgtctgggcacttcttgtgaagcgggagaattatagagctccggccgcagccagggcgtgatcttggcgggctcgaggtcgtcagaggtgtagtcggtcgaaggagagtatggcgcaacagtcggcgagacggggccggaagaaccagttggactcatcgtgcccagagcacgcgttaatgatctggttccggtccgcgaactcccatacaggcccgcagctccatcgctgcactagaggccggacagatggcagcatccgactacgtgccaacgctcttcaaaaaaaccgcttgcatctcgcggggcgtccacag

SEQ ID NO: 6608 - DNA, 1416 bp, unidentified
  source 1..1416: mol_type = unassigned DNA; note = element_a401d9e
  misc_feature 1: note = core
  misc_feature 2..88: note = LE
  misc_feature 89..1129: note = CDS
  misc_feature 1130..1416: note = RE
  misc_feature 1190..1411: note = bridgeRNA
caatgggatggactcctccctcctgagcggcatcagtgtgccagactggaagtcgtcaaccaccagtcaacagaaagaggagtccaccatgcgaattatgcgtatcggcattgatttggccaagcaggtttttcagattcacggcgtcgactcgagtgagaaacctgtcctgcgccgccagttaacacgccatcagatggtgaaattcttctccaagctcacgccttgcctcattggcatggaggcatgtgccagttcgcattattgggcacgccgactcatcggcatggggcacacggtcaaattgatcgctccccagtttgtgaagccctatgtgaaaggcaataagaacgacgccaacgatgcagacgctatctgcgaagcacttggtcgaccgaacatgcggtttgtggccatcaagacggtggcgcagcaggatatccaggcattgcatcggattcgaactgaactcgtgcatcagcgaaccgccaaggtcaatcagattcgaggcttgcttggcgaatacggcattgtggtcgcccaacgtgtcacatcgctgcgcaaagccctgccagagattctggaagatgctgaaaatggcctgacgggcgacttcaaaacacttctcaatgaattgagagcggacttggtctatctggatgctcgggtagcggcacaagacctcgcaatgcagcgattggccagcgcacacgccgatgccaagcggttgcagacattgcgcggagtggggccgattaccgcaacggcactgatcgctgcgctgggagatggccgaatgttcaagagagggcgcgatgctgcagcgtgggttgggctggttcctgggcaacacagcagtggtggcaaagataatctgctgggaatcagtaaacgaggaaatgcgtatttgcgtaccttgttgatccatggagcaaggtcggtactcaaaacggcgaaggacaaggatgaccgcttaagctgctgggtacaaagtgtgtgccaccgacgcaacaaaaacatcgcggccgtagcgctcgcaaacaagaccatgcgcatggcctgggcgctgctgactagcggagcggattaccagcctgaattcggtcagccggacacccaacccgcctgagccaggcccagacaagctggccccgtctccgacgggtttatagaaaagagcaacagtctccacgattgcgaagcatcagacgttgatggcaaacaggtcgaaccggcggtaggaaaaccttgcgattgcgaagtgccttgagcacgctagggcgatcaggacctgccgcgcgaataatccatcatggcccggacaattgcgtccacctttagaggccggatatacgtgagcagtcgagcctacagtcaaagacgttaaatgcttgcaaaccgggaggagtccatata

SEQ ID NO: 6609 - DNA, 1387 bp, unidentified
  source 1..1387: mol_type = unassigned DNA; note = element_a409432
  misc_feature 1..2: note = core
  misc_feature 3..88: note = LE
  misc_feature 89..1120: note = CDS
  misc_feature 1121..1387: note = RE
  misc_feature 1091..1374: note = bridgeRNA
agatggtgtggttgccgccctcccctgacggcatcgattcgtgccaaagtcgtggtgttaacagccacacaacgaggaggacggcgagatgaaggatatgatgatcggggtcgatctggcaaagaatgttttccaggtccacggcgccctgtggactggggaggtgcagttccgcaaaaagctgacgcgaaagcagttccccgcgttcatggcgcggcaggagccccgcctggtcgtcttcgaggcgtgcggcagcgcgcactactgggcgcgggagatggaagcgctcggccacgaggtgaaactgatcgcgccacagtacgctcgcccgttcgtcaagcgccagaagaatgacgccgccgatgccgaggcaatcgtgatcgcggcccgccagccggaaatgcgcttcgtggcgcccaagacggttgagcagcagtcccgcgcagccgtgttccgcggtcgggaacggttggtccatcagcggactgcggatgtgaacgccttgcgggcgctgctgtatgagtatggtcacgtgtttcccgcaggaatacgctctcttgatcgcatgacggtgcttgtgaaggatgatgaagcttcggacctgcccgcactgatccgggaggagtgccaggacctgctggcgcaaattgcagagaaaaccgcgcgtatcgccgaacggaccacgaaactcaagacgctggcctcgcaatcggaccgggctcgccgcctccagaccatgccgggtgtcggaccgctgacggccgtcgcggtggaagcgttcggacctgacatggcacagttcaaaacagggcgtgcctttgcggcttggctgggccttgtgcccaggcagcattcctctggaggcaaggagcgcctggggcgcatgaccaaggcagggcaggccgatatccgacgcctcctgatcattggcgcaatgtcgcgactgaactggcttgggcagcgcacaattgcggaaggcagttggctgtcacgcatgttggcgcgcaagcccaggatgctggtcgcgatcgcgctggccaacaagatggcccggcagatttgggcgatgctgacgaagaacgaagattacaaggatccggcgccggcagtcgcggcatgatgctcatgtcgaactgctggtaacggtgccaaggggggtgaagacgacgacctgaatgggcaaaacgatcgaacagatccggattgggaaaaccagcaaaagcctgcgagctcaaagctcgaaaatgagatttggacccgattcgctgatcaccatcctggcccgcggcttctggaagtgccgcacatcgaggcctcaaagaagaccgcactcgatcacgcgccaacagggtcagaaacttcttgtactacgggcggcaaccacaga

SEQ ID NO: 6610 - DNA, 1486 bp, unidentified
  source 1..1486: mol_type = unassigned DNA; note = element_a4197b2
  misc_feature 1..2: note = core
  misc_feature 3..245: note = LE
  misc_feature 246..1466: note = CDS
  misc_feature 1467..1486: note = RE
  misc_feature 6..241: note = bridgeRNA
ctaatggggtttaccgggccgacagcgtgacaggctcggtgcctggtagccgcggatggatgagcactcaactgtccctggactttgagtcctagtgtcagatcgtgcctccatcggtggtcaggaaggcgaaccgctgatgggatgtcgtgcccgccgcgtttggcgtgagcacttgaccattaggtcgcgggttttcctgcaggctgctgaccgggtagttgagcgaagcggaggaagtcagagtgctgttcgtcggagatgactgggctgaggaccaccacgatgtggagatccaggacgagacggggcggcgacttgccaaagcccgcctaccggaaggcatttcagggatggccaggctgcatgggctggtcgggaggttcctgcccgaagacggcgccgccgccggggtgaagatcggcatcgagactgaccgtggcccctgggttgccgcgctggtcgcctccgggtaccaggtgtatgcgatcaacgcgctgcagtccgctcgtgcccggcagagccaaggcgtctcgggagccaagagcgatgccggtgatgctcacgtgctggccgatctggttcgcacccattcccaccagctgcccaccgtggccggagacagcgagcacgccggcgcggtgaaggtcctgacccggatgcaccagacgctgatctgggaccgcacccgccaggtgttacggctgcgctccagcctgcgggagttcttcccagccgcgctggaggcctacgaggacctcgctttccccgacgtcctggaactgttgaccaaggcacccgagccgaacagcgcggcccggctgacgcgggcgcagatcaccgccgcgctgacgcgggcccatcggcgcgaccgggaggccaagaccaccgcgatcatggccgcgctggccgccgagcaccttacccagccgcctcttattgcggccgcctacggcgcgactgtccgcgccctggccgccctgatcgggacctccaatgagcagatcacagccctgcaagggcaggttgaggcctgttttggtcagcacccggacgctgagatctacctcagccagcccggactggggctcgtcctgggcgcccgggtgctcgcagagttcggcgacgaccccactcgctacgacggcgcccgcgcccgcaagaactacgccgggaccagccccatcacccgagcctcgggcaagaagaaagtcgtcctggcccgatacgtgcgtaacaaccgactggccgacgccctgcaccagcaggcattcagcgccctgagcggatcaccgggagcctgcgcctactacgacgcactcagggaccgcgacatcagctacaacgcagccctgcgccagctcggcaaccgtctcgttggcatcctgcacggctgcatcaaaacgcacaccccctacgacgaggccactgcctggaaccagcacacccaacaagcagcagcttgacacctaagcccatgggatgt

SEQ ID NO: 6611 - DNA, 1386 bp, unidentified
  source 1..1386: mol_type = unassigned DNA; note = element_a4199d0
  misc_feature 1..2: note = core
  misc_feature 3..86: note = LE
  misc_feature 87..1124: note = CDS
  misc_feature 1125..1386: note = RE
  misc_feature 1156..1372: note = bridgeRNA
gatggggtggatggctcccgctcccggcatctaggtgccaaagtgtggttgtcatcgacgaccacgagcaagaggagccatccatcatgaaggttagcacagtcggccttgatctggccaagaacgtctttcaggtacacgccattgatgaagcgggagcggttatcgtcggcaaggcgctgcgccggcgccaggtgatgccattctttagccggcttgcgccctgcctgatcggcatggaggcctgtggcacgagccacttctgggcgcgggagatcgcggcactgggccacgaggtcaagctgatgcctcccgcttacgtgaagccctatgtcaagcgcggcaagaccgacgcgggcgatgcggcggccatctgcgaggcggtggggcggccgacgatgcggttcgtcgccatgaagtcacccgagcagcaatcgatgttggcactgcaccggtcgcgcgatctgctgatccggcaacgcacacagctggtgaacatgatccgtggccagctggccgagttcggcatcgtgctggcaaaaggcattcagcacgcgctcaaacttgtcgaacggcttcttgatggcgaggcactgtacattcctgcgctggcggccaaggtcgtcatcatcctggcggagcaggtccgcgatctgcaggtccggacaagcattctcgagagggatctgaagacctggtcgcgagacaatcaggtcgtaaaacgcctccagaccatcccgggcattgggatcatcacggcctcggccctggccgcttccgtcaccgatccgcagcagttcacctcaggccggcagtttgccgcctggctggggttaacaccccggcccaggtccagtggcggcaaggagcgttcgggtcgcatctccaagatgggcgatcagtatctgcgccgtctgctggtgaacgggatgacatcacggctgcgatgggttcgccaccacccggaggctcagccctgggctgccgagctattgcagagaaagccggccaagctggtcgctgtcgcactggccaacaaggtcgcacggatcgcctgggccgtcatgacccgtggtgagacttaccgcgcgcctcagccttcaacgcgggaggtgacgacgtgaggatccgatcgctcgaaatcaccgaagcgatcagctattgcgaggacgatgcgaagtgatggcgaaccggtcagaccggggatcgggacaacccgacaaatgtccaggacgcaacagtccgctaaccagactgggacccgatccgcggataccatcaaggccagcggtcatagcaccgcatcaacaggccggacacaagactgcacccgaccaaatcgccgcaccaacaataatccttgcaacgcgggagccatccacacag

SEQ ID NO: 6612 - DNA, 1590 bp, unidentified
  source 1..1590: mol_type = unassigned DNA; note = element_a42049c
  misc_feature 1..2: note = core
  misc_feature 3..245: note = LE
  misc_feature 246..1454: note = CDS
  misc_feature 1455..1590: note = RE
  misc_feature 3..257: note = bridgeRNA
cttgtatgataattccaacagggaattaccacacattctcccttcttttcatattttttgtatcgtggtctaatacattcagatatcatggacttttgattattaccctgtagctttgactactcgacaggagtgtattgccgctacctttatctgaattgtttatctgctggatgttgcaaagagctctcgctcggaagtacttatttcaatcaagtctacatggataatcgttggtggatatcatggtatcagactttatgaaagggaggtacaacctcatgatttatgtaggcattgacattgccaaactcaaccacttcgcatctgctattagttcagatggcgaaatactcatggagccgttcaaatttacaaatgacggtgatggattcagtctgttggaatctaaccttgcatccatctgtgatgacaaggacaacatcatcatcggtcttgaatcaacggcgcactatggcgacaacctagtacgataccttgttgccagtttctacaaagtgtgtgtgcttaaccccattaagacgtccacaatgcgaaagaataacattcgcaaaaccaagacggacaaagtcgacacatacatcattgctaaaactttgatgcttcaggaatccctcagatttgtcacattctatgaccttgatctgatggatttaaaacagcttggacgttttcgccagaaaaccattaagcagcgtacacgattaaaaatacagctgacttcttacattgaccaagtgtttcctgaattacagtattttttcaaatctggtctgcaccagaaatctgtctacgccttattaaaagaggctccaacaccgaaagctattgcttccatgcacatgactcatcttgcaaatctgcttaaagtgaactcgcacggacactttacgaaagagcaggcaaaagaattaagagttctagcacagaagtctgtcggtgccagcgacagtgctctatctattcagataactcacaccatttcacaaatcgagttactggatagccagttagaacaggttgaagctgagatgacagatatcatgaaattcaatgattctgttatcatgaccattccaggtatcggttatatcaacggaggaatgatccttggtgagattgatcatgttcaccgtttctccaacccgaataagctgcttgcatttgcaggcttggatccttctgtatatcagtctggaaactttcaagccagacgtaccaagatgtctaagcgtggatctagagtccttcgttatgcactaataaatgcagctcataatgtagtaaaaaacaatgccacctttaaaacttattatgacaagaagatggctgaaggccggtctcactacaatgcccttgggcactgtgccggtaagctcgtcaggatcatctggaaaatgatgaccgacaatgtagaatttaacctcgattaagaggtctgtatacaaacaccatatcgatagattttgaaaatgcacccttagggagctttattaaagttacccttttttaccatcgatacgaaaaagaaatttcttgctagtttagtcttgacttttcatagctggt

SEQ ID NO: 6613 - DNA, 1378 bp, unidentified
  source 1..1378: mol_type = unassigned DNA; note = element_a426858
  misc_feature 1: note = core
  misc_feature 2..69: note = LE
  misc_feature 70..1101: note = CDS
  misc_feature 1102..1378: note = RE
  misc_feature 1137..1375: note = bridgeRNA
caatggtatggaccccgcccttgccgggcggtggaatccccgaacgtcaaccgcttaaaggggaatgccatgcagatcgttcgtattggattggatctagccaaatatattttcgaggttcacggagtggatgcgcacgggaaggtcgtgctccggaagaccttgcgtcgcaatgccgtgtcgagcttctttgccaaccttccaccgtgtctgattggcatggaagcatcgaatggcgcccactactgggcaagggtgctttccgggttcggtcaccaggtccggctgatcagcccccagttcgtagcaccttacgtcaagtccaacaaaaacgatcgcaacgatgctgaggccatctgcgaagcagcgggccggccgacaatgcgctttgtgccggtgaagtcagtagatcagttagccgtgcaggcgcttcatcgcatacgcagccgcctcgtcagtggtcggaccaggctcgccaatcagatccgtggcattctcgccgaacatggaatcgttatagcgcgcaatatcgcgaagctgcggcagaaccttacttatatgattgagggcgatggaaatggcctcagcagtttggtccgagctctcgttggcgagctaaaggatgagctggccgagcttgatcagaggattgcagcctatgaccgacggattcgcgaactctaccgcaacaatgaactgtgtcagcgtctcggcaagattgagggcgtaggcccactcagcgcgacggcgctaatggcggcagtcggtgatcggcaaggctttaagaatggtcgccagttcgccgcgtggctcgggcttgtacccaagcagagatcgagtggcggccgcgatcgtttgtttggcatcagcaaacgtggcgatcgctacctacgcaccttgctgatccatggtgcacgcgcctcgctcactcgagcaaagggcaaacaggatccaagaagccgttggcttgagaaactccgggaacggcggcatcccaacatcgcggccgttgcccttgccaacaaaaatgcccgtatcgcctgggccttgctgtcgagcggtgaagcctacaatcctagcctctcagtcggatcgacttgaggacacctgaaaacagaacaaaggagatcccaccaagcaattgcaacgatcggcaaagatggtgagaacgggcaccccgtcgcttccataacctggtgtgtggaccggcacagctcggctgatgcctcggagccattgaggtggaggcgggcgaaagccatcgaggctcgcggcatagacctgtcacgccgcatcaggaagccggatatacgtcagcagctgtggccgttgatcctgaatatgccgaataatgttgcaatcgggcggggtccatata

SEQ ID NO: 6614 - DNA, 1482 bp, unidentified
  source 1..1482: mol_type = unassigned DNA; note = element_a42e42d
  misc_feature 1..2: note = core
  misc_feature 3..237: note = LE
  misc_feature 238..1461: note = CDS
  misc_feature 1462..1482: note = RE
  misc_feature 7..228: note = bridgeRNA
ctaatggggaccgaccacttcaccccgtgatggagtgaggctggtcaccgagccgccaacaggtgagcactgacagtcccaggacctcgagtcctaaggttagatcgtgcccctggtggtcggtgaggtctcctcggacggctggtgggatgtcgtgcctcgagcactgatccattaggaagctgctggagccctcgggcttgtgtcagtgaccgtcgatggagaggagccaggttgatgatctttgtcggagtggattgggctgaagcccaccacgatgtgttcgtccagaatgaggacggcaaacgacttgccggtggctggttacccgaaggagtggagggcatcgcccggttccacgagatggtgggcgcccacgccgaagagcccgaagaggtggtgatcgggatcgagaccgaccgtggcctgttcgtcggggcgctggtggccgccggctaccaggtctacgcggtgaatccgatgtcgacctcccgctatcgagaccggcactcgacttcgggggcgaagtccgaccctggggacgccaaggtgctggccgacatggtccggactgatcggcacaaccaccgccccgtcgccggggacagcgagttggcggaggccatcaaggtgctggcccgggcccaccagaccatgatctggtcacggacccgccagaccaacttcttgcgttcgaccctgcgggagttctgcccgagcgcactggtcgcttttgacaacctgaacagcggtgacgccctggaggtgctgaaggtggccccgacgccgacgctcggtgcaggcctgtcccgatccaagatctccgccgcccttcggcgtggagggcgccaacgacgggtcgacccacgggccgaggagatccagcaggccctgcgggcaccacaactacagggatcggccctggtggcggctgccatgggatcctcagtctccgccacggtggcggtgatcgccaccatgaacgcgcaggtggccgagctggcccaggagctcaacgtccattttgagcaacacccggatgccgaggtggtccgatccctgccaggacttgggaccatcctcagcgcccgggtgctcggcaagttcggcgatgagccgaaccggtatgccagtgccaagtctcgcaaagactacgccgggacgtcgcctatcacccgggcttcgggcaccaaacggaccgtcttcgctcgtcacgtccgaaacaagcgactggccgatgccgtctaccagtgggccttcacctcgatgaacacctcgccaggtgctcgcgccttttacgactatcgaagggccgccggtgacactcaccatgccgccctgcgacacttgggaaatcgcttggtgggcatcctccacggctgtctcgccagccactccacctacgacgagagcaccgcctgggggcaccgagcaaagatcgaacttgctcgagccgcttgacaagttacggccgtgggatgt

SEQ ID NO: 6615 - DNA, 1477 bp, unidentified
  source 1..1477: mol_type = unassigned DNA; note = element_a44a8f9
  misc_feature 1: note = core
  misc_feature 2..248: note = LE
  misc_feature 249..1460: note = CDS
  misc_feature 1461..1477: note = RE
  misc_feature 1..247: note = bridgeRNA
cgttacctttttgatcgtccccgatgagagtcggggagccaggtcacccggcccggcatgactgatcgcccctgtcgtttcgatgatccgggggggtgttgtcaccgggcctggtggcgtcggtggaccgctaatagggacaaggcgctgtcttgtgacgaagaagatcgtctcgccataacgtggatgccggctgccgtcgccagatctgtgaccaggccaaaccccgctcgaactggagtagtggcatgagcgtcgactacgcggtgtttgtcggcttagacgtgggcaagggcgaacagcacgcctgcgccctggaccctggcggcaagaaactccacgacaagcccctgcccaacgacgaacagcgcctgcgcgcgctgttcggcaagctcaacacccacgggccagtgctcgtcgtggtcgaccagcccgcctccatcggcgcactgcccgtcgccgtggctcgcgccgaaggctgccaggtcgcctacctgcccggcctgaccatgcgccgcctggccgacctgcaccccggcaacgccaagaccgacgcccgcgacgccttcatcatcgccgacgccgctcgcaccttgccgcacacacttcgacgggtcgacgccggcgacgaagccctcgccgagctggaggttctcgtcggattcgacgatgacctggccgccgaggcgacccgggtgaccaaccggatccgcggactgctcgtcaccatccacccggcgctggagcgggcgctcgggccgcgcctgcaccatcccgccgccctggagctcctggcacgcttcggcggcccgaacggcctgcgagacgccggacgcgagcagctcctgacagtcgcccggccactggctccgcgcatggcgggccgtatggtcgacgacgtctgggccgcgctcgaagcccagacagtcctcgtccccggaaccagcgcggccgagaccgtcctgccccgcctgtcacaatcgctacgaagcgtgctcgaccagcgcaaacaggtcgcggccgaggtagaggcgatgcttgatgcccaccctctcgccaaggtcctgatcaccatgcccgggctcgggatcaggaccaccgcacggctcctgctggagatcggcgacatctccgccttcgccacccccgggcacctcgccgcctacgccgggctcgccccggtgacccgccgctccggttcgtcgatcaagggtgaacacccgcccaagggcggcaacaaggcactgaaacgggccatgttcctcgccgcgttcgcatctctgtccgaccccgaaagcagggagtactacgacaagaagcgcgccgagggcaagaagcacaacgccgccctgatctgcctcgcccgtcgccgttcagacgtcatctacgccatgctccgcgaccgcaagccctaccaaccccgccggaagaaccgcacccgaaagccctcggccgcttgacgaatcccatagggaca

SEQ ID NO: 6616 - DNA, 1169 bp, unidentified
  source 1..1169: mol_type = unassigned DNA; note = element_a44b306
  misc_feature 1..2: note = core
  misc_feature 3..225: note = LE
  misc_feature 226..1155: note = CDS
  misc_feature 1156..1169: note = RE
  misc_feature 45..230: note = bridgeRNA
cttgtatctttaatttctgtttctctttgtgcaaaagagggaaggtgcgagatccgtcgccaaggctgctccttggaggtaaaccaaagagcgcgccgtagttcgatccgcacctgcccttggatggtacgtaaactcgaacagttactggagcgaccaggctgctccccgggtggggcagacagcctggccagctcgcatttacaagcaggagttatttaacctatgaaacaaagcgttgtctatatcggggttgatgtagcgaaagcgcatctggacgtggcctgggagaagcggtcacgtcgttttcctaacgacaagagcggccgagccgctttggtcgcgtggatcaaacaaagtccgactgcggtgcagttgatctgcgaagccagtgggggctacgagcaaagattacttgagagcctggagcagagcggcctcaaagtcactttggtgcaggccaatcgagtgcggcagtatgctcgtgccgctgggatcctgagcaagaccgacaaggtcgatgctcgagtgctctcggcttttggtgcagcgatgcagccaaagccaacggtgcctcagtcggccgaacaaaagcgactgcgcgaatacgaagcacagcgtcggcatctaaacaggatcttgctggctgagcaaaatcgactggcccagttaggctctgcagagctgcgggccttaaaccgcagcctcatgagcaaaatcaaaaagcagatcgctgtgcttgatacacgtattggcactttgatcgcgcagaatgaagagctccggctgaaagcgcagaaactcacttccattacgggcgtgggcgagcgcactgcagcactcgtcctggcgcaaatgcccgagttgggtcagctcaaccgccgtcaagctgcagctctgggtggtctggccccatttaaccgcgatagcggcactttacgtggcaaacggaccatcttcggtggacgacgcgctctccgtagtggcctctacatggctgcactagctgctgctcggcacaaccaaatcctctcgcccttctatcagcgtctgcgcgccacaggcaaacctcataaactcgctctaaccgccgttatgcgaaaactcctcctcgccctcaaccacagcctcaaacccatcccctccccagcttgaaaacaagacagtta

SEQ ID NO: 6617 - DNA, 1395 bp, unidentified
  source 1..1395: mol_type = unassigned DNA; note = element_a457d27
  misc_feature 1..2: note = core
  misc_feature 3..88: note = LE
  misc_feature 89..1126: note = CDS
  misc_feature 1127..1395: note = RE
  misc_feature 1141..1382: note = bridgeRNA
tgatgaggtggaacggctcactgccgcaaaatccgagtgctagaatattgtcattcgttcaacgccacaaagtaggagccgtttcgttatgcagatcgcaactatcgggctggatttggccaaaaacattttccaggttcacggagcagacgccgatggggcgccggtgttcaaccgtaagctccggcgtgccgaagtcctgcggttttttgagaagcaaccgccatgtcttgtcggcctagaggcgtgcggcggttcacactactgggcacgcgagatcgcagcacttggccatgaggtgcgtctaatcccgccagcctacgtcaagccttttgtcaaacgcgggaagacggatgctgctgacgctgaggcaattagtgaggccgtgacccgaaaaacgatgcgatttgttcctgtcaagacggccgaacagcaagccgcggcgatggtattaaagacacgtgggcttttggttcgtcagcgaactcaattgatcaatgcgttgcgcgctcatttgtcagagttgggtatcattgcgggcatcagctccgcaaaagtcgcgggattgattgatatcgtgcgcgatgaaaacgaccatcgtcttccgggcgctgctcgtctagcgatgtcgctagtcgccgatcagatcgaggcacttgcaacacaaattggcgagatcgagcgggagatagtgcaagaagcaaagcgagatgaggacatgcgacgcctggcaacgataccgggtgtcggtgcgatcaccgccgcgtctatcaaggcgcttgtaccggaccctgccgcgttcaaatcttgccgccattttgccgcttggctgggattgacgcccaaatcccattctagcggcggcaaagagcggttaggagctatatcgaaaatgggtaatcgcgaacttcgtactctgctagtgctcggggcgacctctgtgttgcgacggataaggggtaatgataaggcaccgggatggctgggtgctcttctctcgcgcaggccttacaagatcgtggccatcgcgctcgcgaacaagatcgcccgcatcatttgggtactgctgaccaggggtgggatatacaggggtcttgaggcagcgaaaagcgcagtgagcgcttgagcctcgacaatctaagaaaccgaccggtgcggtagccgggagaggtaaggtgccgaaacagacgatgatcccatgggacgaaatcccgatgcaggataggccttatgagacaatgcgatcaaatcgcgcgtagctgattagcccctcgcatcgcggacttcatcgaggccagcggtaccgcaccgcgctaaaaggccggacatatgaccgcaccgttcccgtgcgacgccgtcgaaagaaagcgcttgcccgaagggccgttccacata

SEQ ID NO: 6618 - DNA, 1731 bp, unidentified
  source 1..1731: mol_type = unassigned DNA; note = element_a465681
  misc_feature 1: note = core
  misc_feature 2..358: note = LE
  misc_feature 359..1585: note = CDS
  misc_feature 1586..1731: note = RE
  misc_feature 52..330: note = bridgeRNA
cctcgtataatatcttttagatacataaatgtaccttgaaaacttaataaatatttgttcaataggcttagttaagcccatgatataattgtcccagtgtcaatcaggtaatagttctgctttcctctgttgaaccggtaatggttgcttcataataagtctgttcccctgacatggaagttagcttcaaaccggctggctgtttgcttaagtacatggactaccatctagcagtgtggtttcgcatctgtccatcttaagctggattcttatatgcgagggtgtcgatgctccatgatcatgggttttaccaagccgattgaacactcaaatcttattacgaaagaaggtgatttttatgaacccactttacgtcgaaattgatgtaagcagcagatccaatgtcgtttaccttatgcttcctaacggagataaacacagcaacttttcggttgccaactcacaggttggttctgcacagctggtaaaaagaattctttctgccttaacttctcattcccttgactcggttctgattggtctcgaagcaacctctgtttatggagacaatctcgtgtacttcttaagggaagatgccactctggcaccgtttaacagaaagattcatgtcctcaatcctaagcaggtcaaaaagtttcatgacgcttataatgaccttccaaagaatgattatgtggactcttttgttattgctgactgcctgcgtttcggtagaatcaacaaagaggtatatatcggagactatcgctacttagctcttaaaaacctcactagagcacgctactacgctgtctgcaacctcgtcaaagaaaaacaacgttttatgaacgtacttttcaagaagcattctacgatgacgcaggagaaagtattttcagatactttcagtactacggctcttgccgtctacgaagaatttgaatccgcagaagcattagccaatatggacttacaagagcttactgatttcattatggaaaaagggaaaaaccgcttttctgatcctgattcagtagccaaagccattcagaaagccgccaaaagttcctaccgtttgcctaagacggtaaatgactccgttaatcaggtgctttctatatccataacctccatgaaggcattggaatctcaaatcaaagagttcgataaagcaatctctgctcaaatggaactcttgccaaatgtattgatatccattccaggtattggtcctgtattctcagccggtatcatggctgaaatcggagatatcaatcgtttcggaaaccatgctcagcttgctaagtatgcgggtcttgcatggaagcaacatcagtccggaggttttgaagcccagacaacaagactcataaattccggtaatcgctttttaaagtattatctatgtgaagcagcattctctcttgtaagatgcgacaaggaatacagcgacttctaccacctcaaatataaagaggtaaacagatatcaacacaaacgcgcactcgcattaactgcccgtaaatttgtgcggttggtctttgtactactcaaagacaatcgcctatatcgcccggcaaagtagaataacttctacttgctgatgagctgtgccctgctcattttttaacgatgatcgacagggcttaggtgggtgttttttgccttcgtgagatatggcaaaaaatatatgattttttctcatttctcacttgacatcacaccgctgga

SEQ ID NO: 6619 - DNA, 1478 bp, unidentified
  source 1..1478: mol_type = unassigned DNA; note = element_a46cd97
  misc_feature 1..2: note = core
  misc_feature 3..175: note = LE
  misc_feature 176..1222: note = CDS
  misc_feature 1223..1478: note = RE
  misc_feature 1247..1477: note = bridgeRNA
agaatgaaatggacgcctcccacctcagccgttcacgcgaagtgcgccacaagggcgatggatagaaggaaaaatatttgagggtagcgagaggtggaccctcgcgggccaacggcgtcagaagcgcctaaagtgaaagagcaatgctttcaaggctaaccggaggatccacatcatgaatgctactcccaaatcggtggtcggtgtcgacacggccaagagcgtgttccagctgtatacggtggataaggaaacaggcgaagtgatcaaccagcagatcaagcgtgcgcagttcctgcggtggttcgctaaccgtccgccttgcctggtcggcatggaggcgtgcggaggttcgcagcactgggcgcgcaagctccaggggctggggcacgaagtgaagctgatgagcgggaagatcgtcaaggccttcgtctgcggaaacaagaacgatgcagccgatgcacgcgcgatctacatggcaacgcagcagccggaagtgaaagctgtggcgatcaagaccgaggcacaacaggccgtgctggcgatgcaccggatccgtcagcagttggtgaagatgcgcacggcgcaaataaattccctgcgcggtttgctggcggagtacggcgaggtgttcggcacgggcaggaaagccttcgatgccggcatgaaggtggcgctcgagcggttggccgagcggttaccgatgccgctcatcgacacgctgcgcgaccagtggaacgaactggcccggttggatgaacgcatggcccgcatcgaagcctcgctgctggcatggatgcggcaagaccgcgccgctacggcgatctccgcgattccaggcgtcggcctgttgaccgcgaccgcggcggtggctgcgatgggcgatgcgaaggcgttccggtctggccgtgaatttgcggcatggatcgggcttataccgagccagaccggcagtggcggaaaggtacggctactgggcatgagcaagcgcggcgacacctacctacgcaccctcctgatgcacggtgcgcgagcagtgctgcggcgccccaggatgctcagtccttggctacagcaactgagccagcggcggccactgaacgtagtaatcgcagcgctggcaaacaagatggcgcgtacaatctgggcagtattggcccatgaccgcgcatatgacaaggaccacgtcagcatgcggccggccacggcgacagcaacatgaagagtaactcaacttgcgaaaagattgttcgtcaccagttgcttaaggtatcgacagcgatgacagacaggtcagaccgggatccaccaagcctgaatggagcctggggcttagcagcccgtgtagagaatgaggcgtggatcagcgaatttcatcggggccagcggcgatgccgcatacaaggccggatatagaactgcgactttcctcgtctgaacaaaactgaaaataccttgcaaaaggggggcgtccatat

SEQ ID NO: 6620 - DNA, 1073 bp, unidentified
  source 1..1073: mol_type = unassigned DNA; note = element_a47145f
  misc_feature 1..2: note = core
  misc_feature 3..188: note = LE
  misc_feature 189..1061: note = CDS
  misc_feature 1062..1073: note = RE
  misc_feature 25..198: note = bridgeRNA
cttctgtatctcggctttgctattctgaccccgtcagccgccttggcagaggttgctgacggggcggtgtttggcgtctgagccttgtgggtttgaccacgtttcctagcgagccagcaccgcctctcttcatcgtctcgaacagttgaatgcggccgccgaggaccgcggagcagaaggaagagagcatgaatacggtatcacgggaccggatcattggcatagacgtcagccgcgattggttggatatctactgtctaccagaaggcaagcatgcgcggctgccgaacaaggttgaagggcacgagcaagtcgctcaactcgctcgtgaaccgggcgcgctggtttgcttcgaggccactggtggacaggaatggcgtctgtggtccgcccttgacactactgggattgcgacccggcaattgccgcccgcccagatcaaggccttcgccgcgagccaaggcacacgcgccaagaccgatcggatcgacgcggaactcattgcgcgcttcatggccttccggccggatgcgggacgtgtgttgccacatgaaaagatacgccttctcagggcgttgatatcaaagcgcggacagctcgtcgaaacacgtaaacggcttttggcgcagatcaaggcgcacgggaagctgggatcgccggatatgttcgatgccatggatgccgagttgaaagaccttctcgatcgccagattgcagagctgaacgttcggatcgagcagacaatagcctcggataatgacctggctgcgattgccgatgtcctgcgctccgttcccgggatcggccccgtcgccagcactatgctgatcgccgagatgcccgaactcggccagctctccggtgagcaggccgccgcgctcgcgggtctggccccaatcgcacatgacagcggctccatgcgcggcaagcgcgccattggaggaggacggcgccagctgcgacacgtcatgttccaggcggccctcgtcgcacgcaagctcgtcacgattgcgaacgcgctctgcaaaaaccgtcagaaatgggccgaccaggccacctgacagatacagttg

SEQ ID NO: 6621 - DNA, 1440 bp, unidentified
  source 1..1440: mol_type = unassigned DNA; note = element_a475fe9
  misc_feature 1: note = core
  misc_feature 2..226: note = LE
  misc_feature 227..1426: note = CDS
  misc_feature 1427..1440: note = RE
  misc_feature 12..232: note = bridgeRNA
ctactagaggattcctgcaggatcggtgtcgggccagactcggtccaggcgctcggcgggtttgctctctattgggctgcccactcgtgtgcgggtgtggctcactttcggtctgcagcccgccgggcgccgtgacggggcgtggctcaagaagggactgctctgctcgtagtagcactgcccgcctcgccgtccctatcggcacagtgcaggcgggagcccacacatggagcaggtcatcatcggggttgatccccacaagctttcggccacgatcgaggtcatcgacggtgaggagcagctgctcggggcgggtcgcttcaccaccgaccaggccgggtacgcggcgatgcgaaggtatgtgaagaactggccagagcgggtctgggcggtggagggcgccaacggtgtcggccgtccgctcgcgcagcggctgctggaggcgggcgaacacgtcgtcgacgttcccgcgaagctcgctgcccgggttcggttgttcgacagcgggcacaaccgcaagaccgacgcccgcgatgcgcacgcggtcgccgtggtcgcggcccggaccccgaccctgcgggtgctgcaggtcgacggcgaactcgaggcgctacggatgctcaccgaccgacgcgaagcactcacccggcgacgggtccagaccgtcgaccggctccaagcgctgctggccgaattactgccgggccaggcgaaacgcgacatcaccactggccaagccagggcgatgctcgcgtctgtgcgcccccgcgacatcgccgggaagacccgacgccgcatcgcggccgaggagctcgccgagctggtcgcggtcgaagcgaagatcaagaaggccaccgccgaactcaagaccatggtcctcgcgcggcagtcgcgactcatgaacatccctggcgtcggacccgtggtcgccgcccggatcctcgccgacgtcggcgacgtggcccggttcgccgaccggaaccggttcgcgtcctggaccggcaccgcaccccttgacgcgtcctcgggcgagcagaaccgacaccggctgtcccgggccggcaaccgccgggtcaaccacatgattcatatcgccgcggtcacccagctccgtcacgaccccgtcggccgcggctactaccaacgcaaacgcgtcgacgggaagaagcccctggaagccatgcgctgcctgaaacgccgcatctccgacgcggtctaccgccaacttgtcgccgacgcgcagcacgctgccgaccacgacaccggcacgggcccgggagggcactgcggggcgactcaagaatccagcgcggtcgactctcacccgcacatcgacacttcggatcggccacttcccggacccgcacccacgacgctacgcccgacccctccaacccggaagaggccactcacaccagccggttgacaacagaagggagc

SEQ ID NO: 6622 - DNA, 1404 bp, unidentified
  source 1..1404: mol_type = unassigned DNA; note = element_a477f1d
  misc_feature 1: note = core
  misc_feature 2..88: note = LE
  misc_feature 89..1129: note = CDS
  misc_feature 1130..1404: note = RE
  misc_feature 1174..1396: note = bridgeRNA
caatgggatgaacacccccacccttaacggcatcatttgtgccatagtgtagtttcgaccaacactaaacaagacaggagcgttcaccatgaatattacaacaattggcatcgatttggcaaagtcagtatttcaacttcacggaattgacagctttggtaaagtgctcatcaaaaaacagatcaaacgagctcaaatggctgaatattttgtcaatttgaagccttgcttgattggaatgcaagcttgtgggagtgcgcactactgggctcgcaaattagagagctttgggcatacggtcaaattaatgcctcctcagtacgtcaagccgtatgtgaaaaccaataaaaatgatgctgccgatgcagaagccatttgtgaagcggtgacgcgtcccaatatgcattttgtaccgattaaatctactgagcaacaagccatcctgtcgcttcatagaatgcgccaaggctatgtcaaggcgcgcacagctcaggccaatcagattcgaggtttgctggctgaatttggtcttgaaataccacaaggtattggatatatctcaaaacgtgtacctgacattcttgaagatgctagcaacgagttgcctggtatcttgcgtattgaaattcaatctctgctagagcacttaaatgaattaaacaccagggccgataattgtaaaaaaaagattcttgcatggcataaacaaagtgaaaccagtaagaagttggaggcaatacctgggattggtccactcaccgccacagcacttattgcatcgataggggaggcaaagaattttaaaaatggaagacaggttgcagcatggataggtttggtgccgaggcaacattccagtgggggcaaacaaaacttgctgggaatcagcaaacgcggtgacatctacctcagaacgttactcattcacggtgctaggtctgtgatctatcgatctggacaaaaggaaaacccaacagataggcagagttggttaaatcaattgacgcagaggagaaacaaaaatgtagcggcggttgcgcttgcgaataagaatgcaaggattgtgtgggccatactccatcacaatcgtgagtatcaggataaccataaaatgttagttgcagcgtaagaaaattcaggtttaacaagaagaagacagcggagtgtgaactccaagattgcacaggcaatcaagaagtgatggcaaaacaggtaagaccgtgattgacaaagcccgtgccggacgaagcacacaaagtgcgagaaagcgatagaggtgtcaatcagcaaatcccatcaaggacagtggaaaaaaagccacatcaaagtccgaatgtacgggtgcaatctttatcttaaagccggaaacaatcgattgcttggcatcccgggggtgttcatgta

SEQ ID NO: 6623 - DNA, 1569 bp, unidentified
  source 1..1569: mol_type = unassigned DNA; note = element_a483766
  misc_feature 1..2: note = core
  misc_feature 3..246: note = LE
  misc_feature 247..1425: note = CDS
  misc_feature 1426..1569: note = RE
  misc_feature 3..226: note = bridgeRNA
ctcgtattataaagtagtagtgtttatagtccctctccaaggactgtatgctatactgttggagatgctgtggattgtttaatttctcataccactcgatggtttttgaaaggctacaaccacagtctctttgtatatttgttaatcagttagataccgcatgacggtttatttagaacgaggttacaatcgcaaggagttcctgtggctctaaacagtatcatatttattcaaaggagttttctcatgatttacattggaattgatgttgccaaagacaagcacgactgctttattacgaactcagatggtgaaatattatttaatccctttaccatctcgaacaatcgggaaggttttgaaaccttatttcaaagaattaaatctgttgccgaagatttttctaaaattaaagtaggactagaagccactggacactacagttacaatcttctgggatttcttcttgataaaggtttgccgacctacgttatcaatccgttacataccaatctttacagaaaaagtcttagccttagaaagacgaaaacggataaagttgattcccgtaccattgccactatgatgatgtctgacgtgaacttaaagtcctactcagacacatcttaccacaacgaagaattaaagtcactcactcgttatcggtttgataaagtcaaggaacgggcaaagctgaaaagctctgtttcaagacttgtctgtactcttttcccagaactggaaaaactcatccctacgcttcatttggcatccgtttatgctttgctttctgaatttccaagtgcagatgctgttgcaaacgcacacctcacaaggctttccaacctgctctctgagagttctaaaggcagatacgggaaagatactgccgtcatgtttcgcgatgttgcaagaagttcaatcggctctcatatgcctaccaaatctttggaactaaaacacaccattaaactcattcaggaattaaccgttgagattgatgaaatcgaatcagccatcaaacgaatcatggatgaacaaatccagtcgccaatccttaccattcccggtatcagttaccggatgggcgcaatgatcatcgctgagattggagatttcagccgttttgattccgcagataagatactcgcatatgtaggaatgtctccctccacttatcaatctggacagttagataactgttattcccatatggagaaacgaggttccagataccttcgatatgccctttacaatgctacaaaatatgtctgccattgggacgaatcctttggcgcatatctggaaaagaaacgctcggaaggcaagcattataatgtcgcattatctcatgccacaaagaagcttgtgcgattgatttttgcaatggagaaatcgggaaaaacatatctgccaacagcttaattttttctgtaaatatctccttttagagcacctgtaaagatgctcttgttgtcatgcggttttcaaggttcagctatatctgaagtgcatttctgcaattcattcaaaaaactttcattttagacttgacttttaatagttagt

SEQ ID NO: 6624 - DNA, 1661 bp, unidentified
  source 1..1661: mol_type = unassigned DNA; note = element_a48705d
  misc_feature 1: note = core
  misc_feature 2..148: note = LE
  misc_feature 149..1411: note = CDS
  misc_feature 1412..1661: note = RE
tagcacctacggaaggaagaactggagccaccgagggaacggtgcgcgcagcttttttgctgcaagcgcgcatcgttcgaggtggccatggccagtcgaagtacctctagaatgtgagtgttcacaactcattccggagagaccgaccatgaccagtcagaattctatacctgccgatgctgtgttggtagccatcgacatcgccaaggttcgcaatgaagtgttgatcgaagcacccggccataaacgccgccgtcggttatctgttctcaatacgcgtgcagaacatgaccatctgatcgcgattttgcaatcatatgaccgaccggtggtctgcgcctttgaggcaacgggtaactatcatcgtccgatcgcctggcggttggtggaagccggcttcgaaacgcggttagtgtcgtcgctagcgcttgcccgcacgcgagaagccttgcacaacagttgggacaaaaacgatcccaaggatgcccaggtgatcctacacatgttgaggatccactcgactcaggtctatcatgatcccttgcgtgctggcatcaacgacgttcaagaattgtcgaagacacacgaagccattgctaacgccaagaccgagatccaacatcgcatcctgacgcattacctgccgctgtattttccagagatcgagcgtttccggggtaacagtcggagcgactggttcttcgcgttcctcgacgccttccccacaccatcgagcatcacgacactgacgaaggagaagttcgtcgaagcggcatgggatgttgtcggcaggaaagtgagcaagtcacagattttaatggatatttatgagactgcccgcacctcgattggcttgccattgccgctggatgcgcctgcaattcgcatgtttcggatggttgtcgccgaagcccgcagcctgatccgccaacgcaacgagatcgaagcacaggccgatgatttgctgcgaaacagccgtgattatcagatcctgcggcagattcctgggatcggtccgatcaacgcgctaacgatcattgcggaggctggggacctgcgccgctttcatcatcaccgtcagtttctaaaattctgcgggctggatctgtcgacacagcaatcgggccagtatcgcggccaaacccgactttccaaattcggcaacgcgcggctgcgacgaaccctgtggattgctgggcaagttgccatccgccagcgtgagaacggcttccgacataaattcgaacgctacatcgcgagagatcgtgacaatcccgatctccgccgcaaggcaatgaccgctattaccgccaagatggcgcgtgtcgtacacgccgtcgtcaaaagcggttcagattaccggcccttcgttgaagggcgggtaccaggtggaagaacctctgtcagttagagccgtgagggcatccttcgaatgaccctgtagacaatgcttgggtcttccacctggaacagaagctcgtgttaaggacggtgagggccaaaatgatggaccctgtgtttgctatggacgagaccttttcccttgccagtggaagccgcctggttcgacgatgtgacttgacgagcgtcatgcagcgtgagcatgctgacggacagagaaactttgcctgccaagcccattttcttccgcacttaggacg

SEQ ID NO: 6625 - DNA, 1390 bp, unidentified
  source 1..1390: mol_type = unassigned DNA; note = element_a49b8b8
  misc_feature 1: note = core
  misc_feature 2..89: note = LE
  misc_feature 90..1133: note = CDS
  misc_feature 1134..1390: note = RE
  misc_feature 1164..1385: note = bridgeRNA
caatgggatggactcctcctcaccctaatcggcatcaatgtgccaaactgagattgatgtttcagttaatgagaaaagaggagtccacaatggaaattataagtcgagtgggtgttgatttggcaaaaaatgtttttcaattacacggtgcagaccgtaaaggtaaaacagtttggaagcgtaagttatccagagacaaatggttaacggttttatttgcaacggtgaagccaggcgcagtgattggtatggaagcatgtgcaggctcccatcactggtccaggattcttatgagtaagggctacgaggtaaaaattattccccctcaattcgttaagccgtttgtaaaaagcaataagaacgatgccaatgacgcacaggcaatatgtgaagccatggttcgtcccgatatgtacccagtcaacgtaaaaacaattgagcagcaagatatacaggctattcatcgtgtccgaaatgaaatcaagagtcatcgcattgctaagggtaatcaaatacgcgggctggtagcagaatacggtttagtcgcaccgaaagaattatcatccttgcgcagagcgattccagaatggttagaagatgcctccaatggtttaacgatatttttcaggcagctactgcaaggcttatatgaagatctatgttcactggataaacgcatgactgagcttgataaacagattgctctcattgcacaacaaaatccgattgctaaacgcttacaacaattacgcggtgttgggccattaattgccacagcacttgttgcgacgatgggcgatggtaaacaatatcgtaaaggcagagacatggcagcagccattggtttaaccccacggcaacatagttctggtggaaaagaccggttactcggaataagtaaacgaggcgatgcttatctgcgatgtttactggtacatggtgcccgttctgccatgcgtacggcaaaagataaagacgaccgattaagtcgatggataacaagtttgcaagacaggcgacacgccaatgtcgctgcatgcgcaatggcgaataaaatggtgaggatggcatgggcgatgatgacccgcggggttgattatgatcccaattttaatgttgtatccgcaaactaaaggagagcaataaggtgaacgtattcaattaacgattgcgaagtaagctgtgtgatggcaaacaggtcgaaccggcgcggataaaacccgagaatgtccgagtgtgtaataacacgtcaaagcaatagggaatctgcgcgcgaacaacccattatggcccggcatcaatgtatgccacctgaagaggccggatatacgtatgcagtcgagccaacagccattaacagattacttgcaaacgaggaggagtccatata

SEQ ID NO: 6626 - DNA, 1355 bp, unidentified
  source 1..1355: mol_type = unassigned DNA; note = element_a49e92c
  misc_feature 1: note = core
  misc_feature 2..66: note = LE
  misc_feature 67..1089: note = CDS
  misc_feature 1090..1355: note = RE
  misc_feature 1120..1343: note = bridgeRNA
tgatgctgtggacggctctccaacccaccggcagctttggcttccggtttgagctggaggagagccatgggtcaggtagtcacgattggtttggacatcgcgaagtcggtgttccaggtgcatggcgtcgatgctgaaggcagcgtcgtcattcggcagaagctcacgcgagcgcgcctgttgaagttcttcgagaggctggatcccagcctggtcgggattgaggcctgcggaacagctcaccattgggcccgcgagctgatcggccttggccatgatgtgaggctgatgccgccgagctatgtgaagccctatgtgaaacgccagaagaacgacatggccgacgcggaggcgatctgcgaggcggtcacgcggccgaccatgcgtttcgtgccggtgaagtcgccggaacagcagagcgtcatggtgctgcatcggacccggtcgatcctgatccgccaacgcatccaggtttccaacgcgatccggggtcacatggcagagttcggcatggcggccgcggtcggccgtcagggcctccaggcgctgatcgcgatcgtggatgattcatcggatgcccgagtgccagcggaggcccgaggctgtcttggcatgctggccgcgcagttgcggatggtgaacgagcagatcctggatactgaccgcctgatccggaccaatgcccgttcaaccgaggtcggccgccggctgatggagatccccggcgtagggcccctgctggccagcgccctggtcggtacgatcgccgatccgaaggccttcagaaccggccgtaacctggcggcttggataggcctcgttccacggcagaactccagcggcggcaaggagcggctcggcgggatcaccaagcagggcgatcgctacctgcgacagatgctggtcgtcggtgccctggcggtcgtgcgctacgccgtgcgtaacggcacgcgccgaccttggctggtccagctgctcgcgcgacgaacgccgaaggtcgcggctgtcgcgctcgccaacaagaccgcgcggatggtctgggcaatcatgacctcgggcgagcgctacagggagccgctggcggcgtagagacaggctgaggcgaagcaccgaggccgacgaacttgggaagggcggacaggatgtaatgcaacagccggtcgataccggaaggcgagaaaacccacatgcgccagagcgcctcgagcgcgtgcttttggtcgggacccgtcttcgcggaaggcattatggccagcggtcatgcgtaccgcaccaacaggtcgaacacatggccgcaccgaccaggctcagcagaacgtcagatcaacccttgccaacggggagccgtccacaca

SEQ ID NO: 6627 - DNA, 1371 bp, unidentified
  source 1..1371: mol_type = unassigned DNA; note = element_a4a1644
  misc_feature 1..2: note = core
  misc_feature 3..79: note = LE
  misc_feature 80..1108: note = CDS
  misc_feature 1109..1371: note = RE
  misc_feature 1082..1358: note = bridgeRNA
cgatggggtggacgccccccggcggcatcgaatgtgccaaggtagcgggtgttgaagcaccgctatgaggagagcgtccatgaaagaggttagcatcattggcctggatttggccaagaacgtgttccaggcgcatggtgccggagcggacgggtccgttgtattccggcgcaagctatcgcgtgcgcagcttttgaagtttttaagtaagctgtcgccttgcgtggtggcgatggaggcttgcgcgagcgctcaccactggggccggatgatcgccaatttgggccacgacgtcaaactgatccctcccgcctacgtgaagcccttcgtgaagcggcagaagaatgacatggctgatgcggaggcgattgcggaagcagcatcgcgtccgaccatgcggttcgtcgcggtaaagagcgaagcccagcaggcggcagagatgacgtatcgcacccgcgatctcttggttcgacagcgcacgcagacaatcaatgccctgcgggctcatctggccgagcagggcatcgtcgcgcccgtcggtcctgctcatatcggccgcctcgccgcggttgtcgaaggtgatggtgagactttgcctgcggctgtgcgggagctcgcgcacctgcttctgaaccagattgcagatttgagcgggaagatcgcgggtctggatgccgaactgcgccgacgtgcgggctccgacgataccgcgcggcggctgacgacgattccgggtgttggtccgatcaccgcggcggcgatcacaaccttcgcgccaccgatggagaccttctcgaaaggtcgggattttgcagcttgggtcggccttacaccgagacagcattcgagcggcggcaaggaacggcttggcaggacgtcaaagatgggtcagcgcgacatccgaaggttgctgatcgtcggagctgtcgcagtggtccggtgggctgcccgcaaaggtgcgcgagagggctcgtggctcgcgcggatgctggagcgcaagccaaagatgttggtcgcgatagctctggccaaccgcatggcgcgcacggcctgggcgctgatgcgcaaaggtgaggattatcgagatccggcgatggcgaccgcataggtcaagctcgccggggtgtcgccgagaatgtgagcaggacagaggaacgtaagggcaaacggtcaagagaccggatcgggagaaccattattccggacgatgcgccgtcgagcgcgggtaagcgaactggacccgatctgcatatctccatacaggcccgcggcgaatgaaaggccgcaacttcgaggccggacacacgaccgcacctgatcacatgccctaacggccccaaaagcgcttgcattcaggggagcgtccacaca

SEQ ID NO: 6628 - DNA, 1705 bp, unidentified
  source 1..1705: mol_type = unassigned DNA; note = element_a4a4f31
  misc_feature 1..5: note = core
  misc_feature 6..206: note = LE
  misc_feature 207..1007: note = CDS
  misc_feature 1008..1705: note = RE
  misc_feature 1279..1500: note = bridgeRNA
cttagacaaaatggcgccccttctgggcttgaaaagcgtgggttagatgcgagcatttaccacaaaacaagaaaaccaacagaaggaacgcaatgaaaagaaaattatatgtaggaatggatgtccacaaagaaacgatcagaatcgcgtatttaacgagcaattcaaaggaaatattgaaagagcaacaaataaaataggaagaagtgcagatcaagaaattcatcaatcggttaaaattagaatgggatgaaatagattgttgttacgaagcgggagtaacgggttatccactttacagatatttaaagtcattgggagtgaactgtatccttgtagcgcctggaaagattccaagacaaagttcggataagatcaaaacggataaaagagacgcgatcaaattagcgagattaatgcgaagtggggaattggaatcgattcatgtaccgagtgaagaggacgaagcagtaagagattatttaagatcccgtgacagtcttcgtttggatttaggaaggaatcgtcaaaggttgatgaaattcttattaagaaaagacataaagtattccacaacgaagtattggacggtgagtcattacaaatggttgaacaatcttcactttaacaacgagatccttcaagagacgtttaacgattattatagtcgagtaagagttcaagaagagaatttaaaagcgatggataagaagatacaagaggtagcggaaagtgaaccgtatcgagagaaagtgggaatcttaagatgctttcgaggagtggactatttaacggcaatgttcttactttgtgaggtaaacgacttcaagcgattcaaaacggccggttctttcatgagctttttaggacttgtccctggagaatattccagcggttccaaaagaaaacaaacgggtattacaaaaactggaagtcccaggcttcgaagaattttgacggaagcggcctggcaacatcgcttccctggaacaggaagtaaatcgtaaccgcacgtaggtcaggacaacctgcgttagtcgttggtttagcggaaaaagcttctctcaggttacacaagaaatttcgcaatctacagctaagaggaaaaactcctcaagtgatgataacggcagtttcaagagagttatccggatttctttgggcggcgatggatctggttgcatagagttataagtaaaagctatctcaaaaatatcttagaacgattgaaatcggcgttttaagcaaagataaagtatttttgagataacttctcatgtttcattcaatgattgaattcgttagagaaaatgtacgataaaggaggaatacttgttggcgagagtgttgaagcaaatttgaatttcaaatttgaccttcgtttttagactaagaacaactcccgatgtatagattatcctgcggtatccaacccgcgaatatcagtctgatcaatcgtcgcgaatgcttttctctaacgagttaaattattgggtgattaaaaaaaatgcgaaaaaatatttactgctccggatgggggcgccatatcagagcccgtctcaaaacctgaagaaaaatatctctcaacgatccggcaagtttttaaaaaacgtgagagttcccacagaaaccatcgtattgaaggttttctcccgtcgtttaagattgtaatagttcttacattcctaaggttttgagacgggtt

SEQ ID NO: 6629 - DNA, 1533 bp, unidentified
  source 1..1533: mol_type = unassigned DNA; note = element_a4b842e
  misc_feature 1..2: note = core
  misc_feature 3..240: note = LE
  misc_feature 241..1416: note = CDS
  misc_feature 1417..1533: note = RE
  misc_feature 3..217: note = bridgeRNA
cttgtattatagagtagtagttattagagcccctctccaagggctgtgctacactgtaatggatgctgtggattggtataattctcctaccaccagatggttttagaaaggttccaaccacagccctttgcagttttgttaatcagttaaataccgccagacggtttatgtagaacaaggttacaaagcaaagcgttctgtggatgcagcatcacaatttttaccgtcggaggttttgttatgatttctgttggaattgatgtcgccaaggacaagcacgactgcttcatcatcaactcagaaggcgaagttcttgcggatgttttcaccattccaaacaacatggatggctttcagcgcctgctgcaaaggattcgggattgctcctcgcctcaggacaaaataaaagtagggcttgaggcaaccgggcattacagctacaacatccttgggtttcttcttaacaacggtcttcccacctatgtcttgaaccccttgcacaccaacctttaccggaaaagtctcagtctcaggaagatgaagaccgaccgagtcgatgcgcgaacgattgcagctatgcttttgtccgatgtgagcctcaagctctacacagacacagcataccacaatgaggagttaaagtcactgacgagataccgttttgacaaggtgaaagagcgcggaaggctcaagcagtcaattgcccgcttggtctgcatcctgttccctgaactggaaaagctggtacccacacttcatatggtctcggtctacgctctgctcgatgagtttcctggagcaaagcagattgccaatgcgaacctgacgcatttgaaatccgcgctttatagcgcttccaagggccgctacggtagggacaaagctgtcgagatacgcgagtcggccaggacctcgattggctccgtgatgccggcaaagtcgctggagttacggcataccatccgtcttatccgggaactggacgaagagattgatgaaattgaagcggagattcagcagatcatggatgaactgcactctcccattacgacgattcccggcattggctgccgaatggctgccatgattctcgctgaggttggcgacttttcccgctttgactctcccgacaagctgctggcttacgcagggctttcgccttctacttaccaatccgggcaacttaagaattgttatgcccacatggagaaacgcggctccagatacctgcgctatgccatcttcaatgccgccaagtatgtctgtctttgggacccgaccttttctgcctatcttgcaaagaaacgggcagaaggcaagcattacaatgttgccatctctcatgctgccaaaaagctggtacgcctcattttcgccttagagaaatccggagagtcttaccgcttgtcagcgtaactttcacttgatagtctttgcggtaccctgatgggtctctgctttgctatacctttttgagccatctgcttttttgatcaccatcctcagtttcgggcttgacttttaatagttaat

SEQ ID NO: 6630 - DNA, 1407 bp, unidentified
  source 1..1407: mol_type = unassigned DNA; note = element_a4b981c
  misc_feature 1..3: note = core
  misc_feature 4..84: note = LE
  misc_feature 85..1119: note = CDS
  misc_feature 1120..1407: note = RE
  misc_feature 1170..1364: note = bridgeRNA
agcatgcgtaattgggctaccctctgttctgaggtcgagctcccgataagatcacgggatgactgtgaacaagggagaaagaagatggaatattttgccggaatagacgtatcgcttcgatcctgtgcgctttgcattgtggatggcaaggggaaggtgcttcttgaacgagagctaccatgcgagatcagcgatatcactaattgccttgctgagtttgcacatccgattgaacgggtcggctttgaagcaggtactctgagccagcacctatacttcggtttgacaacagaaggcttcgatgtggcctgcatggaggcgcgacaggtcaatgcggcgctgtcagcaatgcggaacaaaacaaacaagaatgatgcccgtgggattgcccaagtgctacggacgggctggttcagtccagtacatatgaagagccgaaaggcacatggtgtgcgtgccttgctcagcacacgcaaggcgttgctgaagaaaacgatggatttggcaaacgaagtgcgtggactgctgaagatcttcggcattcgtctgcccatgaccgtcaagtatggcagttttgatggtgtcgtccgtccgctgattgagatggatgatgttttggcgcatgccttggtgccactattggatgcacgcgtggttttgtatcagcactttctggaactggatcggcgcgtcaaacgcgcagccagccatgacgaagtttgcatgcggttgatgaccgttccaggcgtcgggccgatcgcatcgctgaccttcaaagcagctgtagacgatccgacgcgcttcaaacgatcacggactgtaggtgcgcattttgggctgacgccgcgacgatatcagtcgggtgagcacgacaatcccggtcgtatatcaaaggcaggtgaccgagatgtccgtgcaactttgtatgccgctgccaacgcatttctgatgcgaacgatggccgggtcccagatcaaatcttggggcatgcgactgatgcgcaccaaaggacgacgccgtgcagttgttgcagttgcacgcaaactcgccgtcttgctccacaggatgtgggttgatggcactgaattccgtcaggatccggtgggaggcaaggcatgatctaaaacgcaaccacccaatcctaacggggtcgtccctcaccggacgaggttcgtgccctctcgggcatgtaaacatgccctgtctggtaatagaagaagccgaaaatgtctgctgcgcaacgtgaagcgcgccccaaagcaaggctctccactgcctatccgacatatgcgtgcagcggtgccatcacggcatcaacaagactgcgaagagaagcgtgacccggatgagtgacaaagacctaaaatgacaaggaaaaagagcttgacctaaacacccaattagaga

SEQ ID NO: 6631 - DNA, 1324 bp, unidentified
  source 1..1324: mol_type = unassigned DNA; note = element_a4bb2b2
  misc_feature 1..2: note = core
  misc_feature 3..82: note = LE
  misc_feature 83..1102: note = CDS
  misc_feature 1103..1324: note = RE
tgatcatatgaaaaagctaccttccttcgggttctgtagtagaatgaacccaggggaaataaaaacaaaggaggtagccaccatgtattatacaggaattgacttgcataagaaaacatcatttatcacgacaattaatgaaagaggacaagtggttaaaaagaacaatctaaaaaacataccttcattaattttaaagtattttgacgatttggctgccaacaccagaattgtaattgaatccatgtcttcctggtattggctctatgatcttcttacagggaaggggatggatgtaatcatatccaatcctgcgaagaccaaggccatcgcatcggcaaagattaagaatgataaagtggattctcatatgctggcacagcttttaagagctgatttaattccagaaagttatgtaagcagtatggatacaagaaagctcaaggaattgcttcgccacagaaaccgactggttcgtgacactgtccgtatgaagaaccgtatccatgcacttttaatgaagaacaatctccaacaaccatgttctgatcttttcggaaaaaaaggactgtcctttctttatagcgatattgatctgcctgattatcattgtgaacaactcaaaacgtatctttccttgtatgaaagtattaagaccgaagtggatcacttaacgaagaggatatatgctatggcaaaaacaagcccggttgccaatcttttaaccacgattccgggcatcggtccgctcgttgccatggttatcgtttcggaagtagaagatattgagcgtttcccttcttatcaaaatttatcatcttacgcgggcttggttccatctctggattcaagcggaagcaaggaaaggatgggccgtattaccaagcaaggttcaccctacttgagaactgctctggttgagagcgcccaagtcatcgcgcggcttaaaaactgccgacttaatatttttttccgcagaaggatcgtccgatccggatatgcgaaggctgtaacggcgacggctcataagattttacaaatcgtttattatgtatggaagaatcaaaccccatacttggaggaatataacgtttgcggctaacccgtggttttgcatgacccagattatgtgaggtcgtagctttgattgggacgccgtttatcgaatgtatgataatgtgacgctttatcaagtgaacacgaataggtgtgtggcgatgagcccatattcaaagtgtcttttgctctccctccgccggatatgtatggatccggctacggtcgagcaaaagagatttctattgacaaaacgctttttcatagg

SEQ ID NO: 6632 - DNA, 1489 bp, unidentified
  source 1..1489: mol_type = unassigned DNA; note = element_a4c0ea4
  misc_feature 1..2: note = core
  misc_feature 3..216: note = LE
  misc_feature 217..1467: note = CDS
  misc_feature 1468..1489: note = RE
  misc_feature 2..203: note = bridgeRNA
ctgatgggactaccttccgatcgcacggtggatcccggcagagagcgctagagatgcgtgtccttcgaggactttcatgagacggcgcctctgctgggccccggcgaaggactgacgtctatgagggtgttgtcccgagaggaccgattcattagcacgatgccgttccttcccggtccgccgcatgaccagtggccgacggagaggtgatccgcagtgatcggaattggcatcgactgggccgagcagttccacgacgttgccatcggaactccagacaagggagttatttctcagtttcggatatcgcaccgaccggatggtgtcgagtcgctgatcgaacgcgtcctgcggatggagcccgaccccgccgaggtgcgcgttgtgctcgagacccgccacggcctgctcgtcgaggcgttggtcgatgccgggttcaccgtggttccagtcaaccccgacctggtcgcgcgccgtcgaggacctgcccggaagaaggatgacgcagaggacgcccgcatctgctgcctgctcgccctcgatcgacacaccactttgaagacgctggttccgcacgggcggatcggcggcgagatgcgtgccatcggacgtgacgacgagcgtgccgctcgagaccagacccggttgcttaatcggctgcgcgcggatctgcaggcgacctatccggccgcgctggcgatcgccaagggcgacctcagcgcccccaccgtgctccgcatgctcgaacgatggccgactcaggcggaactgctcgctgcgactcgtgacgagctggctggcttcgcgcgagcagcgcaccacggccgacccgaccggttcgccgaacaggttgacgctgccctcagaacgcccgctctggcggcgaaggagtatctggcccgggccaaagcggcatcggtccggcttgccgcggtccagctcctggcactgcacgaggctcgacgagcttgggaacggcgcatgagcgagctccttgccgatgcgcagaccccggagggtgtcgacagcacggagtggttccccggggggcggatctacctgagcttccccggcctcggaccgcgtctggcggcccgtatcgccggcgagatcggcgaacacatcgagcagttcgactctcctgcagggctgcagtgctacgccgggcaagctcccgtgacccgacggtcgggcaaaagcgacttcgccgtcgttcgccgtcgggctcacaatcacttcctcggcgccgccgtgcaccaatgggccttctgcagcctcaccaagagcggttgggcccgagagttctacgactccaaggtggcggcaggcaaaccccaccaccacgcgttgagaacactcggcaatcgttggctggagatcctctggcactgcctcaccaaacagatgctctacgacgagagcgtccacgtcgccaatcggaacagagccctcgggagggccagctgacccgaggattgacagagggtgt

SEQ ID NO: 6633 - DNA, 1405 bp, unidentified
  source 1..1405: mol_type = unassigned DNA; note = element_a4c4b4f
  misc_feature 1..2: note = core
  misc_feature 3..79: note = LE
  misc_feature 80..1123: note = CDS
  misc_feature 1124..1405: note = RE
  misc_feature 1123..1392: note = bridgeRNA
tgttgggatggacggcccccgaacggcatctaaatgtgccagagtgagctgttaacgatctcaaacgaaggagccgtccgtggatcagattatccgtattggcatggatacgtcaaagcatgtctttcaattgcatggtgtgaacgccgccgagcaaccgatcctgcgcaagaagatgcgccgcaaggagatggttgatttcttcgcgaaatgcccaccgaccgtgattgcgatcgaagcctgtgccgcttcgcatcactgggcgcggttgctgacggggttcgggcatgaggtaaagttgatcgcgccacaactggtgaagccctacgtcaagcgcggcaagaatgatgcagccgatgctgaagcgctatgcgaggcgatgagccgcccgacgatgcggttcgttccggtgaagagtgcggatcagcaagccgcgctgatgctggtgggcctgcgtgagcgtgctgtcgccgcacagacgcagcttgccaatacgattcgtggctatgcagctgagttcgggctgaccgcggccaagggcatgtctcatattccgttccttctggaacgcatgatgattgatgacaatatcccggctttggcgcgtgatctgttcgcatcactcgctgaggaatttgcgcagttgggtgagcgcctgaaagaggtggaggcaaagctgatggcttggtatcgcgacaatgaatgttgtcgccgtcttgcaaagatccctggtgttgggccgatcggcgcggtcttgctggtgatgaaagcgccggcaccggaacagttcacatcaggaaggcagtttgccgcctggatgggcctgacgcccaaggatcattcgactgcgggcaaagtcaggctcggtgttattacgcgggccggcgatgaggcattgcgcaagacattggtagtaggggcgacctcgttgctccgacaggtaagagcgggaagaggcaggaacgcttcgctatggctcatcgagttgctcaagcgtaagccgccaaaacttgcggctgtcgcgttggccaacaagattgccaggatcgcctggaaaatgatggtatccggcgaggcttacaagggcaatgctgcgcaaccggctctggcatgcgcggcgtgacgagatcagctatcacggtgagcaggatacagacgctaccgtgctgagctgatgcgtgaacttgcatgaaacgagtagatggtgtgatcgatcgatccgagacgtggtccactccgcaggtgccaatggcccaacgaggccgaacaagtgtttggaacccacgtcgcggaacccatcttggccagcgttcatgtgtgaacgcaccaacaggccggacatatgaacgcaagcgatccgatcaaattatcaaagaattcttgcaaggagggggccgtccacata

SEQ ID NO: 6634 - DNA, 1753 bp, unidentified
  source 1..1753: mol_type = unassigned DNA; note = element_a4dac63
  misc_feature 1: note = core
  misc_feature 2..271: note = LE
  misc_feature 272..1522: note = CDS
  misc_feature 1523..1753: note = RE
  misc_feature 13..291: note = bridgeRNA
cctgttactatataagagccccaagaccgaggcagccagtcgcggcgcgggacaactcattgccaaagttgtacaatggaaaggcaatggcctgacggacaatcccaagagcttcgcactcgcgacggagtcagtcaaccagccttccattgtgcaacgttcgatttgtgcaggtagagtgccatctggaacactcgagtcagcgaacagatagaaccggcgatggggaaaggcggtttgccattgtagtaacacatcgggaggggttctcatgttcgcagtaggggttgatgttgccaacggaagaagtatggttgccgtgctggatggcatgcgcaatatagtcgcgaaaccgttcgaagtcgttcataccacgcaaggattcgcgaccctggtcgaaaaattgcgccaattggacggcgaagtccgcatcgtcatggagcacacgggccgctattatgaatcgtttgccatgcgcatgcatcgcgcgggattctttgtttccgccgtgaatccattgctcatcaagaattaccagggcagcatcagtgtccgcaaggtgaagacggacaaggcggacgcgcaaaaaatcgcgcaattcgctcttgacaaatggacgattttgccgcattatactcccatggacacgattcgttataatctcaagaccttgcatcgccagttccagttggcgagcaagaccaagaccgccctgagcaacaacctgattgccttgctggaacaaagttatcccggtgcaaaccgatactttgacagcccggttcgtgcggatggcaggcagaaatgggtggactttgtggacaccttctggcacgtagattgcgtcgccaggagctctgagcatgcctttgtggagcgttaccggaagtggtgcaagcgccatggctacattttttctgagcagaaagccatacagttgcacgcggacgcccggcagaaaattcccctggtacccaagtcggatacctgcaagctactggtgcgagaagctgtgtcgcagttgaatgccgtttcgcgaacggtagaaacctatcgcgctgaaatggatcgtctggcatcgcaactgccggagtacgaaaccgtcatgggtatgaccggcgtaggcaaatcgatggggccgcagttgatggcggaaatcggcgacctgcgttgttttgcccaccagaagtcgttggtcggatttgcaggaacggatccgatcaaggaggaatctggcgacaaagtgtcccaaagcgcgccaagcagcaagcgcggctcgccatacctacgcaagacgctgtttgtcattatgaccatcttgctgcagcttcagccgcaggaggatccagtctaccaatttctggacaaaaagcgctccgaggggaaaccgtactacgtgtatatgaccgctgggggtacaaagtttctgcgcgtatattacggcaaagtccgagattgcctcaaggcaaaaggtctgtgggaagtcccggcctcagcatcgcaagaggtcaaccctggttgacaggggttggtcacaaccccttggctgctccatagcacaggcggcgtaccgcaatcaaggatgccgtaggcacggccgccaggccgcttgtccttgattcggctagcaggctgtgctactcccgctttttttgatcgacgccttggcggcgatctgtttgctgtacccttttttctctcccctcctctcgccaatctttacctcattccctcttgactttttatttgcagg

SEQ ID NO: 6635 - DNA, 1346 bp, unidentified
  source 1..1346: mol_type = unassigned DNA; note = element_a4db85f
  misc_feature 1: note = core
  misc_feature 2..71: note = LE
  misc_feature 72..1097: note = CDS
  misc_feature 1098..1346: note = RE
  misc_feature 1113..1343: note = bridgeRNA
taatgacatggtccgccccgcctcaccgggtggggtactctgaccgagctcactcgtaactggagaccatcatggatcatgcgacgctcgttgggattgatcttggcaagcacagttttcacgtccacggtcaggacagcaagggcaaggctgtatttcggaggaaactggggcgcaagcaactgatcgagttcttcgcgacctatgctacctgcaccgtcgtcatggaggcgtgtgccggttctcactacatggcacgcaagctggccacgttcggtcacgaagtcagactgatctcaccgcaatttgtgcggccattcgtcaagtcaaacaagaacgacttcgtcgatgccgaagcaatctgcgaagccgcatcgcgtccggccatgcggtttgtgacaccgaagaccgagtcgcagcaaacactttcggtactacatcgcgttcgtgaaacgatggtgcgggatcgaacgagaacgatcaaccagatgcatggtttcctgcttgagttcggcgtcagcctgccgaccggcaagaccggcgttgtgcgactgccggagcttctcagcttccacgctttgccgccccggcttgtcgctatccttgagcggctgcacgagcatttcaagtatctccagcagcagatcaccgagctcgatcgcgagctggcgcatcagcttgccgatgacgacgtcgggcaaagactgatgagcattcccggtatcgggccgatcactgcaagcgtacttgcctcagagatgggcgacggcaagcagtacagatgcagtcgcgatttcgcggcctcgctcggtcttgttccccgccagtacagtacgggcggtagatccaaccttctaggaatcagtcggcgtggcgacaagaacatccgaagtctcctcgtccaatgcgcccgggcctacatgcgatgtctggagaagcgaaccggtcatctagcggactggacgcgtgcgcttctgacgcggcgccactcgaacgtggtggcatgcgcgctggctaacaagctggctcgcaccgcctgggcgatcgttgcccgtcataccacctttgattcagggcgtgcgacagcgtcggcttgaacgaacgcggactctccatcctcttctctgcttttgcgacgactgaaacgtgatgacgtgaacggcataccggcctgtggaacaccccggcaagcaaagaggctcttgaagccgcacaactttatggggaccgcaggcgcgaacttcatcgtggcgcggggagcagtccccacttcgacgccggatagatttgagcaagccaacactgcatcaagcgtcaggggttgcaaaactggggcggaccataga

SEQ ID NO: 6636 - DNA, 1576 bp, unidentified
  source 1..1576: mol_type = unassigned DNA; note = element_a4db93b
  misc_feature 1..2: note = core
  misc_feature 3..418: note = LE
  misc_feature 419..1462: note = CDS
  misc_feature 1463..1576: note = RE
  misc_feature 13..249: note = bridgeRNA
cttgtatgtttaagttaggtttttaggaaagggatttacctataacccataactattataagatactcttacttgtggatagagtgttgccgttcacctccctgaatcgttgtattcgtcttggagactggtgcctctatctaataaatagtttacgaatgagttagatgttgctgaccgttggtcattcttcgtatctctaacaaggcagtaacgcttattagattagaggatgtacaactatcttatagctataaaataaggagtgaacctcatgtactatgtcggaattgatattgccaaatttaaacactatgcttccatcattgatcaaacaggaaaagcactaactagacccatttcatttcaaaatcatacggatggtggaaataaacttttagcctggatacattaatacgtggataatcctaccgatgtattaattggaatggaggcaaccagacactattggctagccttctattcgtttcttttagaaaaagagttttcagtcattgtattaaatcctcttcaaaccaatgcttggagaaaggggacagaaattcgaaagcgtaaaacagattccattgatgcaaccttaattgcagacgtaattcgctttggaagatttacagaaaccgctttagctgatgaaacaatgttggcattaaaacaactaagtcgtttcagatattcacttgtacatagcgtgagtgatttaaaacgaaaagccattgtggtattagatcaaacatttccggaataccatacggtattctctgatattttcggaaaaacatcctccgaaattttaatggaatataccactcctagcgattttgaaaatgtctcaattgaacaactaactgaacttatggaaaaagctagtcggaaaagaattggcgaaaataaagcgaaacaactcctacaaatcgcgtcccagtcctttggtgtgagattttgtaaaggtgctttttcatttcaattaaaaatgttactcgaacaaatcaaatttattgaagagcaaattaagcattgtgaacaccagatgggagagtatttagttgaactggacacccctatcacaaccatacctgggattggcctcattttaggtgccacaattctaagtgaaattggtaatattcatcgttttgataaaccagctaagcttgttgcctatgcaggaattgatgcttccatttcacaatctgggcaatatgaagcatcaaaaggtagcatgtctaaacgtggctcttcacacttacgacgtgccttatttcaatctgcgatatccgcctatcgatgtgccccagtgttacaagcgttttatcaaaaaaagaaagcacaaggaaagcattattatgtttgtattggcgcattagctaggaaattgtgttacattatttacgccattttaaaaaataataaaccatatgaaattccaccgcatataaaataagttatataccaatctctattttttcagcctttcgataaagacttatttcctatgctttttaaattgaatacccatattttcactttaatttatagttgacttttcatagttggt

SEQ ID NO: 6637 - DNA, 1363 bp, unidentified
  source 1..1363: mol_type = unassigned DNA; note = element_a4dfa05
  misc_feature 1..2: note = core
  misc_feature 3..93: note = LE
  misc_feature 94..1110: note = CDS
  misc_feature 1111..1363: note = RE
  misc_feature 1127..1361: note = bridgeRNA
cgatgagatggtctcctcccccttattaatcggcgtcgcaatgcgccatgatggagatgttagcaaccatcaaaggagaaggaggagaagaccatgagcaagattacgacgattggactggatttggcaaagaatgtgtttcatgtggtcggttgtgatgcgcacggtaagctggtgcgcaggaagcagctccggcgcgggcaaatgttgcgttatttcgccaacttgccgccttctctggtgggcatggagtcctgcgcgagtgccagttactgggcgcgggaactgcaggcgcagggtcacgcggtcaagttgatcccaccgcagtacgtcaagccctatgtgcggggtaacaagaacgactacaacgacgccctggccatcgccgaggcgctggtgcggccccagatgcgctttgccgccatcaagacagtggctcaacaggatatacaggcgctgcaccggttgcgcgagcggcggattgcagagcgcaccgcgctatgcaaccaggtgcgaggtttgctgggcgagtacggcattgtcctgcccaagggcgtggccagcctgcgccggcgcttacccgagctgctggaggatgccggtaacggactgagtgagctgtttcgccgcctgctggcccagtgttaccagcagtttggagagctggatgcgcacattgacgggtatacccgggagctgaagcgccagagccggcagagcgcggcctgtcagcgtctggagacgataccggggtatggtccgattgtggccagcgtgttctacagtgtggtgggtgacgggtcggcctatcgccggggacgggatgtctcggccgccgtgggcctggtgccacgccagcacagcagcgggggcaaggagaacttgctggggatcagcaaacgcggcgaccgctatctgcgcagcctgctgattcacggggctcgctcggtggtgcgccaggcggcgggtaaggatgaccggttaagccgctggatcaacagggtcaaggcagcacgaggctacaacaaggcggtggtggcactggccaacaagctggcgcgcatcggctgggcggtgctggcccacaacacgacttaccaggcggtataacgagtaaccggaggttcctgccgacgattgcgaaggctttttgacagacgatgacaccacaggtcagaccggcgtattgaaaacctggctaacccgacggctcaaaagccgataggtcgataaggacgatacgcgcgcagctcatcgaggccagaggccaatagatgcctcatcaacaggccggatatacggaagcaatcctgtccctgtcatcgcacacacgaagccttgcaaaacgggaggagaccatata

SEQ ID NO: 6638 - DNA, 1487 bp, unidentified
  source 1..1487: mol_type = unassigned DNA; note = element_a4e6523
  misc_feature 1..2: note = core
  misc_feature 3..162: note = LE
  misc_feature 163..1221: note = CDS
  misc_feature 1222..1487: note = RE
  misc_feature 13..193: note = bridgeRNA
cttgtatgtaatagacatgtggtggttagctaccatcacatgaagcggagtgagcttgtctccacccagaatggcgagaaccttgatttgcagctaaagccctccgcttcacctttcacgtcagcattaacattgaacggttgccaggagcgatgactctgcatgtacaagggtaataggcgtgatggttcagtgaaaggaaaaatgcttatgtttcagttaggtattgatgtcagcaagaagactcttgacctgtgcctgttgcgcgagggagtcaaaggcagggtgaaaacccgtaagctgaagaatgatgtggatgctgcatgctctgtcatagactggcttcgcaggcaacgctgtgagcctgccgatgtccatatcatcatggaggctaccggggtttaccatgagtcgctggcttatggtctccatactgccggagccagggtatcgctggccaatcctcatcgcagcagagagtttgcgcggggtatggggattatgacgaaaaatgacagcgtagatgcctgggtactggcctgctatggcgcgcttaaagagccggcgccatgggaacctcccccggaaaatgttcgctatctcagcgcgcttctgcgtcaccgtgatacgttagtgacggactgcacccgcgaaaaaaacagacttgaaaagtgccgggctacggatacccctgatgccattattgaatctatcgggaatgtacttcaaagtctgagtgcggagactgaccatctggacaatcttatccgggagcaccttgagcagtatcctgaattaaaaaaggattttgacctgctgacatcaataaaatccgtaggttttcagctaggtcttaacatgctggttatcctgcggggacatcgttttgacactgcagagcaggccgccgcctttcttggcgttgttcctgttgagaaattctccggcacctcagtcagagggaaaccccgaatgtctaaaatcggtccaccagaaatcagggcgaagctgtatctggcggcgctatgtggcctgagatttaacccggtgatgaaagcgatgtatgagcggttatgcctgagtggcaaggcaaaaatgtgcgctattggcgcactgatgcgaaaactcgttcactggtgctatggcgttctgaaaacacaaaagccgttcgatgctgaatacctgtcttcagatgcgcgtagcgcatgtcaggcggcatgacgttattttatataactctgtagtcaaaccgccgaagcccggcgtaagccggtggaggactatcagagagtggtataacccctcccgccctgaacagccatgcgggcttatagcgatgactatgctgatttaagcccttttaaccccgttagcgcggcatagccgcgatgtatcggggacttagtgcaggcagcttgccttgctgacagcgcttagggggcagtatgtctaaaactgaagctatttttcttgacgaaacacggtag

SEQ ID NO: 6639 - DNA, 1392 bp, unidentified
  source 1..1392: mol_type = unassigned DNA; note = element_a4e8fb1
  misc_feature 1: note = core
  misc_feature 2..223: note = LE
  misc_feature 224..1378: note = CDS
  misc_feature 1379..1392: note = RE
  misc_feature 12..232: note = bridgeRNA
ctacttaacactggtgcctggacttgatcccggccaggatcaggtccaggtacccggtgagaagctcccaaatctgcccatctgcctcattggtgtggctctcatctggcttgcctctcaccgggtgccgtggcgggaatggctgaagaggggtttgcccagctcgaagtagcggtgccttcccgcacggacctcacacgccgcgacgggaaggacaccacagatggcagtcatcatcggaatggacccacacaaacgctcagccacgatcgagatcatcgactacaccagcaagatattgaccaccggccgatacgacaccgacaaaaccggctacgccgaaatgctcaccgcggccagaaaatatgtggatcgggtatgggccatcgagggctgcaacggcatcggccgccacctcgcccaccgcctggtccacgacggcgaaaccgtgatcgacgtacccgcgaaactctcagcccagattcgggtattcgcgaccggcaacggccgcaagaccgatccagtcgatgctcattcggtggcgttgcgggcaccgaatctgcgccccgttcagccagattcgaagctgatcgcgttgggaatgctcgccgatcggcgcgacgaactcggccgcgcccgcaccgacaccgtcaaccgcctgcaccggctgctgctcgaactgctgcctggtggggcgaagaagttcctatcggcgacccaagcccgcaaactggtcgcgaccgtgaaaccccgcgacccggccggcaaggtccggcgccgcctggtcgtggagttgatcagtgagctggaaaccatcgatcgcaagatcaaaaccgcggacaaagaaccgcgccagctcgtcgctgagcacggctccgctttgaccgatctctacggcatcggacccgccggcgcggcccggctgctcgccgatgtcggtgacatccaccgattccgggaccggaaccggttcgcgtcctggaacggcaccgcaccgctggacgcctcctccggccagcagcaacgccatcgactctcgcgcgccggaaaccgcaagatcaaccgggtcttacacaccatggccatcgttgccctgcgcaatcccagtgccgggcggacttactacgactgccgcaaagccgagggcaagacctcgatggaagcgatgcgggcactgaaacggcgcctgtcgaatgtcgtctacaggcgcatgctcgatgaccagctcagacgggaaaaggcaagcccgggagggcaatcggggacgactactgactccagcgcgaccggctcaaccccgcacaccgccacttcggacaagccacatcccggcctcaccaccaaccagagtagccccgacctgcaacccgcgccttgacacgagaggggagc

SEQ ID NO: 6640 - DNA, 1475 bp, unidentified
  source 1..1475: mol_type = unassigned DNA; note = element_a4ef575
  misc_feature 1..4: note = core
  misc_feature 5..223: note = LE
  misc_feature 224..1459: note = CDS
  misc_feature 1460..1475: note = RE
  misc_feature 1..213: note = bridgeRNA
ccccgttaccttcttttgatcaggcccggtgagggcttgcaggccaccggccacggcatgacttgtcgcccctgtcgttgatgatctggggggtgttgtcaccgtggtcggcgggtgccaacgaccgctgatagagacctgacccgctcgcgtggtctgctcgtaacgtggctgccggcgcgggtgcccaggtcggcctgccgcggcaagcgaggaggcatccttgtccgaacccgacaagatcagcgatcacggctatgtcgtgttctgcggcctggacgtgggcaaagcggtgcaccacgcctgcgccctggacccgtccgggaagcggctgcacgacaaggcgctgcccaacgacgaggccgccctggtcgaggtcttcgagaagctgcgcgtccacggccgcgtgttggtgatcgtcgatcagcccgcctcgatcggggcgctcccgatcgcggtcgcccgctcgctgggcatcgacctcgcctacctgccggggctggcgatgcgccgcatcgccgacctgcacccgggcgagggcaagaccgacgcccgcgacgcctacgtcatcgccgacgccgcccgcaccatgccccacaccctgcgacgggtcggcaccgacgacgacaccctcgccgagctcaccgtgctcgccggctacgacgacgacctcgccgcccaatccacccggctcaccaaccggctccgagacgcgctgctgcacatccatcccgccctggaacgcctggtcgggccccgtctggagcgcggtggggtgctcgacctgatcgtcgccgcccccactccgcaggcgctacgtgacctcggcgtggacggcatcaccgcgatcatgcgggcacgctccccgcgactggccaagacgatcccggtgaagatcctcgccgcactcgacgcccagaccgtcgtcgtcgcgggcacgcccgcgttcggccgcgtcatcggcggagtcgccgcgcagctgcgcgacgtccgcgctgaacgcgacacccttgccgcggagctcgaggcccgcctggaggcccaccctcttgccgaggtcctgacctcgatgcctggcaacgggttcaggaccgctctgaagatcctcaccatcgtcggcgacggcgccgcgttccccactgccgggcacctcgccgcctacgccggccttgccccggtcacccgccggtccgggtcctcgatcaagggcgagacccgctcccagcgcggcaaccacgctctgaagtccgcgctgttcttgtcggcgttcgcgagtctcgccgatccgaccagccgcgcctactacgaccgcaaacgcgcccagggcaaacgccacaacgccgccctgatctgcctcgcccgccgccgcgtcgacgtcatctacgccatgctccgcgaccgcaagccctaccagcagcccatgcccaccgagcgggacaccagccccgccgccgcttgacaacgacatagagaca

SEQ ID NO: 6641 - DNA, 1620 bp, unidentified
  source 1..1620: mol_type = unassigned DNA; note = element_a4efd20
  misc_feature 1: note = core
  misc_feature 2..251: note = LE
  misc_feature 252..1487: note = CDS
  misc_feature 1488..1620: note = RE
  misc_feature 6..227: note = bridgeRNA
tcgtattataaggtcagccagaaattatttctggttgaccattttttatatcgatatatgataacggtagccgaggtagaacgttcgcgcccgtggggctaagaccccgtccgcaaaacagttcgccccctacttgtagaaacatgtttgaggctggttgggacaatgatctcgtataacaagcgaagctatgacactatgaggaggattcaggggttaccggcaattatatttttgaaggaggaattttaatgaatccagtcgttggtctggatgtggcaaaaggtgaaagtcaaattcaagcatacttggaaagaaagaagccctacaagaaaagtttcaaagtaaaacatgatcttgatgggttagctagtttattagagtttattaaagagatagaagatatttcaggagaacgtccccctctcgtaatggaatcaacgggtcattatcacacaccggttgttcaatattttgaggacaaaggctatttaatcattatcgtaaatccactcatctcctataaagcaaaaagttctagtttgcgaaaggtaaaaacagatatcattgatgccaatcacctctgcgagctgtattataaagaggatttagagccttataaaaagcgtggtatccaacttatgaacttacgtcaccttacaagacagcacgataatattacaggcatgtttgtacaaaccaaattacaatttcaggccgttttggatcaagtttttcctgaatatagtaaggtttttggagatttatattcggacgtttctttaaaaacattacaagcatttcctacttcagaagatgtcttgaaaagcgatactgaaacattaacaacaaaaataaaagaattctgtaatactcgttcactacaatgggcaaacaaacaggctgaaaagctaatgactgccgcaactcaaaacccttttcagaaggctttatactctagtcttgccctgagcttagatatgtttattaatatgctctttgaatacaaaaaacatctatccatgattgaaaaggagatagatgctttagtaaaaggtattgaagaatctaagattatccgatcaattcccggtatcggtgaaaaaatcgcagccacgattatttctgaaattggggaaattgaaaggtttaatcatcctaagaaactagtcgcatttgccggtcttgatccaagtgtctttgaatctggcacattcaaaggtacttacaatcgaattaccaaaagaggctctagcagactacggcaagctttgtatatggctgttaaatgtgctattcgtgactgtcgcaaacagaaaacaacggatgaaatccttcctcgtaataagagattacgagcgttttatgataaaaaacgggaagaaggaaaaccttttagagtagctgtgatagcttgtgcaaataaacttttacattggatttatgcacttttaaaaaacaaaacttctttcctagatttagcttgatttaacattttaactaatcggtccagaactttccaaatatagtatttggacggttatttggtatgcacaaatttagtataacatgatatttttaatatttttatttaaaaatattgacaactattggctggtt

SEQ ID NO: 6642 - DNA, 1772 bp, unidentified
  source 1..1772: mol_type = unassigned DNA; note = element_a4fcf31
  misc_feature 1..2: note = core
  misc_feature 3..109: note = LE
  misc_feature 110..1384: note = CDS
  misc_feature 1385..1772: note = RE
  misc_feature 1444..1693: note = bridgeRNA
agcattcctgtagatagttaaatatcaggtttgaaaaaaatagagcccctcagtaagatacgagtatagagtccaatctaactcaaaatcttaaggaggaagccctactatgaattttaaaatgcaagacaaacaaaatcaactaatagaaagaatttccgacacacatctaattgtaggtgtggatatagcccagcaattacacgttgctcgtgctgttaacttccgtggaattgtggtcggagatcctcttacatttgaaaataatgaagaagggtttgtaaaacttttaagttggattcaaagcttacaaattctaaaaaacttagattcaataatagtgggtatggaacctacgggacattactggattaacctatcaaattggctttataaacagaacattgaggtagttactgtgaatccccacttagtaaaaaggaataaagagaatcgtgataatactcaatcgaaaagtgataaaaaagatgccctcgttatagcggacatggtgaagaacggctattattcctttgtccgtccaacctctgaagcatttgagaaacttagagttctaatttctaaccgtgatgtaattgttaaacggctcgtgatgtccattaatcaagtaaatcgatgggtggatgtggtttttccagaactcagacaagtgtttaaagatgtaacgtgcaaaggggcgatcgcaacccttcgtttatttcctacaccggatgaaatatcttcattagaaacactagatgtcatgagaggttggaagtctttgatgaaacgacaaccaggacccaagaaggctcaattattaatcaatctagcaaaatcctctattgggactggacaagctctggatgcttataaattccatttagaacaattattagaggaatatgacctcgctattaaacaactcgaaagagttgaacaacaagttaaagaagttctctataaaataccatttgccaaaaaactacttacgattaaaggaatcagtgaaatttcattagctgggatactaggtgaggctggagatttaagtggattctcccatggaaactctctattacgtcatgcaggattacatcttgcagaagcgagttcaggtaaatggaagggccagattgtcatttcaaagcgtggaagatcaagactccgacgcttcctctacttagcaactatgagtcttgtgatgaataaccctgaatttaaagcggtccattcccataatgtgaaggttaaaaagataaagaaaatgaaatcaatcatgaaactgataggtaaattagcaaggatttttgtaggaatagcaagaagaaacgagtcttactgtcccaataaaatacaagctgtaatccctttagctgcatagaaaaaacgtaacttaaatagtttctttaatttgaatgttgtcttattcgcaggattttaaatatgtacggagtaccaggtttcttcaacaaaagggcactgtgacccatcagtttagcataactggcctccaccccttggaaaggcacgacgaaggaatgagagggcaattgacccgttgagacatgggagggaaagcctccaggggcggcgtggagatgtacattatatggtaaaatatggagtggtagctgactcctttatttaactatgccttcacaaagcaaaatgatctgaactcatttcatttacctgtaattccaattacaagggttatgaaatcctgcgaataagtgagcattcgagagatattcgtattaaaccgaggg

SEQ ID NO: 6643 - DNA, 1409 bp, unidentified
  source 1..1409: mol_type = unassigned DNA; note = element_a5075bd
  misc_feature 1: note = core
  misc_feature 2..90: note = LE
  misc_feature 91..1128: note = CDS
  misc_feature 1129..1409: note = RE
  misc_feature 1180..1401: note = bridgeRNA
caatgggatgaacgcccccacctttggcggcaccgttgtgtgccaaagtggagttgcgtagcaaccctttgagtaacaggagcaaccatcatgaaagtcactactgtaggcatcgacctggccaaaaatgtgtttcagcttcacggagtcaacgaactgggcaagacagttttcaaaaagcaattgcggcgtgaccagatggccgagttcttcgtcaagctgccagcgtgtttgattggcatggaagcctgtggtggagcgcactactgggcgcgcaagttgcaaggttttggccacaccgtcaaattgatggcagctcagtttgtcaaaccttacgtcaagaccaacaaaaacgacgcagccgatgccgaggcaatctgcgaagccgttaccagacccaatatgcggtttgtgccaatcaaggacgttgagcagcaaagcgtattggcgctgcatacggtgcgtcagggatttgtgaaagctcgcacggctcaggctaaccagattcgcggcttactcacagaatatggactgatcattccacagggaatttggcacatcgccaaaagggtaccggagctcattgaagatgccagcaacgagttgccaggatcctttcggatgctcatccagcgcttgctcgatcatttcaaggagttagacactcaagtcgatgaactggaattgcaaattgtaaagtggcatcgtcagagttctgccagtagcaagctggcccaagtccctggaattggccccatcaccgccagcgccttggtggcttcgcttggggatgccaaaaactttgacagcggacgtcaagtggcggcttggctgggactggtgccccggcagcactccagtggaggaaaacaaaacctgttgggcatcagcaagcggggggactcgtacctgcggtctctcctgattcatggggcgcgctcagtcatttacaacggtaaagataaaaccaacccaacgtgcaaatggatcaatggaatcgtgagccgacgcaataacaacgtggcagctgtagcgctcgccaataagaatgcccgcattgtgtgggcgttgctgacgcatgatcgagagttccgccctgactacacccgtgagactgtgggtgtgtagcaggtcggcaaggaaagtaggacaacgaggattgacagggggagctgaacaaccgattgctcaagcaatcatgaagtgatggcaagacaggtaagaccgtggttggaaaatcccgagaacgtcggggcacatcgaagtgcgacagacctattgaggatccaaccagcgaatcccatcagggaccgtgacccaaagtcacaccaagagtccgaatgtactggtgcaatctttacctttgagtcaaaacgaattgagggcttggcatagggggcgttcatgta

SEQ ID NO: 6644 - DNA, 1433 bp, unidentified
  source 1..1433: mol_type = unassigned DNA; note = element_a515834
  misc_feature 1..2: note = core
  misc_feature 3..119: note = LE
  misc_feature 120..1151: note = CDS
  misc_feature 1152..1433: note = RE
  misc_feature 1186..1388: note = bridgeRNA
agatggggtaatcggcctgccagcttgtagatagctgaaaaatagggtgctgcgcttcaggctgatggtgaaacgaggtccgcatatgcggcctcaagcatcagaaggagaagcgcagcatggactattttgctggacttgatgtttcggtcaaggaaacgagcgtctgcattgtggatgatgcgggcaagatcgtgcgggaagcgagggtggcgagtgagccggaagctctcctgcaggttctgacgaacaccatctatcgcttcaagcgagtggggctggaagccgggccgctatcgcagtggctttacagcgttctcgccgaagctggcttgccggtgatctgtgttgagacgcggcacatgcgggccgtgctgaaggcacagatcaataagacagatcgcaatgacgcacgcggcatggcgcagatgatgcgggcgggactatatcgcccggtacatgtgaagacgttacgaagccagaagcttcgggtgctgctgacccatcgcaagctgctgcagtcgaaagccatcgccatcgagaacgagctgcgcgccagcctgcgcaactttggtctcaaggtcggcatgatcgggacgatgaagttcgaggcgcgtatcagggagcttgtcgagaggcttcccgatctggccgtgctggtggaaccgctgctcattgtcaggcgggtcattcgcgagcagctcggcatcctgcatcgccgcttgctggccatcgtccgggacgatgacgtgtgccggcgcctcatgacgatccccggcgttggccctgtggtcgcactgacctatcgcgtcaccgtcgatgtaccggcccgcttcaggaagtccaaggcggtgggggcggtgtttggactcacacccgccaagtatcaatcgggcgagaacgaccgaaccggtgcaatatcgcggtgcggagatgagatgatgcggatcatgctctacgaggcggcccaaagcatgctggtgcgtacggcgaagtggtcctggctcaaggcctgggcgatgaagatcgccaggcaccgcgggatgaagaaggcgatcgtggcgctggcgcgtcggttggccgtgatcatgcatcgcatgtgggttgacggcacggagttccggtggaccagggagcttccagtggcttgagagccgtgcaggatcaaatgcgataggaggagatcgagctccacctagcggtggaatgatgtccctcacgggacgatggatgaggtgagatcgtttgtccgcttggacctgccgtcatattgacggcgaggccgcccgaaagattgttccacctcgtcttcgaatccccatgatggaagggccttggtgccgagtccgaagagaagcgcgagcccgtgagcgacatcgacactggagtggtggttagtctgaaagtgcttgacccagacggccgattagaga

SEQ ID NO: 6645 - DNA, 1397 bp, unidentified
  source 1..1397: mol_type = unassigned DNA; note = element_a521d38
  misc_feature 1..2: note = core
  misc_feature 3..88: note = LE
  misc_feature 89..1123: note = CDS
  misc_feature 1124..1397: note = RE
  misc_feature 1163..1383: note = bridgeRNA
gatggggtggatggctcccgctcacggcatctaggtgccaaagtgtgaaggctatcaggcgttcacgagcaagatgggagccaccttcatggagattaccacgatcggcctcgatttggccaagagcatttttcaggttcacggcgttgatgcagcgggcaaagctgtggtccgcaaggcgctgcgacgctcgcaggttctgccgtttttcgagcggaccccgcgctgtcttgtcggcatcgaagcatgcggcacgtcgcaccattgggcgcgcgagctgatcgcgcttggacacgatgtgcggttgatgccaccggcttacgtgaagccctatgtgaagcgcggcaagaccgatgcggccgatgccgaggcgatctgcgaggcggtaaccaggccaacgatgcgctttgtgtcggtgaagtcgcgcgatcagcaggcggcgttgtcgatgcatcgaacgcggaacctcctcgtcaaacagcggacccagctcgtcaacatgatgcgggggctgctggcagagttcggcatcgacatccccaagggactggagcgcgccttgatgatggcccgcgggatcgtcgacggcgctgctcccgacgttccgccagaagcggtcaagattatcgggatcctgtcacagcaggccctcgatgttcatgtcaggctgcgcgagatcgaccgcgacctgctggtgtggcagcgctcgagtgatgtcgcgcgacggctcataacgatacctggcattggtccggttggcgcaaccgccttcgccgcgacggtgggtgacgccagccagttccgctcaggccggcagttcgccgcgtggctggggctgaccccgctgcagatgtcgagcggtggcaaggagcggctcggtcggatcaccaagatgggcgacaagtatctgcgcaagctcctcatcgtcggcatgacctccctggttcgacgagcaaagtacaagcccgagacggtcgatccgcggctggctgacctgctcgcgcgcaagccggttcgggtcgcaacagtcgccatggcgaacaaggcggcgcgtgtgatctgggcgatcatgacgcggggcgagacctaccggtccgggcatgttccggcactggcggcataatcgagtttagctgatcctacgaaaggagataacagcttcacgaagttgcgagagcgatgcgatgtgatggcaaaccggtcagaccgggaacagggacaacccatggaatgtccaaggcgtcatagcctgattagcagaatgggacccagttcgcggactccatcagggccagcagtccaaatatcgactgcatcaacaggccgaacagaagactgcacccgaccaacgccactgcatcaattttacccttgcaacgcgggagccatccacagag

SEQ ID NO: 6646 - DNA, 1155 bp, unidentified
  source 1..1155: mol_type = unassigned DNA; note = element_a537739
  misc_feature 1: note = core
  misc_feature 2..169: note = LE
  misc_feature 170..1123: note = CDS
  misc_feature 1124..1155: note = RE
  misc_feature 9..162: note = bridgeRNA
atgataataaagaggacacggcaggccatctgtcattaggtcctggagaccgtctcgcagtacgaccgccgtgtccaacttccaagtaagcccgaacagttgagtggccgagagaggccgaatctttgctagtgtgggcttaccctgattatacggaggaattgcacctatgacaacaccctgtgaagcgtacgttgggatcgatgtcggcaagacttggttggatgttgccctgtggggtaacgcgtcagtctggcgggtgcccaatgatgagactggagtagccgaaatcatggtgcgagttgcagagctggaaccgcagctgatcgctatcgaagcctcgggtgggtatgagcaactgcttgtccagagtttgctcgtggaaagcctgccggtggcggtggtcaatcccacccgggtgcgggcattatccaaagccaccggcaagctggccaaaacggatgtgatcgatgcacgcttgatcgccgaatatgccttcaagatccagcccgaagttctgggaccccaagaagcccaagaaatccgcctgaaagccctggttagccggcgtgaacagctggtggcaatgcgtactactgagctaaatcgcctgggaaccgcccacaacagcatgcgggccgatatccgtgagcatgtcgaatggatgactgcccgtatccagcagctcgaagcagagatcgagcaattggtggacagtatgcctgaatggcgggtgcaagccgagcgcctggacagtatcccaggtgtaggcctgattaccgccacaacagtgctggcagaaatgcccgaattgggcaagctggaccgccagaagattgccgcgttggctgggctggctcctttcaaccgggatagtggccagctacgcggcaagcgacggatatttggtggtcgcaaaggcattcgccgggtattgtatatggcctgcatgtccgctaagaggtgcaatcctgtcattcgtgccttgtttgagcgcttgatgaagaaaggtaaggttttcaaagttgctatcaccgcttgcatgcgtaagatgctcactattatgaatgccatgctacgggatggagccaattggaggacgcttgaacatttgtcagcatgaattcagcctttacttttaacacagttactgcg

SEQ ID NO: 6647 - DNA, 1408 bp, unidentified
  source 1..1408: mol_type = unassigned DNA; note = element_a53b19b
  misc_feature 1: note = core
  misc_feature 2..90: note = LE
  misc_feature 91..1125: note = CDS
  misc_feature 1126..1408: note = RE
  misc_feature 1179..1400: note = bridgeRNA
caatgggatggacgctcccacctaagcggcatcgtaatgtgccaaagtggagatgcgaatcaaccacttaaacagacaggagcgtccgacatgaagattactacagtaggcatcgatctggcaaagaacgtgttccaggtgcacggggtcaacgagtttggaaagaccgtcgtcaagaagcaattgcgccgtgaccaggtatccgagtatttcgtaaatctacccgcttgcttgataggaatggaggcgtgcggtagtgctcattactgggcgcgcaagctgcagggatttgggcacaccgtcaagttaatggcgcctcaattcgtcaagccctacgtcaagaccaacaaaaacgatgccgccgatgctgaggcaatatgcgaagcggtggcccgacccaatatgcgctttgtgccgatcaagaacatcgagcagcaggcggttttgtcgctgcaccgggtccgtcagggttttgtgaaggcgcgcactgcccaggccaaccaaatccgcggtcttcttggtgaattcgggttgatcgtccctcagggcattggttacatcgccacacgggttcctgaacttattgaagatgccagcaacgaattgccaggttcatttcggcttctggtgcagcgattgctggaccatttgaaggagctcgaccggcaggtcgatgaactggagtcgcagatcgtgaaatggcatcgccaaagtgatgctagtagcaagttggcacaagtcccaggcattggccccatcaccgccagcgcgctggtggcttcactgggggatgcgaagaactttgacggtggccgtcaggttgccgcctggctgggcctagtgcccaaacagcactccagtggtggcaaacagaacctgctgagtatcagcaaacgcggtgatacctatctgcgaaccctacttattcacggcgcgcgttcagtaatttaccgggcgcagcagaagccagaatcctgcagttggattaacggggtagttgatcgacggaacaagaatgtggcggccgtggcgctggccaacaaaaatgctcgcatcgtatgggcgttgctggcccatgaaagggagttccgatcggattacacgaccgccaatgcggccatgtaatcagatcggctgattgaaaaaaacgacaacaataaagcagggagaactgaaccaccgattgctcaggcgatcatgaagtgatggcaaaacaggtcagaccgtggttggcaaaacccgaaattcccgaagcacacaaagtgcgaacgaccgatcgaggagtcaaccagcgaatcccatcagggacagcggcgcaagccgcattcaaagtccgaatgtacgggtgcaatctttaccttcaaaccgtcatgaattgaaagcttggcataccgggagcgtccatgta

SEQ ID NO: 6648 - DNA, 1461 bp, unidentified
  source 1..1461: mol_type = unassigned DNA; note = element_a53b56b
  misc_feature 1..4: note = core
  misc_feature 5..221: note = LE
  misc_feature 222..1445: note = CDS
  misc_feature 1446..1461: note = RE
  misc_feature 1..225: note = bridgeRNA
ccccgttaccttcttgatcaagcccggtgagggcttgcaggccgccggccacggcatgactgagtgcccctgtcgttgatgatctggggggtgttgtcaccgtggccggagggcgccaacgaccgctgatagagacctgacccgctcgcgtggtctgctcgtaacgtggctgccggcgcgggtgtccaggtcggcctgccgcgacgagcaaggagccgcggttgagcaactccgatcccgacccgatgccgttcgcggtgttctgcgggctggacgtcggcaagtccgagcaccacgcctgcgccctcgacacgaccggcaagcggctctacgacagatcgctgcccaacgacgaagccgcactccgcgcggtgttcgaacgtctcgccgagcgcggtcgggtgctggtcgtggtcgaccagcccgcctcgatcggcgcgctggcggtcgcggtcgcccgtgaactcggtatcgaggtggcctacttgcccgggctggcgatgcgccggatcgccgacctgcatcccggccagtccaagaccgacgcccgcgacgcccatgtgatcgccgacgccgctcggaccatgccccacaccctgcgtcgcatccgcggcgacgacgagaccctcgccgagctcgcggtgctggccggctacgacgacgacctcgccgggcagtccactcggctgaccaaccggctccgcgacgcgctgctgcacgttcacccggccctggaacgcctgctcgggccccgtttggaccgcgccggggtcctcgatctgctcgccgtcgccccgaccccggccacgctcggcgagctcggcgccgacggcatggccgaggtgatggcgccccgctcgccgcggctggcccggaccctgcccgcgcagatccgcaccgccctcgcggcccagtcgctggtcgttgctggcaccgcagcgttcgcccgggtcattaccggggtcgccgggcagctacgagacgcccacgacgaacgcgccgacctcgctgccgagctcgaggcccgcctggaggcccaccctcttggaccggtcctgaccacgatgcccggagtcggggtcaggaccgccatcaagctgctcaccatcgtcggcgacggatccgcgttccccaccgccgcgcacctcgcggcctacgccggactggccccggtcacccgccgctccgggtcctcgatcaagggcgagacccgctcccagcgcggcaaccacgccctgcaatcggcgctgttcctgtccgcgttcgcagccctcggcgaccccgaaagtcgggcctactacgaccgcaagagagccgccggcaagcgccacaacgccgccctgatctgcctggcccgccgccgcaccgacgtcatctacgccatgctccgcgaccgccagccctaccgcgctccagcgcgagcacccgagccaatcgcagcttgacagccccatagagaca

SEQ ID NO: 6649 - DNA, 1390 bp, unidentified
  source 1..1390: mol_type = unassigned DNA; note = element_a540ecf
  misc_feature 1: note = core
  misc_feature 2..244: note = LE
  misc_feature 245..1375: note = CDS
  misc_feature 1376..1390: note = RE
  misc_feature 6..244: note = bridgeRNA
cagtgagaatgtggagtgtgatcctgcggccgccgggtctgactcttcgactgactgtccatcgcttgtgacttgaaagcgattcgtcgatccggtggccgcaggttcgcttcggcaccagccatgtgttcgagcggatcgtgacctcataggagcctgcacgaacaggtgcccatcactgtcttgtccgcccgttcggactcgtgacgtgccgtccctcatccggcacgaacgaaaggacgacatgagcatcgtcacacatccattggtgatcgacaaccctgtggcggggggtgtcgatacccacgccgatgtccacgtcgcggcagtgatcgatcacgtcggccgagaactcggccacaacagcttccctaccacgacggccggctatgccgcactcggcacctggcttgccgggcacggcacgatcaccgtggtcggcgtggaagggaccggtgtctacggtgccgggcttgcccgcagcctcaccgctgagggtctgaatgtcgtcgaggtcgatcgtcccgaccgtaagagccgccgtttggatggcaagtccgacccgctcgacgcctacgccgccgcccgcgctgcactgtcgggtcgggcgaccggaactccaaaatcacgtgatggcaacgttgagatgatccgcacgctgcgtgtcgcccgatcgagtgcgatcaaggcccgagcggtcgcgatcacccagctcaaagctgtcatcaagaccgcccccgacgaccttcgcgccgagcttcgcgatctcggtggtgccacactcatcaatcgttgcgccaggctgcgccccgcacgcggccaagcaccggtcccgtcaccgcacgccaaacgcaagccccgccccggccggctgctcgatatcgcggccgccacgaaacacacattggccacgctcgctcgtcgtgtccacatcctcaacgacgaaatcaccggtctcgacgacgacctcaccggcctcgttgacgagaccgctccaacactgaccgcaatgttcggggtcggcaccgacatcgccggccagctcctcgccactatcggcgacaaccccgagcgcatcgccacctcagctgcgtttgcacacctctgcggagtcgcgccgatcccggcgacctccggcaagatccagaaccggcaccggctcaacagcggcggcgatcggcacgccaactgcgcgctctaccggatcgtgatgagccgtctccgctacgaaccgcgaacccagacgcgacgcgacgaactctgcgcccggggcaagaccaaccaagacatcatccggatcctcaaacgcgcgatcgcccgagaggtctaccaagccatcaagaccgatctcatcaccatcaagaacgggacttgacatccataggagcat

SEQ ID NO: 6650 - DNA, 1744 bp, unidentified
  source 1..1744: mol_type = unassigned DNA; note = element_a546a01
  misc_feature 1..2: note = core
  misc_feature 3..292: note = LE
  misc_feature 293..1366: note = CDS
  misc_feature 1367..1744: note = RE
ctagtaccatataagtgtagtcagataggtcgctcctatctactgcacttattttttcgtatgatatgggaagcagttggtctgtcgaaagcccaccttggtgcagatgctttttactgccaccgcagagaagtgcgacagccaaccccttgttgtatgcgcccgagtaagcaggttgtccctttcatagagaggcatacgtgtaacaaactaggttgggataggtaataagtgtggctggctacaaaaatccaactgactgctaaacttttgtaaaggaggacgaattagtatgactcgtatcagtgccggtgttgatgtgtcaaagaacaggagtaccgtatgtattatagaccaggacgggaaagtcattatgcggccgtttcttgtctggcattcgactgaggagctcgattttcttgcagatacgctcaagaggcttaatggagaggttagagtcattatggaatcgaccagtatttaccaatatccgattgctcttcaccttaaagaaaaaggaatttttatctctatcgtcaatgcgtataaagtaaagaaattcgctaatacagattttagaggcggcaaaacggataagaaggactcccgcaccattgccagttacggaattagttattggtataagctattggaatggcagattcccaaagacacctattttaacctggatctgctaaacagaacctatatgaatgcaaaaaagcatcgtcagataatccttcaggaactgcagcattatattgactgtgccatgccgggaatggataaagagcttcattctctcaatctaaacaccaagaaggacttcatgctggattttgtggagaaattttggcatcgtgatgagatcgtaaatatgacagaagccgaatttaccgaagttttcactgcttgggcaaaggaaaagggataccgcccaggcaagggtaaagccgctaagatttacgcgattgccaaaagctgtatcccttattacccagcaaatccaacggttaaaaccattctccaatgtatcgtcgacaagctgagcggagtcaacaggactcttgtcaccatagtaacacaaatgattgaagaggccaagaaacttcctgaataccagattgttagagaaatgccaggcgttggagatccattagcagcaagattcttcggctccgcaggagatatccggcgattcaaaaactcaaaggcactggtcgcatatgccggaatagattcacctcccgatgaatccggagatctcagtagtacgcataggcatataacaaagaaaggctcgaaagtatttcgtgacactggttacgaaataatgatggctttaaggtctcagaagagaacataagaaaaggtcaggaaaaatcctgatgtttatgattatatgctcaggaaagaagcagagggaaagccaccaaaagtagcaaagatcgcagcattgaacaaattcttacggataatatatgcacgaataaaagagttatacgataatatggcacttgcagaaagagccaaaactaaaaccagatccaaaaccagagctaaaactaaagtcaccgcctaagctcaatgaattagcaagatttaactaaagaaaagcgcgaaaaaaccgagggaaagatcggcctttttgtgctgccaaaattaagtagaagaagggaaaaacgccacatttgaaaaaaagttgtaaaaaaatgaaattggcacttgctttttggtagcagga

SEQ ID NO: 6651 - DNA, 1583 bp, unidentified
  source 1..1583: mol_type = unassigned DNA; note = element_a551142
  misc_feature 1..2: note = core
  misc_feature 3..261: note = LE
  misc_feature 262..1368: note = CDS
  misc_feature 1369..1583: note = RE
  misc_feature 14..281: note = bridgeRNA
ttagtaccatataagtgtaagagataaagcataccattagtgctttaccttctgcacttatttttttatgataagggggtaattggtctggcgaggccttttttggattaaacacatccgtcaatcaaaccgtcaaccaccccttattatatacagtcgtttaagcaggttgaaacccataaggtgctttcgtgtaacgaactaaaatgagttgtaataagtgtggatgggaacaattacaaattaaattggaggttaaagatgataagcgtaggaattgacgtatcaaaagagaaaagtacagtgtgtatcttaaagccttatggagaaattgtgagcagaccttttgaggtttctcatgtggaaaaagaactgtctgaattggcaattatgttgcagcgtctgggcgatgaggtgcgtgtagttttggaagcgactgggatatatcatcttccagtattgagctatctaaaagaaagaggcttctttgtggcagtgatcaacccgtttgaaatgaaaaaataccgttgtcagggccttagacgcgtcaaaacggacaaacaggatgccattacgatatcaaactatgggattgaccattggtatcgcctgaaggactatgaggcggaggaaagtgtctacgcagaactgaagctgttaggccgacaataccgtcactatatgaggctgcgggtagaaagtgtattaggattaactcatcttctggattacacaatgcctggaattaagagtctgctggaaggctggaatgaaacaaacggaaaagataaactgtctgatttcgtagaagaatattggcactataatacaataaccgagcagacgctggaacaattcatggaaagttatctgatctggacaaagaagaagggataccatcaaagccaggataaagccgcaaagatttatgctctggccaaagaaagcatccctacgattccttccagtaattcatcgaccaaaatgttagtacaggaagctgttagggtgttacgagaagtggataacactctgatgacgattttaacacaaatgcagttgttagccaagagtctgccagaatatccagttgtccgggcgatgggtggcgttggaaatgtccttgctcccaaactgatagcagagattggggatgtaagaagatttcatagcggtaaagcattgatagcccatgctgggatagatgcccctccgtaccaatccggacaattcacgggaacagagcgaaaaatatcaaaacgaggctcatcgagtctgcgaaaaataggctatgaggttatgcgaagtttaaaaacacataaggcaccagaggacgcagcggtttataaatttatcttaaagaagtaaaaatgaggggaaatcaaaacgtgcggctaaaatagcaggaatgaataagttcctgaggatttactatgcacgtgtcatggaagtgtatcagaaataaacggtaataacatggagactacggtagactggattaacaccagtcttgttgtcgtgggaaaatcagaaataagattatttaaaaccctgtaaaaaaagacttgacttttgttagcagg

SEQ ID NO: 6652 - DNA, 1401 bp, unidentified
  source 1..1401: mol_type = unassigned DNA; note = element_a553e4e
  misc_feature 1..3: note = core
  misc_feature 4..87: note = LE
  misc_feature 88..1125: note = CDS
  misc_feature 1126..1401: note = RE
  misc_feature 1121..1388: note = bridgeRNA
agatggggtggttgccgtcctccctcaacggcatcgcaatgtgccaaagtggtggtgtttcatccacagagcaaaaggacgacaaccatggagcaagatacaatgattggggtggacctggcaaagagcgtttttcagcttcacggcgcctcaatggtggggcatgtgaaattcagaaagaagctttctcgccagcagtttcgcaagtttatgacagatcatccaccggcgtcagtcgtgatggaagcttgcggcagtgcccattactgggcacgggaactgacgcatcttggccatgaggtgaagctgatcgccccgcaatatgtccggcccttcgtgaaacggcaaaagaatgacgtggccgatgccgaagcgatcgtgatcgcggcgcaacgtcccgaaatgcgctttgtcgagccaaaatgtgagggccagcaggcccgcgccgtgctgttccgtgctcgcgagcgccttgtccaccaacgcactgaactcgcaaatgcgctgcgcgcggttctttacgaattcggcaacatcgtcccacaggggatcaggcatctgaagcgcatcgatgggatgcttgaggagccgaacagcggtttgcctattctggtgcgcgaagaatgccgggacctgatggcgcagattgccgaaaagacggcacggattgaggcaaagaccaagaaggtgaaggaattagctaagcagaccgacatggcgcgtcgattacagacgatgcccggtgtcggccccatgaccgcgcttgccatcgaggcctttgctccggacatgagcagctttcggcgcggacgcgactttagcgcttggctggggctggtgccgcgccagcattcctcgggtggcaaggagcggttgggacgcgtctcaaaggccggtcataccgacattcggcaactactgatcattggcgcaatgtctcggctgaattggatgggtcgcaggtcgatcccggaaggctcatggctcgccgaaatgctgtcaagaaagccgcgaatgttggtcgcgatcgcattggccaataagatggctcgcgccgtatgggcgatgctgacgaaaaaccaagattatcgagatccgatctatgcgaaagccgatgtagcgtgaagcttctgctgcatcggaaacgcggagatcggtaagtgggggtgtgaaaagtcgatgacctgaatgggcaaaatgatcgaatagatctggattgggaaaaccaggcgatcttccggagcaagaatagctcggtacacagatatggacccaatccgcggatcaccatcccggccagcggcttctgaaacgccgcactcaaaggcctgacagaagaacgcgctcgatcacatgttcaaagagtcagaagcttcttgcatcaaggacggcaaccacaga

SEQ ID NO: 6653 - DNA, 1562 bp, unidentified
  source 1..1562: mol_type = unassigned DNA; note = element_a56776c
  misc_feature 1..2: note = core
  misc_feature 3..77: note = LE
  misc_feature 78..1190: note = CDS
  misc_feature 1191..1562: note = RE
  misc_feature 1296..1549: note = bridgeRNA
tgttggggtggacggccccctccggcatcagtgtgccagaatgaggtcgttgcagatctcaaacgagggagccgtccatgaacaagattattcgtattggtatcgacacgtccaagagtgtttttgtgctgcacggggtggatgccgctgagcagccggttttgcgccggaagctgcggcgcggccaggtgcttgagttcttcgccaagttggagccgacgaagatcgggatcgaggcctgcggtgcggcgcaccagtgggcacgcgagctgaccgccctggggcacgaggccgttctgctgccgccgcaatatgtgaagccctacgtgaagcggaacaagaacgacgcggccgatgccgaggcgatctgcgaagccatgagccggccgacgatgcggttcgtgccggtgaagaccgccgagcaacaggcggcgctgatgctggccggccggcgtgacggattgatccgccgccgcacgcagttgagcaacacgatccgcggctacgcggctgagttcgggctgattgccgccaaagggctcgacaagatcgagccgttgctgacccgtatcgcggcggaccagaacttgcctgagctggcgcgggaattgttcgccgactacggccgggactatgccgagcttggcaaacaggtcgcgaaaatcgaagccaagctgaaggcttggcacaagaacaacgagctgagccggcggctggccgagttgccgactatcggtccgatcggcgcctcgatgctggtgatgaaggtgactgatccgcacgcgttcggcgtgggtcgcaacttctcggcctggatcgggctcaccccgaaggatcactcgaccgccggcaagatgcggctcggcgtaatcacccgcgccggtgacgaggccttgcgcagcgtgctggtggctggagcaaccgcggtgattcagcaagtgcgcaaggggcgcgggcatccctcgccttggttgctcgaattgctcaaacgcaagccgccaaaactcgccgccgtggcgctcgccaacaagatcgcgcgcatcgcctggaagctgatggtcagcggtgagcgctatgatccgcagcgggcagcgggtcgcttcgttcccccgaccggcaggatagcgccgcgctcgcctcgtcaaggccgcttcgcgccccctgcgggggtggccgttggccagccttgaccacgctcgctcacggcgctcccaacagcccaccgtcggcaggaacaaagccatggtcctcatcgcccatccaaaggatgaacccatcatgaaatgatgctcacaactcttcagcgtgacggcgaaacttcgccgtgcgctgtggccgaagcttgctcgagaaggacagatggtgtgatcgatcgatccagatgcgagatactccgagggacccagtggtcggctcaaggccgcgaccctgtttgggactcgcgtcgcggaacccatcttggcagcggtcatatatggccgcgtcaacagaccgtacatatgatcgcaatcgcttcgattcacacgctgcactccccttgcaagccgggggccgtccacata

SEQ ID NO: 6654 - DNA, 1611 bp, unidentified
  source 1..1611: mol_type = unassigned DNA; note = element_a569133
  misc_feature 1: note = core
  misc_feature 2..276: note = LE
  misc_feature 277..1224: note = CDS
  misc_feature 1225..1611: note = RE
  misc_feature 92..273: note = bridgeRNA
aaacttctatggcggcgatcctcgccgccaccatctaccacgaaaatctaaactcaaaatagagtctaacccattaaccccttgacaataatggatgataacaatacaaccaggctgaactttttttggtggatcttaaggaagataccctgtataagaaactggttgtgacagtatggaagaaccatttagtgtacagctagtacgtatacaaaaatttttgtaacaaatctcctgtcatatgtattgttaatcttttattgaggtgattctcctatggaagcaatgattgaacggtgtgctggcctagatgtacaccaagaaacagtagtagcctgtgtattatttggaccattagataaaaagccaaaaccctctattgaaactttttcaactacaacaacgggactcttggctttaagtgattggctcgctacccttcaggtatccgatgttgtgatggaaagtaccggagtctactggaaaccaatatggaatatactcgaaggttcttttcaccttgttctggccaatgccagacatgtcaaaaatgttccaggacgtaaaactgatgtgaaagatgccgaatggcttgccaagcttctaagatgcggacttattgaaagcaattttgttccaccggaggatattcgtgatttacgagatcttactcgttatcgaaaaaaattgattcatcatcgcacttcagagcagaatcgcattcacaaaattcttcaagatgctaatatcaagctaacatccgttctatcagacatttttggtgtatcgggacgccgtatccttgaagcgattctaaacggtgaaaaaatagagaccgatggtcttcgaaaaatggtggattggcgaacaaaggcaagtattactgacattgccagtgcaattaatggtcgtattcgccgtcatcatcgtgatatgttgcgttaccattgggagcatatgagttatttagaaaaagccatagaagaattggaaaaacaaatcgatcaactcctgtccccctatcgtaaggaagtagaattattggatggaatacctggtgtgaacaaagctgccgcagctacttttattgcagagatgggcgttgatatgtccgtatttaagtcagctaaacatcttgcctcttgggctggtgtgagtcctggaaattacgaaagtgctggtaaaaaaaaacgagtaaaaccacacaaggtaacaaagctttgaaaacgatggctgtagagtgtgtactagcgacatcaaggcaaaataatcgaattgcttcacatcgaaaaaggattaccaaaaggcagggaaaaatgaagggacgaatcgcttctgctcatttactactaacgattgcttacaacatcttaaaaacaggggaaccctatcaagaactaggctcaaattaccttgaagaaaaacaaaataacaaagaattaaaaatgatcgaatacctaaaaaagaaaggctatacaatcgatccatctgaacaacaaactgcataaccagttaaattaacgacatagtacatttacgtccttcaaaaaaattagaatatggtgcgcttatttaagtatggcctttcactaaagtgttttcatacaaaaa

SEQ ID NO: 6655 - DNA, 1565 bp, unidentified
  source 1..1565: mol_type = unassigned DNA; note = element_a57c4f2
  misc_feature 1..3: note = core
  misc_feature 4..245: note = LE
  misc_feature 246..1421: note = CDS
  misc_feature 1422..1565: note = RE
  misc_feature 3..224: note = bridgeRNA
cttgtattatatagtcatagcttttctttaccttttctcaggtatgagctatgctgtttttgatgctgtggattcgttcaattctcctaccacttgatggttttaaaaaggctctaaccacagtctctttgtttacttgttaatcagttagataccgcatgacggtttatttagaacaaggttacaatcgcagagagttcccgtggtctaaaacagtatcatatttatttgaaaggagtttcactatgatatacgtaggaattgatgttgccaaagataagcatgattgctttatcaccaactcagatgggcaagttctcttcaaagcatttactattccaaacaacaggatgggctttgacgatctctatcagaagattacatcctctacggatgatttaaccaatgtaaaagtaggccttgaagccactggacactacagttataacatcttgggatttcttcttgataaaggtctgaccacctttgttatcaacccgttacataccagtcttttcagaaaaagtctaagccttagaaagaccaaaacggataaagttgattcccatacgattgctacaatgcttatgtctgacgtgaacttaaagtcctactcagactcatcttaccacaatgaagagcttaagtcactaactcgttaccgttttgataaagtcaaggaacgggcaaagcttaaagcttccgtttcccggctggtcaccattctctttcctgaactggaaaagctggtccccacgctccacatggcttcggtctctgctttattaagggaattccccggtgctttgcagattgcctccgctcaccttaccagactgacaaacttgctttatgaagcctctaagggccgttatggcagagataccgccatcttatttaaggaatctgccaaaaattctatcggatcgaatatgcctgcaaaatctctggaactgaagcacaccctaaaattgataggggaattaaattccgagattgatgaaattgaacaggaaataaagcgtattatggatgatattcattccccgattcttaccatccctggaatcagttatcggatgggagccatgatcctggctgaaatcggagatttttcccgctttgattctcccgataagatcctcgcctatgccggattatctcccaccacctatcagtctgggcagttggaatcctcctattcccacatggagaagcgtggttccaggtatctgcgttatgcacttttcaacgccactaaatttgtctgcaactgggatcctgtttttgcatcctacctcactaagaaaagggcggagggcaagcattataatgttgcagtatcccatgctgcaaaaaagcttgtcagagtcatttatcatttggaaaaatcgggacaggcatacggcaaagcctcttaacctttctgtttgaaaatctcctttttgagcacctacaaagatgctctgtttgtcatgcagttttcaacgtactgatttacttgaaatacatttctgtaattcattcaaaaatctcatctttgatcttgacttttaatagttagt

SEQ ID NO: 6656 - DNA, 1476 bp, unidentified
  source 1..1476: mol_type = unassigned DNA; note = element_a5859f6
  misc_feature 1..2: note = core
  misc_feature 3..238: note = LE
  misc_feature 239..1261: note = CDS
  misc_feature 1262..1476: note = RE
  misc_feature 10..184: note = bridgeRNA
cttgtatcttgcgatttgaggcgtaaccgttgtttacgtttcggcggagaggccgtacaaacctgaggccagtgcgagctgagcctgctccaagattggcccccgtccctctctttgtgacgccgtggagaatcggaggccttgtgagcctgcatgttcaaggtcggcggaaagagcaagtccgttcgaggcggacgcgggacggtgccgaagctcagagtaacgccggaggagagcgatgagcaaggaatctgtttcgagtcatgtgtcggtgtatgcaggaatcgatgtaagtgcggcgacgctggccgtggcagttcaacgagaggatcgggcgggcttcgagcagcggcagtttgccaactcggggatggggcacaagcaactgatcgattggttgctgaagggtggcgagatagtcagagtgtcgctggaggctaccggaatctactcgctggacgtggcgttggccatggatttggcggagaacatcgaagtctcggtactgaatcccaagatagccaaccgatttgctcagacgctacgccgatcaaagaccgacgcggccgatgcggtggcgctggccgagtacagccgacggatgcagtttgtcgcctggaagcggcccagcagagtcgagttggagttgcgcgctatcagccggcacatcgtcgcgctcaccgacgagcacacacgattgaacaaccgactgcatgcagccgaggcttccgccacgacgccgcgctgtgttcgtcaggacctgaaacattcgatcaatgcgctgaagaaacgtgtcgtgaggctgcgcaaggcggcttcggagttagtcgaactgaatgagacgctggcgatgaaattcaagcagttaatagagatccctgggatcgccgaggcgagcgcgctgcaattgctcggtgagcttgcgccgctcgatcctgagatgaccgcgcgccagtgggtcgcacatagcgggctcgatccggcccagcaggtttctggcagttccgtgcacaaaccgtcacgcatcagccgacacggcaaccgctatctcagacgagcgctctatatgcccgctctcgtcggcgtacgcttcgatcctcatctgaaagccttttacctacaactgcaggcgcggcataagaccaagcttcaggccttgatggcggtagcgaggaagctgctgcacgccatctacggcatcttcaaaagcggcacgcactacgatggacggaagctgttcccgcaattgggcgccgtataaacgctacaattgcctcgccgggcgaaacggaagcgggctctgctgggaagcaaccatgccgagggataacctggcgggctcatcctgacgatgaaccaacggccgggcggggacgaccttgtccggccgcaaacagacatcggagggatagacccgacatgccttgaaaatccaatgcttcgtccgccgaaaaagcttgacttgcaagagagaat

SEQ ID NO: 6657 - DNA, 1164 bp, unidentified
  source 1..1164: mol_type = unassigned DNA; note = element_a585c4d
  misc_feature 1..2: note = core
  misc_feature 3..174: note = LE
  misc_feature 175..1143: note = CDS
  misc_feature 1144..1164: note = RE
  misc_feature 29..195: note = bridgeRNA
cttgtatcttgaaattcgactatcataaaaatgatttggcacagtgtacgcaactcgccagcccctgagggtttttaagcccgttgaggagctattgacgcatacactgagccactcatctgaaacccgaacagttgtccgtcatccataacgtatttgcaaagatgggtaatcatgagtcagccaaatccactttgtgtgggcattgatgtttccaaagcctcactggatatcgcagtcaacaggagtgtagagtcgttcacagccagtaatgatattaacggctttgataccattgtgtccgtactgaagcagcacaccgtgtccctggtgttgatggaagcaaccggtggactggagtctgcggttgcctgctcgcttcaggccgaaaggtttgatgtcgttgttattaatcccaggcaagcgcgagattttgcccgggccatgggatatctggcaaagactgaccgcattgacgccaaagtcctggctcagatggcggaagtgataaaccgtcatcccgaacgtgaacggtttattcgagcgctgccggatgcggaacgtcaggttatttctgccatggtggtgcgtaggcggcagttgattacgatgcttgttgctgagcgtaatcgcctgcatccggcgcatcctcagagcagaaagagcatcaacattatcattagcgcactggaagttgagctggagcggatcgatgagaatatgaataaacacatccagacttattttaaggcactggctgacaggctcagcgccatcaaggacgttggtgcaatgacagcaacaaccctgctggcagaggtccctgaacttggcaagctctcgcgtcgggaaatcagtgcactcgttggcgttgcccccgttaaccgtgactcgggaaccctgcggggtcgacgaaccatctttggcgggcacgctggagttcggccagcgctgtatatggctacactcgtggcaacccgttttaacccggtgatcaagacgttttacaaccgcctgttggcggcgggtaagcccaaaaaagtggcgcttgtggcttgtatgcgcaaaccgctgaccatcttaaatgcgatgattagaaaagatgaagaatggaataattcgtatcatcagataactccataaaaattgcgttcaagacagttg

SEQ ID NO: 6658 - DNA, 1382 bp, unidentified
  source 1..1382: mol_type = unassigned DNA; note = element_a58ae40
  misc_feature 1..2: note = core
  misc_feature 3..125: note = LE
  misc_feature 126..1148: note = CDS
  misc_feature 1149..1382: note = RE
  misc_feature 1169..1351: note = bridgeRNA
acatggggtaatcgcgggagcgaagccctagcgttcacgatggaagctagtggctgttccccgataagatggaagtacgggctcacgatccgaagccgggcccaagcatctgatggagaacagccatggacgagtatatcggactagacgtttccttgaaagagactgccgtatccattcggcgtgacggcaagcgtgtttggcgcggtaagtgtccctcggatccacagcttctggcggcattgatccgcaagcatgcgccggcacccaagcgggtagtattcgagactggcccgctctcggtctggttctttcacgcgctggcggccgaaggggtgccagcgatctgtatcgacgcacgccatgccaaagctgctctcgacatggcaacgaacaagaccgatgccaacgatgccgacggactggcgcatctggctgaggtcgggttctacaaggaagtgcgggtcaagagcttcgacagcatgctcactcgcacgctggtagcggcacggactcgcctcgtgcggattggtaccgagctgtcgaaccagatccggggcctgatgaagacgttcggtctcgtcgttcccgctgtgacgggcagcaagttcgagcatcatgttcatgcgctgctggccgacaatatagacctggggcagatcatccgtccgctgcttgaagcctggcacgcagttcgcctccgcgccgcagagctcggacgcaagcttctcgcggatgcgcggcgcaacgccgcctgccagctgctgatgtcgatccccggtgtcggtgttgtgaccgccacgtcgttcgttagcgcgatcgaggagcccgccaactttaagcattcgagatcggtgggagcgttcgtcgggctgacgacgcggcgctatcagtctggcgagatcgactatgacggtcacatctccaggcgcggtgatagccacctgcgcgggctcctttacgaagccgcaacagtcctcctcacgcgcagccgatccgaatgcgatctacgcaaatgggggctgcagctgcgagaaaggcttggcttcaaacgcgccacggtcgcagttgcccgcaagctcgccgtcatcatgcatagcatgctgatcaccggtgaaccattcagggagaaatccgtcgcagcttaaattcccgagctcgtccgcgtcgcaaggcgccacgagacgtcctgccgggacgtaggctgatccattccgcgacattcgttgcaccttatgccttcatggcagtgaagtgcgtgatgaaccttggaagggttacccgcgaagccccatcatgcggcggcatatgtcgaccgcgaagacgaccatgctctcggcaacgacatctcagaaacctcttgcaaccaacgcgattagacg

SEQ ID NO: 6659 - DNA, 1178 bp, unidentified
  source 1..1178: mol_type = unassigned DNA; note = element_a58cdeb
  misc_feature 1..2: note = core
  misc_feature 3..212: note = LE
  misc_feature 213..1175: note = CDS
  misc_feature 1176..1178: note = RE
  misc_feature 3..188: note = bridgeRNA
cttgtatgtttagacttgaaggggtgggtgggactaaagcatcgcttctgactcgactctgaccagtcaagtacagaccgtgggagacttcatccccaccccttcaccaaatgcgccaataaggaatgcatcggctttgaccgacgatagaagcaagccagcgcaacggtgaaccccgacaagctcttaaaacgtagctcggaggattggtcatgacaacctttgattctcaagtggtagttggtgttgatgtagcgaaggatgaaatcgtggtgcatcggcgtgatttggataaaactcaaatcattgccaacgaaacgccggcgctgaaaaagtggttacgcagcctgccctcggatagcgccattgcgatcgaagccaccaacatctatcacgttgagaccgttgagctggcctattcgatggggcatcgggtgtttgtggttgatcccggaaaactgagcaagtaccgcgatagtctgggtaagcgggcaaaaacagacgcttcagatgccgctcttctggctcgctatctggcgcatgaaggcgccgcgctaaggctctggagtccgcctcccgaggtttataccgagctgaaaaacctgcttcatcgccgggcgaaactggtttccatacaggtgacgctcaagcaaagctggggtaatcatgctgatctgccaaaggagtttggggctgttatcgacagcctgaaagccttggatcaagcgattcaaaatttgatgaaggacatcctgaacaaggcagggctgatgccccagatcaagagatgcgaaggtatcgagggcgttggcttcctgaccgcgacagcgtttcttacggcctatatgcgtggtgatttcgcgagcagtgatgcttacattgcctatttggggctggatttgtgtgtgcgggactccggtaagaaaaccggccgacgcagacttaccaaaaaaggtgacccggagattcggcgcctggggcacaacgcttcgatggcggcctgccgatccgagacatggaaacccttctatcagcggcatctggacagtggtaaggcaaggactcaggcactggtgatcttgacccgcaaattggcgcgagtagcgtttgcgctgatgaagaatcagaccgattaccgaccaaattctatatttggggcttcaccccaaacatagaat

SEQ ID NO: 6660 - DNA, 1386 bp, unidentified
  source 1..1386: mol_type = unassigned DNA; note = element_a59c541
  misc_feature 1..2: note = core
  misc_feature 3..85: note = LE
  misc_feature 86..1114: note = CDS
  misc_feature 1115..1386: note = RE
  misc_feature 1158..1373: note = bridgeRNA
tgatgtggtggacggcgcccgctcccggcatcgatgtgccatagggtgcttcgtcggaagcgaatcacatgagggagccgtccagatgcaaatttccacgatcgggttggatatcgccaagaacgtgtttcaggtccacggcatcgacgccaacgagacggtcgttgtcaggaagcgactccggcgtagccaggtgctggcgttcttcaaagcgctgccgccgtgcctcatcggcatggaggcctgcgccacggctcattattgggcgcgcgagctcacgaagctcggccaccgggtgcggctgatgccagcaaaagacgtgaaggcctacgtcaagcgtaacaagaacgatgccgccgacgccgaggcgatctgcgaggcggttcggcgcccgacgatgcgtttcgtgcaggtcaaatcggccgagcagcaggggcagttgatgcagcaccgtacgcgcgatctgctgatgcgtcagcgcacccagtcgatcaacgcgttgcgcgcgcatctggccgaactcggcattgtggctgcgcagggcgacaaaggggtcaaggaattgctctcgatcgtggcggacgaaaaggatgcgcgcttgccgatcgatgcacgtgcgagcgtcattgtgctggcggcgcagcttcaggcggtgcagacgctgatcggatcgatcgagaagcgaatcaagacgcagcaccgctcgaacgaggcgagcaagcggcttgagaccatcccgggcatcggtgtcatcggggcgagcgcgatcgcggcgacggtagcggacccgacggtttttcggtcggggcgcaattttgcggcttggatcggactggtgccgcgacaggattcaaccgggggcaagcagaagcttgggccgatctccaagcaaggcgaccgctacttgcggcgcattcttgtcgtcggcgcgcattccgtcttgcggcgcgccaagcagaaccctgagaaatatttctggctcacgcaactccttgcgcggcggcccttcaaggtcgtggcggtggcacttgccaacaagatggctcgcatggcctgggcgctgctggcccatggcggcacctatcgggcgcctgtgcttgcggcagcggcgtaaggagttctggcgatggaaggatgaggttctgttcgtgcgttcatgaactgcaggggtgatgaagacattgatgcgaaacggtcgagaccgtcgatcggaaaacccgtgatgggtcacgcgaggaaagagcgcgtggttttgtttgggaccgatcagcggatcacatcagggccagcggccaaacggccgcattcaaaggccgaatacatgaccgcacccgaacgcttcgctgatagtcagattcctcttgcaccgcgggcgccgtccataca

SEQ ID NO: 6661 - DNA, 1376 bp, unidentified
  source 1..1376: mol_type = unassigned DNA; note = element_a5a5932
  misc_feature 1..2: note = core
  misc_feature 3..84: note = LE
  misc_feature 85..1116: note = CDS
  misc_feature 1117..1376: note = RE
  misc_feature 1146..1364: note = bridgeRNA
tgatgctgtggacggctcctccaccggcgcgtgagcgccaagcatgtggtgctgttgaggccccacgattcggaggagccaatcatgcagtcaatcacgacgatcggtctcgatatcgcaaagtccgtgtttcaggttcactgtgttgatgcaaaaggccaagtggtactccggcgccagctgaagcgtcgctatatgctggcattcttccaaaaacttcagccgtgtctggttggcatcgaagcttgcgcctcatcgcactattggtcgcgcgagctgcaggcgatcggccacagcgttcggctgatgccgccggcctatgtgaagccctacgtcaagcggcagaagaacgacgccacggatgcggaggccatctgcgaggccgtcaccagaccgaacatgcggttcgtcgcgaccaagacacccgagcagcaaagttgcctgacgctgcatcgcacgcgtcatttattgatccgccagcagacctcagtgatcaatgcgatccgcgcacatcttgcggagtttggcatcgttgcgccggtcggacgcaatggtgtggaccagctgcttggcattgttgccgacctggctgacaagcggctgcctgaagttgcgcgcatttgtgttgcggctctcggcacccaactgcgaatgctcaaggcacagatcctggagttcgatcgcctgattagagcctggcaccgatctagtgaggcaagcaggcggctcgacgcgatcccgggcgttggaccagccctggccacggctctggtcgccagtgtcgccgacccgaaggctttccgctcgggacgggacttctcagcctggatcggtcttgtccccaagcaggcctcgagcggaggcaaagacaagctcggcagcatcagcaaacaaggcgatcgctatctgagaagcctattcacgacgggggcgcttgctgtgatccgctatgccaaaatccatggcaccaagcatcggccctggctcactgcgttgctggctcggcgtccgaccaaggttgcggccatcgcgcttgccaacaagatcgccaggatggcgtgggcgatgatggcgaggggcgaacgctacaaagaacctgccgcgcttgcggcttgaacggatcgcgtcggacatccggcgcgatgtgacggttgggagggcgaacagcacgtaatgcagagccggtcgatccggcgatcaggacaacccatttgggccagagcatctctgaatgcgtgcttttgatcgggacctgatccgcggagcgcattatggccagcggtcacgtgtaccgcgctaaaaggccgaacacatggctgcaccgaccaagcctgcgacgcgaagattctccttgccaacccggagccgtccacaca

SEQ ID NO: 6662 - DNA, 1159 bp, unidentified
  source 1..1159: mol_type = unassigned DNA; note = element_a5acb34
  misc_feature 1..2: note = core
  misc_feature 3..220: note = LE
  misc_feature 221..1147: note = CDS
  misc_feature 1148..1159: note = RE
  misc_feature 12..223: note = bridgeRNA
cttgtcttatgattcttccgccttctctgcgaaggtggagccactgccgccggctcaaacggcaggcagtggcggtggttggatcgcgaacggcttggtcatggacagtgacgtcgatggaccgttctagagtgtgatcggccaccgtcttcgcatgaggcctgaacggatacgcagcggcttctggccctgcatgacaagcataggacacgcgaagaccatgaaagatagcatcggtatcgacatctcaaaagcccatcttgacgtttgccgtccggcgaccggtcagacagcccggttcgagaactcggcggcgggattgactgcgttcaagcgctgggtcggttcaagtcagcccgatctggtgatctacgaggcaacgggggcttatcatggcctgcttgagaaacgctgctctggcgatctgcccttggtgaaggtcaatccgttacaggcccgccgctttgcccaggcccgcggaacccgtgccaagaccgatgcggttgacgcccatgtactggctttgatgggcgaggcgctggatctgcaaccggacagccctgccagcgaagatcaccatgatctcaaacagttgcaggtcgcgcgcaccgccatgatcaaagcgcgcacgcggctgaagaaccggcttgccacccagacgctctccctgctcagacgtcaggcgaaagtgcagctggctttgctcgacaggcagctcaaagccatcgacgccgagatcgccagcaggctgtcgcgggatcaggcccgctccctcgacatcctgcaatccattcccggcctcgggtccgttgttgcagccaccatccttatcgagtgcccggaaatcggcgcgatggaccgcaaacaagccgccagccttgccgggctcgccccgatggcccgacaatcgggccaatggcgaggcaaggccttcattcagggtggccgtaaattcctgcgtgacgcgctctacatgcccgcactcgtcgctacccgcttcaatccagacatgaaacagaaatacaatgcgatgcgcaaagccggaaagccagcaaaagtcgctttaacggctatcatgcgaaagctcatcgagctggcaaacacactcataaaacaggataggaaatgggcgccaaatccagcttgatcaatacggata

SEQ ID NO: 6663 - DNA, 1327 bp, unidentified
  source 1..1327: mol_type = unassigned DNA; note = element_a5acdb9
  misc_feature 1..2: note = core
  misc_feature 3..68: note = LE
  misc_feature 69..1031: note = CDS
  misc_feature 1032..1327: note = RE
  misc_feature 1094..1325: note = bridgeRNA
ttaatgagatggtcactccctccttcccggtactatgctgaggacaggctttcattcggagaactatcatggaaaacattgcgctcattggtatcgatctgggtaaaaactctttccatattcattgccaggatcgtcgcgggaaggctgtttaccgtaaaaaatttacccggccaaagttgatcgaattttttggcgacatgccccgctacaaccatcgcaatggaagcctgtggcggttctcactttatggcacgcaagttggaagagttggggcattccccaaagctgatatcaccaaatttgtccgcccgttcgttaaaagcaataaaaacgactttgtcgacgccgaagctatttgtgaagctgcatcgcgtccgtctatgcgttttgtgcagcccagaacggaatctcagcaggcaatgcgggctctgcatcgtgtccgtgaatccctggttcaggataaggtaaaaacaaccaatcaaatgcatgcttttctgctggaatttggcattagcgttccccgaggagctgccgttattagccgactgagtaccattcttgaggataatagtttgcctctttacctcagccagttattgctgaaattacaacagcattatcactatcttgttgagcagattaaagatttggaatcccagttgaaacgaaagttggacgaagatgaggttggacagcgcttgctgagcattccctgcgtcggaacactgacagcgagtactatttcaactgagattggcgacgggaagcagtacgccagcagccgtgactttgcggcggcaacagggcttgtacctcggcagtacagcacgggagtaggacgacattgctgggaattagtaagcgaggtaataaaaagatccgaactttgttggttcaatgtgccagggtattcatacaaaaactggaacaccagtctggcaaattggccgattgggtcagggatttactgtgccggaaaagcaactttgtcgtcacttgtgctctggcaaacaagctggccagaatagcctgggccctaacggcacgacagcaaacttatgtagcataacggcagaaatacaccggtttaaagaattactgatctggttttgcgaatactgatattgatgatactaacggcccaccggcctgttgaggaacctgtaaaacggaaaggctcattgaagccgtatattttctggaggttcatcaggcgcggaactcatcaaggcgcgggaataaaatcccattcagacgccggatagattcaagcaagccaacttgtcgtcaaaatcggtgttgcaaaaacgggagtgaccataga

SEQ ID NO: 6664 - DNA, 1429 bp, unidentified
  source 1..1429: mol_type = unassigned DNA; note = element_a5b9464
  misc_feature 1: note = core
  misc_feature 2..210: note = LE
  misc_feature 211..1413: note = CDS
  misc_feature 1414..1429: note = RE
  misc_feature 1..206: note = bridgeRNA
cgttgatgcttatagggcctcgttttggtctgactctgccaccgactgacttcgtgtctttgctttgatccgtcggctgggacggggcgctttgtgagtgcgccgaccaggcggacatgacctcataggagcctggtcgaagaggccccatcaacgtcctgtctgcccgcccggtcggctgccgatccgatcaagaagggcaggaccatcatgacaacaagactcgagaaaatcttcgcgggtgtcgatacgcacgcggacacgcatcatgccgcggtgatcgatagcaacgggaaacaactcggtgatgcgcagttcccgaccacaccggccggctacgcggcgctggccgcgttcttgaccgccttcgggatggccgtgcgcgtgggggtcgaagggaccggttcctacggtgctggcctggcgcgccacctgggagcggctgggttcgtggttgttgaggtgttgcgcccgagtcgacagctccgtcgaacgcgcgggaagtctgacccgttggatgcttacgcggcggcgcgggccgcgctcgcgcaggaggagcatgcgacaccgaaagcgggggccgggcaggtcgaggcgatccggtatctgctggtcgcgcgtcgcagcgcggtcaaggcgcgcaccgccgcgatagtccagatcaagtctctcctggtcacggctccggacctgatccgggagcgttaccggtcgctgggcgacaaggcactgatcgcggcgctggcccggttgcggctctcgaccgatccgttactcgccgcggtcgggcagggcctgcgatcgctcgcgaggcgtcaccagctgttgggcgaggaggtcagcgacctcgatcaagcgctggcggcgttgactgcgggcgcgaacccgggactggtcgcggcgaaaggcatcggcacgatcacggctgcgcagttgttggtcaccgcgggcgataatccggaccggctccgcagcgaggcctcattcgcggcgctggccggggtcagtccgatcccggcttcgtcggggaagacgaaccggcaccggttgaatcgaggcggggaccggcaagcgaacgcggcgctgcaccggatcgcgttggttcgtatgtcgtacgagccccgcacgcgcgactacgtcgctcgtaaacgcgcgctgggccacagcaacaaggagatcatccgttgcctgaagcgagcgctcgcgcgcgaggtgttcacgctgctcaccacgagggtcgaggttccggtgatcgatgatctccgcccgctgcgacaggctcggaaactgagcctcacgaccgtcgcggaacacttcaacgtctggcccgccacgatctcgaaactcgagctcggaaaacaccgcgatgacgatctcgcgaacagctaccgcgaatggctcaccgcggcttgacaaccaataggagcat

SEQ ID NO: 6665 - DNA, 1360 bp, unidentified
  source 1..1360: mol_type = unassigned DNA; note = element_a5bf150
  misc_feature 1: note = core
  misc_feature 2..67: note = LE
  misc_feature 68..1102: note = CDS
  misc_feature 1103..1360: note = RE
  misc_feature 1106..1350: note = bridgeRNA
tatggaatggcccgcccctccttccggcgctgtaggctcgctggcggttcataaggaggaacgggaaatgaggatttcggttcttggcgtcgaccttggcaagaatgtttgcagtctggtggggctcgacgcgtccggcgcagtagttttgcgacggcgcgccaagcgagagacggtggtcgcgctggcggcgaaactatcgccctgcattgtcgggatggaggcctgctgcggcgcccatcatctcggccgcgtgttcgccgctcacgggcacgaggtgcggctgatgtcgcccgaatatgtccgcccctatgtcaaggcgcagaagaacgacgatcgcgacgccgaagggattgcggaagccgtgacgcggccgacgatgcggtttgtcgagctgaagagccaggagcagctcgacatgcagacgctgcatcgatcgagagaccgattggtcggcgaacggacggccctgatcaaccagctgcgagcaatccttttggagcgcggaatcgtcgctccccagggcaagcggaagctggagcaattcctcgtcgaactgatggacgagcaaggcggaccggggttgagcccacggatgatcacattggtcgccgacgcgcgcgcccaatgggccgagctcgatcgacggatcgccgccttcgacgcggagttcattcgctggacgaaggagaacgaagacgcccgccggctggcgacgatcccgggcgtcggcgcgacgatcgcctcggcattgatcgcagcgatcggcaaggccgagacgttcgaacatgctcgcgatctggcggcatggttgggcttggttcctcgtcagttcaccaccggcggcaaaccgaagcttctgggcatcagcaagcgtggcaacaaatatcttcgcaggttgctgatccacggcgcgcgagctgcgttgccctatgtcgccgagcgggacacgccgctcggccgatgggccaaagcgctcatgagccgcgcccaccccaatgtcgccgtcgtggcgttcgccaacaagctggccaggatcgcctgggcagtgctgcggcgcggagaagcgtttgccgtcaagggatcgctcatggcggcgtagcggttgatcgatcagcgctcaagggtgctattcgatcggtgaggtttgcgagtggtggaagcgagatggcctgacagtcgaacggcgttccggaagcctggttcaaaaaacggcgctcgacgccgggagttttatgaggaccgggacgcgcgtatctccatcttggctcggcggaagaccgcgaagccggatacgttgaagcagactgatcattcggcgctctcgatcaaaccccttgcagacggggcgggccatacg

SEQ ID NO: 6666 - DNA, 1245 bp, unidentified
  source 1..1245: mol_type = unassigned DNA; note = element_a5bf426
  misc_feature 1..2: note = core
  misc_feature 3..68: note = LE
  misc_feature 69..1007: note = CDS
  misc_feature 1008..1245: note = RE
  misc_feature 1029..1243: note = bridgeRNA
ttaatgagatggtcactccctccttcccggtactatgctgaggataggctttcattcggagaactatcatggaaaacattgcgctcattggtatcgatctggataaaaactctttccatattcattgccaagatcgtcgcggcaaggctgtttaccgtaaaaaatttacccggcctaagttaatcgaatttttggcgacatgccccgctacaaccatcgcaatggaagcctgtggcggctctcactttatagcacgcaagtcggaagagttggggcattttccaaagctgatatcaccacaatttgtccgtccattcgttaaaagtaacaaaaacgactttgtcgacgccgaagctatttgtgaagctgcatcacgtccgtctatgcgttttgtgcaacctagaacggaatctcagcaggcaatgcgggctctgcatcgtgtccgtgaatccctggttcaggataaggtaaaaacaaccaatcagatgcatgcttttctgctggaatttggcattagtgttccacgaggatctgccgttattagccgactgagtacccttcttgaggacaatagcttgcctctttacctcagccagttattgctgaaattacaacagcattatcactatcttgttgagcagattaaagatttggaatcccagttgaaacgaaaggtggacgaagatgagattggcgacgggaagcagtacgccagcggtcgtgactttgcggcggcaacagggctggtgcctcgacagtacagcacgggaggtcggacgacattgctgggaattagtaagcgaggtaacaaaaagatccgaactttgttggttcaatgtgccagggtattcatacaaaaacaggaacaccagtctggaaaattggccgattgggtcagggatttactgtgtcgaaaaagcaactttgtcgtcacttgtgctctggcaaacaagctggccagaatagcctgggccctaacggcacgacagcaaacttatgtagcataacggcagaaatacaccggtttaaagaatcactgatctggttttgcgaatactgatattgatgatactaacggcccaccggcctgttgagaaacctgtaaaacggaaaggctcattgaagccgtatattttcttgaggttcatcaggcgcgggaataaaatcccaatcagacgccggatagattcaagcaagccaacttatcgtcaaaatcggtgttgcaaaaacggaagtgaccataga

SEQ ID NO: 6667 - DNA, 1153 bp, unidentified
  source 1..1153: mol_type = unassigned DNA; note = element_a5c1b7e
  misc_feature 1..2: note = core
  misc_feature 3..189: note = LE
  misc_feature 190..1137: note = CDS
  misc_feature 1138..1153: note = RE
  misc_feature 22..188: note = bridgeRNA
cttgtatcttgagttgagtttctcaatgatacgactcatcatcaaccggggcatgatagaccgatgctaccgaggtccactgagaccgttggacagcgagggtcgtcatgcccttcctgaccaagcccgaacagttgcgtgggccgttgagcccgtatcatgcaaggtagggccaccaaggaggacatgatgacgagtacgcaggtctttgtcggcattgatgtctcgaaaaagcagttggaccttgccttccgaccagagggccggttcgccgcccccaacgatgaggccgggtttgctcaggtgctcgaacgcctgagcaccgtctcccccgccctggtggtgttggaagctactggggggatagagattccgctcgcgggggcattggctgcagcaggggtaccggtcgtggtggtcaatccccggcaggtgcgggactttgcgaaggcggcggggaagctggccaagaccgatgtgctggacgcccacacgctggcgcacttcgctgaggtcatgcgaccggagttgcggcccctgcccgatgagcagacgcagacgctggcagcgattctgacacgccgccggcaactcgtcgagatgctcacggcagagaagaaccggctcgggcaggcccgcaagccggtgcgcaagagcctgcgggcacacatcgcttggctcaaacgcgaattggcgcagacggacagcgaccttgctcacaccattcatgagagtccggtgtggcgagagaaagacgacctgttgcggagcaccccaggggtgggacccgtgttgaccaccacgctgctggcgaatctgcccgaactcggcacgttgactggtaagcagattgccgcgttggtcggtgtggccccactgaatcgtgacagcgggacgtggcgcgggaagcgcacggtctggggcggtcgcgcccagatccgggcgacgttgtacatggccgcggtggtcgccgcacgctttaatcccgtgatccgtgcgttctatcaacgcctctgtgcggcgggcaaggcaaagaaggttgccctgacggcctgcatgcggaaactgctgatgatcctgaatgcaatgctcaaacatcggaccccatggcgcacggaactggttcagtgtgcttgacagcccaagacagttg

SEQ ID NO: 6668 - DNA, 1446 bp, unidentified
  source 1..1446: mol_type = unassigned DNA; note = element_a5c5386
  misc_feature 1..2: note = core
  misc_feature 3..210: note = LE
  misc_feature 211..1425: note = CDS
  misc_feature 1426..1446: note = RE
  misc_feature 7..210: note = bridgeRNA
ctaatgggactggaccagcttgccggaggcaagctggtctccgagccacctggcgggagcactgtccaaccccgggccgtgagccctacacctagagcgtgccccgccgggttggtgaggagacggacagctggtgggatgtcgtgcctcgagcactgatccattaggtcgctgcgcatctcctcgggctcacgagcgagaggaggaagagtgctctttgtgggagtggattgggccgaggaccatcacgatgtctgtgtgatggccgaggacgggatggtgctcgccaaacggcgggtgcccgacagcgtggccgggatcggtgagctccatgagctgatcgccgaacacgccgagaaagacgaggaggtggtcgtcggcatcgagatcgaccggggtctggtggtctggtcgctgctcgaggccggttacgaggtctatgccgtcaacccgatggcgtctgctcgctatcgggatcgccacgccacctcgggggccaagtccgacccgggcgacgccaaggtgctggccgacctggtgcgtaccgatcggcacaaccaccgacccgtcgccggcgactcggagctggccgaaggggtgaaacgcttggcccgggcgcaccagagcgccatctggaaccgccaacgccagctcaacgcgctccgctcgtcgttgcgtgagtactaccccggagcgctggtggccttcggcggcgagctggccagcaccgatgccctggccgtgctcgaaatcgcccccacccccgagctcggccgggggctgccgcgatccaagatcgcctcggcactgcgcaagggcggccgacagcgcaacatcgagcggcggcccgaggagatccagacggccctccgggccgagtacttggaggccccggaactgatcgccaacgcccacgggctcgtcacccggtcgaccctgacggtgatcgccaccttcaacgcccagatcgccgagctcgagacggcgctgtcggagcattttgagcagcacccggacgccaaggtcgtcctctccctgccaggactggggacggtcctcggtgcccgggtgctgggcgagttcggtgatgaccgaactcgtttctccgaagccaagtctcgcaagaattacgccggcacgtcacctgtcaccaaagcctcgggccacagccgggtcgtcctggcccgtttcgcccgcaaccgccgcctcggcgacgcctgtgatcagtgggccttctgtgcgctcacccactcaccgggagccaggatttactacgaccaactgcgagccaggggaaagacccaccgccaagccctcaggcaactggccaaccgcctggtcggcatcctccacgtctgcccagagcgaggcgtcctctacgacgagctcgtggcctggccggaggattccgaacttgcggcttgacttcttaggcccatgggatgt

SEQ ID NO: 6669 - DNA, 1486 bp, unidentified
  source 1..1486: mol_type = unassigned DNA; note = element_a5c9391
  misc_feature 1..2: note = core
  misc_feature 3..241: note = LE
  misc_feature 242..1465: note = CDS
  misc_feature 1466..1486: note = RE
  misc_feature 7..231: note = bridgeRNA
ctaatggggatcgatcgcctcgccccgagttgtgggtgaggatggtcggctagagccaccagcaggtgagcactcctggcgcctgggccgttgagtcctaggtctagatcgtgcccctgctggctggtgaggtctcctcggatagctggtgggatgtcgtgccccgagcactgatccattagggagctgctggagtcctctggctcaggggtttgaccgatgtcaggcgagagggggccagatgatttttgctggggtggactgggcggaagcccaccatgacgtgcacgtccaggatgagagcggcaagcggctgggcggaggccggctgccggagggagtggaggggatcgcccggttccacgagctggccgcgcggcacgcgcaggagcccggtgatgtggtgatcgggatcgagactgaccggggcctgttcgtgactgcgctcgtcgcggcgggctaccaggtgttcgcggtgaacccgatgtcggtgtcccgttaccgggaccggcactcagtctccggggcgaagtctgatcccggcgatgcgaaggtgctggcagacctggtccggaccgaccggcacaaccatcgcccggtcgccggcgacagcgacctggccgaagcggtcaaggtgctggcccgcgcgcaccagtcgatgatctggtcccggcgccgccaggcgaacatgctccgctcggcgttgcgggagttctacccggccgccctggccgcgttcgatgacctgaccagcggcgatgcgatcgaagtgctccgcgctgccccggccccggcgctgggcgcggcgctgtcccggccgaagatcgccgcggcgctgtgccgtggcggccggcagcggcgtatcgacgcgcgggccaccgacatccaggcgacgctgcgcagcccgcaactggccggctcgccggtggtggcggctgcgatgggtgcctcggtcagcgcgtcggtggcggtcatcgccgagatgaccacccagatcaccgtgcttgagcggcagctggccgcggattttgagcagcacccggacgcggaggtggtccgttccctgccaggactagggaccgtcctcggcgcccgggtgctcggcgagttcggcgacgatccaggccgctacgccactgccaagtgtcgcaagaactacggcggaacatcaccgatcacccgggcctccggcacccgccgggtggtgctggcccgccacgtccgcaacaagcgtctcgccgacgcgatctacctctgggccttcgcctcaatcaccgccagccccggcgcccgtgcctactacgacacccgccgcgccgccggcaacacccacgacgccgcactgcgcgccctcggcaaccgcctggtcggcatcctccacggctgccttaccaaccacaccgtttacagcgaaaccaccgcctgggcgcaccgcaccgacaccaaactcacccaagccgcttgacaccttccaggcgtgggatgt

SEQ ID NO: 6670 - DNA, 1382 bp, unidentified
  source 1..1382: mol_type = unassigned DNA; note = element_a5d0f4e
  misc_feature 1: note = core
  misc_feature 2..95: note = LE
  misc_feature 96..1127: note = CDS
  misc_feature 1128..1382: note = RE
  misc_feature 1149..1374: note = bridgeRNA
caatggtatggactcctcctccccttaacggcatcgcaatgtgccagactgaaagaagcttattttttcagtgacaggaagagaaggagtccgttatgaagcttagtagagttggtgtggacttggcaaagaatgtgtatcagttgcacggtgtggatcgtcacggcaagacgatttggaagcgacggttgcggcgtggtcaatggctgcaggccttgttggacaagacagatcctggctgcgagatcggcatggaagcgtgcaccggcgcgcatcactgggcccggcagctgcagtctcgaggttacacggtgcgattgatcgcgcctcagtttgtaaaaccctacgtgaagagcaacaagaacgatgccaatgatgccgaggcgatctgcgaagcaatgagccgaccgcacatgcgctttgtgtcggtgaagacggttgagcaacaggatctccaggcgacgcatcgagtccgcagcgagctcaaggatcatcgcaacgccaaggccaaccagatccgcggcctggtggctgaatacggtctggttgcaccgccatcgttgctggctctgcggcgcgccatccctgagtggttggaagatgccgagaacggcctgacggattacttccgatcagtgctgcacggtctctgggacgatcttctgacgttggagggtcgcttcaaagaactcgacaaggagatcgagaagctggcgtgcagcaacgaagttactaagaggttgcaacagttacgcggcgtgggacccatcgtggcaactgcactggtggcgaccgtcggtaatggtgagcagttcagcaacggtcgacagatggctgcttcgttgggactgacgccaagacagagcagttccggtgacaagcgccgcttactcggtatcagcaaacgcggcgacgtttacatgcgcacgcagttaatccacggcgccaggtcagttgtctcacaggcaaaacatcgcgacgatccgctgagtcgctgggcaaccgacatcgcaaagcgacgacaccccaacgtcgcgacggttgcactggcaaacaaaaccgcacgcatggcctgggccatgctgcgcaatgacaccgattacgaccccaacttggcggttggctgagcgggatgaaaacaggagacactcaatagcgattgcttaagcaaactgattgatggcaaacaggtcgaaccggcgtcggtaaaacccgtgaacggctacgtactacgagtacgaaaaagcaatagggaactgacgcgcgaataaaccattatggcccggcatcaacgtatgccaactacagaggccgaatatacgtatgcagtcgcgccaggtctgtcatcacaagtttgcttgcaatgaggaggagtccatata

SEQ ID NO: 6671 - DNA, 1172 bp, unidentified
  source 1..1172: mol_type = unassigned DNA; note = element_a5d4899
  misc_feature 1..2: note = core
  misc_feature 3..206: note = LE
  misc_feature 207..1160: note = CDS
  misc_feature 1161..1172: note = RE
  misc_feature 3..182: note = bridgeRNA
cttgtatggttagacttgaaggggtggtgggactaaatgcccgattctgactgttcgcagcagtacagaccgtgggagacatcgccccaccccttccaccaaagcgccgataaagaatgcatcgtttgcaagcgacgatagaagcaagccagcgcctcttggtgaaaccccttcaagcctaaaaaccttaacgtggagtacggcccatggcaatgcagacaggtagattgatcgtgggtgcggacgttgcaaaagctgagctggttatccatcacgacagcagtgatgaggtaatcaaactgaaaaattcaaaagccgacatcaagcggtggctgaagcaacaacccctgaacactgccatcgctgttgaggcgaccaatgtctatcacttggacttggttgagttggcccatggactaggtttcagtgtttatgtcgtcgatgggtttcaactgagcaactaccgaaaaagtgttggcgggcgagtcaaaactgacccttctgatgctcggttactctctcgtttcttgagaaatgagggggaggaccttcgtccttggagcccgcctccagccgtctacggcaagctgcagagcctcctccgccgcagagccgcactggtgtctgctcgcaccgctatgactcagagctgggctaatgaaaccctcttgaaggcggccttcgaagctttcgtaacatcaatagatcgattggatctgctgatgcaaaagaagatgaaagaagtgctccgagagaccggactgcatgagcaagttgctcgttgtcaggcagtagaggggataggtttccttacagccacggcattggtaatggcctttgtcaggggcgaatttaaaagcagtgactcctacattgcatttcttggaatggatctgcgagtgagtgactctggacagaaagctggacgacgccgtctcacaaaacggggctgctcagaaatccgtcccttgctgcacaacgcagcgatggccgctagcaagtctacggcctggaaaggcatctatgaacaacaccgcaacagcggcaaggcaacgacccaggccctcgtgatcctggcaagaaagcttgctcgcgtagcattcgccctgatgaaaaatcaggacgaatatgtcaccaaagcgagcaaaccggcttgctgaaaaccatagaat

SEQ ID NO: 6672 - DNA, 1440 bp, unidentified
  source 1..1440: mol_type = unassigned DNA; note = element_a5dda5d
  misc_feature 1: note = core
  misc_feature 2..226: note = LE
  misc_feature 227..1426: note = CDS
  misc_feature 1427..1440: note = RE
  misc_feature 13..241: note = bridgeRNA
ctactagacgattgccctaggaccggtgtctggccagactcggtttaggtgatcggcgggcagctctctatgcggctgcccaccagttgaaccggtgtggctcactttcggtctgcggcccgtcggtcaccgtgacgaggcgtggctcaagaagggtctgccctgctcgtagtagcaatgcccacctcgccgtccatatcggaactagcacaggcgggagaagcgcatggaacacgtgattatcggggttgatccccacaagctgtcggccaccatcgaggtcgtcgacgaacgcgaacaccttcttggctcaggtcggttcagcaccgaccaggccggctacgccgcaatgcgggcttacgtgaaggcctggcccgaacggacgtgggcggtcgagggcgccaatggcaccggccgtcccctggcccaacggctcctggaggccggcgagcacgtcctcgacgtcccggcaaaactcgctgcccgggtccgcctcttcgacaccggccacaaccgcaaaactgacgcccgagatgcgcactcgatcgcggtcgtcggggtgcgcacaacgaccctgcgtgtcctgagtctcgacggggagcttgaggcgttgcggatgctcaccgaccgccgcgaagcgctgaccaggcgtcgggttcagaccgttgaccggctccaggcgttgctggccgaattgctgcctggccaggccaaacgcgacataacgaccggtcaggccaaggccatgctggccaccgtccggccccgggatatcgccgggaagacgcggcgccgcattgcagttgaggagctgaccgagttggtcgcggtcgaggcgaagatcaagaaggccaccgccgaactcaaggccatcgtgctgtcccgaggctcgaccctgatggacctgcacggcgtcggccctgtcgtggctgcccggactttggctgacgttggtgacgtggccaggttcgcggaccgcaacaggttcgcgtcctggaccggcactgcaccgctggatgcctcatcgggggagcagaaccggcaccggctctcccgcgcggggaaccggcggatgaatcacatgatccacatcgccgcgatcagccagatccgtctcgacaccgacggtcgggcctactaccggcgcaagcgggccgagggcaagaaaccactagaggcgatcaggtgtctcaaacgccggatttccgacgcgatctaccgccagctcctcgcagatgcccaggcagcggctggcacgggtccgggagggcactgcggggcgtctcaagaatccagcgcggtcgacctgcccccgcacatcgacacttcggatcagccacttcccggaaccgcaaacccgacgctacgcccaaagccgaccccggggaagaccaaccctcgcaagtccctcgttggggcaggttgacaacagaagggtgc

SEQ ID NO: 6673 - DNA, 1317 bp, unidentified
  source 1..1317: mol_type = unassigned DNA; note = element_a5e343e
  misc_feature 1..2: note = core
  misc_feature 3..224: note = LE
  misc_feature 225..1109: note = CDS
  misc_feature 1110..1317: note = RE
  misc_feature 1084..1299: note = bridgeRNA
agatgtatggactcccatccccctcgggagtaacgtaataagtgactaaacttttaccaaggagcccatacatgtttaattgtaatgtgattgcgattgatttagcaaaaaatttatttcaggtttgtaagacagataaaaacggtaaggttatttataacaaagcaatctccagagctaaactcaaagaatgactaattaaagagaaaaaatctttagttgctatggaatcctgtagcggtacacattattgggcacgctttgccaaacaagcaggtcattatgcaaaaggtatcaatgcgagacaggttaaagcgtttaggcaaggccagaagacagacgctaatgatgcactcgctatttctgttgcggctcgccagcctcatataaaagaaagtcgtttactttcagcgcaagagcaatgtctacaaggaatggaatgcatgcgggatttattggttaagcaaaaagtcagcttaagtaatcaacttcgcgctttattacttgaattaggacatgccattgcccaaggcgatgctaggttaatacaagctattcctgagatacttgaagatgctgaaaatgaattaacacatacttttcgcttttcaatacaggtcatttttcgacgttttattgataccatagaagaagttaagctgattgaagagaagttacgagaaatcgttaaacaagaccaaatctgcacccgtttacaagcattagagggtgtgggtcctgtctgtgctattttaataaaaatagctttaggtaacaccgcacatttcaaaaatggtagggaagctgctgcctgtttcggcttaacaccagtacagcatagtagtggtggtaaggaaaaaataggctcaatatcgaaagtggtaggaaacaagaagctgcgtagtgctttgtataaaggtgcattagctgttgtttgccaactagaaaaaagagaaagccgtagccaaaaagatatttggttaaaagagttaaccgctcgtcgaggtaaaaaaatagccgcgattgcgttggctaataaaacagtaagaactgcttttgcgttgctaaagcatgatgcagagtatcagccacaattacttgtggcttagatttgtcaaaaagagcgattaaaataggtaagaccaaccttcaagagactgttaggggctgaagtttataaaactgctcaacagaaaagtcatgaaggtgcgaaaacatcagaggccagaggtagcacctcaatatgagcccgtatataagctagcatctaacttattttaaactttttctttttgacattaacggggagtccatata

SEQ ID NO: 6674 - DNA, 1439 bp, unidentified
  source 1..1439: mol_type = unassigned DNA; note = element_a5e91a7
  misc_feature 1..2: note = core
  misc_feature 3..233: note = LE
  misc_feature 234..1424: note = CDS
  misc_feature 1425..1439: note = RE
  misc_feature 11..224: note = bridgeRNA
gtcctacctttcaagggtggttgctctggtcattcgtaagatcggagggcccaggggttctgggtatggctggcatgtgggcgccgttggcaaggctcaaaggacttggccgcccgggaccccgcgacgactcgaccgccaattgggagacgcgactcgatcgctgctgtaggacaacgtcggcgaggtcgtctgcgggtgacatgtgagacggcgagctggcggaggtggccgtgcccgagatctgggccggagtggacatcggcaaggaacaccaccactgcgtggtgatcaacgcggacggcgaacggctgctgtcgcgccgggtcctgaacgatgagaccgagttgcttcacctcatcggcgatgtcctggcgatatccgcggacgtgctgtgggccgtcgatctcaaccacggcggagctgccctgctgatctgcctgctcctcagccacgatcagccgatggcctatctgaccggcctggcagtccaccgtgcctcggccacctacaagggcgaaggcaagacggacgcgaaggacgcctttgtcatcgccgaccaggcccgcgttcgccgggacctcgggctgctgaggcccggtgacgagatcgctgtcgacctgcgcacgctgaccaaccggcgccttgacgtggtcttcgaccgcacccggcagatcaaccggctccgcgcccaactgctggagatcttccccgcgttggagcggtcgctggacctggtcaataaaggcccggtgatgctgctgaccggctaccagaccccggccgcgatccgccgcgccggcgtccagcggatcgagacctggctgaagaaccgcaaggtccgcggtgccgcggcgctggcgaagacggttgtggaggccgcccgggcccagatgaccgcactgcccggcgagaagctggcggccgccatggtggtccgcctcgcgaagggggtgatggcccttgatgaggagatcgtcgagcttgacgccctgatcgaggccacgtttcgcgagcatccgcacgccgaggtgatccgtagcctgcccggtatgggccccaagctcggcgccgaattcatcgccgcgaccggcggtgacatggacgccttcggcagcgccgaccgcctggccggcttcgccggccttgcccccaggccccgtgactccggccgcgtcagcggcaacctgcgccgcccccggcgctaccaccgcggactgctgcggtcgatgtacctctcggcgatggtcagcatcacgaaatgccccgcgtccaaggcgtactaccagcggaagagaagcgagggtaagggccacaagcaggccctgctcgcgctcgcccgccgcaggctcaacgtcctgtgggcgatgatccgtgacggacagtgctaccaaggttcacctcccgtcacgactgcggcttgacatcacgattgggaa

SEQ ID NO: 6675 - DNA, 1445 bp, unidentified
  source 1..1445: mol_type = unassigned DNA; note = element_a5ed2a8
  misc_feature 1..2: note = core
  misc_feature 3..226: note = LE
  misc_feature 227..1429: note = CDS
  misc_feature 1430..1445: note = RE
ctgatatatctcctggatggtcagactcgcagggaaactgacctcgacggggaaaccggcgcctgcctatccggccgcgaccgatgcagctagtgaccggtcctcgtgcttcgtcttcgagcggtgattgggatccgacggcagcgaccggtgatggagcatcaggcgacgcggtgacgaagcgaggcgaggacccctggggtcgcaaccgacacaggaggtgcgtatgagcctggcggtgggcatcgacgtgggggcatacaagtgcgcggtggcggtgtgccgcgagggtgagcgcgaggcggagcgaaaggtgctgaacatcacgacccagcgcggcggcttcagtgatctggacgcctggatggtgcagcaggcagcgccgatcgacgtggtggtgatggagtcgagcggccactactggttcaacctggccagccatctgcgccgccaggggtatccggtggcggtggtgaacccgttgcaggccaagtactttgccaagagccgcatgcagcggagcaagagcgacccggccgacgcgcgcacactggcggcgttgggaacgcacgaccagccgcggatcagcgagcccctggtgggggccgagctcaaggaggcggcacgcttcgcgatgcgcctggtgcgcgagcaggcgcaagtctgccagcgcatccagcgcttggtggacatcggctttcctgagttgcgcgaggtctgggacgacccgacctgcgtgagcgcgctggcggtgctccgccacgcgccaaccgcggcggcggtgacgcgcatgcatcaggaccgcatcgctcggctgaagcgcccgggtgttggcggccgcgtgatcggaccgatgaaggccgcccaactcaaacagctggcgcagacctcagtggcggcgccggagctcgaacagcaggtgcgcttcgagatgcgcttgctgatcgcccagcacgacctcttcgaccagcagatcgccagcgccgacgcgcgggtcgcctccctgctcgacggcgaggtgtcgcagcggttgctctcgattcccggcgttgggccgtccaccgccgccacactcatggctgagatcggcgacatctggcgcttcagcgatgtcgaccagttgctcgcctgcgcgggagtgcatcccaaggagcagagctccgggcagaagggtgcgaacccggagacgagttggaccatggccaaaaccggcaatacctatctccgtgcggcggcgtaccggatggcagtggtcggggtgcagcacaacccgatcctccgcgcccactacgctcgcaaacgcgctgccggcaagtccgccatgaacgccctcgggcactgcatgagcaagtcgctggccatcgtctggggcgtctggcgcggcggcaaggacttcgacccggcgcatgcgagcgccggatcagcttgacatcaacttatgggat

SEQ ID NO: 6676 - DNA, 1210 bp, unidentified
  source 1..1210: mol_type = unassigned DNA; note = element_a5f31bc
  misc_feature 1..2: note = core
  misc_feature 3..189: note = LE
  misc_feature 190..1176: note = CDS
  misc_feature 1177..1210: note = RE
  misc_feature 12..198: note = bridgeRNA
cttgtatctctcagtgattgatgtttagctagcagcaatcacatcgggacgccagtgagtatgtgaacgacctaatcagaaaatgatgggttgtagataatgccctggcttcctaacctccataaaactgaatggtatcctagcgccctatttcaggtgacgctgcatgtacaaggggagtaaatagagatgaaggcctatgcaggtattgatgtcggtaaagataaattagatgttagttggttacgtgacgccaccacaaacaagaagaaaacgaaagtattaaaaaacacaccaaaagggcataaagaactggtgacgtggttgctcaaaaatacaaaatatcaaccgcatgaaatcgttattacagttgaaccaacgggtgtttatagtgaacccctcatgtactatttacatgaacaaggattcattttattacaagcaaatccaagtaaagcgtcgcaatatgcaaaagcgttgaatttggttcataagacagataaatcggatgccacgatgctagcccgttatggacatgaccagcaacattctttgtgtagatggcagccagagccggtggaatcaagagcgttaaaggcgatgctacgcaggctagaagcactagagcaggatttgcagcgggaagaaaatcgatttgaagccgctaatttttcaggcgcatcagcacgagtgattcagtcgctggaagacatgatagcggtgttgaaagatgaaatagacaagttaactcaagaaattgacgaccatatagatgggcatccatcactaaaaaagaaccgtaaattactccaaagcataagcggcgttggggttgttgtttcaagagtgatggttagcttgttagcctgtaagaattttaaaaatgcaaagcagttttcagcgtatttgggtttaattccgaagcttaaagaatcggggaaacaggctggaaaaaccacattaagcaaacaaggcccgagttatgttagggtcaaattatatatggcagcagtcgtggcagggcaacataatcctgatataaaagctcaaaaaacacggttattgcagcaaggcaagaataaaatgcaggcattaggagcggcgatgagaaagctggctcaaatatgctttggagttgtaaaaactcaaacagaatatcagcctcaagttaattaaataacgacttgaagctgattgtgagagatggtat

SEQ ID NO: 6677 - DNA, 1397 bp, unidentified
  source 1..1397: mol_type = unassigned DNA; note = element_a5f97f6
  misc_feature 1..3: note = core
  misc_feature 4..83: note = LE
  misc_feature 84..1127: note = CDS
  misc_feature 1128..1397: note = RE
  misc_feature 1131..1384: note = bridgeRNA
tgatgtggtggacggcgcccgccagcggcatctgatgtgccaagatgggtccgttgcaagatccatctgaggagccatccaccatgtcgaagattatcaccattggacttgatatagcaaagaacagctttgcggcgcatggatttgacgagttcggcaagacggttttgaagaaggagctgaagcgtggtcaggtcttggcgttcttcgccaggaatccggggtgccttgtcggtatcgaggcgtgtgcgagtgcgcatcattgggcgcgcgagatcaccgggctgggccacgatgttcggctgatcccggctcagcgcatcaaggcgtttttgccacgccagaagaacgatgcggcggatgcgcatgccatcgcgcgggcggtccgcgacccggagatgcggttcgttgcggtaaagagcgtcgagcaacaggcggcactgatgctgttcaagacgcgtgagctcctgatccgccagaggacgcagctctcgaatgcgctgcgaggtcacttcggggagatcgggatcgtggtgcccaggggtgcgcatgaggtgcatgcgcttgtcgagagggtcatgaacgaggagaaagcgcaagagctgccttgtgcgatgcgggcagcgttacggccggtggtgagtatgctgttcacgctcaatgaggagatatcgtctctcgacagggcaatccgccaagtgcatcgcgccgatgatacgagcctgaagcttgcggaggtgccgggcatcggcccgctgatcgctatggtgctgtcggccagcgtcggcaggccgacttacttctcttcgggccgggagtttgcggcctatctggggctcgttccccggcaacactcgaccggtggaaagaccaggttggaggcgatctccaagatgggcaacagcgacttgcgccggcttctggtcgtcggcgcccgcgccgtgttggcgcgaatgaagtcgggcaaggccaaatcggccttggccgaatgggcgcgcaagctcttggagaagaagtcattcgcgctggtgtcggtggcattggcgaccaagatggcgcgcatcgcctgggcgatcatggccaagggacgccgctatgatcccagctacataggcaaacccgcgtaaggaaccaaagaccacatatcgtagccgcaacgcagattggcagggtgaagcacgcgatgatgtgagaaggcgctaggcgtcagagccggaaaacccgctgcactgtcagcacctcgagtgcgcttcggtgatgaggactggctcagcgaaccccatcagggccagcagtcatatccggactgcacaacaggccgaagacatgactgcatcctgcgcgtccctcacagaaatcgttccgtatccccttgccaacagggcgccgtccagaca

SEQ ID NO: 6678 - DNA, 1267 bp, unidentified
  source 1..1267: mol_type = unassigned DNA; note = element_a60c093
  misc_feature 1..2: note = core
  misc_feature 3..227: note = LE
  misc_feature 228..1253: note = CDS
  misc_feature 1254..1267: note = RE
tccattagacttatacctatgaatttcttagaataagaatcaaataaaccaggtaccggataggaaggctgaataagtctatgtttcctcaaagggataacctacattgcgaaccagacccagccttcccgatgattaaagctaaatagtgttttcatcgcgtatggagcgattagtaatggagcaagctcatatcatctccatccggcaccgggaaaggacctattatggaaaagcacttctattttattggccttgatatagccaaagagacctttgtggcaagtatctatcatacaccggatagaccggtcctgaccaaagagaacttcagcaacaatcctcaagggtacaaagagctcatcgtgtggctccaggataaccagatcaatacaacgaactgccatatctgcctcgaggcgactggtgtctattcagatggtgtagcctattatctttcggcccaggggtatcgggtcacagtagaaccacccttacgggtcaaacgggccttccatccagccggacataagaccgatccggtcgattcccgtcagattgccgaatacgcctaccgcttctctgatcggcttatcccctggcatcccaaagaagagctcctcgagaagatccgccaattacttagtgtcagagaacagttcaccaaacagaaggtagcccttaaaaatgcccgagatgcctatcagagacagaaggtgcaagtcgagctcatccagaaagcccaccaggaaaccttggcacagctggaaaaacagatcactcggatcgatcaggaactggataggctgatgaaagaaaatcccgatctctcccaaaagtttcaccatctcaagagcattcccggatttggtctcttactttctgcccatcttctggtcatgactgaaaactttaccagcatcaatgattaccaacgactggctgcttttgttggcattgtaccatatcaacaccaaagtgggacttccatcctaaagaaggcaagaattcgccactatggacctcgtgcttgccgaaagctcttacgtcttgctgcccagtcggtagcaacccataatatgacctttagaaaatattacttgcgtaagctggcagaaggtaaggccaaagcattggtattgaataatattgccaataaactcttaaaattagcctgtgctctcatccgggataactctcggtatatcaaagaatatcattcttttcatcctatgtatgtaaaaggtacttgacaaagtcatagtgt

SEQ ID NO: 6679 - DNA, 1363 bp, unidentified
  source 1..1363: mol_type = unassigned DNA; note = element_a60cc5a
  misc_feature 1: note = core
  misc_feature 2..69: note = LE
  misc_feature 70..1095: note = CDS
  misc_feature 1096..1363: note = RE
  misc_feature 1123..1357: note = bridgeRNA
gaatgacatggattccccctttctagaatctgccacactgaggtggtatcgattaacactggaggcaccatgtctaattgttcttattttggcggtatcgacctagcgaaaaatcactttagtatccacatcgtcgactctgacggaaaagtcattctcaacaaatccgttactcgccctaagctgctgactaccatagcaaatatgccacctatgcgtataggattagaagcgtgtggcggcgcgcattattgggcaagaacactcaataaactgggacatgatgctcgtattatggcggttaaatatgtggtgccacaccgagtaaaaggaaagaatgacctcaatgatgcggtcgccatatgccaagccgttcaacacacatccactcgctttgtacctataaaatcctccgaacaacaagccatattgtcggtacatcgaatgagagagcactgggttcgtgaacgaacggcattgatgaatcgcatacgagccttgctgtccgagtttggacttatcatgcccgttggtcagtcctctttaatgaagcaagtcccactcctgcttgaagaggcggaaaacgagctgccacaactggcaagagccactattgctgatgcctaccaccacctggagcacctgaaccaacgtatcgccgacactgaacaagcttttcacgcattcgctaaagtcagcgacaatgttcagcgcattatgaaagtcagaggcatcggtcctcaaaccgccaccgcgatactcgcttccataggtaatggcgctcagtttgataagagccgagacttctccgcttggttagggttggttcccaaacagtattcgacaggagggaaagcccggctgggcaggataactaagcatggcgacaagtacctgagaaccttgctggttcatggagcacgaaccgtgattgccaacttaggcgataagcaagacaggctcagccaatggtgtcgcggcatattagaacgaagagggatgaatcgggcgattgtcgcactggcggctaagaacgctcgaattatctggtcactgttacacaaccagacggaatatgagaattacgctgcttagttcccaatcaaccaagcagcagaaagagaatacccaccgggtcagagcaaacgcaatggatggagataggttaagaccaagagcggagagcctgttaatgcggcggacatacccaatgtcatctaacgaataaggcaccgcagtcgcgcaaagtcatcagggtcatggtgagcataaatcaccaacaaacagaccgaatgtagagcggcagtccaaaacccatcacttgaagtttagcggatgtttgacagccgggggaatccatgta

SEQ ID NO: 6680 - DNA, 1387 bp, unidentified
  source 1..1387: mol_type = unassigned DNA; note = element_a6117c9
  misc_feature 1: note = core
  misc_feature 2..87: note = LE
  misc_feature 88..1119: note = CDS
  misc_feature 1120..1387: note = RE
  misc_feature 1163..1382: note = bridgeRNA
caatgggatggactcctcctcacctcggcatcttgagtgccagactgaaagtgcgaaccacagtcaacagtgagaaggagtccacacatgaagcttatgcgcattggggtcgacctggccaagaacgtgtttcagatccacggcgtggattgtcatgagcggccagtctggcggcaacgtttacctcgtgatcgctggctgcaaacggtgctggagaagatcgaacccggctgtgagatcggcatggaaagttgtggcggtgcgcaccattgggcgcggcagctacaggcacgcggttttcaggtgaggctgatcgcgccgcagttcgtcaaaccgtacgtcaagagcaacaagaacgacgccaacgatgccgaagcaatctgtgaagcgatgagccgtcccagcatgcgcttcgtcgccatcaagaccatcgagcaacaggatatccaggcgacgcatcgcatccgggccggcttaatcgaacagcgaacggccaaagccaatcagattcgtggactggtcgccgagtacggtctagtcgccccgaaggagttactgatgctgcgtcgtgcgataccgtgctggctagaagatgcggataacggtttgacggttcgcttgcgtcggctactgaatggcttgtggggcgaccttcgcgcactggatgaacgtgttggcgaactcgacagcgagatatctgcaatcgcggcaagcgagccgagtgccgtccgtttgcagcagctgcgcggggttggcccgatgatcgccaccgcacttattgctgccatcggtgatgcccgacagtttgccaatggccgacagttagccgcctcgttggggctgacgccgaagcaacacagctctggtggtaaagatcggctacttggcatcagcaaacgtggcgatgcttatctgcgaacactgatgatccacggtgcgcgctcggccctgcgtacagccaaatccaaagacgatcggctcagccagtgggctgttcgtttggccgagcgatcacatcccaatgtggccgctatagcgctggccaacaaaaccgcacgcatggcttgggcgatgctgcgcaacgggaccgattaccaaccggatcgggctgcggcctgatccaccaaaccgtcacgtccaacgagtaaacaaaccgtctacccagattgctaagcaacccgaacgatggcaaaccggtcgaaccggcgtcggcaaaaccctcaaatgtccaggtgcgtaaagcacgtagaagcgattgggagccgacgcgcgaatagcccatcatggccctgcatcgaatcgatgccaaagtcagaggccgaatatacgtgtgcagtcggcacgggggccaaagcgaaggggcttgcaatgaggaagagtccatata

SEQ ID NO: 6681 - DNA, 1333 bp, unidentified
  source 1..1333: mol_type = unassigned DNA; note = element_a614e31
  misc_feature 1..2: note = core
  misc_feature 3..257: note = LE
  misc_feature 258..1319: note = CDS
  misc_feature 1320..1333: note = RE
  misc_feature 29..226: note = bridgeRNA
ccgacttgtatgagtgtcgcgggacgatgagttgggattgcagcccatagcgtgccgtagcaggccgcagggatgactcagagttgtcctgtcacccaaggttcgggttgaccccactgtggtgtgtcacccctgcggtctgcgttcgcggcgtgactgaagagaggcgtgaccccaagctgctgtgagaggtacttgaagtcggattgtccgccgcggattccccacccacatcgagcgaagggaacccatgttccatgatcatcatcggcatcgatccgcacaagtccacccacactgcgaccgcggtggacccggccaccaactctgacatcgggtccctgcgcatcgaggcatccctgaccgaataccaacgcctgatcgtctgggcgaaagcatggccccaacgcacctgggcgatcgagaacgccgacggactcgggcatcacttggctctatggcttttggctcacggggaggtcgtcctcgatattccgaccaccgcaaccgcacggatccgggaactctcccggggaggtcgccgtaagaacgaccgcattgatgccgccgcggcggccagtgtcgcagcgctgcagggcgacgcccgtcaggtctaccccgagaccatcactgatgcgctggcactgctggatgaacgtcgagtcaacctgtcacacagcagaacccgcgcagtcaatcagctacacgcgctactgcgtgagttgatggcgggcggcgcaccgacgtcgctgacccccgccaaggccgccaccacactgcgtggattccgccccaggaccagcccagaccggattcgagtggagctggccaaggagctcattgccgacttccggcggttcgacgagcaactcaaggccaacgccgccaagatcgtcgttctgctcgacgaacacggcaccacgcttcgcgagatcgacggcatcggaactgtcctggccgcccgtctgttgggccgcaccggccccgcgagcaggtttgcctcggccgccgcatacgcgaactacaccggcaccgcacccattcaaattgcgagcgctgattcctctcgtcaccggctgtctcgttacggggaccggcaactgaactctgcgctccacaccatcgcgatggtccaggtccggatgcccgcgagcgccggccgcgtctattacgacaagaagattgccgagggcaaatccccccgatgcgccacccgtgcgctcaagcgtcaccttgccggacatttgtggcgcctcatgtatatcgacgaaacccgcattccacgagcactctcaggagtcgcggcgaatgcctcttgacatatagagaggca

SEQ ID NO: 6682 - DNA, 1426 bp, unidentified
  source 1..1426: mol_type = unassigned DNA; note = element_a6165b7
  misc_feature 1: note = core
  misc_feature 2..81: note = LE
  misc_feature 82..1137: note = CDS
  misc_feature 1138..1426: note = RE
  misc_feature 1190..1417: note = bridgeRNA
taatgggatggcccggccgtgctcctaccctgtgagacgtaaagtcttactgggaatcaagcaccacaaggagcacgtcccatgtcacaccagtcaacgccacgcacagtcgccacaatcggcatcgataccggcaagaacacattccacctggtcggcctcgatcagcgcgggaacatcgtgttgcagttgaagacctcacgagcgcagcttgagcggcgccttgccaaccttccgagctgtctagtcggcatggaggcgtgttctggcacgcaccacattgctcggcagctcgaagcccttggtcacgacgtgcggttgattccggcacagtatgtgaagccgttcctcaagggccacaaaaacgattatcgcgacgctgaggcgattgcggaggcggtgcagcggccgaccatgcattttgtgagcatcaagacgcctgatcagatggacctgctggcattgcatcgtgtgcgttcacgtctggtcagccggcgcaccggcgtgatcaatcaaatcagaggcttcctcattgagcgcggcattacggtccggcaaggaccggcaccgttgcgcaaggcactgtccgacatcctgagctccaactcgcccacactctcgccacggctggttcgcctcattagcgatctggccgaagattggcgtcggttggacgatcgcatcgcaaccgtgtcggccgagatcgaagcgctggcggagcaggatggcccctgccaacgtttgatgacggtgccggctatcggaccaatcatctcgagcgctgttgtggcggcgatcggcaacggcaccggctttaggcagggacgcgactttggcgcttggttaggtctggtgccgaagcaggagtcgaccggggatcgcacaatcctgggcaagatctccaaacgcggcaataagtatctgcgaacgctgttcgtgcaggctgctcacgtcatcctggcgcgacggccgagggcggcgatgcgcggtctatggccttggatcgagcaggcatccaagcgactccaccgcaacatgctggcgatcgcgctcgccaacaagcttgcccgtatcgcctgggccgtgctcgcgcgtggccgccaatatcagccgagaattacgcctcaaggagtctgacccacgctcgcgccacgcaaaggttcgaaactctggttttgttcgatgacaatcctgccgaggtctgcgagatgaaatgaagagatggacgaacggtctgcccggcgcaaccaagagactgggtgccaaaatggcccttagaggtctttccgctagtcagcctggatgcgcgcggatacccatgtcggcccggagcacaatgctccacccagaggcctaatacattgttgcagctctcacgttcgtcgatcttcgatcttcatcttgctccgcacggccgggccataca

SEQ ID NO: 6683 - DNA, 1568 bp, unidentified
  source 1..1568: mol_type = unassigned DNA; note = element_a61be00
  misc_feature 1..4: note = core
  misc_feature 5..287: note = LE
  misc_feature 288..1451: note = CDS
  misc_feature 1452..1568: note = RE
  misc_feature 39..269: note = bridgeRNA
tcacgtataattaaaactatctcgaaaggggggtagttttaattatttctcctttcctcaaaattattatatttgcaggagtagctacctgcgatataataaagacaagcactgtggatttgtatctattgttttacagctcagactggttagaggtgactcaagccacagtggtttgtctgaaatggtaattagttagttaacgctctgacgtttctatttgcgtgaatacattggcagaccatctgtggaaaacagcagtgcaaaaatatcaaaaggaggaacccatgtattacattggtatcgacatttcaaaattcaagcacgattgtgccgtaattgacgactccggagaaattgttactccttcgtggtcttttacaaatgacgctgagggattttcgcaattaaagttattgcttaattcccttgatacagaaacaagaataggacttgaatctaccggtcattatggtatgaatctaaagctgtttcttgaatccaacaacttttcattcatggagttcaatcccctgcttatcaatcgtttcgttaaatccaagtccctacgaaagactaaaagcgattctattgattgcatgatgattgctcactatttaatgacggtagagtacaagccctatccatcatcattttaccacacagagaagctaaagtcactaacaagattcagagattctcttattaggctcagaagccgccagcttgtagagctcacaaacatcttagataatgtgttccctgagtttaaaccattctttggcagtaggttttcggttacagcattatacatactctctaattactcatcgcctgaaaagattgctaacatgaactctaagtcttatgaagcactacgcaaattatctcgcggcagattttcaacagtagattttgcaaagcttaaacagcttgctaaaaatactataggtactactgaagattatttactcttacaaatgcagattgttttggatatttacagacaattggattcaaagattgatgagacagaagtttctatcaaggaatgtgtttccgatatgaatccgcctatgctttctgttccgggaatcggtattgaatctgctgctgtaatcttagctgaatttggcgatttctctaaattcaagaatgcttctcaaatgcttttctttgccggattagagccgggatacttccaatcaggaacatccgagacaaccggtaaaatggttaagcacggttcatcatatttgcgttatgcacttatgaactgtgcccagacagttgtaaattatgaaccgacatttgctatgttttactccaagaaacgtgcagagggtaaacctcatcgtgtggccttatcgcatgttgttaaaaaactactgcgtgtcatttatacgctgcaaactaaaaacattgcatatgatgctgattttgtaaggtagttactaacctactattttttaagtccttgcaatacaggacttttttgccatgttgtttttcagcttttaaaaatttttgaaaaacttttcaaaaacctcttgacttctaatagttag

SEQ ID NO: 6684 - DNA, 1346 bp, unidentified
  source 1..1346: mol_type = unassigned DNA; note = element_a61ccb5
  misc_feature 1..2: note = core
  misc_feature 3..64: note = LE
  misc_feature 65..1096: note = CDS
  misc_feature 1097..1346: note = RE
  misc_feature 1100..1335: note = bridgeRNA
ttatgggatggcccgcccctcaccacccgtcgcaggcttgtgccgggatcagaggagaggaccaatgaccaagacaccgatcgccgtgctgggaatcgatctgggcaagaacagctgcagcctcgcgggtctggatggcactggctccgtcatcctacgacggcggatgacacgcgagggcgtggtgaagttcgtcgccacgctgccagcctgcgtggtggcgatggaggcttgttgtggcgcgcacttcctcggccgcaccttcgtgtctcagggccacaccgtgcggctaatgtcgccggaatatgtcgctccctacgtgaaggcgcagaagaccgacgatcgtgacgcagaggcaatcgccgaggccgcgacacggccgaccatgcggctggtcaccctgaagagcgaagcacagctggatctgcaagtgctgcatcgagcacgcgagcgattggtggctggtcggacaaggctgaccaaccagctgcgggccgtgctgcttgagcgtggtgtgatcctgccaaagcgtcgcgcaccgctcatcaagcggctagacgaactcatggcgggcgagctgcagatcagcaagcgcgtgctgcggcttcttcaggaactccgggacgagtggactgagcttgatcgccggatcaaagcctacgacgacgagttggtggcattgacgcggcaggacgacgacgcgcgacggctggcgagtattccggggatcggggtgatcaacgccacagccctggtcgctgccgtgggtgatgcctcggcctttgaaaagggccgcgatctggctgcctggcttggcctcacgccacgacagcactccactggcgggaagaccaagcttctggggatcagcaaacgcggaaacaagtatctgagaacccagctgatccacggcgcgcgtgccgccatggcccacttcgtcaggcaggcgacgccgaccggcacctgggtgcgccaattgcttacgcgagcgcaccccaacgttgcggtcgtggcgctggctgcaaagcttgcacgcattgcttgggccgtgctgcgccacggcagttcatacggccagcaggctgtgagcgtctgatgaaagaatagcggctgacaacaggtcggagccgcgcaggaagtctgtggaggtggaaaacagatggcttaacggtcgaaccggcgtcgcggcagcctggttaaaaatgtggtgctcgacatcgcaatccttatgaggcccgagacgcgcggaacccatcttggccagggtgcaagccctgagaccggatacgttgatgcagaccaacacgccatccgaatcatccttgcagacggggcgggccatacgt

SEQ ID NO: 6685 - DNA, 1159 bp, unidentified
  source 1..1159: mol_type = unassigned DNA; note = element_a620c7f
  misc_feature 1..2: note = core
  misc_feature 3..214: note = LE
  misc_feature 215..1156: note = CDS
  misc_feature 1157..1159: note = RE
  misc_feature 28..192: note = bridgeRNA
cttgtatgtttacccgtggcaggcctagaaagggtctgtcggggtggagggacgaggccggcatctggcctgtggcacagacggtaggagagttcgtcccacccctcaccttaaacgccgataaggaatcgatcggcacgggaccgacgatagatggcaagccagcgttcggtgaggccccgacagacaactccaagctagctcgggaggtgtgatgatggcaacgcatcggatcggggtcgatgtcggcaaggccgagttgtggatcagcatcgacggtgaaaccgcacagccgtgtcccaacgagctcccggcgatccgccggtgggtccgtggcttggaggggccagccgactttgccctggaagccaccaacgactatcacttggccctggcgctggaggctcatcatcagggccaccgggtgtatctgatcaatggctatcgcctcaatcgctaccgcgagagcatcggtggccgggccaagaccgatgccggggatgctcggcttctggtgcgttatctgcaacgcgaacaggacgaactgcgcccctggacaccgccgcccgagggctaccggaccctgcaaaagctgctgcgccggcgtgccacgctggtgcgggcacgggtcatgctggagcagagcctgcgaggcgtacccgaactgcagtccaatctgaaggatctgctccgggagatcggtcggctcgacgctgtcctccagcgtgtgctgcgcgagacggtcggcagcgccggctggtcggatcatgcccgacgctgccagcagatcgagggtgtgggcccgctcaccgccaccggcttgacgatggcgttccatcgcggcgccttccgcagcggtgatgcgttcgttgccttcctggggttggatgtccgcatacgcgactccggcacgaaacgggggcagcgcaaactcaccaaacagggcgatccggagttgcgacggctgctctatctggccgcgatgcaggccaagtcgaaagccgcctggagcgactactaccagcgctgcctggaccgtggcctggcgacgacccaggcactgaacgccttggctcgaaagctggcccgcgtcgccttcgccctgatgaaaaatcagaccgattaccaaccgaagatcccttgtggagagacatagaat

SEQ ID NO: 6686 - DNA, 1590 bp, unidentified
  source 1..1590: mol_type = unassigned DNA; note = element_a62129b
  misc_feature 1: note = core
  misc_feature 2..78: note = LE
  misc_feature 79..1143: note = CDS
  misc_feature 1144..1590: note = RE
  misc_feature 1351..1581: note = bridgeRNA
taatggaatggtccggccgtgctcctgccccgcccgcaagttacgctggcaaggggcaccaaagacaaggagcacactatgtctcagaaactcaacaccgcaatcgccgtgatcggcattgatatcggtaagaattcgttccacgtcgtaggtctcgatcagcgcggtgcgatcgtgcttcggcaacggtggtcacgcggccaggtggaagcgcggtttgccaacatgccgccctgcctgatcggcatggaggcctgcgtgggtgcgcatcatctcagtcgcaagctcaagagtctcggtcacgatgcccggctgatgcctgcgaaatacgtgcgcccttattcgaagggacagaagaatgatttccgcgatgcggaagcgatcgccgaggcggtgcaacgcccaacgatgagatttgtcgccactaagactgtcgagcagctcgacttgcaggccttgcaccgggtgcgtgagcggttggtcggtcagcgcaccggcatcatcaatcaaattcgcgccttcttgttggagcgcggcgttgcagtgcgccagggtgttcgcttcctgcgcgccgaattgcccggcattctcgccaaccgcacggacgtcctatcaccacgcatggtgcatgtcatcgagggactggctgacgattggcgccggcttgatgagcgcatcgagggcctgtccaccgagatcggagccttggcctgtcaggatccagcatgcgatcggctgatgacggtgcccggcattggaccgatcatctcgagcgcaatggtcgccgcgatcggcaatggtgctgcattctccaaaggccgcgacttcggcgcctggctcggactggtgccgaagcagatatcgacgggagaccgcacgatcctcggcaagatatccaggcgcggcaatcgctatctgcgcgttctattcgtgcaggctgcctgggtcgtattgatcaggccaaagagctgggaacgttacgggctcaagccttggatcgaagccgccaagaagcggctgcaccacaacgtgctggcgatcacgctcgccaacaagctcgcccgcatcgcctgggcggttctcaacaaggagcgcaaattcgaatgcatcaggacgaacaagatgtcgccccgagctgcttgagtgtcgcgccgtgctcggacccgtcaaggcgtggcctggcaacgctggagcaagaggcaaggcaaacgcgacggccagccttgacggccccttgcgcgcggcgcctcagcttcgagcgcaggccgggacgaaggaacggcctcaccggcacgaacaaaggaactgcacgaaataggaagctacgcaatgacgtgacgccaaacacttacctgccgaggtctgcgagaggatgagacgagatggaggatcggtcttcccgtcgcatgcgaacactggtgacccgaatggcccaatcgaggccggtccgctaataagaccgcatgcgcgctgatatccatgatggctcggagcaaatagctccaattagaagccggatacattgatgcaagaccgcacatccgtgccagatcgacgaaaccctcttgcaacgcacggccggaccataca

SEQ ID NO: 6687 - DNA, 1398 bp, unidentified
  source 1..1398: mol_type = unassigned DNA; note = element_a62c80a
  misc_feature 1: note = core
  misc_feature 2..75: note = LE
  misc_feature 76..1131: note = CDS
  misc_feature 1132..1398: note = RE
  misc_feature 1162..1389: note = bridgeRNA
taatggaatggtccggccgtgctcctgccccaccagcgataagctggccaggggcgcccagacgaggagcacgccatgcctgcgccaacagagattgcagtttccgtaatcggcatcgatatcggcaagaactcgttccacatcgttggtctcgatcagcgaggagcgatcgtgttgcgccagaagtggtcgcgggggcaggtcgatgttcggcttgccaatatgccaccgtgtctgatcgggatggaagcttgtgtcggcgcgcaccatctgagccgcaagctcagagcgcttggacacgatgcccggctgatgccggcgaagtacgtgcggccttactgcaaggggcaaaagaacgactttcgtgatgccgaggcgattgctgaggcagtgcagcggccgacgatgaagttcgtagcgaccaagaccgccgatcagctcgacctgcaggccctgcaccgagtccgtgagcggctggtcagccagcgcaccggtatcatcaatcaaatccgcgccttcctcctggagcggggcattgcggtgcgacaggggcaacgcttcttgcgagtggagttgccgcgcatcctggccatgccacccgacgtgctgtcaccccgcatggtgcgggtgatcgaggatctggccagcgattggcgccggctcgatgaacggatcgagactctatcgagcgagatcgagacgctggcgcgccaggacgctggttgcgaacggctgatgagcatccccggcatcggaccgatcatctccagcgctatggtggccgcgatcgggactggcgatggcttctccaaggggcgcgacttcgccgcctggctagggctcgttcccaggcaaatctcgacgggagaccgcaccatcctgggcaagatatcgaaacgcggcaatcgctacctgcgcgtcctattcgtacaggcagcgtgggtcgtgcttgtgaaggtgaagccgaacagatgggacggccacgggctcaaacactggatcgaggccgccaagaagcggttgcatcacaacgtgctggcaatcgcgcttgccaacaagctcgcgcgcatcgcgtggagcgttcttgctcgtggtcgagccttcgaggcgagcaagcttcaagccgcgtgatcattcgcgagtagtcgagttcgagtacttacccgccgaggtctgcgagaggatgagacgagatggagattcggtcttcccggcgtgtgcgaacactggtgacccaaatggcccggtcgaggcctgtccgctaatgaggtcgcacgcgcgctgatatccatgatggcccggagcatgacgctccaatcaaaggccggatacattcatgcaagaccgctcaccaccagcttgtcaaaatcttcttgctccgcacggccggaccataca

SEQ ID NO: 6688 - DNA, 1149 bp, unidentified
  source 1..1149: mol_type = unassigned DNA; note = element_a6335a2
  misc_feature 1..3: note = core
  misc_feature 4..208: note = LE
  misc_feature 209..1138: note = CDS
  misc_feature 1139..1149: note = RE
  misc_feature 16..189: note = bridgeRNA
gcttgtgtctttgcgtcggcgtaggcttcggggtgagagcggagtgcggcaagcccgctagcggcggtgctgcgagcacgtgtgggagctggggctgccgcactccctccaccaatagcccgaacagttgcccgagtcgtacctcgaaatcacaagccggggcatggtggaggtgctctcacttccgatcgtactccggagtgaaatcatgagcatccatgtaggaatcgacaccggtaaatccatgttggacgtgggtttttttcctggtgagcgctgcgaacgcttcgccaatacggccgaaggccatcgcgcgttactgctcgcgctggcgcccctggaggtcccccacatcgctatcgaagcgacgggcggctatgagcgagggatcatcgatgcgctggctcaggccggttattgcgtcacccgcctggcgtcgcatcgcgcctcggcttactcgcgagccatgggccggtttgccaagagtgacaccctcgacgcccagatcctggcgcgtatggcggcgaatatcacgccacaaccgtacgagatgccgtcgcccgaacgcggcgaactggccgaactggtgcggtgccggttgcagatggtcagccagcgtgacgacaacggtcgacgtctgaagcagacgcagctggctgcagcccagcacgcgctgcgcggcatgatcgaggcggccagtacgcaaatccgtgagctcgaccggcgtatcgcgaaagccacgaaggccgtcgatcctgcctcacggctgcgcgaagtgccgggtgtcgggcccgtcgtagaagcgaccctgatcgcgtacctgcccgagctgggacggctcacacgacagcagatcgccgcgctggtgggcgtggcgccttacgtcgaccagagtggttgccgtgacggtgccaggcgcgtacgcgccggccgatggatcgtccggcgcgcgttatacatggccgcctgggccgccgtcagagcaaaaggaacagccctgggcgagcgttaccgcgccctgcgggcgcggggaaaagtagccaaggtggccatcgttgcctgcatgcgatgcctgatcacggccatcaatgcgatggtccgtgatcaggccggatggcggcatggggcggctgtctaaaaaagaaagtt

SEQ ID NO: 6689 - DNA, 1164 bp, unidentified
  source 1..1164: mol_type = unassigned DNA; note = element_a636142
  misc_feature 1..2: note = core
  misc_feature 3..207: note = LE
  misc_feature 208..1158: note = CDS
  misc_feature 1159..1164: note = RE
  misc_feature 22..213: note = bridgeRNA
cttgtaatagcgcaatcagatattgtccggatgttccgtgaggaatggcctgccgcgactgcaaccgcggcaggccgctggcgatcggatcgcgcccaccctgagcagtttgcggctgccctgtagcaggatcgcgccagcaccttcatcggacccggatggttgccggaacaatcaggttcgcttcacaaggcagggtcgacgaagatgacgcagactagcacgacggcgggtatcgatacatccaaaagcaagctcgatattgcacttcatggccggcccgagcggtggcaggtcgtcaattcggtgtctggttggcggattctgacagataaattgacgacggccggcgtcagccgcgtcggcatcgaggcgaccggcggctacgagcgcggcgtggtgcagcatctgcgggctgcaggcttcaccgtgcaggtgctgcaaccggttcaggtcaaggcgttcggccgggtgcatttgcggcgggccaagaacgatgtgctggatgcggtgatgatcgccgcctgcacggcgacactcgatcaggtcagggacgctccagaccctcgcctggccgaactggctgagcaattgaccttcctcgagcaaatcgaggaagacatcaaacgctacaagatccggctcgaacatatcggcgaaccacgcttgcggcgcctgatgcttgcagagatcaaacgactgaccacacggcggctgacccagatccgtttcattgccaggcaattgcgcgctcaccgcgatctcgctgtccgactgggcctcgtgctgagcatccccgggatcggcgaacgcaccgccctggcgatcctgattcgcatgcccgaactcggccgtatcagtcgcgaggaagccgcagcgctggctggtctggctcccttcgacaacgacagcggacagcacaagggtcagcgccgcatcgcaggcggcagggctcgcctgcgacactccctgttcgccgccgctctaccggccgcctttcgctggaacaaggccctcatcgcgctctaccaacgtctgaccgcagccggaaagccccacaaggcagcgctcatcgcctgcgctcgaaagctgctgatctatgccaataccgtcgtccagcgcggcacgccgtggaccgaaaggcctatcggcgtttaatggttg

SEQ ID NO: 6690 - DNA, 1374 bp, unidentified
  source 1..1374: mol_type = unassigned DNA; note = element_a637503
  misc_feature 1..2: note = core
  misc_feature 3..230: note = LE
  misc_feature 231..1271: note = CDS
  misc_feature 1272..1374: note = RE
  misc_feature 7..211: note = bridgeRNA
ctcctatgtttgtattgaataactttacgatgattttatgagtgaaaagagtgagagcacggcaatcgcaaatagcttaggcatgttgggcgttagatatagcctcactcttttacttttttgagttagaacagaatgtaaggaatacagcgaagcggtatatccaggataaccaacaggaggaaaaacgaagaaaggttttcacttataaaagctaaaaacttttatcaatggcaaacagattattaaaacaggtggtgggtatcgacgtagcccagaaagaactcgttgtttctttggggaaaatgaatgagatggcggttacaacggtttatgctaacaaggttttttcgaataatgagaagggctttgtaagtatggaggcatgggtaaataagcaaaccattgctgaatatccgttaaggtatgtaatggaggcaacaggtgtatatcatgagcgttttgcttactacctggcaggtaaaggatatgctgtaagtatcattatgcctaacaagatctcaaactttttcaggacgctggagatcaaaacgattaccgataaatccatgtctgcggctatagccatgttcgggcttgaaaagcagctggacaactgggttcagcccaaaagagtgtacaggagtttacggcaggtaactcgtgaaagggagcagcttattgccgaacggaccatgatcaagaaccagttacatgctgaacaggcagaggcttttccgggtgatgacactatccgcaggatgcaggacaggataaaaatgatcaacacacagcttaaagaaatactggcagagataagaacagcaataacaaaggacacagaattaagacaaacactggcaaccattaccactattcccgggatcggtttattgacggccgctgtgattttggctgaaacaaatggctttgaactgatcaggagcaaaaaacaactaaccagttacgccgggctggatgtcagggaaaaggaatcaggcacttcggttaaaggcaagcccaggatatcaaaacgaggaaacaagcatttacgaaaagccatgcacctgccggcattagcagccataaggtattcggaaagatataaagcgatattcgtcagaatcgtatcccgcaacagcgtaaaaatgaaaggtgccgtagctgtacaaagaaaattactggagatggtctacaccatatataaaactaataaaccatttgaaaaggattatttgcagcagcaaaacacaataactgaaaatagttagagcagtcacctcaattgaagaactgccctaaacaggctaacataaagccgcctaagaaacaaaagtaaaaaaaccaaataacatttgcatatcaacacagaat

SEQ ID NO: 6691 - DNA, 1141 bp, unidentified
  source 1..1141: mol_type = unassigned DNA; note = element_a63a368
  misc_feature 1..2: note = core
  misc_feature 3..197: note = LE
  misc_feature 198..1127: note = CDS
  misc_feature 1128..1141: note = RE
  misc_feature 11..207: note = bridgeRNA
cttgtatcttggcatttcagccattgtgctgcaaaacagagcggctgcgagatcctaagcgcctcgggtcggaactttgtgtccagaccgtggtgtagtttgatccgcagccgccgtgttctttcgaactcgaacagttacttgagcgatcccgccactgcaggaccagctcgaatttacaagaaggagtctctcatatgaaggaagaagttgtctattgcggaattgatgtggccaaaaagcagctggatgtggccctgggccaagagcgctggcaaacgcctaacaccagggagggcattgcaagagtgttaaaacgaatcaaagaaatgcggcccaaagtgcacgtgatctgcgaagccagcggtggttatgaaaaagccatcgtgactgctctgcaggggagcgctttggcggttagtctggtgccagcaaaccgcgtgcgccagtttgctcgcgcggctggcattttggccaagagcgacatcatcgacgcggccgtgctggtacgctttggagcggctatgcaaccggcctccactccggctcaaccagcacacatcgcgcgcttgcgtgagctggatgctcagcgccgtcacctgagtcgactgctcagtgcagaacaaaatcggctcgcccaattatcctgcgcagagctgcgggccttgagtcgcagcttgattagcaaagtcaaaaagcagatcgctaccgtcgatgcgcgcatcgctgccttgattgggcaggatcaaatcctttgcgctaaagcacaaaagctcacttccatcacgggcgtgggctctcgcactgccgcactgctactcgcgcaaatgcccgagctgggcagcctcaatcgaggtcaagccgccgccctcgctggcctggctccatttaatcgcgacagcggcacaatgcgaggcaaacgctgcatctttggtggacgtcgcgcgctgcgcaccggcctctacatggctgccgtagccgcggcacgacacaaccacatcctggcccctttttatcaacatctgcgcgcggccggcaaaccacccaaactggctctcactgccgtgatgcgcaaactgctcatcgctctaaatagcgctcttgctctaaccctcaatccggcttgaactcaacacagtta

SEQ ID NO: 6692 - DNA, 1571 bp, unidentified
  source 1..1571: mol_type = unassigned DNA; note = element_a648ca5
  misc_feature 1..2: note = core
  misc_feature 3..281: note = LE
  misc_feature 282..1445: note = CDS
  misc_feature 1446..1571: note = RE
  misc_feature 3..246: note = bridgeRNA
cttgtatgatatttatagaagttaaataccatatttcctttcttttattattgtgatttataatacattcagatgctgtggactttagatttatttctgtagttcaactattttttaggagtgtattgccacatttctatctgaagcatttattagctggatgtgcctgaaccttagctgttcatgagtgcttatctcaatcaagtctatgatgatagacctaagtggattgtcacagtatcagtacaggaacctttgttcctaagaaaggagcggttaacatgatttatgttggcattgatatcgccaaactaaaccatttcgcctcagccatatcctctgatggtgaaatactcattcagccttttaaattcacaaatgactatgatggcttccatctgctggtttccaaactcaattctcttgagcaggacagcctcatcataggtcttgaatctacggctcattacggcaacaaccttgttgaatttcttgttttacataactacaaggtctgtgtcattaaccctatccagacttctacgatgcgtaaaaacaacattcgcaagactaagacggataaggttgatacttacattatcgctaagactttaatgatgaatccgcatagactttttacaacctatgacctggatctgttacatctgaagaacttcggtcggttccgtcagaaactcattaagcagcgtaccagagtgaaaatacaactgacatcctatgtggatcagtctttccctgaattgcagtatttcttcaaatcgggggttttgatcaatacctgttactgcctcttaaaagaggcttcatcaccaaacgctattgcttctatgcacctgactcatttgacgcatctcttagaaaaagcctcgcacggtcattttggtagagatacagccaattcattaagaattctggcacagaagtctgtcggttcaagtgacagttctatatctatgcagataacacaatccatagagcagatcgagttactggatagccaagttgataaaatcgaatccgaaatgaaagtaattatgctttctctggattctgtaatcatgaccattcctggtattggttatataaatggtggcatgattctgggcgaaatcggcgatgttaccagattttcaaaccctggtaagcttcttgcgttctctgggcttgatcctgctgtttatcaatcaggaaactttaatgccagtcacacaaagatgtcaaagcgtgggtctggacctctacgctatgcactggttaatgcggctcataatacagttagaaacaaccagacatttcatttgtattatgataagaaaatgtctgaaggacgaactcactacaatgctcttggacattgtgctggtaagttagttcgcattatctataagatgctgactgacaatatcccttttaatttagaataacaattcgaccgatcatatagatttttcaaaagcacccttgcggagctttattaaagtcagttattttctggtcagaatgaaaatataaatattttaatgatttaggattgacttttcatagctggt

SEQ ID NO: 6693 - DNA, 1443 bp, unidentified
  source 1..1443: mol_type = unassigned DNA; note = element_a65131c
  misc_feature 1..4: note = core
  misc_feature 5..150: note = LE
  misc_feature 151..1128: note = CDS
  misc_feature 1129..1443: note = RE
  misc_feature 1211..1443: note = bridgeRNA
aaatgtaatgaacgcatcccacacaattaaacacggagcagtatgatggttaaaagggtgaaactggcaggtgtggagcctcgcagatttccggcatcatagtgcccaatacgggatgcataaagctccctcagactggagactccacaaatgaaatatacaccggttggcgttgatatcgcaaaacatgtcattcagattcacttcatcaatgagcacacaggtgaagtggttgataaacagttgcgtagacaggattttctgacgttcttcggcaaccgtgagccatgcctgattggtatggaggcctgtggaggttctcagcactgggcacgggaactgacaaaacttggtcataaagtccggttgttgcaggcccgcttcgttaaggcattcgtcatgggcaataagaatgatgtgatggatgcccgggctatctggatggcggttcagcagccgggtaaagaaatcgccgtaaaaacagaagaacagcagtcggtactggttctgcaccgtacccgcatgcaactggtgaagttccggaccgcacaaattaatgccctgcacgggacgttactggagtttggtgaaaccatccacaaaggccgggcagcgatggagcgggagttccccgaagcactggaacggatgaaagagagactgccaccgtatctcattatggttctggaaaaccagtacaaccgactgaatgagctggactcactgatagaggatattgaaaaacagcttaccagcgtggcgaggcagaatgaaacctgtaagcggttgctggatattcctggcgttggaccacttattgcgacggcagcggtggccaccatgggggaagcatcagcgtttaaatcggggcgagagttcgccgcatatgttggtctggttccaaaacaaactggctccggagggaaagtacgtctgctggggataagcaaacgtggtgacacttatctcaggacattatttatccacggtgcaagagcggtggcattagtagctaaagagcctggcccgtggataaccgaactgaaaaaaacgtcgtccagccagtgtggcaatcgtcgccatggcaaacaagctggcacgaacagtatgggcgataaccgcccatgaccgtaagtatgacaggaaccacgtcagtatcagaccatattaatcgctgataccattaaacaatgaactcttaacaaaagggtgaatgctgaaaggttgctatggcggccagagtgatgacaaagacaggtaagaccgtgactcactaaacctgaacagtattttgggcttgaagtccgccgtgaaaataaggggtgagtcggcgaattacataggggctcgcagcgttacggctgcaataaagccggatataaagctgcaacctacccgtcatgtcaaaacaatggatgccttgcaaacgggatgcgttcatat

SEQ ID NO: 6694 - DNA, 1465 bp, unidentified
  source 1..1465: mol_type = unassigned DNA; note = element_a65740b
  misc_feature 1: note = core
  misc_feature 2..227: note = LE
  misc_feature 228..1451: note = CDS
  misc_feature 1452..1465: note = RE
  misc_feature 15..239: note = bridgeRNA
ctgattgagaatcgatgtagacgttgcggtttggccgtagcgtcgagaggtcccgcggggctggctcttgagccgcctgccggccggtttcggcctggcttacgaacgaagtgccagcttcgccgggtctcgccgtggtgtggctcaaaagaggcgcgagcgcgggccgatccggaatcaggcatgcccgccacggtccttcccccgagtatgacgaaggagcggttatggcagcagtgatgatcggtgtcgacccgcacaagggctcgcataccgcagtggcggtcggtgcggccgaggagccgctgggcgaacttcgggtgcgctcgtcggcctcccaggccgggcggctcgtggcgtgggcggcggactggccggagcggacctgggcggtcgagggtgccggcggcctgggtcatttgctggcccagcaactggtttcggcgggcgagcgggtgctcgatgtgcagcccaagctaggcgcccgggtgcggctgctggcggccggggacacgaacaagaacgacccgaacgacgcccggtcagtcgccgtcgcggcgctgcgcccggcggccgggcgggaggtgaagccggacgatcacgcggcggtgctgaaggtgtggtccaagcgtcaccgtgacctgggccgggcccggacccaggtcgcctgccggctgcacgccgtcctgtgcgagctggttccgggcggcatctccaaggagataaccgcagctcacgccactcatgtcctggagtcggccaagccgtcgggggccgttgagatggcccgctgcgagctcgccgccgacttcctggaagacctgcgccgcaccggcacccagatgcgcggcaccaagaagaagctaacggccgcggtccgggcgtcgggcacgacggccaccgagatcttcggtgtgggaccagtcatcgccgccaccgtcatcggctgcgccgtcgatgtgtcccgcttcgccagccgggatcacttcgccgcttacaacggcaccgcgccgatcgaggtgtcctcaggaaaccgcaagatctaccggctgtcacggcgcgggaaccggcggcttaaccacgtcatccacatggccgcggttacccagatccgccaccgccacagcgacggccgggcctattacgaccgcaagctagccgagggcaagacacccaaagaggcactccggtccctcaagcgccggatcagcgacgccatcttcgcccgcctccaagccgacgcccgcagggtcgcctccgcagctagcactgggggcccgggagggcaaccggggaacgactctgtcgccagcgcggccggctcacaccccgagcaccggctcttcggccaagccactcccgggcctgaatccacactacgaccccggcccgattcccagagcgagaagaacccaccaccccttacgagaaaggtccgccaagcctcttgacaacaaagaggctt

SEQ ID NO: 6695 - DNA, 1561 bp, unidentified
  source 1..1561: mol_type = unassigned DNA; note = element_a65a5a9
  misc_feature 1: note = core
  misc_feature 2..227: note = LE
  misc_feature 228..1538: note = CDS
  misc_feature 1539..1561: note = RE
  misc_feature 18..242: note = bridgeRNA
ctacttatgtcttccttagaccgcctgggccggcgcaggctcgggtgaggtgcccggccggagcgctctctttgcggctgcccgccgttcggcgaggtgtggctctttcatggcatgcggtccggccgggcgccgtggcgaggcgtggctcaagaagggtctgctcagctcgaagtagcgttgcccgtcctcgctgacagggatgcagttcggtgaggaggcgcgtgatggatcaggtgatcatcggggttgacccgcacaagctgtcggtcacgattgaggccagggacagccgggaggttctgcggtccacgggcaggttcgggactgacaccgcgggctaccgtcagctgctgagggcagcccgtcagtggccgcagcgggtctgggcagtcgagggcgcgaacgggatcggtcgtccggtcgcccagcggctgctggctgatggcgagcgggtgctggacgtgcccgccaagctggccgccagggcgcgcgtgtctggcaccggccagggacgcaagaccgacgctaccgacgcgcacgcgattgtcatggtcgcgctgcgggacacaggattacgcgagctgagctccgatccggagctgatggtgctgcggctgctatgcgaccgccgtgatgagatctcccgggccagggcgcaggctctcaaccggatgcaccggctgttcctggaactggtgcccggcggggcgccggtgaagaagtccaccagccagtacaagtccctgctggccagggtgcggccgcgggacctggccggcaagacccgccgccggatggccgccgaggagctggccgaccttgcacggtatgacgccaagctcaagacaatgaaggccgagctgaaagccacggtccaggcccgcggatcccgcttgatggacatccacgggatcggccccgccggcgccgccaggatcctggccgatgtcggagatgtggcccgtttccctgaccgtaaccacttcgcctcctggaccgggaccgcgcccatcgatgcctccagcggtgagcacacccgccaccgcctgtcccgcgcagggaaccgcaggctgaaccacgtcctctacatggccggcatcgtccagctgcgcaacgacaccccgggccgcgcctactaccggcgcaaagtccagcagtccaagacctcgatggaagccatgcgctgcctgcgccgccggctctccgatgtggcctgccgccagctcgtcgctgacgccgcccggacagcagcattggatcaggcaggtccgggagggcactcggggacgactctgaaatccagcgcgaccgacctgaccccggacatcggctcttcggaccagccatttcccggacccgcaccctcgacgctacccccgcccccgcctgccaggaaccccgccaggccggggacaggcgccataccgcgacgacgcgccggaggtgtcaacgtggagcgccccaccggacgaacgacgttgacaccgacaagcgccggcgcacactcgaagggcctcccggacccgcccccttgacaaagctcttcatagaagggagc

SEQ ID NO: 6696 - DNA, 1408 bp, unidentified
  source 1..1408: mol_type = unassigned DNA; note = element_a66086d
  misc_feature 1..2: note = core
  misc_feature 3..204: note = LE
  misc_feature 205..1404: note = CDS
  misc_feature 1405..1408: note = RE
ctcctacataaaaatatggtataaataatttagcttaaaaaaattgagggcaggacaacttatgtcaccttggcttttaagccatttaaggagtctgttgcctgcctttaaccatgattagttggttgggctttcagccctcgtcagcatggaggattggttcagcaggctccctgccctcatcattcgaaaggaggatttttcatggataacttccctgttttcgtcggcatcgatgtttccaaggataagttcaacgtctgcgctatctctaatcccagttccatcatcttcgaatcttctttcgatatgtccaaacaagggttttcctccttcgcaaacaaactctctgccttcccaaaacaatccatcatcatcgctatggaatctactggctgttatcatctcaaccttctggctttcctttcttccaacgactttgcttgcgctgtttttaatcctctaactgttaaaaactttgcttctcttcgaaagaccaaaaccgacaaaatcgatgctcgcattatcgctactgctttgttttacctacaacatcaaattccttcttctgcttttgtcaactctgagcttcgtgatattgtcagagcacgcgaaaacattatccaccgcatcgcaaaagttaaagacaatatcgaaaaactgctcaacgttcttttccctgaactcgaaagagttaccaatatctacagtgacactatcctcaatcttctttctcatttcccttctgccaaggctattcaaaaggctcgtaatctggatgtgttcttttccaaagaccgtggcagaagtacaaaacttaatgctcaaaaacttaaagaactcgctaataactcgattgctcaatattggccgatgaaagaaaagattcttgtgcaaaatatcaaagaactacaatttttacagcaacagcttgaagaatacgacaagatgatgaaagaatattgcgaatgtagtgcgataaaccttgatatcgagatactcacgtcaataccaggtattggtgaaaacagcgcgatgcatttcttggcagaagttggagatatctcaagatttagtacatacaaaaaactcattgcgtattgtggactcgatccaagcattgcccaatcaggcaaaagcaaagtagaaggacacatatcgaaaaggggcaatgcccacctaagacgaatactatggctaatggcagtgagtgtagtgattcacaacgaatatttccgaacatactatgaacgaaaaaggcagcaaggtataccgtacaaaaaagcgataatgtcagtagtacacaagttattgcgaacgttgtacgcaatgttgagaaagaaagagaagttcaatattgattatgctatctcacactcaaaacaaaaatttaattttgcatagttga

SEQ ID NO: 6697 - DNA, 1443 bp, unidentified
  source 1..1443: mol_type = unassigned DNA; note = element_a66d9f5
  misc_feature 1: note = core
  misc_feature 2..94: note = LE
  misc_feature 95..1135: note = CDS
  misc_feature 1136..1443: note = RE
  misc_feature 1204..1438: note = bridgeRNA
taatggaatggacgcccacttcctaatacggcatctaagtgccaaagtagtggttgcatcactaaccactaaacaaagaaaggggcatccaaaaatgaagattacgacaactggcattgatttggcaaagactatttttcagatacacggtgtgaatgaacatggcaaagtcgccgcacgcaaaaaactcaaacgtgccgagatgctcccttacttcgccaacctaccgccgtgcctaatcggcatggaagcctgcggcagcgcacaccactgggcaaggaagctgcaagcgttcggccacacggtcaaactgatggcaccgcaattcgtcaaaccctatgtcaaaaccaataaaaatgacatggccgatgccgaagccatctgcgaagcggttagcagacctaatatgcgctttgtcccgatcaagaacattgaacaacaagccattctttctgtacatagagcgcgacaaggctttgtcaaagcccgcaccgcacaggccaaccagatacgcggcttgctgtccgagtttggcattgtcatcccgcagggcatccacgccgtgatgaaacagataccggatatcctagaagatggcgagaacgatttgcctggcaccttccgccacctgatcgcacgcctagccgataatctcaaagaaatggacaggcaggttgatgagctggagaaagaaatcaacctgtggcaccggcagaatgaagccagccgcaaactggctgacatacccggcatcgggccgattactgccagtgcgattgtggcgaccgtgggccgtgctcaagaatttgaaaatggccgccaactggcagcgtggatgggtctggtaccacggcaaagctccagtggtggcaagcagaacctgctgggtatcagcaagcgtggggacacttatctgcgcaccttgatgatacacggtgcacgatccgtcatttaccatgcagagaataaagcagcgccggatagctggctaaggaaactgatggacaggcgcaacaagaacattgcagcggttggcctggccaacaagaatgcacggatcatctgggcgatgttggcgcatgatcgaatattccaccctgattatgcagcgacatcaataacggtcgctgcataatcagggcggttgcgtaaaaccagttaaaaagtttttaacagtagcaagttaataccgagttgtagacgtagtaccaccgattgcatgggcaatcatgaaatgatggcgagacaggtcagaccgtgagtgagccaatccggtcaactttacgaacatcaagttcgataacgtaataggaactcactcagcgtattccatcaggaacagaagcattgcgcttcaatcaaagttcggatgtatggctgcaatctttacctattctcaaaattgttgattgagggcttggcaaaaaagtgggcgtccatgta

SEQ ID NO: 6698 - DNA, 1654 bp, unidentified
  source 1..1654: mol_type = unassigned DNA; note = element_a676ac1
  misc_feature 1..2: note = core
  misc_feature 3..328: note = LE
  misc_feature 329..1528: note = CDS
  misc_feature 1529..1654: note = RE
  misc_feature 44..283: note = bridgeRNA
ccattacggtttaggcagttccctgctggggacccgaggattcatggtttctccccttttggggtgggttatgtttgttccggtccctgcttagcagcgggactcgtcactggcttcggtatggcttgtttttgtccctgtctgaaaatgatccggggggtgatgccgccgaaggcagtgacatacttcaactgctaataggaacctgactcgccggaatgcctggtgaagtctcaagtaatgtggatgccagcgagagtatgtccgacgaacccagtgacgatatctgtccgtttcacacttatatcgcacatggagaatcgtcctcgtgacctacgatttcgtcatcggcatcgatgtcggtaaatactttcatcacgcttgtgtcctcgacaaagatggtaaacaagtaaagtcaaaacgcattgaccagtcagaacattctttacgcaggttcttcgaccttttcctcgccctgtcctcgaaaattttggttgtggtcgaccagcccaacaatattggcaggcttaccgtcgcagttgcccaagacatggggattaccgttaaatatcttcctggattgtcgatgcggcagctgtcgagggttcatgtcggaaatgcgaaaactgatgttcgtgactcatatgtcatcgcgcatgcaggagccaatcttcccgatgccttgcgcaatgttgaccgtgtccagcaggtgttcagtcagctaaaagtactcaacggtatcgatgaagacctcgcccggtcctacaccaggctgatcaatcaaatccgctcctcccttgttggatcctatcccgaattcgaacgggtacttcgtggccaaaatatccacagacggtgggtgttgcacatgctggccaaatatggtggccccacaaaaatcaaacgaatggggcgcgcacgcctgatcgcgttcgcgaagaagtacaaagcaagaaaccccgagaaaatcatcgatggcctgctggatgccatcaagaatcaaaccgtgtcaatccacgggtcggaatatgttgaactcggtgtcgccatgtccgccactgatgccttggcaaagcttgaccaccggaaagttatcgaagaaaaagtaggcgccctcatcgaggaggttccgcacacccacatcctcttgtctatgcctggcatcggcccgaaaaccgcagctcagatcctcatgacagtcggggacttctcggactttaaaacagcttcccacatggcctcatacgcaggactatgcccacagaccaaccagtcaggcacatccatcaacacgaaatcaccgaacagggcgggaaacaagaaattaaagaacgccctatggcaatcctcattttcagcgatcagataccacgagcgttcacgccaatactacgagcggaaacgtaaagaaggcaagagacacaacgccgcagtcgtagctctagcaagaagacgcctcaccgtcttgttcaccatgatggcaaatcacagcctctaccaagaaccagaaaaacagaagacagcttaacgggctaaaacaccccagccgattggcaatacgccaatcggctcccaggcgtacccaaaaacaatcccacaccgaacgtcacccccaacaactacccccctcaggttgacgaactatataggaaca

SEQ ID NO: 6699 - DNA, 1592 bp, unidentified
  source 1..1592: mol_type = unassigned DNA; note = element_a679fb2
  misc_feature 1..4: note = core
  misc_feature 5..370: note = LE
  misc_feature 371..1582: note = CDS
  misc_feature 1583..1592: note = RE
ctcactggactaccttcttgtccatgaaggacgtagcagcgcaatgcagggttgtccacggcggtgggcggacggcgcttgcgacggaccggccgcacggcgcggtggtcaacccgtgttcactgcgatggcttgacgtgccgagttcgaacgtcgaaggtgtgtatcgacttccgtgcccccgaggagactgccccgggcgctggccgctcgacggcccgcatgagacccgcagccctcggggtgccggaagacccagacgggctacaggatgtagcgccgcggtgtgcagccaagagcgccaatcagtgagcttcccgcgtgggcttccggcacggcgagtcataccgcaacttgcaggagtttgtccatgagcaactactttgccgggctggactgggccagcaagacgcacgcgctgtgcgtcatcgacgagcgcggtggcgtcgtcgagcgcttcgacatcgaccacgacgccggcgggctgaccgagttgcggcgccgcctgcgccgcttcggctcgccgccggtggccatcgagcgaccttcgggcttgttggtcgataccttggtcgatgccgacttcacggtcgtgccgatccatcccaacgccgtgaaggccagccgcccgcgctacaggagccacggcggcaagagcgatgcctccgacgcctacgtgctggccgacttgctgcgcaccgacggccatcgcttcaaggccttgacccctcagagcgacgagatccgcgccttgcgtgccctggtgcgcgggcgtgatgacttggtggccactcgcgtgcatctggccaaccagctgcgcaccctgctcgagtcgttctggccgggcgcagccgccgtctttgccgacatcgactcgccgatcgcgctcgccttcatcgagcgctaccccacgcccgagagcgcctccagactcggccccaaacgcatggcagcgttctgcgcccaacacgcctactgcggcaggcgcagccccgatgacctcctcgctcggctgcaagaagctcccagcgccgtctccgccgagacggagatggaggccaaaggcgagctggcgcgctgcgtggcccgaaccctgactcgcctggtcgaacaactgcggctgttgtcgagccgcatcgagcacctcgtcgcttcgctcgacgatggacgcatcttgatgagcttcccgcgtgccggccgcatctgcgccgcccaaatcctcgccgagctcggcagcgtacgcgagcgcttcgccaccgatgcccagctcgccgccgaggccggcgtcgcgccggtcacctacgagtcgggcaagtccaaagccgtcaccttccgctgggcttgcaaccacaggctgcgcgccgcgatcacttgcctggccgacaactcgcgccatgtcaacgcctgggccgcacacgtctatgccaatgcccgggcacgcggctgcgaccatccgcactccattcgaatccttgcccgcgcttggctgcgcgtcatctggcgcgcctggaccgatcgcaaaacctacgaccccatgcaacaccgcgccgctcaactgctccttaaagccgcaggaggttgacacaggatgt

SEQ ID NO: 6700 - DNA, 1535 bp, unidentified
  source 1..1535: mol_type = unassigned DNA; note = element_a67ada2
  misc_feature 1..4: note = core
  misc_feature 5..262: note = LE
  misc_feature 263..1510: note = CDS
  misc_feature 1511..1535: note = RE
  misc_feature 55..229: note = bridgeRNA
ctcactggtgcaccttaggtgtcgcagaccgtaggttgcgtgccgttgtgggagagctgcggcgtccgggcagggagagccagaaaggcttgctctgcgagagcctgcatgagatctgctcctctgtccggcgcggaaggccccaaccgaccacagggtgtcgcgccagggcagctgaagcccagagcgccagttcagtgagcgatcggtgagaccttcccacgccggagcggaggaacgaccctcggctcggaggtgagacgtggaagcgcttcggccaaagtatttcgtcggcctcgattgggccagcgccgcgcatgccgtatgcgtgctggatcccgacggtcgccccgttgttcaggatgtgatcccgcataccgcggccggcttgaccgatctggtgcgtcgcctcacgcgcttggcggtccccgccgaaatcgcgatcgccatcgaacggccgtccggcctgctcgtcgacacgctcgtggcggcgggcttccgcttggtccccatccatccgaatgcgctgaaggccacgcggccccgctacgccgcagcccctggcaagagcgatcccggcgatgcctacatccttgctgatctcctccgcaccgacggccaccgctttcgccccctgcggccgcccgccgattcgacccgcgccctccgggcggccgtccgcacacgcgacgatctcgtggcgactcgcatccagctcgccaatcagctccgcagcctgctggagagcttctgggccggcgccgcggcgctgtttgccgacatcgactccccgatcgccctcgcgttcctcgacgcctaccccacccccgacagtgcggtacggctcggcgagcagcgcctcgcgcgattcctccagcgccacgcctactgtggccggcgcgcccccgcggcgctgctcgcccgactgcgcgccgctcctcgggggtacgccggggaactcgagagcgaaaccaagggccagctcgtgcgcagcctggtcgcggtgctccgcccgctcgtcgagcaactccgagaacttgaggccctcatagcggcgcagctcgcccagcacgccgatggccccctcctgcagtctttcccgcgcaccggcaccgtgaacgccgcccagcttctggccgaactcggggaggaccgcggccgcttccccaccgcggcgcagctcgctgccgaggccggcgtggccccggttacccgcagctccggcaaacactgcagcgtcgcttgccgcttcgcctgcaacaaacgactgcgccaagccgcgaccacgtgggccgacaactcgcgccacgcccatccctgggcagcggctgtctatcggcaggctcgcgcccgcggctgtgaccatccgcacgcggtccggatcctcgctcgggcctggctgcgcgtcctgtggcgctgctggcaagcccgcacgccgtacaaccccgcccaacatggcagggctctccccttcctggtctcgcgcccccccacgtctcgggtcgcctgacgacagcagggttgacacagggtgt

SEQ ID NO: 6701 - DNA, 1632 bp, unidentified
  source 1..1632: mol_type = unassigned DNA; note = element_a67e9cf
  misc_feature 1..2: note = core
  misc_feature 3..268: note = LE
  misc_feature 269..1474: note = CDS
  misc_feature 1475..1632: note = RE
  misc_feature 60..257: note = bridgeRNA
catgtatactttaagatgtaaattaatgaaagaaatttttattagtttatgataaaatattttttattctttcttataagaaagaataaaaaatttgcgtttgagtaagggcagattataccaggggtctttgaatccatttttatgactgcccgtctcttatcttattattaatctagtcttagaaagtggggtcaaagaatccatataaccagcatgatgagataattgtaagcactaagagtcaaactaggaaaggaagtattatatgaagtatgttttagtactagatgttgctaaaagtaaaagtatgtttatgttatcttctgatgttggtgaagttctattagaacctactgaatacatacataataaatccgattttgaaagaatagattcttatattagtaaacttaacatcaaagataatttaacagttattatggaagcaacaagtatctaccacaaagcaccagaaagattttttaaagaaaataattatcatgttattgtctttaatcctcttattggtaaagaaattactaacactattagaaaaacaaaaactgataaacaagactgcattaaattaactaatttattttggaaaggtagtattcctgatagaaattatactgaagatgaaatttatactaaattaaacgaattatctagacaatattatcatctagatgaaggtttaactagacataaaaatcgttataaagaactattacatctatgttttccggaatttgaattatgttttaaatatgggaaaatatatgacttaactgccttaaattttattaaagaatttccccatgcatatattattaaagacaaacgtgttgatgcacttgcttataatatggctaataccaatgatagacatcttaattattataaaagaaaggctaatattatcaaagaatatgctataaattcttatccaggagtaagtgagaactctaaggatgtagataacttaaaacaattagctaatattataatcgaaatagctaaacaaaaagaaatcattaaagagcaaatgattgagcttgccaaacaaactaaaaattttgaatgtattaattcattatttggtattggagaattatccgcttctttaattattgcagaattaaaagatattacaagatttaataatataaagcaaattaatgctagttgtggattagacccaacaatagttcaatccggtaaaagtatagattatcatggtcctatttctaagcgtggaaatagatatgctagaaaaatattatttaattgcagtcgaaatattgtaactttatcagccaaatgtgataaagaaaatccaatatatgtttattatcaaaagaaaaaacaggaaggtaaacattactatgcttgtttaactgcctgttccactaaactaattagaattatttatgcactatgcatgaataattccacccaacaaaattagtttaacattttatttaaaatatatcaacttttcaacaccaaatttttaaaaaaataggcaattttggtgttttaagtcgtggattcaactaaaattttaggcaaaatcacaacttttttaagaactttacaaaaaacacttgtaaaaacttagaaagt

SEQ ID NO: 6702 - DNA, 1216 bp, unidentified
  source 1..1216: mol_type = unassigned DNA; note = element_a684a83
  misc_feature 1: note = core
  misc_feature 2..363: note = LE
  misc_feature 364..1185: note = CDS
  misc_feature 1186..1216: note = RE
  misc_feature 35..203: note = bridgeRNA
tcttaagtttgtattatccttaaattagataaataaacagaaagcacaaaagagaggattaaggttattatacacgcagagacttagatctcgtcaacattgaaaatcacctctcttttctacacagatttcgtacagttctatgaggctttaagacctcgcttttaagtcgttgaaactcgcgtagattgtcctttcaaaaaacattttcttatgaataaagatataaaatattttggaattgacattagttatttagtatttgatgttaccgattctgatggtaattactatcagtttaaaaacaatgtgggaggctttaggaagtttacaaaactatagaatacttatagtcattgtgtaatggaagctacaggttattatcattatcaattagcatattatttgttagagtctagtataaaattgtctgtagagaatccattatctgttaaacgatttatacagatgaagctatcaaaaatcaagacagacaagagcgattctaagcttatttgtgagtatgctcagaaagtagaattaaagctttggcaaggtaattctaagaatgaaatagaatgttttcaaattacccgagcgctttctatctatactaaacaaagtacaatgataaaaaacaaattgcatggagaaactgttttgggagcgcccagtaaagcagtcgtaagatccttaaaacgcagtttaaaataccttggtaaagaaaaaaaaaacttagaggataagttgttggccttagtgaacctaactcatcaagatctattaactcgtttaaaaacgattccaagtattggtccaaaaacatctattatgctaatagttttaacaggaggttttgatcgctttaaaagcgcaagtgaattatgtagttatgcaggattaacaccagtaattaaacaaagtggaagtagtgtaaaagggcgaccaagaattagtaaaatgggtaatcaaaagcttcgtaatttattatttatgtgcagccttaatgcatgtaaatgtaataaagcttgtcgagaactttatgagcgaatagttgcaaaaggaaagagtaaaaaattagcattaattgcaatttgtaataagctattaaaacaagcttttgctattgctaaatcaggattaatatatgatgaaagctatagaagtgttttagtgaaaaattaatgggattttacttgtttttcaccacagtact

SEQ ID NO: 6703 - DNA, 1358 bp, unidentified
  source 1..1358: mol_type = unassigned DNA; note = element_a6a2c9e
  misc_feature 1..4: note = core
  misc_feature 5..81: note = LE
  misc_feature 82..1104: note = CDS
  misc_feature 1105..1358: note = RE
  misc_feature 1083..1346: note = bridgeRNA
atgatggggtggatggcccccttgcggcatctgagtgccaaactgctggttgatcgaatcagcagcaacggagagccatccatgggcgaggttacgacaattggactggacttggcgaagcatgtttttcaggtgcacggggtcgatgcagagggagcgacggttctgcgcaagcggcttcggcgtgcgcaggttgtggcgttcttcagccggctgccgcgctgcgtggttgggatggaggcgtgtgggacggcgcactactgggcgcgcgagttgcgtgcgcttgggcacgaggttcggctgatgccggcgcaatacgtgaaggcctacgtcaagcgcaacaagaacgacgcggcggatgctgcggcgatctgcgaggcggttgtgcggccgacgatgcgctttgtggcggtgaagacggccgagcagcaggcggctgtgctgctgcaccgtggccgtgagcggctggttcgccagcgcacggggcttgtgaatgccttgcgggcgcacttggcggagttcgggatcattgcgccgcaggggctgcgcaatgtcggcaggctgatcgccatcgtgcgggacgaggacgacgcgcggctgccggatttggcgcgccaagtgctcgcggtgctggccgcccagattgagcagctggagggggcggttgcggcgatcgagaagcaactcatggcttggcacaagagcaacccggtgagccagcggctggcgacgatccctgggatcgggccgatcatcgccacggcgatcgccgcgacggttacggagccgagcggctttcgcagcgggcgcgagtttgcggcctggcttggtctggtgccgcggcagaattcgaccgggggcaaggtgcgcctgggcgggatatccaagcgcggcaaccgctatttgcggcggcttctgatcaacggcgcctgcgccaatctgctgcgctcgaaggcaaccaatgccgatccttgggtgatcggactgcgccggcggcggccgagcctagtcgtggctgtggcgctggcgaacaagacggcgcgcatcgcctgggcggtgatgcagcgcaaggagaactaccagcgcatggccgcggcggcttaggccgctgagccacgttctggagcttgcgagagagcaatgacgcgtgatggcacagtcggtcgatccgacgcaaccgagagaaacctgccgcttcattgggacatcgatcccgctcgaatgatgaggcctcggttcgcggaccccatcagggccagcagtccatccggactgcatcaacaggccggacacatgactgcaagcgacctctgcgctgcacgctcaaagatctcttgccaagcgggggccatccacac

SEQ ID NO: 6704 - DNA, 1618 bp, unidentified
  source 1..1618: mol_type = unassigned DNA; note = element_a6a4cf7
  misc_feature 1..2: note = core
  misc_feature 3..276: note = LE
  misc_feature 277..1452: note = CDS
  misc_feature 1453..1618: note = RE
  misc_feature 3..225: note = bridgeRNA
ctcgtattataaagtagtagtgtttatagtccctctccaaggactgtatgctatactattggagatactgtggattgtttttcacctcctaccacttgatggttctaggaaggctacaaccacagtctctttgtatatttgttaatcagttagataccgcatgacggtttatttagaacgaggttacaatcgcaaggagtaccagtggttctaaacagtatcatcatcttgaactgacgttcaagatgcaaaaaatttattcaaaggagtattcttatgatttacgttggaattgatgttgcaaaagataagcacgactgctttatcactaattcagatggtgaggtattatttaaaccctttaccatttctaacaatcgggaaggttttgaaaacctgtttcaaagaattgaatccgtatcagatgattttacaaaagtaaaagtaggactggaagctaccggacactacagttacaatcttttgggattccttcttgataaaggtctgaccacctacgttatcaatccgttacataccaatctgtacagaaaaagtctaagccttagaaagacgaaaacggataaagttgattcccgtactattgccactatgatgatgtctgatatgaacttaaagtcctactcagatacatcttaccacaatgaggaattaaagtcactcactcgttatcgtttcgataaagtaaaagaacgggcaaaactgaaatcttccgtttccagacttgtttgtattctctttcctgaattggaaaaactcgttcccacacttcatatggcttccgtatatgctctgcttttcgaatttccaagtgcagacgcagttgctaattcacatctcacaagactttcaaatctgctcgctgaaagttctaagggcagatatggcaaggataccgctgttatgtttcgtgaagccgcaaggtcttctatcggctctcatatgcccgcaaagtctttggaactgaaacataccatcaaactcattcatgaactcgatgcagagattgaagaaatcgaaaatgagattaaatccatcatggatgaaattcattctccaatccttaccattccgggtatcagttaccgcatgggtgccatgatcattgctgagattggtgatttcagtcgttttgactctcctgataagatacttgcgtatgctggaatgtcaccctctacctatcaatcaggacagttagataactgttattcccatatggaaaagcgtggttcaaggtatctacgatatgccttatacaacgcagccaaatatgtctgtcactgggacgaatcctttgcagtatatctggctaaaaaacgagccgagggtaagcattataatgttgctttatcccatgctaccaagaaacttgtgagaacgatttacgcaatggaaaaatccggacagccatatcaaagtgcttcgtaattcatttctgtaaatatttccttttttgagtgccaacaatgacactctgcttgtcatgcagttttcaaggttctaagaatcatttttgactcttttatatctgaaatacatttctgcaattcattcaaaaattttttgattttatacttgacttttaatagttagt

SEQ ID NO: 6705 - DNA, 1477 bp, unidentified
  source 1..1477: mol_type = unassigned DNA; note = element_a6aa1f3
  misc_feature 1: note = core
  misc_feature 2..94: note = LE
  misc_feature 95..1189: note = CDS
  misc_feature 1190..1477: note = RE
  misc_feature 1208..1433: note = bridgeRNA
agacaaaatggcgccccttctgggcttgaaaagcgtgggttagatgcaagatttgcatttaccacaaaacaagaaaaccaacagaaggaacgtaatgaaaagaaaagtgtatgtaggaatggatgtccacaaagaaacgatccaaatcgcgattttaccgagtaatacaaaggctttagtgaaggaacagcaaatcaagcatgaagaaggacagatcaagaagttcatccaaaagctaaaatcggaagggactgaaatccattgttgttacgaagcaggggtgacaggttacccactttacagatatctaaagactttaggagtgaattgtatcatcgcagcaccgggaaagataccaaggcaaagttcggataaaattaaaacggataaaagggatgcgatcaaattagcgagattattgcgaagtggggaattagaatcgatccatgttccgagtgaagaagacgaagcggtaagagattacttgagatcccgggacagtcttcgtttggatttgggaagaaaccgtcagaggttgatgaaatttctcttgagaaaaggaatcacctattcgacgacaaagtattggacggcgagtcattacaaatggttgaacaatctacactttgaaaacgagatacttcaagcaacgtttaacgactattacagcagagtgagagttcaggaagagaatctgaaagcgatggatcaaaagatacgggagatagcggagagtgaaccgtatcgtgagaaggttggaatcttaagatgctttcgaggagtggattatctaacggctatgtttttactcagtgaggtgaatgatttcaaacgattcaaaacagctggttctttcatgagttttctcggacttgttcccggagaatattcgagtggttccaaaagaaaacaaacgggcattacaaaaacgggaagtcccagacttcgaaggattctggtagaagctgcttggcaacatcgatttcctggaacaggaagtaaggttgtagtcgcacgaagagtgggtcaatctgcgttagtcgtttctttagcggaaaaagcatccttaagattacacaagaagtttaaaagtatgcagctaagaggaaaaactcctcaggtaatgataaccgccgtctcaagggaattatccgggtttctttgggcagctatgaacttggttgcttgaattggagtaatatgtgatagttcatcaaatggttttattcgttagagaagatgacacgataaaggagaaattcttgtgagttccttgttgaagcaaatttgaatttcaaatttgatcttcgttttgtagactaagaacagctcccgatgtatagattatcctgcggtatccaaaacccgcgaatatcagtctgatcaatcgtcgcgaaggcttttctctaacgagttaaactatttgatgagatatatgcgaaaaaagatttactgctccagttgggggcgccatatc

SEQ ID NO: 6706 - DNA, 1360 bp, unidentified
  source 1..1360: mol_type = unassigned DNA; note = element_a6ab947
  misc_feature 1..2: note = core
  misc_feature 3..74: note = LE
  misc_feature 75..1100: note = CDS
  misc_feature 1101..1360: note = RE
  misc_feature 1076..1351: note = bridgeRNA
tgatgatgtagacgccccccggcggtctcaatgtgccatggtgggtttgagtaaacctacattggagaacgtccatgaacgaagtttgcacgattgggttggatctggcgaagaatgttttccaggtgcatggcgcagatgcatctgggcgggttgtcatccgcaagcgactccgtcgcaatcaggtcttagcgttttttagctcgcaacctcattgtattgtcgcgatggaagcctgctccggggctcatttttgggcccgtgagattggaaggcttggccatgaaacacggttgatcccgccagcctacgtcaagccatttgtgaagcgccagaaaaatgatatggcggatgccgaggctatttgtgaagcagcgcagcggcctacgatgcgctttgtcgcagtaaaaagcgagcaagctcagggggcagctgtggtgttccgcatccgcgaattgttgatccgacaaaggacccaatcaataaatgcgctgcgtggtcacttggcagagttcggtgaagtggttccgcaaggggcggctaacgccccccgattgattgctctgatcgaggatctagggaccaccttacctgaaatggcccgcgacatactgcgtgtccttgtcaagacattgtcccagctcaatctgcagatctccgcccttgacgccgagatcaagcgccgtgcccatgaagatgcgaccgcgcgccgactgatgactatcccgggcatcggcccactgatcgccacggccttggtcgctctagcgccgccaccagagatgttccggcgcggacgagacttcgccgcatggctcggccttgtgccacgacaacactccacgggcggtaagcagcgcctcggtgctaccacaaaaatgggggaacgatctctgcgtcgtctactgataatcggagcgaacagtgtcgtcgtgtggagcgcccggaagggaacagcgcccggatcatggcttgcggggatgctggcccgaaagccaacgatgctcgtacgagtggcacttgccaacaagatggcccgtattgtttgggcgctgatggcgaagggcgaggtttacagggctccggttgtggcggcgtaagcagcagagcaaccgcgaggacgtcggagcggaagaggtcaaaggaaggtatggcgcaacggtcgtgagacgagatcaggaaaaccagtttgcgacactgtgctttacgagcacgcggttttgatttggacttgatcttcgaacaccataggggcccgcggcaagtgaaagcgccgcatcagaggccggacacatgtcagcacccgactacgcgcgaaatgccaaccaaaaaaacctcttgcgtttggggcgtctacaca

SEQ ID NO: 6707 - DNA, 1552 bp, unidentified
  source 1..1552: mol_type = unassigned DNA; note = element_a6b4899
  misc_feature 1..2: note = core
  misc_feature 3..266: note = LE
  misc_feature 267..1439: note = CDS
  misc_feature 1440..1552: note = RE
  misc_feature 20..246: note = bridgeRNA
cttgtatactaaatatatcagattgatacatcagtatactctcctttcttatttctgctttatattattttcctatataatatttagataaacgttgtggagtattccatgttttacctacggctcgaccgttgaatggagggtatacccacaactattattcaaaggataaattagctggttaacgcttgacgtttcatttacaaggtcatccgaattttagtttgtggtcgcacaatgtttaaatatatctaggaggtcttaacatgctttttattggcattgatgtcgcttcaaaaaaacatgatgtaattattatttcagagtacggtgaaatcctttcagagtcttttactattgaaaactcttctgcgggatttaaaaaactccatacggaaatttcttcccatacggagctttttgataacgtccatatagggcttgaagaaactggtatttactccagtaacatccgtgacttcttgcactctgccggtttcaacgtgtatatgattaaccccgttctaacccaccacagtagaatggcatattcactaagaaacacaaaaactgataaacttgactgccttgcaatctgtagatatatcatgcataatttcacgcatctcaaaccctatatatctacactatacacgacttctgaacttaagtcattatctagattacgtctagataaacttcatacccttgcaaaggccaaaatggagttcactcgattgctccagattactttccctgagtttatcaaacacttcaaacagcattctcagtgggctatgaatcttttctcttcttatccagctcctgctaagattgctcgtatgcatcttgacacacttgtaagcattatcaaaatcaagggggatcgtgtttctgctgctcaattaatcaaaaatcttgctaaaaaaacaattggtgatacttctattaccaactcacttcttatagagtctatcatcgatgacatcaatcactacaacaaacagattgctattatcgataaacatcttgatgctctgatggctgattttgattttataacaacaataccaggtgttggtaacgttattggtgcttctatcattggtgaaatcggtgatatctcacgctttaattcaccttctcaactattagcatttgccggtcttgatccctccatctatgaatcaggagagttcaaaggtaaacggtgtcgcatatctaaacgtggctctaaatacctcagaacttccatttttacagctacacgtgttgcgtgtgtaggaaaaggcaagaacaatcaattccgtcagaaatatcataagaaaaaacttcaaggcaagcatcataattctgcactttgtaatgtgtccaaaaacatgataaataccattttcgctatgcttaacagtaaagaggattttatatacattacataactcacaatataatttaggtattcttagcagtacctttatttatgatgctcttttttatctattcaatattttcttcttttatttcattttttacttgacttttgtatagctgg

SEQ ID NO: 6708 - DNA, 1316 bp, unidentified
  source 1..1316: mol_type = unassigned DNA; note = element_a6c7f8b
  misc_feature 1: note = core
  misc_feature 2..491: note = LE
  misc_feature 492..1280: note = CDS
  misc_feature 1281..1316: note = RE
  misc_feature 62..273: note = bridgeRNA
cctttagatttaaaaaatagtaattttcttaaaacagcatttatagttatcaacaatgggggggtctggggggagactgataacttgttaataaatgttgataaattaaatttactaaaaaagaatggggtgaactttccgattttctaggtaaaacctatgtcccgtattagtccccattctttaattagttgcctaaagaaccaattagaattttaggtttccaggccttctaaaggtgtaagttttggcaactttatttgttaaatctataatccaaagttatgaaatttaaagtatttatcggaattgatgtcagtaaatcaactattgatgtttacttgctccggggtggcagacatgctgttttcagtaataacaagaaaggatttgctgaaatgacagagtggatcatgtagcaaactggagaggtaatttgctctgaaatcatttttgcttttgagcatacagggctttattcggataatctgatgatgtttctggatgaacagaatttcccgtttacagttgtctcaggcttggaaataaaaagatccatgggtataaggagaggtaaatccgacaagactgattcaaagctgatagcagaatatgtctatgaaaagagggagaaaataaaactctttgaaatgccttcagcaacattaagggctctaaaaaagctcgcgtcatacagagaacgtctggttcaggaaagggcagggttcaaaaccagaataaaggaatttaaagaggtgttcccggatactgagttcgtattttacactgaatcccataaaaagataattgaatgcctggataaggagattcaaggtattgacaatgaaatcagaaaactgatcaaaaaggaagagaagctacataggcagtataagctcatccagacgatcaaagggataggacctcaaacagccataataatgattgtgcttaccaagggtttttcttcttttgagaactggagaaagtttgcaagcttctcgggaacagctccctacccaaatgaatcaggtttatacaaaggaaaaaccaaaacaagtaatcttgcaaacaaacaaatcaagagccttttaacattgtgtgctgaaagtgctatccagcacaatcctgaaatgaggttgtattatcaaagaaaagtagaggaaggaaaaaacaaaatgagtgtactaaacacgataaggaacaaactcattgcaagagtctttgcagttgccaaacgaaatactccatatgtagaaacattcgggtttgcttcttaaaaattgtattattttacttgctttaatcttagaata

SEQ ID NO: 6709 - DNA, 1388 bp, unidentified
  source 1..1388: mol_type = unassigned DNA; note = element_a6c8aac
  misc_feature 1..2: note = core
  misc_feature 3..87: note = LE
  misc_feature 88..1119: note = CDS
  misc_feature 1120..1388: note = RE
  misc_feature 1096..1375: note = bridgeRNA
agatggggtggttgccgccctccctgacggcatcaagatgtgccagcgtagtttgggttcaagctacgaacggagaggacggcaaccatgagtatcgatacgatgattggtgtggatctggcaaagtctgttttccaggttcacggggcgtcgatgaacggcgagatgcggtttcaacgcaaactgtcgcggcaggcttttcccactttcatggcccaacagccagccgccgcggtcgtaatggaggcttgcggtagcgctcattactgggcgcgtgtgctgagcggatttggtcacgaagtcagactgatcgcgcctcgctacgtgcgcccatttgtgaagcgccagaagaacgacgcagccgatgccgaggcgattgtggtggcggcccagcggcccgagatgcgctttgttgaacccaagagcgaggctcagcagagcgctgcgatcctgtatcgatcacgccagcgccttgtgcgtcagcggaccgagacggtgaacgccttgcgggcagctttgtatgagttcgggcacgttatccctcagggcatccggcacgtcggtcgcatccgcgcgatcctggaggcgcccaacagcgacctaccggcattgatgcgcgaggagtgcctcgcgatgctcgagcagcttgctgtgctcagcggctggattgatgcgaagaccgcaaggatcaaggaactcgcagccgccacgccggtgtcgaagcgattgcagaccatgcctggcgtcggccccttggtggcaatggcagtggagaccttcgcgcctgacatgacgagctttcgcaacggccgtgactttgcggcgtggcttggattggtaccgcgccagttttcatcaggcggcaaggaacggctcgggcgggtcaccaaggccggccaggccgatatcaggcagatgctgatcattggtgccatgtcgcgattgaactggatgggacgcaaggcgatcccggaaagctcatggctggcgcgcatgatggcccgtaagccgcgcatgttggtcgccatcgcactagccaacaagatggcgcgccagatttgggccatgctgacaaagaacgaagactacaagaatccgatgccggtcatggctgcctgataccaggctccccagacaggctggatggaaggggtgtgagaaggcgacgacccgaatgggcagaatgatcgaacagatctggatcaggaaaaccagttcaggactctgagcaaatcgagctcgccaatgagatttggacctgatccgcggatcaccataccggccagcggtccctgaaagcgccgcaatctaggcctgacagaagaccgcactcgatcaccagttcaaaaggtcagaaaccctcttgcatcacgggcggcaaccacaga

SEQ ID NO: 6710 - DNA, 1462 bp, unidentified
  source 1..1462: mol_type = unassigned DNA; note = element_a6ce69d
  misc_feature 1..3: note = core
  misc_feature 4..466: note = LE
  misc_feature 467..1444: note = CDS
  misc_feature 1445..1462: note = RE
  misc_feature 26..236: note = bridgeRNA
cccgttaccttttaggtgtcactgttttccgtcaggataggtagtgctgggaaccggctgaccccggcatgatgtctgcccccagttgtccatgatccgggggtgttgtcactgggatcagtctggttcgtttggatcgctgatagaagcacgctctgaatactgtggggctgcgtaacgtggatgtgagcgaacgaaccatcggtgacctggtttgtgcttaagagaccgaagaaggtaaccgatgcagccacaagtatttcttggcatcgatgtcggcaagacagaacatcatgccaccgctgttgaccatgatggccaggtagtgcatgacaagccattgccgcagtccgaaccgaagatccaagaactgttaacagctcttgcggccaagcatgaacagctgctggtcgtggtggaccagcctaaaaccataggcgcgtgagttttcgcggtagcccaacaaatggggattgccgttgcctacctggcggggctgaccatgcgccgtgtcgctgatcttcatccaggccaggtgaagaccgatgccagggatgcttacatcatcgctgatacagcccgcaccatcccccacacactgcgcgggatcactatcgcggacgaacacatcgccgaattgtcaatgctgtgtggcttcgatgacgatctgaccgcccagctgaccggggtacgcaatcggctgcgcggcctgctcacacagatacatcctgcccttgaacgggtagtgggaccgcgcctggcccatccagcagtagtagatatgctcagccgctatcccactcccgcagcactgcacgaggcaggacgcagccgcgtgagaacacgattgaagaaactcgcaccccgcatggcggcccgcctggctgacgagatctttgcagctttggccgaacaaaccaccatcgtggccggaacaaacactgccgggcacatcatcagccgactcgccgctcagcttgcacagctgaccgagcagcgcgccgatattgaagctgagatcttaacggtggtcgatgctcaccctcgaacctgcgtcctgacctctatgcccggcatcggggtcaggacagccgcgcgtatcctcacagaggtcgtcggcaagaacttcaaatccgtcgcacacctagcctcatacgccggtatcgcaccagtaacccgccgatccggaacttccattcgcggtgaagcaccctccagacgcggaaagacaaccctcaaacgcgcactattcctatcagccttcgcatctatcaaagccgacccattctcacgtgcgtactacgacagaaaacgtgccgagggcaaacgccataaccaagccatcatcgccttggccagacgcagaaccgacgtcctatacgccatgcttcgcgatggcaccctttacgaaccccgccccacgcaacaagctccagcagcttgacgaaaactatagaagcac

SEQ ID NO: 6711 - DNA, 1256 bp, unidentified
  source 1..1256: mol_type = unassigned DNA; note = element_a6d1541
  misc_feature 1..2: note = core
  misc_feature 3..234: note = LE
  misc_feature 235..1233: note = CDS
  misc_feature 1234..1256: note = RE
  misc_feature 58..212: note = bridgeRNA
taccttagatttgcatctgtggggtatggataaaatagaaaggataaatttgtgatgccaagaaaggaagcaggaagtgcaccagtttcgattaaggagaatataagcttcatttccataagcggacttcctgcttgtttgaacccaggcccaaatagtaggttaacatccattgttaaggtaattaggttaagttcaagacctttcaggtagaaattcttaaaagacagaaacgtggaaaatttttattttatcggcgtggacatttcgaaaaagaaactggacttctgtgtgatgttcgagggaaaggttgtgcatgaagaggaaacagcgaatcaccagaatgccattatgtcattgatacgtcatttggagaaagattatgggatagacggcagtcgtatgcttatctgtgcggaacatacgggacaatacactttccctttggcttgtgcctgcaaagcggcggaatgcaagttgtggcttgaaaatcctgctgaaatcaaatattcctccggtattcaacgaggaaagaacgacaaggtggatgccaagcgcatcgctgtctatgccagccggtttcaagacaaggttcaatactatgagcgcccctcggaggatattgaaagattaaaacagctcgaatctgaacgtagcctgtatgtgacagatttagctaaatacaaggggcagttgaaggaccagagggaatatatgccgacagcattgtacgaacgaaaggtgaagcgtttgacggctttgatggagaacttggagcaagctatacaagccattacgaacgaaatggatgaggtgataacctcctgtccggtactgtctcgtcagatggagctgttgatgtccatagatggagtagggcgtgtggtggcaaccaacatgataatcacgacggaggcctttactcgcttcgatgatccgagaaagttcaactgttatgccggggttgcccctttctcttattcttccggaacttcccagcaatcgaaagcaagagtatcgcacagggccgacaaagtgatgaaaagactgttgcatatggctgctgtagccgtaacacatcggaatggaggagaactgaagaagtattatgacagaaaagttgccgaaggaaagaacaaaatgtccgtaataaatgcgttacgagcaaaaatcgtggccagaatgtttgcggtcatcaaaagaaatgagttgtataaacctattttatcgtaaataatttgcaaaaatcatagtag

SEQ ID NO: 6712 - DNA, 1565 bp, unidentified
  source 1..1565: mol_type = unassigned DNA; note = element_a6d8f8c
  misc_feature 1..2: note = core
  misc_feature 3..246: note = LE
  misc_feature 247..1422: note = CDS
  misc_feature 1423..1565: note = RE
  misc_feature 3..226: note = bridgeRNA
ctcgtattatatagtagtagtgtttatagaccctctccaaggtctgtatgctatactattggagatactgtggattggtttatttttcctaccactcgatggtttaagaaaggctccaaccacagtctctttgtatatttgttaatcagttagataccgcatgacggtttatttagaacgaggttacaatcgcaaggagttcctgtggctctaaacagtatcatatttattcaaaggagttttctcatgatttacattggaattgatgttgccaaagacaagcacgactgctttattacgaactcagatggtgaaatattatttaatccctttaccatctcgaacaatcgggaaggttttgaaaccttatttcaaagaattaaatctgttgccgaagatttttctaaaattaaagtaggactagaagccactggacactacagttacaatcttctgggatttcttcttgataaaggtttgccgacctacgttatcaatccgttacataccaatctttacagaaaaagtcttagccttagaaagacgaaaacggataaagttgatgcccatacgattgctacaatgcttatgtctgatgtgaacttaaagtcctactcagacatatcttaccacaacgaggagcttaagtcactaactcgctatcgctttgataaggttaaggaacgggcgaaactgaaatcttcggtttcccgacttgtaacaatcctcttccctgaacttgagcagctggttcctgccattcatatggcttctatttatgctcttttatctgaatttcccagtgcttccgctattgcccattcacaccttacgaggctaacccatctcttatctaccgcttcaaaaggacactatggaaaagatactgcaatcctttttcgtgaagctgcaagaacgtctattggctctcatatgcctgctaagtctctggagttaaaacataccatcaaactcattcaggaaatcacttccgagattgatgaaatcgaagcggacatcaaatccatcatggacagcattcattcacctatcttgacgattccaggtatcagctatcgtatgggagccatgattattgctgagattggtgatttcagcagatttgacgctcccgacaagatacttgcctatgccggaatgtctccctctacttatcaatcaggacaactggaatcttcgtattctcacatggaaaagcgtggatcaagatatcttcgttatgccttatataatgcaacaaagtatgtttgccattgggacactacctttgccacctacctggagaagaaacgtaccgagggaaagcattataatgttgccctgtctcatgctacaaaaaaacttgtcagggtaatttttcagttagaaaaatcaggacaggattacatcaaatcagcttagttttggttttaaatatctcctttttgagcacctataaagatgctctgtttgtcatgcggttttcaatgtacaaatctacctgaaatgcatttctgcaatttattcaaaaaattcatttaaggacttgacatttaatagttagt

SEQ ID NO: 6713 - DNA, 1413 bp, unidentified
  source 1..1413: mol_type = unassigned DNA; note = element_a6e8011
  misc_feature 1: note = core
  misc_feature 2..218: note = LE
  misc_feature 219..1238: note = CDS
  misc_feature 1239..1413: note = RE
  misc_feature 16..230: note = bridgeRNA
ctgatggagagtgaagggcacgcgttgcgggctcgcccgtagcgtcaggggttctggcgagctggctctgtaagtgcctgccgctctcgggttggctgaagagcgaacagcttgctcgccagtgctccggccacggtgtggctcgaaagaggcgagagcaccttcttcatcaggagtgcccccgtggtgtccaaccccaaccacgaggaggcagacagatgtcggtgctgatcggcgtcgacccccacaagcgatcgcatcaggcagtcgcggtcgacagagacgaaagacggctcgcggagctgaatgtgcgcgccgccaaggaccagacccaacggctgttggcctgggccgcccagttccccgaccggcgctgggccatcgagtcagcggccggtctcggctatctgttgtcccaacagctggtcgccgccggcgaggaggtgctcgacgtgccggcgaccttggcagcgcgagtgcgcgtgctgggctcgggacgctcgcagaagaacgatcccaacgacgctttctcgacggccatcgccgcgctgcgccagcgaggtctgcgccaggtccgagccgacgaccaccgagccatcctgcggatgctggccacccgccaccacgacctgggggcgctgcgcacccaggctgcgtgtcggctccatgcgagcctcgccgcgctcattccaggcgggttttccgggcgtttgtcggccaagcgggccgggtcgttgctcagggggatcaggccgacagagggcgtgaccgccgagcgcaaggcccaggccagcgagctcgtggccgatcttcgccgtctcgacgctgccatcgccgccacgagaaagcgcatcgaggtggcggtggcggcctccaagacctcggtgaccgatgtctacggcgtcggccccgtggtggccgcaatcgttgtcggccacgcgggcgacgtgcgccggttctggacccgcaaccacttcgcctcctacaacggcaccgcacccctcgaggcgtcctcgggtccgcgcaaacgccaccgtctcaacccccgcggcaaccgccagctcaaccacgccatccacatggcggcggtgacccagatccgcaacgacacgccgggtcgcgcctactacgagcgcaagatcgccgagggcaagacgaagaaggaggcgctgcgcgctctcaagcgccgcatctccgacgctgtctatcgccagctgctcgtcgacgccgaccgataggcgcgggcccaggaggacaaccagggacgactcccaagaccagcgtggccggctcacaccctgaacaccggctcttcggctaggtcactgcccgggcccgacaaccaacgctacgccgccatggcggcggctgcttcaacgcgtcccaaagatgggtgttgacacaaagaggctt

SEQ ID NO: 6714 - DNA, 1441 bp, unidentified
  source 1..1441: mol_type = unassigned DNA; note = element_a6e9a85
  misc_feature 1: note = core
  misc_feature 2..227: note = LE
  misc_feature 228..1427: note = CDS
  misc_feature 1428..1441: note = RE
  misc_feature 12..239: note = bridgeRNA
ctactagacgattccgttagggccgctgtctggccagactcggtctaggtgctcggcgggaagctctctttgcggctgcccacccacgttgagggtgtggctcactttcggtctgcatcccgccgggcgccgcgacgaggcgtggctcaagaagggactgccctgctcgtagtagcaatgcccacctcgccgtcccacattggaacgagcacaggcgggagcagcacatggagcacgtgatcatcggggtcgatccgcacaagctgtcggccacgatcgaggtcgtcgaccaacgcgagcaactacttgggtcgggtcgcttcgccaccgaccaggccggctacgccgcgatgcggacctacgccaagatctggccccatcgggtctgggcggtcgagggggccaacggtgtcggacgtcccttggcgcagcggctgcttgagtcgggtgaacaggtggtcgatgttccagctaagctcgctgcccgcgtgcggctcttcgacaccggccataaccgcaagaccgacgcgcatgacgcgcactcgatcgcgatcgttgcggtacgcacgacgaccctgcgggtgctgcaggtcgatggcgagctcgaggcgttgcggatgctggcggaccggcgtgaggcactcaccaggcgtcgagttcagaccgtcgatcggctgcaggccttgctggcagagctcctgcccggacaggccaaacgcgacatcaccactggccaggcacgagcgatgctggccactgttcgcccgcgcgacatcgccggcaaaacccgacggcgcatcgccgcggaggagttggccgagctggtcgcggtcgaagcgaagatcaagaaggccaccgccgagctcagggagatggtgctcgcccggggctcacgactgatggaccttcacggcgtcggtcccgtcgtcgctgcgcggatcctggccgacgtcggcgacgtggcccgcttcgctgaccgcaaccggtttgcctcctggaccggaacagcgccgttggatgcatcctccggcgaacagaaccgtcaccggctctcgcgagccgggaaccgacggatgaaccacatgatccacatcgccgcggtcacccagctccggctcgataccgatggccgggcctactaccgtcgcaaacgagcagagggcaagaagcccctcgaagccatccgctgcctcaagcgcaggatctccgacgccatctaccgccagctgatggccgacaccgggcgggccgccgacgggggtgctggcacgggtccgggagggcactgcggggcgtcccaagaatccagcgcggtcgacctgcccccgcacatcgacacttcggatcagccacttcccggacccgcaaccacgacgctacgcccagccacgccgagcgggaacccatccctcagatcgaccgcttgacaacagaagggagc

SEQ ID NO: 6715 - DNA, 1097 bp, unidentified
  source 1..1097: mol_type = unassigned DNA; note = element_a6ec347
  misc_feature 1..2: note = core
  misc_feature 3..204: note = LE
  misc_feature 205..1038: note = CDS
  misc_feature 1039..1097: note = RE
  misc_feature 3..180: note = bridgeRNA
cttgtatggttagacttgaaggggtggtgggacgaacagttcgcatctgactgcagcaacagtacagaccgtgggagacctcgccccaccccttccaccaaaagcgccgataaagaatgcttcgttcaagcgacgatagaaacaagcctgcgcctctgggtgaaacccctacaagccgtaaaaccttaacgtggagaagtgctcatggcaatgcgcgtttcgaagtcagtgataggcgtggatgtcgccaaaattgaactcgttacctaccaggcagactcggacctactcgctttaatacccaatgaaaagcccgccataaaacgctggcttaaaacgttacccagacctgctgcccttgctgttgaagcgacaaacatctatcacgtcgatctggtcgagctggcctaccaggctggtttcgacgtctacatcatcgatggttttcaactgagcaattaccgtaaaggtgtcgggggccgcagtaaaacggatgcatccgatgcccgtcttcttgcccgttttctaaaaaacgaaggtgaatgtctacgcccctggacgccgcctccagccgtctacggcaagctgcaaagccttctgcgacgcagagcctcactgattcaggccaaaaccagcctgacccagagctgggcgaatgacgccagtttgaaagcctcatttgcagccttcctcaagtccatcgagcggctggacctgttggtcaagaaaaagctcaaagacgccctgcgtgaagcgggtctgctggaacaagttgcccgctgtcaggccgttgaaggtatcggttttcttaccgcgacggctctggtcatggcttacagccgaggcgacttcaacagcagcgactcatatatcgcctttttgggcatggatctgagggtgactgactcaggccaaaaaaacggccgcagatcgctgaccaagcgagggtgctcggaaattcgtcgattgctgcacaacgcagctatgtcggctagccgaacgagtgcatggaaagagttctacaaccatcatcgctgaaaaatcagagcgaatatcaacccagagggtgcgttatggcttgatcaaaaccatagaat

SEQ ID NO: 6716 - DNA, 1391 bp, unidentified
  source 1..1391: mol_type = unassigned DNA; note = element_a6eead6
  misc_feature 1: note = core
  misc_feature 2..75: note = LE
  misc_feature 76..1101: note = CDS
  misc_feature 1102..1391: note = RE
  misc_feature 1157..1388: note = bridgeRNA
tactgagatggacccgacgccaccttcgtcggaaactggtcatccttcacaacttgccgcttccggaggttcatcatgaacgttgacattctgggcatcgacctggccaagcgcgtgttccaactacacggggccgatcggcgcggtcatgcgctgcaccgagccaaggtcagtcgacctgaattgatggagtcgatccgacagctacagccgcgcatcatcgcgatggaggcctgcagctccgctcaccactgggcaaggcagttccaggcaattggtatcgaggtcaggctgatcagccctcattacgtcaaacccttcgtcaagacaaacaagaacgatcgcaacgatgcagaggcgattgtcgaggcagcatgccgtccgagcatgcacttcgtgccagtgaagtcagttgagcagcaagacatccaggccatccaccgcacgcgcgatttactcgtgcaccagcgcaccgccctcatcaaccaggtgcgagggctgctcgctgaaagaggattcgcggtggcgcggtctcctgcagcgttcaagaagtccgttcccgaaatccttgaggcggcacaaggcgagttgaccagtcgctgccagacgttgcttcggatggtgttggatgggttccgcgctatcgaagcccagatcgcccagacggaagactggcttgaagcagtcatgacacagtccgcgctgtgccagaagatcgcagccatccccggcgttgggacgatgaccgccaccgcgatggtggctgcggtcggcgatgccaaggcattcaagaacggtcgtcatctggccgcctggattgggctcgtcccacagcagcactcgtcaggcggaaagtcacgcctgctcggcatcagcaaacgcggagatgcctacttgcgaacgctgttgatccacggcgcgcgctcggtcctgatccgggtcgcctgccgcaaagacgcacgcagcgtgtggctgcaagaactgattgcccgacgcggatacaaccgcgccacagtagcgctggcgaacaagaatgcgcggatcattcaatccgtcctgagtggacctgagagctaccgcccttcaatggtggtggcatagcagaacactctccagcatgattcctggccggcaacaagcggccaacacccagtcctggttttgcgacgcttctcaaatgtgatgacacaaccggttagaccagcgttccgtgatcctgtacttcctctgggccgagcgatcaggccgaactgctgctaaggacggaacgcgcggatctcatcaaggctgcgggctcgcacatgcgttgcccaacaagcaagccgaatacatgtgtgcagaccgttgatcatcagacgagaggggcttgcaaaaggcgtcgggtccataca

SEQ ID NO: 6717 - DNA, 1910 bp, unidentified
  source 1..1910: mol_type = unassigned DNA; note = element_a6f6994
  misc_feature 1..3: note = core
  misc_feature 4..129: note = LE
  misc_feature 130..1413: note = CDS
  misc_feature 1414..1910: note = RE
  misc_feature 1592..1851: note = bridgeRNA
gagcattcctgtaatgaataaaaaacaaagaagaatgaactttgaaaaaataagtacctcctgataaaatacagagtgtaagtttaagaacttacctcgaattatcaaaataaacaggaggtacttaaaatgaagtatacacaaaatgaaaagattttgcaagtaacagaagacacattaattgcgggagtagacatagcaaaagaaagccattatgccagagcatttgactacagaggagtagaatatgggaaatacctaagatttgagaacaatagagaaggtatgacaaaattttttaaatgggcaaaagacttgatggagagacataagaaaaacaaactaatagtagggatagaaccgacagggcaatattggctatgttttgcccaataccttaaagacaataacataaaggtagtattggttaatccattccatgtaaagaggagcaaagaattagatgacaattctcccacaaaaagcgatagaaaagaccccaaaacaatagcaatgctagtaaaagacgggagatatgtagagccgataatacctgaaggagtatatgcagaattaagggtagcgatggacataaaagacaggttgaacaaacaaatagggatgacaaaaaatcaaataacaagatggttggacatatactttccggagtttaacactgtattttcagactgggaagggaaagcagcacttatcacattaagagaatttccaacgcctgagaagatagcaaaaaagagtgctgaagaaataatatcgatatggaagaaagaagtacaaagaggggtaggagaaaaaagggctataaagctgatagaaactgctaaggagagcatagggaagaagcagggcataaagatggcagaatacgagataaagactctcattgaacaatacgaatttctcaaaaaacaaattgaagaagtagagaagaagatagaagaattaatagttgagataccaggggttaaagaactactagaaatcaaagggatagggataaatacagtagcgggttttattgcagaagtaggagacattgagaaatatgaacacccaaaacagatacaaaaactaggaggattaaacctagtagagaatagctctggtaagcataaaggagaaacgacaataagtaaaagagggaggaagcgattgaggagagtactatttaatgcagtaatggccttggttgcaaaaaacgaagagtttcgtgaactacacaaatattacactaccagagcgcaaaacccgctaaaaaagaagcaatcactaatagtattgtgcaacaaactgataagggtattttatgtcatattaaagaaaggagtaaaatatgacccaatcaagatgatgaaggacataaagaggccagccttacaggaagctgcataaaaagtactaacatactatcaaatcaattaagggttaattatcttctcttcagctttaacttactcacatctaaaaagctgacccttaataggaaaattaaaagtgtgaacgacgtgacataaaaggtaaagtaaggaataaaacaaaaacaactaatcaagagatgggatattgacaacaagagcgggaattgtcatacaagaataatcaccatacgggcaaagaccctgcaatggagcagaaatgacatccacctcatggcaggtagaacgaaggaattaaggactaagatccagtgagacatgggagggtaaaccccatgagataagtggagctatcccgccataatatggaaataggatataaggtttattaaacttacctatttaatgggtaaataagtaagaaatggtaatataagccatgagatgctcttgttgtgatgagaaatttaaagaaaaactaagatattaagagaaaataaaagataatagagg

SEQ ID NO: 6718 - DNA, 1347 bp, unidentified
  source 1..1347: mol_type = unassigned DNA; note = element_a6fad0c
  misc_feature 1..2: note = core
  misc_feature 3..75: note = LE
  misc_feature 76..1101: note = CDS
  misc_feature 1102..1347: note = RE
  misc_feature 1119..1344: note = bridgeRNA
atgaaatggctacccccgccgccccctgtgatcgcccactaagctttcgcagggggctcatcggagaccgttgccatgaacaaagtagctattgccgccatcgatctgggaaaacactctttccatctacacgcgcaagatgatcgtggtcatgagctttaccgcaaaaagtttactcgtgcggcgctcatgcagcacctgatgaatctcgaaccctgcaccgttgtgatggaagcctgcggcggagcccacttcatggcgcaggaggtcgcgaagctgggacatacgcccaagctcattgccccgcatctcgtacgcccttacgtgaaaagcaacaaaaacgacttcgctgatgccgaggcgatctgcgaggcggcgactcgtccaacaatgcgctttgtacaccccaaaacccaggctcagcagctgctggccatgctcaactcgacacgcgattcgttcatcaaagagcgcaccgcgaccgtcaatcggattcacgcagcgcttttggaggtcggcgtcagtctggccacaggcttcaagcccatcaaagaactgcccgctcggcttgaagcgagttcaattcctgtgcccatcaaaaaacttctgacgaggttgcaggagcacttcacctatctggatgggcagatcaagacgctggacaaggaagtggaatgccaggccgccgaagatgatctggcggctcgtttgatgaccatgccctgcgtaggcccgatcacctccagcgtcctggctgccgaattgggcgatggcaagcagttcaaatgcggccgaggctattcggcctcaatcgggctgatacccaaacagcattctacgggcggcaagaccgtcctgctgggcatcagcaagcgaggtgatcgcaaccagcggcgcctgcttgtccaatgtgcccgtgtttacctgatgcaactggaccgacagaaaggctggctggcggactgggtccggcagctattggcccaccatcactccaaccatgtggtctgcgcgctggccaacaagctggcgaggatcgcctgggcgattgcggcccaccacaccgaattcgatgcagggccagccgcgatgaacgcctgaccctgctgtcacccgagcaccacccacctggttttgcgatgctggataactgatgacgtgaacggccaaccggcctgacgacaaccctgagctcccacacggctgaaaggccgttcgaataattaggatcgtcgggcatcgattctcatcgaggcgcggggccacaaccccactcagacgccggatagatgaaagcaagccaaacacgcatcaaaaacagtattgcagaaaagggggtaaccatag

SEQ ID NO: 6719 - DNA, 1422 bp, unidentified
  source 1..1422: mol_type = unassigned DNA; note = element_a708c35
  misc_feature 1..2: note = core
  misc_feature 3..123: note = LE
  misc_feature 124..1179: note = CDS
  misc_feature 1180..1422: note = RE
  misc_feature 1183..1422: note = bridgeRNA
gaatgaaatgaacgcgtcctacccagacgacgggaccaggagacgtgcctgcttgcaggccaacagcgtcaatgtgttcaggtggaaaatccacgaatatgccggcaaccggaggaatccgaaatgacctgtacgactgtgggcgtggatatcgccaagaacgtgtttcaggtgcattacatcgacgaagagacaggcgagatcgtgaacaagccgatcaggcgcgcaaaattcatggagcacttcgtgaaccgtgccccgtgcctgatcgggatggaggcgtgtagtggagcgcaccactgggcgagacagcttacgaagatgggccatcaggtaaagctgatgcctgcggcgttcgtgaaggcgttcaatatccgcaacaagaatgacgcagccgatgcgcgagcgatctggctggcggtgcagcagcccagcaagccgatcgcagtgaaaaccgaagtacagcaggcaatgctggcactgcaccggacgcgggagcagctggtgaagtttcgcacgatgcaaatcaacagtctgcggggactgctgacagaatatggcgaggtaatgggtagaggccgggccgcattggacaaggcgataccggatgtgctggcaagggttgccgagcgtcttccggcaacgttaatcgatacgctgcgcgagcagtggacagggctcgcgaaactggaccagcagattggcgccatcgagcggcggatgcgcatgggggtcaaggaagaccgggctgtgagagcgatcagcgatatccccggtgtcggaatgcttacggcgacggccgcagtttccatgattggcgatgcgaaggtcttccggtcggggcgcgagttcgctgcgtgggccgggctcgggccgaaacagacgggctcgggcggtaagacgaacctgcacggaatcagcaagaggggcgacacgtatctgcgcacgctgctgatccacggcgcgcgctcgggactgacgcactcgaaggaaccgagccagtggctcgagcagatcagcaagcgccggccgccgaacgtggtgatcgtggcgctagccaacaagatggcgcgaacgatctgggcagtgctggcccacgatcgaccgtaccagaggggctatatgagtttgaaaccggcaccaacggttgcactcgggaaggaatcaacttttagataggctgttaccttaaacggttgcgcaggaaatcgtatgtgatgacaagccaggtaggaccgggattcgctaagcctgaatgataggtcgagcatcaagctcgtcagttgaatgaggtgcgagtcagcggatttcataggggcccgcagcggtactaccagctgcaacaaggccggatatagatctgcaagccagtctgtctgccacagcacacgataacttgctcaaacgggacgcgttcatata

SEQ ID NO: 6720 - DNA, 1399 bp, unidentified
  source 1..1399: mol_type = unassigned DNA; note = element_a70ddb3
  misc_feature 1..2: note = core
  misc_feature 3..288: note = LE
  misc_feature 289..1128: note = CDS
  misc_feature 1129..1399: note = RE
  misc_feature 1105..1386: note = bridgeRNA
agatggggtggttgccgcccatctccgacggcatcgcaatgtgccaatgtgccaatgtggcgatgttgaaacccacgacaggaaaggacggcaaccatgacagagaatatgatgatcggggtggatctggcaaagaacgtttttcagctccatggcgcttcaagtgcaggcggcacgatgtttcgtaagtagctgacacgggctcagttccggctcttcatggcggatcagcccgcgtgccttgtggttttcgaagcctgtggcagcgccagttactgagcgcgggaaatgacggcgcttggccatgaggtgaagctgatcgcgccgcaatatgtgcgcccattcgtgaatcggcacaagaatgaccgtgcggatgctgaggctatcgtcattgccgcacggcagcctgaaatgcgcttcgtggagccgaagacgactgagcaacaggccaaggcagtgctttttcgcagcggggagcgacttgtccatcaacggacggaactggtgaatgcccttcgggctgtgctctatgaatacggccatgtcatccccaaagggatcgggaagctcggaaatgttcgggatatcgttgaggagcccaatagcgacctcccggaactggtgcgggaagagtgccgggatctattggagcagatcgccgagaagtcgagctggatcgataagaaggccacgaaggcaaaagtgcttgccacagaaacggacatggcccgtcgcctgcaaacgatgccaggcgtcggtcccctgaccacattggcgatcgaggcctttgcgccagcgatggagagcttcaaatgcgggcgagattttgcggcttggttggggcttgttccgcgccagcattcgtcgggaggaaaggacaggcttggacgagtttccaaggccgggcaggcagatatccgacgcttgctgatcatcggggcgatgtcccggctgaactggatcgggcggaagcctgttcagccggaatcctggctcgcgcgcatgctcgaccgaaagccgagaatgcttgtcgcaatcgtcttggccaacaagatggctagggcaatctgggccatgttgaccaggaagcaggattatcaggttccggcaccagcaatgaccgcatgacgttaaaacaagcgacggtcttgcgctgatgccaacgatgtgagagagcgatgaccagaatgggcaaatgatcgaacagagccggatcgggaaaaccagttgaaccacttgagccgcaaagctcggccggtagatttggacccgctccgctcatcatcatcccggcccgcggcaacggaaaagccgcaaatcagaggcctgacacaagaccgcaatcgatcacagcaccaatgggtcagaaagctcttgcattagcggcggcaaccacaca

SEQ ID NO: 6721 - DNA, 1370 bp, unidentified
  source 1..1370: mol_type = unassigned DNA; note = element_a70dee1
  misc_feature 1: note = core
  misc_feature 2..237: note = LE
  misc_feature 238..1347: note = CDS
  misc_feature 1348..1370: note = RE
  misc_feature 75..234: note = bridgeRNA
ctgtgaggatcatggcgtgctgtcccggatcgcggtttgacccgtatgagagcagagcgcagtgtcctggcttggatctgtcggctgtggtgcggggcagtgcttgccgtcaccggtccggcggggcgtgtcccaataggggccttgccgtgaacaaggcgccatcacagctttgaccgcccctgccggcccggtgttggccatcgtgtgcccgtaccgaacaggagtccgacagccgtgaccagcatgcctcaggcggtagcgaccgaccaatccgacacctgcgccgaggaggtggtgctcggagtggatacccacaaggacacgcatgtcgccgccgtggtgacggtgctgggcggggtgatcgaatgcaaggctttccccaccaccacggccgggtatcggagtctgctggcctgggcgcgcggccttggcctggtgcaccgagccggggtggaatgcaccggctcttacggtgccgggctgacccgctacctgctcggcgagggtgtcgaggtggtggaggtcaaccagcctgacaaggcaacccgccgtcgacggggcaagaccgacaccatcgacgcccaagccgcggcgcaggcagtgatttccggtcgcgccactgcgaccgcgaagacctgcgatgggccggcggagatgacccggatgctcaagctggccaaggattccgcggttaagtcccgcacgcaggcgatcaatcaactcaaggccgtgctggtgtcggccgacgccgggctgcgggactcgctggccgggctgagcaccccgatcttgatccgccgctgcgcggaactggccccggccgatcgcgatcactgtgccgatactgcgggcgtcgcccgctacaccctggcgctgctggccgagcgcatccaccggttggccgaggagatccgcgaactgaaccaccgattgaccaccgtcatcaacgcacacaggccgcaactgctccagcgggtgggcatcggcccggacaacgccgccgccttgttgattaccgccggcgataaccccgaccggctcggcagcgaggcgtccttcgccgccctgtgtggtgccagtccggtcgaggcgtcctcggggaacacccagcgcatgcgcctcaactacggcggcgaccggcaggccaacgccgcgctgtatcgcatcgtgctgacccggctgcgctggcacgcccccacccgcacctacctcgaacgccgcctcaccgaaggcaggacccgccgcgaaatcatccgctgcctcaagcggtacgtcgcccgcgaggtctacccgctcctgcggccagctcctgctgtcgaacacgcggctcaagcggcgccatgaccacttgacgaacataggggcat

SEQ ID NO: 6722 - DNA, 1399 bp, unidentified
  source 1..1399: mol_type = unassigned DNA; note = element_a7128a6
  misc_feature 1..2: note = core
  misc_feature 3..64: note = LE
  misc_feature 65..1120: note = CDS
  misc_feature 1121..1399: note = RE
  misc_feature 1119..1387: note = bridgeRNA
tgttgggttggacggctcccagcggcatcgcaatgtgccaaggtgatttcgttgtaggactcacatgaaggagccgcccgtggaacagattattcgcatagggatggatacgtcaaagaacgtttttcaactgcacggtgtcaattcggcagaacagccggtcttgcgcaagaagctgacgcgccgggagatggtccggtttttcgagaagttgccaccgactgtcgtcgccatcgaggcctgcggcagcgcgcaccactgggcgcgtcttctcggttcgtatggtcacgaagtgaggttgatcgcaccgcaactggcaaaaccttacgtcaagcgcggcaagaatgatgcggccgatgcagaagcgctatgcgaggcgatgagccgccccacaatgcggtttgtgccggctaagagcgtagagcagcaggccgccctcatgctcatagcgatgcgtaccaggctcattcagaaacgcacgcagctcgccaacaccatccgtggctttgcggcagagttcggagttaccgcagcaacgggcatgtgccggatcgagcccctgctcgaacgcatcgcggcggacgaggcgatcccggaactggcacgggaattatttgcgcttcatggcagggaatattcgcagctcctgatggaaatcgagcgggtcgaagcccaggtcatggaatggcaccgcaatgacgaatgtagccaacggctcgcaaaaattcccggcgtcggcccaatcggcgcctcattgctaatgatgaaaaccccagacccgcaacagtttaaatccgggcgagactttgcggcctggatcggtttgacaccccgcgatcattcgactgccggcaaagtcaggctcggggtcattacacgagccggtgatgagctcttgcgcagtacactcgtggtaggagccaccgccgttgttcagcacgtccgccgtaccggaggcaagaatgcctctgtctggctcttgggatcgctcgaacgcaagaagcccaaactcgttgcggtggcgctcgccaacaagatcgcgagaatcgcctggaaactgatggtgagcggtgagcaatatcgaagagcagaactatcgccgccggcagtggcagcgtgagagattggccaggcacgatgagcagccgtttgctatcgtactgagctgatgccaaatcttgcaggaattgagcagatggtgcgatcgatcgatccaaggcgtgtggcattccatcggcaccaatggccgttcgaggccgctgaggtgtttggaactcatgctgcggaaaccatcttggccagcgaccatgtgcggtcgcacccacaggccggacatatggacgcaagcgatccgatcaaattctccgcacagcccttgcaagagggagccgtccacata

SEQ ID NO: 6723 - DNA, 1434 bp, unidentified
  source 1..1434: mol_type = unassigned DNA; note = element_a7143ca
  misc_feature 1..2: note = core
  misc_feature 3..216: note = LE
  misc_feature 217..1434: note = CDS
ctcctacgtaaaagtatggtataaatattttagtcaaaaaataggcagggcaggacgacttagtgtcccttggctttcaagccattacgggagtctgtcgcctgcctttaaccatgataagttggttgggtttttaaccctcgtcacactggaggtttggttcagcaggcccctgccctcgccttttaacctattcaatcgaaaggaggttttagtatgtctcaaaacttctccatctttgtcggtattgacatctccaagcataagttcaacgcctgtgctatccaaaatcctaattctatcatcttcgaatctgctttcgatatgtccaaacaagggttttcctcctttgttcaaaagctctccgttttccctaagtcttctgtccttatcgctatggagtctactggctgttaccatcttaaccttctttctttcctctctctcaatgatttctcttgtgtcgttcttaatcctttgcttgttaacaaatctcttcccgttgggcttaggaaaactaaaactgacaaaatcgatgctcgctctattgctcttaccatcttctatacccatcacattcttcctacttcttctttcctcaactcagattttcgggatattgcaaggaaaaaggaaagcatcactcatcaaatctcaagagtcaaaaacgacatcgaaaagcttctttctctcctcttccctgaacttgaaaaagtgaccaacatctacaatgatgctatcttggatttgctttcttctttcccttctgctaaagctatccaaaaagcctccattgattctctacgtgttttcttttcaaaaacaatcggtagaaagttaaaacttaccccagaaactcttaaagagcttgctaacaactccatcgctcagtattggccagtgaaagagaagattcttattcaaactatcaaggaacttcgatttttacaacagcaacttaatgagtttgatgagatgctcaaagaatattgcaaatgtgcttcgcttaatcaagatgttgaaatactcacgtccattgacggaattggtgaaaatagcgcactgtattttcttgccgaagttggcgatatttcaagatttagcacttacaaaaaactaattgcctattgtgggcttgacccaagcgtagatgaatcaggcaaacacaaaggagaaagccgtatatccaaaaggggcaatgcacacctgagacgaataatttggctgatgagtgtgaatgtagtgagacacaacgaatattttaaagcatattttcaaagaaaacgagcgcaagggttagtatacaaaaaagcgatgatgagtgtagcgcacaaattgctaaggacgatatttgctatgatgaaaaagcgcgagaaattcaacatcgatcatacattttcgtcttctactcaaaatttaattttacatagttga

SEQ ID NO: 6724 - DNA, 1794 bp, unidentified
  source 1..1794: mol_type = unassigned DNA; note = element_a71b931
  misc_feature 1: note = core
  misc_feature 2..112: note = LE
  misc_feature 113..1390: note = CDS
  misc_feature 1391..1794: note = RE
  misc_feature 1463..1716: note = bridgeRNA
gcattcctgttaagtaacaaataaccggtttgcaaaaaatgagtgccacccatagaataatgattgttaactggcaggttaattaatcatcgttcaaaggagacacccacaaatgaattataagcagaatgaaaaaatcaatcaagtaaaagaatcaactttggtagttggaattgatatcggaagcacaacacagtacgccagggcatttgactggagaggcattgaactcggaaaagtctttacgttcagcaacagcagagaaggttttgaagcctttaaagcatggatgcagcatttgcaggacaagtacagaaagtcagatgtaatcgtaggtatcgagccgacaggtcattactggtttgaccttggcgcttatcttgaggatgagggcatcctcctggttatggttaacccttatgcggtaaagcagaccaaggaactggatgacaacagccaaagcaagaatgacaggaaggatccgaaggtgatcgcaaagctggttaccgagggccggtattctgcaccatatacaccggatggtgtgtatgctgatttaagaattatggtggccaatcgtaagagactcatcagggagatgacccagatcaaaaacagatttgccagatggttcgccatatatttccccgagtacacagatgtgtttggggactatgaagcacagagcagtatgctgcttctaaagaaagtttgtactccggaagcaatcgtggaactgggagccgagaaaatcaatcaaatctggcgtgatgcaaagcttagggctgtaggaatgaaaagggcaacgaccctgtgtgagacagcaaaacgcagcatcggcttaaagaaaggctcttcggctgcccggtatgaaatgaaactgttgctcgaggattacgaatacaaaaaggcacagcttgacgccgttatggaggagatagaaaagctgtgcaggaagatacccgaaagcgagcagatgcttgccatcaaaggtataggagtgatcacggtagccggatttctggcagaagtgggtgatgtgaggcgtttcgaatcacccagacagatacaaaagctggcaggactctcattacgggagaacagctctggaaagcacaaaggacagacgaccataagcaaaagaggtcggagtaagctgcgggcagtactgttcaatgcagcaattccgctgatagcgaagaatccggagtttaagtcattgcatgagtattacacgacaagagcgaacaatccgctcaagaagaaacaatccgtgattgccatcagctgtaagctgataagagtcttttatgccatcctagcaaaaggagtgacctatgatgcacagaagttgatttctgacattcacaggcagccgcaggtagcgtaagaagaccaactgtgagattcaggagacgtccgccgtaaggcgctgaaaggaacagaagaatttcataaacatagagagccaagtcagatttatttccatcagagcagagactcagcgaaggagcatcatgacgcccctttatggataagcagaacgaaggaattaaggaccctgaagtaaaggagatcccgtatgacatgggaggttaggctgccgtaaggagttggggaaagaaaggccgatcataacagaataagacgacgtcttgttttgtgtaccctaaacatccgtatatccatgattcatggccaaggggaatgacatagacttagaagcaatctctatgaaaaaatgaaaatgtgagaaaaagcgagttaacaagagaaaaacaaagattattatgg

SEQ ID NO: 6725 - DNA, 1346 bp, unidentified
  source 1..1346: mol_type = unassigned DNA; note = element_a7229a4
  misc_feature 1..2: note = core
  misc_feature 3..83: note = LE
  misc_feature 84..1094: note = CDS
  misc_feature 1095..1346: note = RE
  misc_feature 1082..1333: note = bridgeRNA
tgatggggtggatggccccctcactgcaccgccgtgcgatgctgggggctgtcgaaggtcaccgaagcgaaggagccaccctgatgacaatgacgacgatcggtctcgacttggccaagtatgtctttcaggttcacggtgtcgatgctgaaggaaatgtgatcgagaagcgccgcctccgacgcggccaggtgatcgcgtacttcgcgtcgataccgtcctgtctggtcggcatggaggcttgtgcgacggcgcacttctgggggcgcgaactccgcaagctcgggcatgaggtccggctgatgccgccgcaatatgtgaaggcatacctgaagcgcggtaagaacgatgccgccgacgcggcagcgatctgcgaggcagttggccggccgtccatgcgcttcgtggcgatcaaggcagaagaacagcaggcggtgctcgtgatgcatcgcgctcgagacctgctcgtcagacagcgcacacaactgatcaatgctttgcgggggcacgcggccgagttcggcattatcggagctcagggccgctggaatatcgcgcgcctcctggtcaatatccgagagggctgtgccgtgccagaactcgcccgtgcaatcgtcgagatgctggccttgcaattggacgccatcagtgaacggatcgacgaggtcgatgcccggatcaatgcctggcacaaggcgagcccggtaagtcagcgtctggcaacgatccccgggatcggtccgctcatcggcactgccatcgcggccaccgtggctgacccggcagcgttccgaagcgctcgcgagtttgcggcatgggtcggccttacccctcggcagaaatccaccggcggtaagcagcggttggggcgcatcagccggcaaggtgaccagtacatccggcggttgctgattattggagcccagacgacgctgttacggtcgaaggcagcgcgagccaatccgtggatccagagcctgctggcccggtgtccacggcttaaagtagcggtggccctcgccaacaaaactgcgcgtatcgcctgggccttgatggccaaggaagaaagctaccggcagatggcctcggcatagatcgagggcatcagtcggcggaaacttgcaagagagagacagtgatggagcggtcgggcgcaccgacggagttggagaaacctggagaagtcaggggtgtcaaacccgaggatttgatgaggttccagcccgcgaacacccatcggggcctgcggccaaacgagccgcacgaagaggccggacacatgaccgcaagcaacccgcctgcctcaacacaatcttttcccttgcgagtcgggggccatccacaca

SEQ ID NO: 6726 - DNA, 1305 bp, unidentified
  source 1..1305: mol_type = unassigned DNA; note = element_a72b364
  misc_feature 1: note = core
  misc_feature 2..283: note = LE
  misc_feature 284..1087: note = CDS
  misc_feature 1088..1305: note = RE
  misc_feature 1100..1291: note = bridgeRNA
taatgggatggactacctcctccctctgaggttaactgaacaaaatatactcagcaggagcactatcatgaatgttatctatctcggtattgatctggctaaaaatgtttttcagctttgtggattaaatcaggcgggtaaaccggtttataaaaaacgcacggatcgtaaaacgttactacagaccgtcgcgaatattccggcctgcctgattggagtggaagcctccacgggcgcattttactgacagcgtgagttcgaaaaactgggacataaggtcaaagtgatcagcccccagtatgtaaaaccctttgtccgcgggcaaaaaaatgacggtaatgatgcacaggctatcgcaattgctctgatgcagccaacaatgcagttcgtaccacccaaaagccctgaacagcaggatattcaggctctgcaccgtgcaagacagcgtattgttaatcaccgcactgcgacagtctgtcaaatccggggactgctgcttgatcggggaataacaatcggcgcggcagtctcaagagttcgtcgtgctgttccgcttattcttgaagatgctgaaaatggccttagcgttagaatgcgcaggacgattgcagaactttatgatctctttaacgatcttggtcgtcgtataagcttttttgataaagaaattgatgctgtgttcaggcaatcagaagcctgccagtgcattgccaaagttaaaggcatcggccccaaaacagcaacagctgttgttgccgcgattggcaaaggaactgaatttaaaaatggtcgtcactttgccgcatggcttggtctggttccacgacagcactcgagtggtgacaggcaggtactgatgaatatgacgaaaaaaggcgacaagcatttgcgaaccttatttattcatggagccagggcagtcgttagagtggctgcaaataataatgagggttatttaaatcaatgggttaatcagctaaaagagcgacgaggatttaacaaaacgaccgttgcagtcgccaataaaaatgccagaattatttggtcaattcttcacaatgaaacagagtacagaccggcagtgtaatagcatacctttaaaagttgcaaagtattgaaaaatggccacaggttgaacctgcacaatcggaacctgactactatattggccttcgtggccatccagttgttgaggcgattgtgtgcggattacccatttgggcacagatatttctgatgccggatagatgtaagcaacaacctaaaacctgattcagtacttgcaaaacggaggtagtccataga

SEQ ID NO: 6727 - DNA, 1399 bp, unidentified
  source 1..1399: mol_type = unassigned DNA; note = element_a72d708
  misc_feature 1: note = core
  misc_feature 2..228: note = LE
  misc_feature 229..1230: note = CDS
  misc_feature 1231..1399: note = RE
  misc_feature 6..211: note = bridgeRNA
cttttatctttgcactatcaataggaagttaagagaaactctccgaattgttaaaaagaaagacagggacggtgaacttctctgttaactagtcacaaggactttccggggttacagtccgtctctgtcttatttgttgaacacatcaagctagatttctagacctgtatgtctactaaaagttttggatgcattcaactaacttatttaatcaataacagcaaagatatgcaagacctgtcaactaaacaacacttcgtgggctgtgatgtatcaaaagatacattggacttggccctgtatcaaccgaaaacggactaccgcaagttcgaacaagtgcagatttccaacgatacggagggattcaagcaactgctccaatggctcaaggcacggaagattaagaaaaacgaggtggccatagcttttgagcacacaggggcgtactccatcgcactggccgaatggctgcacaagaagaaaatcaccttcaacatgctccatccgctggacgtcaagaacgcatgttcccgaggcaggaacaagaccgatgaggtggatgccaaattcatcgccgactatgcctatacaatgcgcgagaagctcgctccctcaggtccggagcccaagaatatcaaacacctcagagagctgcgtaacgagcgcgatctgtgtgtccgctgccgcgcctcctatttgtgccagataaaggttcagactgaagcacagaccattgcgcgcatgcataagatggtcgactttatgaccgtccagatacatcagatagaggaagaaatcaagaaaatcatcgccgccgacgagaccatcgcgaccaattaccatctcctcatctccatcccaggcataggcatggtgaatgccgtcaacacaatcgtcgccacgggaaacttcacacgcttccaaacctcccgacaatatgccaaattctgctccgtcagtccgatggcagtacagtcgggcacctcggtacactcaggcaaccatgtctgcaagaaaggtcacaacgagttgaaagctaccctttcggaggcagcccgcagtgccatcatccacgatccgcaactcagacactactatcagcgcaagcgcagtcaaggcaaaagccacgggtgtgtgatgaatgccgtcaagttcaaactcatctgccgcatgttcgccgtgataaagcgtcagcaaccctatgtcaacaccgaatgctatcgtggctaagccggagaaggtacacctgtacttcctttgaccgattccggaacagagattggtcattggacaaatccatatcatcccaatgagagaacatcatcctgtaatgttaaaaacttgaactcgagaaaatgcaaatattttaacactttatccttgctcaaatcctagattt

SEQ ID NO: 6728 - DNA, 1380 bp, unidentified
  source 1..1380: mol_type = unassigned DNA; note = element_a730270
  misc_feature 1..2: note = core
  misc_feature 3..86: note = LE
  misc_feature 87..1118: note = CDS
  misc_feature 1119..1380: note = RE
  misc_feature 1148..1368: note = bridgeRNA
tgatgctgtggacggctcctccaccggcacgcgagtgccatgaaagtgggtgctgttaaggcccccacgattcagaggagccaatcatggcggcaattacgacaatcggtctcgacatcgcaaagtcggtctttcaggttcatggcgttgatgccaacgggcatttagtcatccgccggcagcttaagcggcgccatgtgctggcgttctttcagaagctaccgccctgcctgattggtatcgaagcctgcgcgacgtcgcattattggtcacggcaactgcaggctcttgggcatacggtgcgcctgatgccgccggcgtatgtgaagccctacgtcaagcggcagaagaacgatgccgctgacgccgaggcgatctgcgaggcggtcaccagagcgaacatgcggtttgtcgagaccaagacagccgagcagcagagctgcctgacgcttcatcgcacgcgccatctgttcattcggcagcagacctcagtgatcaatgcgatccgtgcccatcttgccgagttcgggatcgtcgcgccggtcggacgtaatggcatcgaggagctgctccatgtcgtcgccgatccaaatgaccagcgagttcctgagataacgcgcgcgtgtgtcgccgctctcggggcacagttgcacaggctcagggagcaaattctagcgttcgaccgcatgatcatggcctggcatcgatccagtgcgacgagcaagcggctcgatgaaatcccgggcgtcggtccggcgctggccactgctctggttgccagcattgccgatccgaaagcgttccggtctgggcgcgacttctcggcctggatcgggctagtgccaaagcagcattcgagcgggggcaaagagaagctcggcagcatcagcaagcaaggcgatcgttatttgcgcagcctgttcacgacaggggcgctcgccgtcatccgctatgccaagatctatggcaccaagcaccggccttggctcacggcactattggcgcgccggccgaccaaagtcgccgccatcgctcttgccaataagatcgcgcggatggcgtgggcgatgatgacgaagggcgagcgttacaaggaacctatcgcactggcggcgtaaacgagatcgcgccgacatccggcgtgacgtgaaggttggaaagggcaaacagcacgtaatgcagagccggtcgatccggcgatcaggacaacccacttccccccacgcatttgtcgaatgcgcgctattgattgggacctgatccgcggagggcattatggccagcggcctgtgtgccgcactgaaaggccgaacacatggccgcaccgaccaatgctgcaaacgtgaaaaaagtccttgccaactcggagccgtccacaca

SEQ ID NO: 6729 - DNA, 1135 bp, unidentified
  source 1..1135: mol_type = unassigned DNA; note = element_a73cbd5
  misc_feature 1..2: note = core
  misc_feature 3..176: note = LE
  misc_feature 177..1127: note = CDS
  misc_feature 1128..1135: note = RE
  misc_feature 20..183: note = bridgeRNA
cttgtatgtcggaaaatatgtcctggaagcctcagatcgatggccccatgccctgggcgaaagcccaagttcgagggagagcgaggatcgaggcttccatttttgatagcgtttagcctaagcccgaacggttggatggcagcacgccgaatggtcacaaggatgggataagccaaatggatatcaaggttgtaggaatcgacgttagcaagaacacgctggatctggactctttgcctgacagcgcgagcttgcagttcatcaatgacgaagcgggtatcgcttcgctgttggcatacctggccgagcacaacgacgaaggtcaaatcgatcgcatcgtgcttgaggcgacaggcggttatgaaaccagcgtcagtatcgcgctggctggtgccggattgccggtcgcagttgtcaaccccaagcaggtgcgcgacttcgccaaagcttgcgggattctggccaagaccgaccggctcgacgcgcgcgtgctggcgcgttttgcccagcagatccggccgccagtgcgtccgttgcccgacgaggcgcagcgcgaatttgctgacctgttggaccggcgcagccagctcgtggtcatgcgggcgcaagagaaggctcgagtcgccactgcgccgccgcttgccatcaagagtctgaaagagcatatcgaatggttggacgcccgtatcaagtcgctcgatatcgatatgacccacaagctgcgcaccagtgacgtatggaagcaaaaagtggaattgctcagcagtgtgccgggcattggcaaagtcagcgtgttcaccctgctggggcgactgcccgagttgggtaagctcaaccgccagcagatcgcagcgctggtcggcgtggcgccgtttaacgacgacagtggcaagcgccggggacaacgctacatccgcggcggtcgagccgaggtgcgcaatgtgctgtacatggcgacggtaacagcgattcgtcataaccctgccatccgtagtttctatgagcgcttgagtcttaccggcaagccattcaagctcgccgtgactgcctgcatgcgcaagctgctgacggtcctcaataccatggcgaagaccggtcagccgtgggaaaacaaactgcccgcttgacacggttg

SEQ ID NO: 6730 - DNA, 1362 bp, unidentified
  source 1..1362: mol_type = unassigned DNA; note = element_a73dcf3
  misc_feature 1..2: note = core
  misc_feature 3..81: note = LE
  misc_feature 82..1104: note = CDS
  misc_feature 1105..1362: note = RE
  misc_feature 1080..1349: note = bridgeRNA
tgatggggtggacgcccctcgacggcatcaaatgtgccaacatggtgggtgttaaccgccacaacaggggagacgtccgaaatgaacgttagcatgattggattggatttggccaagaatgtctttcaggtgcatggagcggataccgccggcgctgttgttttccgcaagcagctgcggcgggacaagatgctcgcgttttttgccggacacccggcgtgcgtcgttgcgatggaagcctgctccagcgcgcattattgggcacgtgagatcggcaaactcggccacacggttcgcctgatcgctcctgcttatgtgaagcctttcgtaaagcgccaaaagaacgatgccgccgacgccgaggcaatctgcgaggcagcccagcgcccgacgatgcgctttgtcacggttaagagcgaggagcagcaggcgagcgcggccgtgttcagggcacgcgatttgctggtgcggcaacgtacccagacgatcaacgccttgcggggccacttggcggaatacggacagattgttgcccagggcccgacccatgtcaccagacttgtctggcacgtggaggatcccaggagcaagttgccggaggccgcacgcatggctctcgccattctggttgatactctgaagtcgctcgaccaaaggatccagaaactggatgtcgaaatcgctcggcgtgcccgggaagacgaagacgcacgacggttggtaacaattcccggcgtcggtccgatcaccgcgacggctttgatcgccctggccccagaagcggccggcttcaagcgaggccgcgacttcgcagcctggttgggattgacaccgttgcagcgatccaccggcggcaagcaaaagctcggcgagacatcgaagatgggagagcggacattgcgccgcctgctcatcatcggtgcgagcgcggtggtgctgcaggctcgccggcgcggcaccccagaaggttcgtggctagggcgcatgcttgcgcgtaagccacccatgcttgtgacggtcgctctcgccaacaagatggcccgcatcgtatgggcactcatggcaaatggcggcgtctataaagctccagctgtggcggcataaccgcccggccagaggtcgtcgaaatgtaggaaggtcaacggaaggtatggcgcaacagtcgatgagacggggtcgggaaagccaggagtctccggagtgcttcgagcacgccgcattgatttggaacccgatccgcgaactcccatacgggccagcgacggatgaacggtcgcgcaaaaggccggacagatgtcagcacccgactacgcgcgtgataccgccgaaaactattcttgcattcaccggggcgtccacaga

SEQ ID NO: 6731 - DNA, 1191 bp, unidentified
  source 1..1191: mol_type = unassigned DNA; note = element_a73de33
  misc_feature 1..2: note = core
  misc_feature 3..210: note = LE
  misc_feature 211..1188: note = CDS
  misc_feature 1189..1191: note = RE
  misc_feature 36..198: note = bridgeRNA
tcctttagatttaaaaaatattaaattgtagaaaaaagaagagaatagagtttgagtacactatcctactttcagagctttattaatctcaaatcttgattaagactctactctatcttatcaaattctcaaatagaaattcgggcttaaaacccattattaaggaatcgagttattgataagtgtcttttctgattaaaattcaaatttatggaaaaaatagttattggtattgatgtgagtaaattaacattagatatctgcattcaagacaatggatctaatcattatgaaaacattcttaataccgaagaagcaatcaaagcgttttttagaaagcttaacaagaaacacgagattataattggaatggaaaacacaggtagatttaatgctattctttacagagtactgatgcattattcttatgctatttatgtgatcaatccttttcatttgaaaagaagtatagggctagttagagggaagaacgataaagttgacagtgaacgcatcgctttatttttatcaaaaaactatatggatcttcagcaatggaaaccaaattctcatgccattgaaaaaattaaattattaaatgcagaaagaaagcatagagttaaaatacgtgcaggattattagctcaatcacaagatgaactatttttaagttcaagtattgataaaggtattttacgattaaacactaagctcatagatgtactaaccaagcaaattagtgaaatagaaaacaaaatatatcaattaatttttaaagatgaagaacttaataatcattatgatagaatacgatctataccaggagtaggaaaagttttagcatttaatatgctgataaaaacagatggctttacaaatattaatagtccaaggcaaatggcttgttatgcaggaatagctccatttgattttcagtctggaacttctataaggagaaaaccaaaagtttcgtccatggcagacaaagacttaaaaaaattattacacttagcagcaatgagcgccattcgattaaaaaatgacttagctatttattatcatcgtaaagtggaagaaggaaaaaataaaatgtcagttttaaacgatgttaggaacaagattattcatcgtatttatgcactaattaaaaatcaaactatatataaaaatagcttgcttttgtcatagaaa

SEQ ID NO: 6732 - DNA, 1483 bp, unidentified
  source 1..1483: mol_type = unassigned DNA; note = element_a7418c6
  misc_feature 1..2: note = core
  misc_feature 3..229: note = LE
  misc_feature 230..1462: note = CDS
  misc_feature 1463..1483: note = RE
  misc_feature 7..229: note = bridgeRNA
ctaatgggactgcaatagctgcctctcggccatgctgttagccgagccggctgccggtgagcactgtattttcccaggcctcatgttgaggtctatgactagatcgtgccccggcaggtggtgaggaggccgggagtgctggtgggatgtcgtgccggtgagcactgatccattaggtcgtggcaggtcttctctggctcgaggttgttgatcaactttgggaggcggagtgctgttcgtcggcgacgactgggctgaggctcatcacgacatcgagattgaagatgaggtcgggcatctgctggccagacggcgattgccggagggtctggccgggattaccgcgttgcacgagctgatcgccgaacatcttggtgctgacgtggagaccggccaggtgctggtggggatcgagacggagcggggtccgtgggtgcaggcgttgctcgcgtcgggctacatcgtctatccggtcaacccgatgcaggtggcccgttaccgggagcggcactcgacgtcgggcgcgaagtccgacgccgcggatgcgcatctgctggccgaactcgtgcgtctcgaccgggcccatcatcgaccgatcgccggggattccgagatcgccgagcacgtcaaggtcgccgctcgagcgcaccagacgatgatctggtcgcgggttcggcaggtcaacgcgctgcggtcgctgttgcgggactactacccggccgcgctggccgcgttcggcaccgatcttgccgaccgtgacgcgttggccgtgctggccgccgcaccgagcccggagcagggtcggcggctgtcccaggcccggatcgaggcgttgctgcgccgggccggccggcagcgcaacatcaccgccaccgcggcacggatccgggccgctttgagctctgagcagctgaccgcccggccgggcgtggtgccggcttatgcggccagcgcatccgcgctgatcgttgttctggcagcgatcgtcgagcagaccgaggtgttggccgggcaggtggagcagggttttggccagcacccggacgttgagatctaccgcagccaacccggcctcgggacgatcctcggcggccgggtgctagccgagttcggcgacgacccggaccgttacaccgacgccaagagccgcaagaactactccggcatgtcaccgatcaccaaggcctccggcaccaaacgagtggtgctcgcccgctacgcccgcaaccgccgactcggcgacgcgctgctgctgcaggcctactcggcgctgcgaacctcaccaggtgcgcgagccttctacgaccatcagcgggcccgcggcgccacccactaccaagccctccgggccctcgccaaccgactcgtcggcatactgcacggctgcctgcgacaccacaccctctacgacgaaagccaagcctggcacctcggagacaagaaactcagcccagccgcttgaccgcttgcggacgtgggatgt

SEQ ID NO: 6733 - DNA, 1326 bp, unidentified
  source 1..1326: mol_type = unassigned DNA; note = element_a745919
  misc_feature 1..2: note = core
  misc_feature 3..65: note = LE
  misc_feature 66..1070: note = CDS
  misc_feature 1071..1326: note = RE
  misc_feature 1107..1314: note = bridgeRNA
ttatgggatggacgcctcctgttttccgatcaatcttaaatgatctaatggaaaggagaaatacgatgacgattcaattactggcggtagatttggggaagcggtcatttcatatgcacgggatcactgctgatggtgtagtggtttctcgcaaggtaagccgctctaagttcgaggcagctgtgactaagcttgatccagttgtcattgcgatggaagcctgtgcgagtgcccatcattggggtaggcggttcaaagcatctggacgggaaatacgtttggtgaatccccggtttgtgaaagcattcgtgcgcggctccaaaaacgatgcggttgatgccgaagcgatctacgatgctgcatccagaccgacgatgcgttttgtgcctgtaaagacgaccgaacagcaggacttgcaatcgctgcatcgtgtacgggagcgattgatcactcagcgcacatcgctgatcaaccatacacgcgggctacttgccgaatatggcgtggcgttgcctaaaggtgcttggcgctttcgtgatcaggctccggcggcgatcgcagagacagaattatccgaactcgcttactttctgttttctgaattgctggatcaattgcgcgacgttgatgcgcgactctccaaagtcgataccaggatcgtcgctatttgccgcgagcatgacgcctgccgtcgattggtagccttgcccggcgtggggcccgtcatcgctaccgcacttgttgccgctgttggtgatggttgccacttccgttcaggccgtgagctcgcggcctggattggcttggtgccccgtcaatacacgaccgggggcaagccgaggcttggcgggatcggtaaacgtgccaatcattatctgcggcgccagctcatccatggtgcccgtgctgtcattagccgattggctggccgggatgatcgccgatcggtctggttgaaaagcattgtcgcgcgagcaggctttaacaaagcattggttgcgctggccaataagactgcgcggatcgcttgggtgatactagcgcgcaacgaagaatatgtgcctgcataataggggcatgctgacgggatcgccgccaaggcggtaatgaatgcgaggtggatactgatggtgcaacggcaaggaccgccgcttcgaagcctgatttcgacgaaggcctgtgaggccgaacatgttcggaggccggaagtagcggattcccatcaaggccaggcgcaaaattgctccaacaacaggccggatagattcgtgcaaaccatgctgactgcatcatgcaaaaacaccttgcgcaggaggcgtccataga

SEQ ID NO: 6734 - DNA, 1437 bp, unidentified
  source 1..1437: mol_type = unassigned DNA; note = element_a745e6c
  misc_feature 1: note = core
  misc_feature 2..112: note = LE
  misc_feature 113..1129: note = CDS
  misc_feature 1130..1437: note = RE
  misc_feature 1144..1371: note = bridgeRNA
gaatgaaagggacttccccgtcccgaactagccgcgtattgcggcgaccggcaacgaagtgccacgatgggaagtgcgaatgtctcatcaactcgttcgaaaggggaagtccatgtctattgttactctgggaatcgatctcgccaagaacgtttttgcgttgcatggcattgatgccaccggccgcgtggtgctagcgcgtccgagcgtgacgcgcggcaagttgcttgaactggttgcctctttgccgccgtgcctcatcggcatggaagcgtgctcgggtgcgcatcactgggcgcgtttgttcgctgcgcacgggcataccgtcaagctgatggcgcccaagttcgtcgcgccctatcgcctgtcgggcaagcgcggcaagaacgatgcggctgatgcggcggcgatctgcgaagccgtgacgcggcccgccatgcgctttgtgccggtcaagaacattcaccagcaaggcgagctgctcgtgcatcgcgcgcgccagggcttcgtcgtgcagcgcacggccacgatcaaccgcatccgcggccttctgtcggagttcggcatcgtgctgccgttgaaggccgctacggtgcgtcgcgaggcgcttgcgcagttggaggacctgccgggctggtgcaacaccgtgatcggcgatctgctgagcgaagtgcatcgcctggacgagcgcatcgcgcagtacgaccggcacatcgaagccattgcgcgccagagcaagtccgcgcagcagctgatgcagcttcccggcgtgggtgcgaccacggcgacggcattgattgcgatgatcggcagcggccacgagttcaagagcggccgccagctctcggcgtggctgggcctggtgccaggccagtacagctcaggcggcaagcagcgcctggggcgcatcaccaaagcgggcgatccgtacatgcgaatgctgctgatcctgggcgcgcgatcggtgctgcagacggccaaggacaagagcgatgccgtgagccgatgggccgtgcagctggcagcccgcgtgggttactggaaggcgattgtcgcgatcgcggccaagaacgcccgaatgtgctgggcggtgctggcccggggagagagtttcaagttgccggcgtagtcgaagccggcaaagagtttcaccgcgtgatgtgcaagcgttgatgtgagtgaaggttggacctgcgcggggtgtgcctgttcatctctaggagagggcatctgccgtcctcggctaacgattgaggcccccgcgcgcgtctttcatcagggtccgcagcacgagtgctgcatcaatgaccgtttgtagtttcgctgtccgcacccttcgcaagcagctgcacagagcgcatggaaagtttgattgcctacacgcgatctgcgatcgcgaaggggatcatttgcttgacaggtggggaagcccttgta

SEQ ID NO: 6735 - DNA, 1600 bp, unidentified
  source 1..1600: mol_type = unassigned DNA; note = element_a75e90f
  misc_feature 1..5: note = core
  misc_feature 6..297: note = LE
  misc_feature 298..1485: note = CDS
  misc_feature 1486..1600: note = RE
  misc_feature 53..267: note = bridgeRNA
ctgctataaataagatgcgatgaatctttaaataattatccgttttccttgtacatttaccgtatgctatcctcgtccaacggtgacgatgatataattccctcatgcagacagaggttccttgctttatccctgcggcactgtccgctttacagcagtatgggacctctcccttatgggatttcatgaatgagccggatgcgggagtgatctctccgcagatttctatgcaggatatgactcataaggacatgaggaactgtctgtacatcaacaggaaaggcaggtgccaacactatgttcattgtcgggatcgacattgccaaacggagtcacgaagccatcatcatcgctgaggatggccaggttgtccgcaaggcattcagcttccggaataactgtaccggctacaatctgctactggaacaggtacggaaactgacccttgtaaagagccagatcgtattcgccatggaatccaccgcccactattggctggcactctacgccagacttttgaaagacggatacgcagtcatggttctgaatcctatccaatcccattccctgcgggagctttacatccgcaaggccaaaaccgacgccagagactcactcatcattgcggaccttgtccgctttggccgctgcaaagccagcaacgtgcctcaggacaaaatcctggctctgcgagagctgtgccgcagtcgcgcctatctggtagacatggccgctgatctgaagcggaagctgattgccttattggacagaatatttccggagtacgaatccctgtttgattctgttttcagcaaggcttctattgccgtactgtgcaaatactctacaccccaaaaagtgaaaaatgcaaatctcaggaaactgacggatctccttatggaaagcagcaacggacattttggcgagtggaaggcccatcaactgaaagaggccgcctgcagcagctttgggatcgatgacagcggcggcgtgtattccacgttgcttgggatgttccttgagcagatcctgtctttaaccgcacaggcagattctctggaaaaacagatatccgtattcttccaagagtttaataaccctttaacctctataccgggagttgggactgttctcgccgcaacaattttaagcgagatcggtgacattactcgcttttcttctgccgataagctgttggcttacgcaggacttgatccatccgtgaagcagtccggcgaatttaagagcaaccagaatcgtatgtccaagcggggatctccttatttacgtcgtgccatttggttggcgtccacggtagcagtgcatcgtgatccgatgtttcaaacctattacgaaaagaaaatatccgaaggtctgcattacatgaatgtgattggtcatgtcagcagaaagatgaccgctgtgatcttcgctgtcctccgggatggacaaccgtaccaacccattttgcaatctgccggttgaccgagctgcatcattttcatccggcccgcaaagggtctggttctttgcgcccttttccgatataccccttatacacgcaagcagaaattttatcccttgacaaacccatagccga

SEQ ID NO: 6736 - DNA, 1401 bp, unidentified
  source 1..1401: mol_type = unassigned DNA; note = element_a76257b
  misc_feature 1..2: note = core
  misc_feature 3..86: note = LE
  misc_feature 87..1130: note = CDS
  misc_feature 1131..1401: note = RE
  misc_feature 1147..1389: note = bridgeRNA
tgatgaggtggaacggcccgctccgacagcatcgaagtgctaagaacgtggtcgttgttgcaaacgccataaggagggaccgttccatgaaggatgttaccactatcgggttggacctggccaaacaggtttttcaggttcatggcgccgacgctgaaggcgcgccgttcttcaatcgaaaactacgtcgcgccgaggtactgcgcttctttgcgaaattgccgccctgtctggtcggaatggaagcctgcgccagtgcgcattattgggctcgggagatcgcggccatcgggcatgacgtcaggttgctgccgccacaatacgtgaaaccctttgtcaaacgcggcaagacggatgcggcagatgccgaagccatcgccgaggccgtgactcgaaagaccatgcggttcgttccggtgaagacgagcgaacagcaagcagctgtgatggtgttgaagacacgcgctctgctggtgcgtcagagaacgcaggcgatcaacgctctgcgatctcacatgggcgaattggggatcatcgctccgaccggcatcgccaacgtcaagtcattggcggtcatcgtacgggatgaggatgatgtgcgcctgcctccggcggcacgcttcgccctcaccgaaatcgttgagcagatcgaaatgctcgccgcacgaatcgacaagctcgaacgggaaatcgtcatccaggcccggaaggacgaagacatgcggcgccttacgacgatccctggtgtcggggccatcatcgcaatggccgtcaaggcattcgtcccagatcctgccggcttcaaatcagcacgtcattttgctgcctggattggcctgacaccgaaggcgcactccagcggcggcaaggagcggctgggccgaatatcgaagatggggaatccggaactgcgatcgttactgaccagcggcgcgtcagcggtgctgcgtcatgtcagatatcacgatagagcatggccgtggctaaaggacatgctggcgcgacgcccgttcaaggtcgtcgctgttgcgctcgctaataaaatcgcccggatgatatgggcattattgaacagaggtgggacatatcgcaatcccatggaaatgatggaggccgccgttccagcctaggggcgcgaccgtcaatatagtctgactggcaaccgccggcagatgcaaggtgcaacgcagacgatgaaccacgggacgaaatcccgaaacaggtcaggccgaaacccgtgacgcgcacaaagcgcgcccccttgatccagccacctgcttcgcggacttcatcgaggccagcggtcgatgatcgcgcaaacaggccggacatatgaccgcaccgtcctcatgtggtgaaatcgactgaagagcacacttgcaccgcgggccgttccacata

SEQ ID NO: 6737 - DNA, 1335 bp, unidentified
  source 1..1335: mol_type = unassigned DNA; note = element_a76265b
  misc_feature 1..2: note = core
  misc_feature 3..74: note = LE
  misc_feature 75..1088: note = CDS
  misc_feature 1089..1335: note = RE
  misc_feature 1069..1322: note = bridgeRNA
tgttggggtggacggccccacggcatcaggtgtcaagattggttgtcgagaagtcaatgcaggagaccgtccaaatgcagtacaagcgcatcgctgtagacacttccaaggcaaccttcaccgtccacggggtcgacgcccaagatcgaccgatactgaggcaaaatctaagccgggcgcagttcgaggtgttttgccggaagcttgctccaactgagctcgtgctcgaggcctgtggtggttctcatcattggggccggcttctccaaaatataggccatgtggttcggttgatcccgccgcaatatgtcaaacccttcgtcaagcgtggaaaaaatgatcggaacgacgctgcagctatcagcgaggcggcttcgcgtcctgacatgcggttcgtcccagtcaaaccattggcaagccaggcagacgcgatagacctcagcgtccgcgacctactgatccggcagcgcacgcagctagtgaacgctatgcgcggccatgcggcggagttcgggatcatcgccgcgcaaggcatcgcacaaattgacccgttgctggacaaggtcgctggcagtgaaatgccgcagattgcgaaggacgcgctggcccaattgggacaatgtatcgacgatctggataaccatcgagcagcggtggaccagcgcttgactgcgcgtcacaaggccaactcggtcagccagcgtctggcagcggttcctggtgtcggcccgatcactgcgctgactctggccacgaagatcgatcccagtcagttcaactccgctcgccatttcgcagcttggcttggtctaacgccgaaagaacgctcaacgggtgggcgggcacggctgggtgggatcagccgagccggcaatgaacgactgaggcagttgcttgtgttgggcgcaaccgcggtcatccgccatgccaaacctgagagcaagacgccgaacccatggttgctgaaattgctagagcgccggccgcgcaagcttgccgctgtcgctctggccaataagatggcccgcatactgtgggccatgatggcgaacaatacggcctaccggcgtacgccacaggccgcctgatcgttcgtcgccgccgcggggcaaaagagcagtagcgaaagatggcagttggtcgaaccgacgaacaaggcatcccgtctgttacacgggcgcatcgacgccgcaatagtgtttggggcttgttcggcgaaacccatctgggccagcggtcattcgtgccgcatcaaataggccggaaacatgaccgcactcgtaccgcctgccaaattacgcagaaagctcttgcgccccaggggccgtccaaaca

SEQ ID NO: 6738 - DNA, 1474 bp, unidentified
  source 1..1474: mol_type = unassigned DNA; note = element_a762c67
  misc_feature 1: note = core
  misc_feature 2..137: note = LE
  misc_feature 138..1172: note = CDS
  misc_feature 1173..1474: note = RE
  misc_feature 1216..1416: note = bridgeRNA
gaatacgaagggacttcccgcaatccctgaactgcgtcgaggcgccaagattgatgttgcgaagtcaatctgcaacgggaaatgggaagtccatgagcgaggttacacgaggcttcatcgcgcgggtaggggtcgatttggccaagcgcgtcatccaggttcatgcggtcgatgcaactgggcaagtcgtcgtcgcgaaggcgttgccgcgtgacggcttcatgccctggtgcgcccagttgccgccgggaacgttgatcgccatggaggcctgcagcggcgcccaccattggacgtgcaagttgagggctctggggctcgatgcacgcatgatggcggcccacttcgtgacgccgtaccgcatgcaaggcaagggcggcaagaacgacgccaacgacgcggccgcggtctgcgaagcggcgtcgcggccgtcgatgcgcttcgttccactcaagaccccagcgcaacaggccatgctcgccattcatcggctgcgtgaggtgtacaaggaagagcgcaccgcctgcatcaaccgtattcgagggctgctcactgaatttggtctggtcttcgcccagcgccccgaggtgctgcgccgagatctgtcggacgtgcttgaagatgcaaccaacgaactgccggcgttgctgcgcatggcgttgcgacaggcccgcctgcactggctcgagctcgaatgccatatggcgtggtgcgacgagcgcatcgaggcgcacgttcgtaccgacgaacaggccaaggcggccgcacagctgtgcggcgtcggcccggtgacggcctcggcgctggtagcaatggtcggtgacttcaaacagttcagatcgggcaaccagttcggcgcctggttggggcttgtgcccaggcagaactccagcggcggcaaagccaccctcggccagatcacgaaacgcggcgacgactacctgcgcacactgctgatccagggtgccaaggcggcgatggttcacgccaagaagcgtagcgaccgcatctcgctatggctggtgagtctgatcgatcggatcggccggcagaaggccgtggttgccatggccaacaagaatgcccggattctgtgggccgtgctgaccaagggcacggcctacgatcccaaccacgtgtctatcaacccaggattgcccaccacggtctgaaggactgcgagcatccgtcgagatcaggaaagaatcgttccccgtagacgtgcgttcgaagatgcaccccacaggtcagaccggcagcaggtgaactcggtccgctttccgccgcgccacgatggcgacgccgatacccgaatggagtcctgctgagcggtttgtatctgggcccgcaccgttgagtgcaacaaagccgcctgtagatatgcagtctgttctgtgtggcgttgcctcttcggcacgcaggtcatgcgaggaaagaggaataccggctattgaataaacgggaaatccctgta

SEQ ID NO: 6739 - DNA, 1209 bp, unidentified
  source 1..1209: mol_type = unassigned DNA; note = element_a76dcd0
  misc_feature 1..3: note = core
  misc_feature 4..211: note = LE
  misc_feature 212..1195: note = CDS
  misc_feature 1196..1209: note = RE
  misc_feature 13..193: note = bridgeRNA
gcttgtatcttgaatgtgttgctggttagctaccagcaacatgaaacggaggcagctttttgcgccgcttaagacccgatcttgcttcgtagctttaagccctccgtttctcctttcacgccagcaactactctgaacggtaaccagaagctctgacttcgtatgtacaaggctagatggcgtgatggtttaagtgaaagggagatatccgatgttctgtcttggtattgatgtcagcaaaaacaaactcgacctctgcctgttccccggcaacggcaaaaagaaaacgaaatccatcaaaaatcaggtcggcgtagaacgtgacatctgcgactggctccagaagcagaagtgcccgccagagcaggtgatggtggtgatggaagcgaccagcgtctatcacgaaaacgtcgcttacgggctgcacgggaacacgcccgtgacggtctgtatcggcaatccgcaacgggtcagggagtttgcccgcggaatgggtatcctgaccaaaaatgacgcggtcgacgcctgggtgctggcccgttacggcgagctgaaacagcccgatgcctgggttccgccgccaccggaagtccgcaagctgaaagacctgctgcgtctgcgtgacgccatcgttgcagatgtgcagcgcgcgatgaacatgctcgcgaaggcgaaatcaaccctgacggcgggcgaggtgaccgaatcgcctgagtgcacaaaaaaatcgcgggaaaaggatctgaagcgaataaacgcgctgattgacgaccacatggataagaatgatggtctgaaagatgatcttaagctgctggagtcgataaaaggtatcggcggcgtagtgggaacgaccatgctgtcggtgctgcgtacgtgccagttccgcaatgcgggtcaggtagcggcgtggctgggcgtggtgccggtcgagaagacgtcaggcagttcggtgagagggctggcccggatgtcgaaaaccggtcccgccgacgtgagagcgaagctgtatatggccgcgatagtagcggcaaggtggaatcgccccgtaagagcgctgtatgaaaggctgatggcgaagggcaagccagccaaagtggcgctgggagcggtgatgcgcaaactggtccatctctgcttcggtgtgcttaaaacacgagagccgtggaacgaaaactacgtagctaccgcttgacgttcaagacggta

SEQ ID NO: 6740 - DNA, 1424 bp, unidentified
  source 1..1424: mol_type = unassigned DNA; note = element_a77576e
  misc_feature 1..4: note = core
  misc_feature 5..141: note = LE
  misc_feature 142..1410: note = CDS
  misc_feature 1411..1424: note = RE
ttccgtaagactgtgggtggctcaggagggtcaggtgtggctgaggtcgccttgcgcttggtcgctaactgggaatgtccacccgatcctcctggtcgccctggctgctgattgagatgtgcgcttggtcgctggttacggatgcgtcagcggggtgtccacgagtcgttgtcagctgtattggagcgaggaagggacgtgcgcgtggcgccactgcgggagagatcatgggttggggtcgacatcggcaagacgcaccactgggtgtgtgcgctcgatgatgacggcacgacgttgctgtcggtcaagatcatgaacgacgaggccgagatcctcgcgctgatcgcgacggtgggcgagctggcgggccaggccgtgtgggcagtcgacatcatcggtgcgccgtcggcactgatattggcgttgctggcccgggccgaccagtcggtgcgatatgcgtcaggacgggtggtcgccgcgatgagcagcgcgtacaccggcgagggcaagaccgacgtcaaagacgcctacgtgatcgccgagaccgcccgcatccgccgggacctggccgtgatcgaccacgacaccgacctggtccgcaacctggccgtgctgaccgggcatcgcgccgacctgatcgccgaccgcgtgcgcatgatcaaccggctccgagacctgatgaccagcgtctttcccagcttggagcgggagttcgactacgcctcctgcaaaggtgcgctggtgctgctgaccggctacgccagcccccaccggatccgccgcatcggccaaacacgactcaccgcatggctgcgccaacgcaaggtgcgcaacgcggccggtgttgccgctcgagctgtcaccgcggcccgtgcccaggtgacggtgcttcccggccaagacctcaccgagagcatcatcgccgaactcgccaccaacatcctcgccctcgacgaacgcctcaagagcctcgacgctcagatcgctgagcacttcgagcagcatccccaggccgcagtcatccaatcgatgcccggcttcggtccgttcctcggtgcctctctgctggtcggcgccggcgacctgcgcgcgtttcccagcgctggccacctcgccgccgcggcagggctcgtccctgtgcccaacgactccggtcgccgctccggcaacctgcaccgcccgaaacgctacagccgtccgctgcgccacgtgttctacctctcggcgcagaccagcatgatgcgcgccggaccgaaccgcgactactacctcaagaaacgcgagcacggccgcacccacagccaagccgtcatcgcccttgcccgccgccgcgtcgacgtcctctgggcactgttacgcgacaaccgaacctggacaccagcagcaccaacgctcgctcaggcggcttgacaacaccattgaga

SEQ ID NO: 6741 - DNA, 1721 bp, unidentified
  source 1..1721: mol_type = unassigned DNA; note = element_a776579
  misc_feature 1..3: note = core
  misc_feature 4..68: note = LE
  misc_feature 69..1229: note = CDS
  misc_feature 1230..1721: note = RE
  misc_feature 1268..1485: note = bridgeRNA
aagatgctatggggcggcggcgaggatattgcatccatggtcgctgatgtgaaccgatggagcgccccatgcagaagttgaacgatctgagccgatccctcacggcccttgaaccgaacggcacgctgatcgccgtgatcgagatgagcctgtcgagctggctcgttgccggcatcgtgcctggcgtcgagcgccagccgttgaagaagctggaggtcgacgagagcgcattgctgaatctgctcaatcgttggcgagaggaagcgaagaaagcaggacaccagatcgaacgcatcgcggtcgctttcgaggccggccgtgacggcttctggctggctcgctggctgagggcgcgcaacatcgaggtccatgtcattcacgcatcgagcgtcgccgtatcgcgtgagcaccggcgcgccaagaccgaccgcctcgacaccgagctgctcaaacgcgcctttctcggctggctgcgcggcgagcgtaatcactgcaagatggtcgcgatcccgacaatcaaggacgaagacgccaagcgacccaaccgcgagcgcgagagccttgtcggagagcaaaatcggatcaccaaccgaatgaaggcaacgttgatccggctcggcatccgtggattcaatcccaaactgaagaaggccgccgaacgccttgaaggcttgcgcacgcccgagggcgagccgatcctgcccaacacgttggctgagctgcgtcgcgacatggtgcgtcggcggctcgtcagtgatcagatacggcagatcgaggatgctcgcctggatcgtctcgaacatgcacctggtgacggaccacacgcaatggtgcacctgttggcgcgcgtgatgggtgttggcatcgagacggccgacatgctggtgcatgaggtgctgtcacgaaacttgcgcgaccgacgggccgtagcgcgttatgcgggtctcactggctcgcccgacgagagcgggacgaaacgccgagagaaagggctggcccgttccggcaacgctcgagttcggcgaggcatgatccaattagcgtggcggttccttatgttccagaaagagagcgccttggcgcagtggtttcgagcccgcaccgagaacgcccgcggtactcgcaagaccatgatcgtggccttggcgcgcaagcttctgatcgctctgtggcggctggtgcgggagggtattgtgccagaaggcatcgttctgcgtccggcacaatgaacggaggacgctgaaagcagccgacagtttcggccttgtccgtacgcttgtgacaaggcgccgatgacggttcgaggtggcggagtcccgaggtgactcatggctttgatgccgagaggaagaatgggtccgccgcttcggagcttcgctgccgatgcgcatggctgcatcatggttcgggtccttggacccaccgaatacaaggttgtggcgcgattgatccgcgcccgaacgcgggctctcctctgatcgtcatcccgatcgcaccaagcgtgccgtcgtgctcgaagccgtcaaggtgtggcctggcaacggttgtgcatgccgcaaggttggtgcgacggccaaccttgacaggtcctgcgcgcgccgacatgagcgaggcgcgggtcgggacgaagaaacgggatttcagatcgaacaaagaaactgacgagaggaaaaaaagatgcgccgccgtcccgaaactccttgacaaggaaagccccatac

SEQ ID NO: 6742 - DNA, 1387 bp, unidentified
  source 1..1387: mol_type = unassigned DNA; note = element_a7771fc
  misc_feature 1..2: note = core
  misc_feature 3..79: note = LE
  misc_feature 80..1105: note = CDS
  misc_feature 1106..1387: note = RE
  misc_feature 1130..1374: note = bridgeRNA
cgatggggtggacgctcccacttaacggcatctttgtgccagaatggttgtgttggaaccattacaagagagagcgtccatggaaaagattagcataatcggcctggatttggctaagagcataattcaggttcacggggccagcattgatggcgcgattcagtttcggcggaagattgcgagcaagaagttgcttgccttcctatcgggtgttgatccttgcactgtggcgatggaagcatgtgccggcagccaccattggggtcgcgagattgccaaactgggtcatcaagtgaagttgatcgcgccaatctacgtcaagccgttcgtcaagcgtcagaagaatgatgcggccgatgctgaagccatctgcgaggcagccctgcggccaactatgcgttttgtggcagtcaaaagtgaggagaagcaagctgcagctacggtattcaaggtacgtgaccttctcgtgcggcaaaagacccaaatcatcaatattctgcgtggtctgatggcggagttcggaattacggttccacaaggtccctcacacgtcggtgttctgatcagtcacgttgaaaacgatgactcgagcctgacggaggcggcacgcgcaccgtgcttggccttggttgtaacccttcgggctctcattgataagattcgggaacttgatctagagattagtcgaagggctcggcaggatgacgttgccaagcggctcatgagtattccgggagtcgggcctgtcattgcaacagccctcgaagccttagcaccacctgcagcgacgtttacacgcggtcgagatttctctgcgtggatgggtttgacgccacgacaacactcatcaggcggcaaagctcggcttggcaagacctcaaagatggggcagcgcgaccttcgaagattgttgatcattggagcggcagctgtagttcgctgggcgtcaaggcgaggagcggttgaaggatcttggttgtcgcgcatgatcggcaaaaagccgcccatgctgatcgctgtggccctcgccaaccgaatgggacgcattgcatgggctcttatgacgagcggcgatcgctatgaggagagaaacctagcggcataagatcagctttggcggggaggatttctaaccgccattgcgagcgagcgagtgaaggcaggtcgaacgaaggatatggacaaacggtcaagagacggggtcaggaaaaccagtttaccggacggcacctcgagtgcgcgtgagcgtattggacctgatctgcgaactcccatatgggcccgcgacgttttaaggtcgcaacgagaggccggacacacgtcagcacccgaccactgttcaagactgagtgaagattttgcttgcattcgagggagcgtccacaca

SEQ ID NO: 6743 - DNA, 1387 bp, unidentified
  source 1..1387: mol_type = unassigned DNA; note = element_a7774d5
  misc_feature 1: note = core
  misc_feature 2..70: note = LE
  misc_feature 71..1102: note = CDS
  misc_feature 1103..1387: note = RE
  misc_feature 1145..1382: note = bridgeRNA
caatggtatggaccccgccctcacgcggtggtggaatctcgaacgtcacctgcgatgaaggagaagtctcatgcagatcgttcggataggtctagacctagccaagtacgtctttgaggttcacggcgttgacgcgtacgggagaatcgtcgtgcgaaagagtttgcgtcgtggcgcagtggctacgttcttcgccaatctgccgccatgtctggtcggaatgcaagcctcgaatggggcgcactactgggcaagggtgctcagcgagcttggccaccaggtacggctgatcagcccccagtttgtaacgccgtatgtgaagtcaaacaagaacgaccgcaatgatgcagaggccatctgcgaagctgtcggccggcccacgatgcggtttgttccgccaaaatcatctgaacagctagcgatccaagcggttcatcgcattggcagccgcttggtagcaaaccgggtcaagctcgcgaaccagattcgtggcctgctctcagagcacgggattgttaccgcccgcaacatcccacggttgcggcgggctcttgctgacatcgcagggaccaatgatgacgagctcaacggcctggttcgtgtgctggttagagaagtacaggtggaattgatcgagctggatcggcgaattgtatcctatgatcggcgcatcggtgagctctaccgcaacagcgaactgtgccaacgcctgggaagaatcgaaggtattgggcctgtgacagcaacggcgttggttgccgctgtaggggatcgaacctgcttcaagaatggccgccagtttgctgcgtggctaggacttgtaccgaggcagcgatcgagtggaggacgaactcaattgtttggcataagcaagcgcggcgatcgctatttgcgcaccttgttgatccatggtgcgcgtgcagcactgtgcaaagcaggcggcaaacaagatgcacgaagccgctggctcaataacttgcgccgacggcggcatcacaatgtcgccgcggttgcgctcgccaacaagaatgcgcgcattgtctgggctttgctcgccggcgacaaattctacgaacccgaacgatcggtacaggccgcttaaacaaagcggtaaacggaggacttaacgaaggaggtctcacccagcaattgcaacaaaatggtaggagatggtgaaacggtcattccgtcgcttcccgaacctggcatgtggctcggcatggcttcggccaatgtctgggggccgttgaggtggaagcgcgcgaaaatccatcggggctcgcggcgacgaactatcgagccgcatcaggaagccggatatacgtcagcagttgtgaccgttgaacttaatctagccggcctgttgcaatcgggcggggtccatata

SEQ ID NO: 6744 - DNA, 1213 bp, unidentified
  source 1..1213: mol_type = unassigned DNA; note = element_a77913b
  misc_feature 1: note = core
  misc_feature 2..221: note = LE
  misc_feature 222..1187: note = CDS
  misc_feature 1188..1213: note = RE
  misc_feature 44..211: note = bridgeRNA
tcttaagtttgattttaattaaaacagttaactttaaatattaaatcagaaagaacaaaagagcggagtaaggttaaggttaccagtggaacttttgattccgtcaacattgataatccccgctcttttctactttaatttcgttcagatctttgaggccctgacctcgtttttaagttggtgaaaccagagtagactgtcctttcgtcatttgtttttctatgaataaatatagcaaaatttacggagtggacatcagtaaggatgtctttgatgtggtgtgctccgatgatgcccatcatcagttcgataataccccgaagggtttcagttcttttttaaaggctattgcccagggctcgctcgtggtgatggaggccaccggatattatcactatcgactggcacagtatctttttaagcacggcgttgtcgtttcggtagtaaacccattatcggtaaagcgtttcatccagatgaagcttgccaaggtgaagacggacaagagcgatgccagggcaatctgtgagtacggcagggtaaatgatgtcccttgctatactgcccttacggatgtacaggccgagtgtctgcagctttttaggttactggacagctatctgaagaagcgcaccgccaccaagaacaagctgcacggggaggaaactttgggcattccctccaagtttgtccatcaatccctcaagcgtgacctcaagcatttggacaaggaggtaaaggcactggaggaaaggttgcttttattggtaaagcaggaccaacaacaccaacttacattgttgaagggaattccgggcctgggtaccaaaacggccctcttcctcattgttataacagatggttttgacaaatttgagactgccggccaattgtgcagctatgtgggaattacccccacaatccggcaatcgggaagcagcgtgcggggcaagagcagaatatcaaaggtgggcaaccagaaactcaggaaccttctcttcctgtgcgcattctcggcgtgcaagcacaacaaagcctgtagggagatctatgaacgcattgtggcaaagggaaagagcaaaaaactggcacttattgcggtggctaacaaactgctgaaacaggcatttgcaatcgcaaaaagcggtttgccctatgatgagaaatttgtatccaaattgaactaaaaacatttgtttttcaactcagatct

SEQ ID NO: 6745 - DNA, 2145 bp, unidentified
  source 1..2145: mol_type = unassigned DNA; note = element_a786609
  misc_feature 1..2: note = core
  misc_feature 3..273: note = LE
  misc_feature 274..1488: note = CDS
  misc_feature 1489..2145: note = RE
  misc_feature 11..250: note = bridgeRNA
ctcgtataatagatttacggtttggatgcaatgggaaaccgcatgaaacccacttgttgttccacaagccatgtgggataataaggccagcagacagagggcgcaggttgtctccttgaagtatagcttccgcagaaagaattgcgcctctgtctttgcgggttgacgcgaatgagctggatagcgaagatgcgctgcatatctaacgaggttgtgtcccgcaaagaagcgtgaggaaactctgtctgaaattttgaaacaggaggtttcgccatgttctactgtgggatcgacattgccaaatacaagcatgaggccacggtcatcgatgaggctggcacggccttgccggacagcatctcctttgccaacagtaaggaaggctgtgaaaagctgctggcgctgttcgagcggctgggtgtctccaatgatggcctgctcattggcatggaagctaccggccattactggctgagtgtgtacgggtatctgttggaacagggttttgaaatcaaggtcatcaaccctatccagtccgaggcgtttcggaagatgtatatccggcagacgaagaacgaccgaaaagacagcttcatcatcgcccaaatcatgcgcttcgggcagttctccaccacgagcctgtcggaagagacgattgtggcgctgcggcagctgagccggtaccggctggccctggtggacacctgtggagactgcaagcgccgggtcattgccttgctggatcaggtcttcccggagtatgacgcgctgttttcagatacctttggcgttacctcgaaagaagtcctctcccaatatcctacacctgaggacctgttgactgtctccaccaggaaactctccaatcttttggagaaaaccagtcacggccggttaggaaaagagaaagctgaacagttgaaagcagcggcagccaattccttcggtgtgagctttgccagagatgcctttgctttccaaatcagacagctcgttgagcagatggagtttctggaaagacaggtcacggagttggaggctcagatctcctccctgctgaaacagaccggcagctacatcaccacgattccaggcattggagacaccctgggtgccatcattctcagtgagatcggggatattcaccgcttcaacgcccccaataaactggtcgctttcgcaggactggatgttagagtcacacagtctggtgagttcaccggcacccggcagaaaatctccaagcgcggctcaccgtatctccggcgggccatctggctggctgcctcccgggcggccttttgcgaccctatcctctcggagtactatcagtccctccgggcccgtggcaagcatcatctcaccgctatcggcgccgtctcccgtaagctctgcaacattattttcgctatcctcagtgaggaccgcccctatgaggccatcccaccaaaagagattcgacaccattcggcagatttcacaatgtgaatgccgcctgcatagaacttttgtaaaagttgggatattcttccaccagcatattttggaggaggaattttccatgtttatgagacggattcccacacaggagcaacgttatatcctcgcggacttgctccgtcacggacgggaggcacaagacctaactcaacagcagatttccgaccttttagactgctctctccattgggtcaatgatatggaacaaggtaaatgtgacccgagctggcgggatgctttccactatgcggctattatcaagcttgatcccatcgtctttgcagaggaggccggacttcgtgtttcaataccttcctttcgaaaatgaggcatattctccgtatatcggcaaatatcgaacctttggcctgcgtgttttgctgtctcagaatggccttgagaaagaagttatgcttttgccggatatctcctcagatttttcctttgtgctgcaccttgccggtcttcttaccagaaaacagctcgatcctattcatcttttggatgtgatcgaagattctctttgagtgattcttctgcgcctttccttggctcacgggagcgtgagccttttgctgttgcccttttcatccctcatcttatctctgacttttttcattttcctcttgactttttatagctggt

SEQ ID NO: 6746 - DNA, 1323 bp, unidentified
  source 1..1323: mol_type = unassigned DNA; note = element_a78a7e6
  misc_feature 1..2: note = core
  misc_feature 3..68: note = LE
  misc_feature 69..1106: note = CDS
  misc_feature 1107..1323: note = RE
  misc_feature 1081..1307: note = bridgeRNA
agataattggactccccataccttaatagataagttaacttgtatatagttagttaatggagtcagtgatgaaaaatattattgtgggcgttgaccttgctaagcatgtgatccaggtttgttcattttcgaacaaaaaggtgcaatctaacattgatatgacacctgctaaattcactgagtggcttactgtaacaaattccgtaaccatagtatttgaagcatgtggcacatctaattactggaagcaaaaagctatttcacttgggcatgatgctcgtttgatttcgccgaagttagtttctgctgttcggcagaatcagaaaacagataagaatgacgctttggctatagttcaagcggccttattgcctgatgttacttttatttctggtaaatcgactgaacagcaacagttgcaatcaattgtcagactgcgcgagctctgtattaagcagaaaacagctgctggaaatcagttaatagctcttttatcggagtttaatatcaaaacctcaagccgtaatggcagtttaaatggggtgattacagccacactggaagatgctgaaaatggattatcttttgagttcagggaggcgctaagcgccgcctggcaacactatctatcaatagcaaaatctatttctgtttatgatagttgccttgaaaaggcaattgaaaaacatgctgattgtaaaaaactactcaagctggaaggtgtaggcgtgcttaacgcaattaatctatacatagcgttaggatgcgcagatttaggaactttcagtaaaggtaaagatgcagctgcatgtataggtttaacgccgattcagcactcgtcaggtggaaaagcaaaacttggttcaatcggtaaatatgtcaaaaatgggatactcaggagccagcttattaccggcgcgatgtcagcagttaaccacgcagtaaatcggaaagctaaaactaaaaaagatatttggatagcatcattggtttgccgtcgaggtaaaaaatgtgctgcggttgctttggccaataaaaccgtaagaacagcatttgcaatgcttacgcagggtacggaatacaaagctgagttagttgaagcttaaaaaagagttcaaacaataaattgcacaaacgaagataaaaatcagctagctaaggccgccgtcaacacagagtgaaaaactcgcaagatagattagccagctagttcgcgtaaatatcatagagcctgagatagcttctcaaatagagctcgtacataagtacgcaattatttcttcaagagagttatttattgttgacacgtggggagtccacata

SEQ ID NO: 6747 - DNA, 1545 bp, unidentified
  source 1..1545: mol_type = unassigned DNA; note = element_a78edde
  misc_feature 1..2: note = core
  misc_feature 3..247: note = LE
  misc_feature 248..1423: note = CDS
  misc_feature 1424..1545: note = RE
  misc_feature 14..215: note = bridgeRNA
ctcgtattataaagtagtagttattagagtccctctccaaggacaaaatgctacaatagacaaggtgctgtggattggtttaaacctcctaccgcaagacggtttcggaaaggctccaaccacggctctttgtttttagtgttaatcagttagataccgccagacggtttatatagaacgaggttacatagcaaagaggtgtggctctaagcagcactgtaaaataaaacgccggaggtaaaaagaaatgatttttgttggtatcgatgttgcaaaggacaagcacgattgctttatccgcaactcggaaggaacggtcttggcagatgtatttaccattgccaataaccgcatcggttttgagacgcttctttcaagaatccaaagctgttcccaaggtgaaagcaaaataaaagtagggcttgaagccacaggacattacagctacaatctgctggggtttcttttagacagcggcctgacaacctatgtcattaaccctctgcacacgaacctctaccggaaaagtctcagcctgcgaagaaccaaaacagatcggatagacgcgcgtaccattgcaatgatgctcatgtctgatgtggacctcaagtcctactcaaatacagcataccacaatgaagagctaaagtcactaaccagatacagatttgataaggtaaaagagcgcgccaagctgaaaagctccgttgcgcggttagtgaatattctgtttccggagcttgaaaagctggtctcaagtctgcacatcgctgttgtatacgcactgctgagcaactatccgggtgcaagctatatcgcaaacgccaatactgaagaactcgctgagactctttgtaccgcctctaaaggtcgttataccaagtctaaaaccgcggaaatccaagtagccgcaggggtctccattggctcgaaaatgcctgctaagtctatggagttgaaacacacgattgctctcatccgcgaactggacaaagaaatttctgaggtagaatccgcaattgacaagattacatctcagatggattctcccatctttacaatccccggtattggccgacatatgggtgcaatgattcttgctgaagttggagatttttccaactttgcaagcgcagacaagctgctggcttatgctggactctctccatctacatatcagtcagggcaactgcaaaactgttatgctcacatggaaaagcgtggctccagatatttgcgatatgctcttttcaatgccgccaaatatgtttgcctttggtgtcctacattctcggcctatcttgaaaagaagcgttctgagggaaagcattacaatgttgccatctctcatgcttctaaaaagctggtaaggcttatttttgctatgcagcgttccgggaaagccttcttagctgattattaagcgtgcgattttatacggagcgagtatccgacaacggatgctcttgtttgctataccaattttcaccaccttaaaatttctctcgaaaattttgttttgggccttgacttttaatagttagt

SEQ ID NO: 6748 - DNA, 1496 bp, unidentified
  source 1..1496: mol_type = unassigned DNA; note = element_a790f8c
  misc_feature 1..2: note = core
  misc_feature 3..245: note = LE
  misc_feature 246..1475: note = CDS
  misc_feature 1476..1496: note = RE
ctaataggggttgccggggttgccgatgcggcagactcggtgcctggtggccgccggtaggtgagcactctcgccgcttgggccttggagcccttgggttagatcgtgcccctgccggtgaccgggagagttgatcgctgctgggatgtcgtgcccccgcctgcgggtgagcactgttctattaggtcgctgatggttctcccgctggccgctgactcgtttcggcgttgggatcgggagggctgatgcggctgttcgtgggtgatgactgggctgaggaccaccacgacgtggaggtgatggacgaggccgggaaggtactggccaggaagcggctgccggagggagccgccgggatcgcgcagctgcacgcgctggtcggcgctcacctgggcgaggacggcgatggcgccgacgtgctggtcgggatcgagaccgaccgcggcccgtgggtcgcggcgctggccgcggccgggtaccgggtgttcgcggtgaacccgctgcaggcggcccggttccgggaccggcacggggtgtcgggcgccaagagcgacgcgggcgacgcgcacgcgctggccgacatggtccgcaccgactcccaccagctgcgcgcggcggccggcgacactcccgaagcccaggccatcaaggtgctggcccgcgcccacaagacgatgatctgggagcggacccgggcggtgcagcggctgcggcaccagctgcgcgagtacttccccgccgcgctggaggccttcgacgacctggacgcccccgacgcgctggaactgctggccagggcgcccgagcccgccattgccgcgaagctcacccgcgcgcaggtctcggccgccctcaagcgcgccgggcgccgcaacgtcactgaccgcgccaccgccatcctcgcggcgctgcgcagcgagcagctcggccagccgcccgcgctcacggccgcctacgccgcggccgtccggtcgctggtcgcggtcatcgtcaccctcaacgagcaggtcaagctcctccagggccaggtggaggaggattttgggcggcacccggacgctgagatcatcttgtcccagcccggcctgggaccgatcctcggcgcccgggtgctcgcagagttcggcgacgaccccggccgctacgccgacggcaaggcccgccgcaactacgccgccaccagccccatcacccgcgcctcgggcaagaagaaagtggtggccgcccggttcgtgcacaacgaccggctcgtcgacgccctcaacgcccaggccttcgccgccctgaccgcctcacccggcgcccgcgccttccacgaccagcagcgagccgccggccacggccacaacgacgccctgcgccgcctcgccaaccgcctcgtcggcatcctccacggctgcctcaaaacccgcaccctctacgacgaggacaccgcctgggcccaccgccaggctcaaacccagcaagccgcttgacaacctaagcccctgggatgt

SEQ ID NO: 6749 - DNA, 1407 bp, unidentified
  source 1..1407: mol_type = unassigned DNA; note = element_a793e36
  misc_feature 1..2: note = core
  misc_feature 3..112: note = LE
  misc_feature 113..1141: note = CDS
  misc_feature 1142..1407: note = RE
  misc_feature 1161..1402: note = bridgeRNA
agatgccgtaacgggcctgcgccggggctgatcggcggggcggctgtccctcagagtggtggcgtgtacggggtccgaacgggtcggccccgaacctcgtcgagggacagccgtggaccactatgccgggatcgacgtctccttggaacggagcagcgtgtgcgtggtcgacgccaccggccggatcatccgcgagacgaaggtggcgagcgagccggaggcgctggtccggttcttccgggagctcggcctgccgctgacccgggtcgggctggaggccggccccttgtcgcagtggctccacgccgggctgaccggtgccgggctcgaggcggtgctgctggagacgcggcacgtcaaggcggcgctctcggccatgatcgtgaagaccgatcgcaaggacgcgcgcggcatcgcccagctcttgcgtatgggctggtaccggccggtgcaccgcaagtcccccgacgcccaggaggcgcgggcgctgctggccggccggaagctgctgcaggccaagctgcgcgacgtggagctgagcatccggggcatcctgcgcgggttcgggctcaaggtcggcgaggtcagcaagggccggttcgccgccaggatcggggagctgatcgccggccacgagatgctggaggcggtcaccggcgcgatgctgcaggctcgcgagggcctgcgggccgagttcgtgcgcctgcaccggcggatgctggccatcgtccggggcgacgcggtctgccgccggctgatgacggtgccgggcgtcggcgcgctggtggcgctcacgttcaagacggccgttgacgatccggagcggttccgtagggccaaggcggtgggagcgcatttcggcctgacgccgaagcggtaccagtcgggcgagaccgacgtgagcggcgggatcagcaaggtcggggacgcgagcgtgcgcaccgcgctgtacgaggccgcgaacgcgatgctgacccgggtcagcggcatctcggcgctcgagcgctgggcgatgggggtcgccaagcgccgcggcatgaagcgggcgaaggtggcgctggcgcgcaagctggccggcgtcctgcaccgcatgtgggcgaacggcgccgacttccgctggggcgaggaggcggtcgcttaggaccacagcagggaacacgagttcggggtgggaccggacggtcggtcccgctcctccgaggtcccgtcgccgggacgcgggaaccggtgaggccgtgggtagtgctgtggatgccccgccgggggtggaccacgcgccttagattggcccgccggctcccttctgaccgcatgatgtggcggcccggtgccgaccacggacggaagcacgaggccggcgacgggatggtcactcgggggacttgacgcccgacggcccgttacgga

SEQ ID NO: 6750 - DNA, 1552 bp, unidentified
  source 1..1552: mol_type = unassigned DNA; note = element_a798514
  misc_feature 1..5: note = core
  misc_feature 6..250: note = LE
  misc_feature 251..1450: note = CDS
  misc_feature 1451..1552: note = RE
  misc_feature 24..221: note = bridgeRNA
tttgtacaatataagcatagatgaaaattactttagtgatagacatctatgcttattttttttatgataggtttgagtggtcaacgaagatagatttgggataaaacgcccgttacacaaagtgttgaccaacacatcctattcaatattcgattaagcaagttgggagaaacacccgtgtaaataacaaatatgaatcaataggatgatgttggaaccaatcgtaaataacatatggagatgattaataatgataggaattggaattgatatttctaaaaataaaagtacagtgtctgcaataaatgatactggagaaatcattatgaaaccacaagaatttaaacatagtgagaatgaacttaataagcttattcagtggattaaggatcaagaagatacagtgttcgtagttatggaatctacaggccattatcattatccagtattgaagaagttatatgaagaagggatatatgttagtgtagttaatgcttatctaatgaaaaaatatggggatatagagattagaaaagctaaaacagataaaaaagatgctattagaatagctaaatacgctattgaaaaaagatttagtcttaagaaatatgaaggtgaagatgaaaaatataatgatttaaagtttttatcgagacaatataatcaaatagtttcaatacgagtaaaggcaaagatacaatttaacaatcttcttgatgaaattatgcctggaattaataaaattttaactagaacaacaggaaattcaagcaagatattatatgattttgttgaaaagtatgaacactttgataatatcaaacgtaagggtgaacaaaagtttataaaagagtattcagcttggtccaaaaagaaaggataccgtaatggagcaattaaagcactaaaaatatatgaattggcccaaaacagtatcacaactagatctgctaataattctacatatattgctcttaaaaattgtattaaaattttaagagaaactgaagaatctagcaattctattttaacacagatgcaaacaattgcgtacacattaccggaatataaaattgttagggaattaaaaggtgttggtgataagcttgcaccaaggctaattgctgagattggagatgttagaaaatttacaagtgctaaagcattgaatgcttatgccggaaatgatgcacctccacatcaatcaggtcaatttgaaggaactaaaagacatatatcaaaacgtggttcttctagcttaagaaaagtcggatacgaaataatgatggctttaaaagttacaaaaccaactgaagataatgctgtttatgaatttatgataaaaaaagaatccgagggaaaagcaaaaaacgtggctaaaatggctgctcttaataagttcttaagaatttattatacacgcgttatgaatttatataaaacattgtaatagctagtccacttaataaagctactatgaagtagctttattaaggttacacttttttaggtatattaaattaaaaataatagttgacaaattattagcaag

SEQ ID NO: 6751 - DNA, 1460 bp, unidentified
  source 1..1460: mol_type = unassigned DNA; note = element_a7a811b
  misc_feature 1..2: note = core
  misc_feature 3..157: note = LE
  misc_feature 158..1204: note = CDS
  misc_feature 1205..1460: note = RE
  misc_feature 1231..1459: note = bridgeRNA
agaatgaaatggacgcctcccacctttaccagcggaacgacgaccggcaagcagagaggaagaggtagtggacaggtggaccctcgcgggccaacggcgtcagaagcgcctaaagtgaaagtgcgtgactttcaaggcaaaccggaggatccacatcatgaatgctactcgcaaaacggtggtcggtgtcgatacggccaaaagtgtgttccaggtgtacaccgtggtgcaggagacaggcgaagtgatcaacaagcccatcaagcgcgcgcagtttctgcagtggtttgccaaccgtgcaccttgcctggtcggcatggaggcgtgcggcggctcgcagcactgggcgcgcaagctccaggaactggggcacgaggtcaagctgatgagcgggaaaatggtcaaggctttcgtctgcggcaacaagaacgatgctgccgatgcgcgtgcgatctacatggcgacgcggcagccggaagtgaaagccgtggcggtcaagaccgaaggtcagcaggcggtgctggcgatgcaccggatccgccaacagctggtgaagatgcgcacggcgcagatcaacgaattgcgcggtttgctgggcgagtacggcgaagtgttcggcacgggcaggaaggcattcgaaaccggtatgaaaggggcgctcgagcggctggccgaaggcttgccggcaccgctgatcgacacgctgcgcgaccagtggagcgaactggcgcggctggacgagcgtatcgcccgtatcgaggcatcgctgcgggcatggctacgcgaagaccgcggcgccagggccatcgccgagattccaggcgtcggcctgctgaccgcgaccgcggcagtagcggcaatgggtcatgcgaaggcattccggtctggccgtgaattcgcggcctggattggcctcgtaccgggccagaccggtagtggcggcaaggtacggctgctgggcatgagcaagcgcggcgatacctatctgcgcaccttgttgatccacggggcgcgggctgtgcttcagcatgccaagacacctggcccatggttgcagcaactgagccaacgacggccgcccaacgtggtgatcgtggcgttggccaacaagatcgcgcgcacgatctgggcggtactggctcatgaacgtgcgtatgacaaggaccacgtcagcatgcggccactcgcggcggcagcgacgtgaagatcaacttacaacctacgaaaggatggcacgtcaccagttgcgtcaggtattacagcgatgacagataggtcagaccgggatccaccaaacctgaatgactgctggggcttatagcccgctaggagaatgaggtgtgggtcagcggattttatcggggcctgcggcactgccgcacacaaggccggatatagaactgcgactttcctcgtctgcacaaagctgaaaataccttgcaaaagggaggcgtccatat

SEQ ID NO: 6752 - DNA, 1226 bp, unidentified
  source 1..1226: mol_type = unassigned DNA; note = element_a7af989
  misc_feature 1..2: note = core
  misc_feature 3..239: note = LE
  misc_feature 240..1211: note = CDS
  misc_feature 1212..1226: note = RE
  misc_feature 6..212: note = bridgeRNA
cttgtatctcgactatcgctccgtcaggagtaatagttctcgactgatcatcgagggagggacttggaagccgcacagctgcttaggcttttagcctgtaacgtagatcgggctccaaccctccacactcactcgtgtaattcgtacggtatcttaggcccgccttcggcgagagcctgcatttgcaagcttggacagagtgcagtgatgatcgtaatcgacctgattgggagaggggtatgaccagtttcgttggcgtagatgttgctaaaaacacgtttgatattgctacacacctgccaaacggcaagcacaaaaccaaggccaagctgagcaacgatgccaagggtttcaaagagtttgaagcctggttgaacaagcatgttgagtcttctgctttgatcgtgatggaagcaaccagcgtctatcacttagagcttgctgagttcgtttacaacaagggttatcaagtctgcgtcgtcaatccagccacagctcattcgtacgctggaagcgaacttcgtcggatcaaaaccgataaaagcgacgccaaattacttgccgacttcgcccgggaaaaaaatgaaaagctgaagctttgggcaccagaaccactgaggtatcgccagttgaaagccatggttcgtcgtctggatgaccttcaggagatcgagcaaatggagcgtaatcgactcgaagtgtccgatgaaaaggtcaaggcctccatcaactcggtgttgcggcatatcgaaaaagagatcactgaaacgcataaaacgattaaaaaacacattgatgatgacccggacatgcgccagatgcgcgacttgatcgtcaccatcgatggcatcgggcagaaaacgattgagcggctgctggccgagctgggcgacctacgtaagtacgacgatcctcgtaaactggttgcagctgccggtcttaaccctaagctccatgattcaggccagttaaaggggcgctcgacgatctcaaaaattggttcggtacgcgtacgggcgggtctctacatgccaggtcttgttgcgttgaagcataacgaggcgatcaaagccatgaaggaccgcttgaaggccaacggcaaggcccccaagcagatcatttgtgctgcgatgcgcaagctgctgcattttgtttacgccgtgctcaagtcgggccagccttatgacccgaattttgctcttgtccggtgaggttcaagacggtat

SEQ ID NO: 6753 - DNA, 1424 bp, unidentified
  source 1..1424: mol_type = unassigned DNA; note = element_a7b841e
  misc_feature 1..4: note = core
  misc_feature 5..207: note = LE
  misc_feature 208..1410: note = CDS
  misc_feature 1411..1424: note = RE
  misc_feature 1..196: note = bridgeRNA
ctccgtaagttgttgggcggcccaggagggccggatgtggctgatgatgtcttgcctcgagtggctttccaggagtggccgtccggccctccggggtgccctggctgctgattgagatatgcgcgcgatacgtggtcgctgattacggagacgacagcggggtgctcctgggaccgaacctgtgccgtaacgagcgaggagtactgggtgaacccaccacgggcccgggcgtgggccggtgtcgacgctggtaaaggtcaccattgggcagcggttgtcgatgacaccggtgccacgctgtggtcgaagaagatcgacaatgacgagaccgcgatctggaccgcgttgggtgagatcctcgccctggccgaggaggtgtccttcgctgtcgatatctccggcaccgcgtcggcattgttgctggccttgctcgccgcgcacggcatttccgcggtgtatgtgcccggacgaaccgtcaaccgcatgtcgggtgcctaccggggagaaggtaaaaccgatgccaaagacgcttacgtgatcgatgaaacatccaggcacagaaatgatttcacgacgatcgaggtgcccgcgcagttggcggccgacctcgcgttgctgaccgcgcaccgcgctgatctggtcgcggaccgggtccggatgatcaaccggctgcgtgatgtgctgaccggggtgttccccgcgttggaacgggctttcgactacagcgcccacaagggggcgttggtgctgttgaccgggtatcaaaccccggccgcgatccgccggcgcgggcacacccggttgacggcgtggctggccaaccggcacgtccgctccgccgagaccgtcgcggccaccgcgatcgcggccgcggccgctcagcagaccactctgcccggtgaggccgtggccgcgcagatcgtggccgagctcgcgcgggcgatcctggatctcgacgaccggatcaaacgcctcgaaggccaaatccgggacaccttccgcgagcacccacaggccggcgtcatcgagtccttgcccgggttcggtccgatcctgggagcggaattggtcgtcgccgcaggcgatctggcgtcctacaccgatgccgggcatctggcgtcggcggcggggttggtgccggtccctcgtgattccggtcgacggaccgggaacctgcatcgcccgaaacgctacagccggcggttgcgccgggtgttctacctgtcggcgcagaccagcatcatccgcgacgggccgaaccgggacttctacctgaagaagcgcagcgagggctgcaagcacgtgcaggcggtgatcgcgttggctcggcggcgagtcgcggtgttgtgggcgttgctgcgcgacgatcgagtgttcacccccgctccgccggtcacgctcgcagcttgacaacctcattaaga

SEQ ID NO: 6754 - DNA, 1536 bp, unidentified
  source 1..1536: mol_type = unassigned DNA; note = element_a7b9159
  misc_feature 1..3: note = core
  misc_feature 4..260: note = LE
  misc_feature 261..1427: note = CDS
  misc_feature 1428..1536: note = RE
  misc_feature 15..240: note = bridgeRNA
tcttgtatactctatttatgattatagtagttaaacgagtatacattcctttcttatatttttatactataatctatatatggtactgtggatttggttcatttttttgtagctttgactaccataaggagactcttaccacagtcctattttttaactagcaataagttatttagcgcatgacgctcgatcacaagattatagaaaataggatctcgtgtgcaaacaacagtgccaaacaaattaaagaggtgattcatatgtatctagtcggtatagacatcgctaaatacagtcaccagtgttttatggctacaacacatggtgaaattatcaatgaattttcatttgataataattctaatgggtttaagttactacttaaacatttaagtgctctatatcaatctttagaaataaaaataggtcttgaagctacgggacactacggcaatactttaaaacaatcattaagtacaaacggttataccttcttagagtttaacccttatcttgccaaacatttttttaaatccaccacgataagaaaaactaaaactgacaaggttgatgcacgattattatcaagtatgttagcgtctgtagactacaagaccttacatactaaatattatcatattaatgaattaaaatcacttactagagctagaaatagtttaattgaatctagatcaaatgctttagtacaaataactaatgctctagatattatctttccagagtttaaatctcattttaacaatagattaggccttactgctctttatattctaaagaagtataaaactcctgaaagaattagtaaattaactaaaacacattttgaaacaatttcaaataaatcaatgggtaaatttacctatccaaagtttttaaaacttaaggaattagctagtgataccattggtataaaatctaattctatcgttacagttatgttagttcatattgatttattctattccattaatagtaatattgaaatgctagaaactgaaattaaatctataatgaatttaacaaattgtaaaatgattactattccaggcatatccttgatgtctgctgctactatacttggtgaagttacggattttaataacttttctaattcttccaaactaatagcattttctggttttgatatagctatacatcaatctggagaatccatgtcttatggtagattagttaagcgtggttcttctttacttcgaaagactatttggaatttagtcatcggaagtattagattaatacctgaaattactgaatactatcataagaaacgtgctgaaggaaaacatcgtaatattatcttttcagcaatatctcgtaaactaattcgtatcatatatcatttagaatctaataatattaattacgataaaaataagattagataaacattatgtagccaattgtttatttaataaatcattttttattaacctaatactttcaattaggttttttagtctttatatatttattcacttgacttattaatagtta

SEQ ID NO: 6755 - DNA, 1447 bp, unidentified
  source 1..1447: mol_type = unassigned DNA; note = element_a7ce96a
  misc_feature 1: note = core
  misc_feature 2..99: note = LE
  misc_feature 100..1149: note = CDS
  misc_feature 1150..1447: note = RE
  misc_feature 1195..1445: note = bridgeRNA
taatggaatgatccgcccctctcttcaaagctgtacaatgacagcttttaaaacggctcgtaacgtgagccaagacgccgaagtagaggagcgaaccacatgaaagagtataacgaaaaaaacgcgatcaaggtaataggcattgatttggccaagaacagctttcatgttcatggcgtaaatcaagcaggacataaggtgatgagcaagaaaatgagtcggcaaaacctcaaaacttttatgatgaacttgcctccctgccttgtgggtatggaagcttgtggtggtgcccattactgggcgcgtctgctacgcaactgggggcatcaggttaaattgattgcccctcaattcgtcaagccgtttgtcaaatccaacaaaaacgatgccattgatgccgaggccatctgtgaagcaatacaacgccccaatatgcgatttatcgctatcaaaaacacggcacaacaggatgtattggccatccatcgaatgcgcagtctggtggttggccaaagaacggcattggtgaatcagatcaggggactcttacaagagtttggtattgtgattcccaagggaagacggcatgtgaatcaatacctgcctcgtatactggaggatgccgagaatggtctcagtggtttgtttcgggaagcgttgcatggtctttatcgggatctgtcccactttgatcagcgagtggttgactatgatgacaggattgatcaaatggcccaagttgacgaacaggcgcaaaggctgatgaccattccaggtgttgggccgaaggtagcgaccgccttgctgggagccatcggcgatatatcggcattcaaaaatggcagagagctggcggcatggcttgggctggtaccacggcaatgctcaaccggaggcaaaagcaccttgcttgggatcagtaagcggggagatgtttatattagaaaattactgattcatgggtctcgttctgtgctcaactgggttgatcgaaaagatgaccgaaccagtctatgggccaaagaattgaaggcgcgtaggcataagaatattgcgtcagtggcattggctaacaggatagtccgggtcgctttcgctttattgaaacggggtgaggactacaagatagcagtgacaacgcccgcatgaaaaaaaacgtgaaagattaactgcaatagatcacgcgaacgaagacggtccaacgagttgcgaggagagaaaatcacagtgatggcataaaaggtaagacctgcatttctgtaatactgagaaaaacacggatccaaatcatggatttgagatcgacagagtgatgagaacagaaatgagcgtattccatcagggtacggggcacagacaatccccattaagataccggatatatggctgcaacttttcctttatgaccacggttatttttctcttgcaaaacggggcggatcatata

SEQ ID NO: 6756 - DNA, 1358 bp, unidentified
  source 1..1358: mol_type = unassigned DNA; note = element_a7d20d4
  misc_feature 1..2: note = core
  misc_feature 3..75: note = LE
  misc_feature 76..1101: note = CDS
  misc_feature 1102..1358: note = RE
  misc_feature 1125..1354: note = bridgeRNA
ttaatgagatggtcacccccacaccctgcgagggctacgctttcgcagggtgttttgttttcggaggccatcatcatgagcgagtcagcactggtcggtatcgatctcggtaaacacagttttcatctgcacggtcaggacaaatcgggttgcgaggtgtttcgcaagaagctctcgcgtccacagatgatgcagttcttcggcaacctgccggcctgtgtcgtggtgatggaggcgtgtgccggcgcgcattttgtcgctcgtcagctgatcgccatggggcatcaggccaaactgatttctccgcagttcgtccggcccttcgtcaagggcaacaaaaacgactttgtcgacgccgaggccatttgcgaagcggcctcgcgtccatcgatgcgcttcgtttcgcctaaaacagaggcgcagcagacgctttctgttctacatcgcctgcgcgaatcgctggtgcacgaccgcaccaaagtcgccaatcaaatgcatggcttcctgctggagttcggcatcagcctgcccaaggggctggcgatcatgaaacgtttggcgaatatcttggccgagcatgagttgccggttcggctcaccgtgctgttgcagcgactgcacgatcacttcgtttacctggatgagcagatcaaggaactggataaagagctggccagccagctggccgccgatgatctgggcagtcgtctgctgagcctgccgtgtgtcggcccgatcaccgccagcctgctggcggtcgaaatgggcgacggtcaacagttcaagtgcagtcgcgacttcgcggcgtctgtggggctggtgcccaggcagtacagcaccggaggcaaggcgaatttgctcggcatcagcaagcgcggtgacaagcacctgcggcaattgctggtgcagtgtgctcgggtctacctgcaaaggctggactaccagcatggccgcttggccgactgggtgcgctcaatgctgatgcgacgtcactcgaacgtggtggcctgcgcgttggccaacaagctggcgcgaatcgcgtgggcgctagcggctcaccatacgcaatatgaaacagggccagacgcgctgaacgcctgaccctgcggttgttgcagtaccacgaaccacccttcaggttttgcgatagctgaacaacggatgacgtgaacggcctaccggcctgacgaagaacctgacataaaaatcggcttcagaagccgcgcggtttttcaggatcgtcgggcgcgactctcatcgtggcgcggggcataccccggatagacgccggatagatttaagcaagccaaccacttcacccattaatcagtattgcaaaaatgggggtgaccatagat

SEQ ID NO: 6757 - DNA, 1426 bp, unidentified
  source 1..1426: mol_type = unassigned DNA; note = element_a7d5799
  misc_feature 1..2: note = core
  misc_feature 3..136: note = LE
  misc_feature 137..1156: note = CDS
  misc_feature 1157..1426: note = RE
  misc_feature 1177..1423: note = bridgeRNA
ggaatggacgcctccctcccgccgaagggtcggtgagggggagcagtaagggaggtgagccctcgcaagacccgacggcatcgaagtgccaaagtggagttctcgcaacttccactgaaggtcaggagggctcgccatgaacgctacgacatttggactggatctggcaaagcgggtgatgcaggtgcactgggttgaaggggaaacgggcgagatctgccggcggcaactgaagcgcggccaggtgctggagttctttgcccggcgggcgccggcggtcattgccatggaagcgtgcggcagcgcgcactactggggccgcaagcttgtggggctgggtcaccaggtgcggctggttgccgcccagttcgtgcggccgttcgtcaagaccaacaagaccgatgcggccgatgcgcaggcgatctgggaagcggcgcagcggccggggatgcggtgggtggccgtcaagagcgaaggccagcaggcggtgctgatgctgcaccggatgcgcagccaactggtggagatgcgcaccatgcaggtcaaccagctgcgcgggttgctctacgagttcggcgccgagttgccaccggggcggcgggcggggctggcgcgcatgccggaggagttggccaagctcgaggccgtgctgccggcgatggtgatcgacacggtgcgcgagcagctgaagcggattggcgggctggaccaggacattgccgagatcgagcggcggctggcggcgtggaagcaggacgatgcggccagccggcggctgatggcgatcccgggcgtggggctgctgaccgcgacggcggcagtggccacgatcggtgaggccaaggcgttcaggtccggccgcgagtttgccgccttcgtcggcctggtgccgcggcagtccggcaccggcgggcgggtgaagctgctgggcatcagcaagcgcggcgacgtgtacctgcgcacgctgctgatccacggggcgcgcgccgtgatcacgcacggcaagcagcacgatgcctggttggagcggctgctggcgcggcggccgttcaatgcggcggtggtggcgctggccaacaagatggcacgcacgatctgggcgttgctggcccatgaacggacgtaccaaaggaactacgcggccgctgccgcgtaaacgatcaacgaaccgaaggagtgtggatcgctgataggttgcgcaggtggatgtgcgattgatggcgtgacaggtcggaccgcggggaagagaagcctgaatgatggccagcccttcgagggctccatggagatgaggccttccccggcgaattccatcagggcccgcagactgaaaaccggtctgcaaccaaggccggatataagactgcagccagtccttctcgccaccatcaaacatcgcttgccaaaccgggaggcgtccatataa

SEQ ID NO: 6758 - DNA, 1426 bp, unidentified
  source 1..1426: mol_type = unassigned DNA; note = element_a7dd2b5
  misc_feature 1: note = core
  misc_feature 2..128: note = LE
  misc_feature 129..1148: note = CDS
  misc_feature 1149..1426: note = RE
  misc_feature 1185..1425: note = bridgeRNA
attgaaatgaacgcgtcccatccgtgaacgagtagacaacggaaggttgaccctcacgggccgacggcatcagagctcaaattgaaagatcatagaggtcttcgcaggccaaaaccggaggggctagcatgaactggacggcagtgggtgtggatatcgccaaaaacgtattccaagtgcattacgtcgatcaggttaccggcgaaatcgtgaataaaccaatcaagcgggcacagttcctagagcactttgcaaaccgtgccccttgcctaatcgggatggaagcgtgcagtggtgcgcaccactgggccaggcagcttgtaaagatgggccacgaggtcagactgataccggcggaatttgccaaggcgtttaacattcgcaacaaaaacgatgctgcggatgcacgggcgatctggctggccgtgcagcaaccaggcaaaccggtagcggtgaagaccgagacgcagcaggcgatgctggcactgcaccggatgcgccagcagctcataaaatttcgcacgatgcagattaacaatctgcgtggactgttgacggagtacggcgaggtaatgggcaagactcgtgcggccttggacaaggcgattccggaagttctgggacgggttgccgagcgactgcccgcagtggtaatcgacacgctgcgagagcagtggaacggactggcgaaattggacgagcaggttgcgcagatagagcgtcggatgcgcgagtggaagaaagaagatgaggcggtcaaggcaatcagcaagattcctggcgtggggctcctgacagcaacagcggccgtcgcgatgatgggtgatgcaagggcattcaaatcggggcgcgagtttgccacgtgggccgggctcgtgccaaaacagaccggctcaggcggcaaagtaaccttacacggcatatcgaaacggggcgacacgtacctgcgcacgctgctaatccatggtgcgcgagcggtgttgaggcatgcgaaggaaccaggcccatgggttgagcagatgatcaagcggaggccgatgaacgtcgtgattgttgcactggccaacaagatggctcggacaatcttggcggtactggctcacgacagaccgtaccagaagaatttcgtgagtgtgaagcccgcctgagtggatacggaatagaagactaacattaaatacaggatgaaagtccaaaggttgcgcagcaatcgagtgggatgactagtcaggtaggacctgggactcgctaaacctgtatgccgatacgagcttcgagctcgttgcctgaatgaggagcgagtcagcggatttcataggggcccgcggcgccagtaccggctgcatgaaggccggatagagagctgcaaccatcctgtcagtctgaacatacgaaaactgttgcaaaatgggacgcgttcatagag

SEQ ID NO: 6759 - DNA, 1457 bp, unidentified
  source 1..1457: mol_type = unassigned DNA; note = element_a7df084
  misc_feature 1: note = core
  misc_feature 2..194: note = LE
  misc_feature 195..1442: note = CDS
  misc_feature 1443..1457: note = RE
  misc_feature 1..237: note = bridgeRNA
cgttacctttttcgtggccccgcaatggggctcccggcctccggtcccggcatgactcaggtccccagtcggtcatgatcgaaaaggtgctgtcaccgggcacggaggcatcggcagaccgctgatcaggggcatgggcgccgatcccgcacagggtgaggcaggctcttcgtaacgtggatgccggcacgctgatgccgcaggcaggccgggacggttcggagtcgggatacaagatcgtgaacgagcacgagaccgtcgacatctatctgggcctggacgtgggcaagggtgagcatcacgccaccgcgctgaccccggccgggaagaagaccttcgacaagccgctgcccaacaccgagccgaagttacgcgagttgttcgccaagctgcaggccaaacacggcaccgtgcttgtcgtcgtcgaccagccggcctccatgggggctctgccgctggcagtcgcccgtgacatgaactgccaggtcgcctacctgccgggcctgacgatgcgccggatcgccgacctgtatccgggtgaggccaagaccgacgccagggacgcctacgtcatcgccgacgctgcccgcgcgatgccgcacacgctccgcgccgtcggcccggccgatgagaccacggccgagttgcagatggtcgccggcttcgacgacgacctcgccgccgagaacactcgcatcaagaaccgcctgcgtggtctgctcacccacatccatccctcacttgaacaggtcctgggccctcgcctggaccatcccgccgttctcgcactgctggaacgcttcggctcacccgcacagatccgcaaggccggacgtcgccgcctggtctcgttgctgcgaccgaaggcgcctcggacggcggagcgtttggcggacgacatcttcaccgccctcgacgagcagaccgtcgtcgttcccgggaccgaggccgcagcactgatcatcctcagtctggcctcctcgctctcctccgtcctcggccagcgcaaggccctggccgcgcggatcgaggaactcctggaggaccaccctctttcccaggtcctgacctccatgcctggcatcgggaccaggaccgcagcccgcatcctcatcgacgtcggcgacggcaccgcgtttcctaccgccgggcacctggcggcctacgccggcctcgccccggtcacccgaacttcgggctcctccatccgcggcgagcaccccgcccgacgcggcaacaggcagctcaaacgcgctctctacctcgccgcgttcgcctcgctcaagcaaccggagtcccgcgcttactacgacaagaaacgcagggaagggaaacaccacgtcgcagccgtcatcgcccttgcccgacgacgagtcgacgtcctgttcgccatgctccgtgacggcaccttctaccaagctccagctggcacatcagcttgacggagaccatagggg

SEQ ID NO: 6760 - DNA, 1155 bp, unidentified
  source 1..1155: mol_type = unassigned DNA; note = element_a7ef6d0
  misc_feature 1..2: note = core
  misc_feature 3..207: note = LE
  misc_feature 208..1143: note = CDS
  misc_feature 1144..1155: note = RE
  misc_feature 12..213: note = bridgeRNA
cttgtcttatgaaggtcccagcttttgtgcgaaacaagagccacagacaagcattttgaaatgcttgtctgtggtggtggttggatcgtttagagcttggtctttgaggaccgtatcagagtaagatcaaccaccaccttcgccacaggcctgaacggatacagagcggcacgaagccctctaggacaagcataggatatgacgaagatgcccgatgataccattggtatagatatttccaaagccactttagacattcaccggctgagcgacgggaagatgatgtcgtttagcaattgccctgcaggatttaaggcgctttccaagttctgcgcacagacgacggtaacacgcgttgtttatgaagcaacaggcgcttaccacggtgggctggagcgcgccttgggtgcgcatttaccattggtaaaggtgaaccctttgcaggcgcgccgatttgcgcaagcacaaggtgtacgcgcaaaaaccgacgccgttgatgcaaaaatgctggccgccatggggaatgcttttgcattacaaccagatgagccagccacaaaaatacaacatgaccttaaggagttacgctcattcagatcgggattgatcaaggatagaacgggcatcatgagtcgtctgaaaacccaaaccctgcccatcacttgccgtcaaagtaaaacccgcttggctcaagttgataagaacatcgctgaaattaatgctgagattgaccgtctgataaattccaatgacacgctggcgaactcaatgaaaattctccgctcaattcctggcattggtgcggtctgtgcttcaaccattctcatagagatgcctgaaatcgggagtatggaccgaaagcaggtggcttgtttaactggagtagcgccgatgacacggcaatctggacaatggcgagggaaatcattcattcagggtggtcgcaaagtagtgagggacgccctctacatgccagccttggtcgcgatgagattcaaccctgacctcaaggcaaaatatcaagccatgattaaagctggaaagccaccaaaagtcgcccttactgcgctcatgcgaaagctgattgaactcgccaacgccctcatcaaagcaaaccgaaattgggtgattaaagaggcttgatcaagacggata

SEQ ID NO: 6761 - DNA, 1354 bp, unidentified
  source 1..1354: mol_type = unassigned DNA; note = element_a7f4de9
  misc_feature 1..3: note = core
  misc_feature 4..79: note = LE
  misc_feature 80..1087: note = CDS
  misc_feature 1088..1354: note = RE
  misc_feature 1094..1341: note = bridgeRNA
tgatgtcgtggacggctctcgcaccagcctaagtatggcaaggtgcagtcgttgtaggtccacgtctaggagtcgttccatggagaaagaggttgtcaccgtcggattggatctggcgaaaaacgtatttcagatacacgcaattgggagtgacggtgaagtgcttgtccggcgcaagctgcggcgggctgaggtgatccgcttcttcaccgatttgccggcgtgcctggtcggcatggaagcctgcgcatcggcgcatcactggggccgcgagcttatggctctgggccatgaggtgcgattgatgccaccagcctacgtcaaaccatacgtgaagcgcgggaagaccgatgcggcagatgccgaggcgatctgtgaggcggtaacccgaccaacgatgcgctgcgttgctgtgaaaacggtcgaacagcaagcggtgttgatgctccataagagccgagattttctggtccggcaacgaacgatgttgatcaacggactgcgagggcaccttgctgaatacgggatcgtcactcgcgtgggcgccggaggggttaccgcatcattgaaggcgctccacgacgagcaaagcagactgccggctcatgccagatcagcgcttcacggcatcgccgcacagctgagagcgctttccagcgagatcgatcggctcgagacacagatccttgcatggcagacgagccgccgtctcgcgacgatcccgggcatcggcccaattaccgcatcagccattgcagctgctgtcccagatgcatcgttgttccgatcgggacgacagtttgcagcgtggcttgggctcacaccacgaccgcacagctccggtggtaaggagcgacttggcggcatcacgaaacagggcgatggttacctgcgaagacttctcgttgttggagcgaccgcagtcatgcgcgtggcgcgcaaggatgcgtctccccaaccctggatggcgcagctcctcgagcgcaagccaacaaagatcgcgacggtggcactcgcgaacaagacagcgcgcatcgcctgggcggtgatggcgcgtaaggaggtctacacgcccacggccgtgtaaaagttatcctcgccgctcgctcaaccgcgaacggcaggatcgcgcaagggcagctcagtagtgatgacgaaccggtcagaccgggggttggtgaaacccagggggtcacagcgcttcgagcgcgatgacgtgattagggagccaatctgcggacttcatcagggccagcagccatacggtgctgcgcgaacaggccgaacacatggatgcacccgaccgatatcatcaccgcagaaaaactcttgcgcagcgggggccgtccacaca

SEQ ID NO: 6762 - DNA, 1400 bp, unidentified
  source 1..1400: mol_type = unassigned DNA; note = element_a7f5b39
  misc_feature 1: note = core
  misc_feature 2..89: note = LE
  misc_feature 90..1127: note = CDS
  misc_feature 1128..1400: note = RE
  misc_feature 1172..1392: note = bridgeRNA
caatgggatggacgcccccaccctctacggcatcaacgtgccaaagtggaagtgtgatcgaccacttaacgaggatgggagcgtccaccatgaatattacaaccgtcggtattgatctggcgaagaacgtttttcaggtgcatgcggtcgatgaacggggcaaggttgtgctacgcaagcagttacgacgcgggcaggttgccgagttctttgtgaacctgccgccgtgcctgattggcatggaagcgtgcgcgagctcccatcactggggccgtacgctggagcgcttcgggcacacggtccgactgatggcgccgcagttcgtgaagccgtacgtgaaaacgaacaagaacgatgcggccgatgcggaggccatctgcgaggccgttggccgaccgaacatgcgttttgtgccgatcaagagcatcgagcagcaggcggttttgtcggtgcatcgggtacgccaggggttcgtcaaagcgcgcacggcgcaggccaaccagatccgcagtctgttgggcgggttcgggctggtgatcccccagggtatccgccacattgcccaacgcgttcccgcgctgctcgaagatgcgagcaacgagttgccgctggccttccgacagctgatcgagcggttggccgagcatctgaaggatctcgatcaacaggtacgggagttcgagcgccagatcgtcgcctggcaccgcagcagtgacctcagccgggagctggaaaggatcccaggcattggtccgctggccgccaccgcgctggtggcttcgatcgctgacgccaggagcttcgacaacggccggcaagtgtcggcctggctcgggctggtgccgcggcagagctcgagtggcggcaaatccactctcctcggcatcagtaagcgcggcaatgtctacttgcgcacgctgctgatccacggcgcgcgctccgccatcttggcggccaagcgccagagcgagtgcaagaacgtctggctcaccaacctgctcaatcgacggcacgccaatatcgcggccgtggcactggccaacaagaacgtgcgtaccgtgtgggcgttgctcgcccatgggcgcaagttccaggccgactatgtgccgacacgcatggccgcgtagcctgcccattactgacgacgaccgctagaacaggagatcacaccaccgattgctcaggcaaccatgcagtgatggcgaaaaggttagaccttggttggccaaacccagaatgtctgcagcacctcgagtgcgaggaagcaattgcggagccagccagcgaataccatcagggacagcggcccgcgccgcagcaaaagtccggatgtacaggtgcaatccatcctttcaagccgtcatgaactgaaagcctggacaagtgggggcgtccatgta

SEQ ID NO: 6763 - DNA, 1425 bp, unidentified
  source 1..1425: mol_type = unassigned DNA; note = element_a7f9314
  misc_feature 1: note = core
  misc_feature 2..77: note = LE
  misc_feature 78..1136: note = CDS
  misc_feature 1137..1425: note = RE
  misc_feature 1187..1416: note = bridgeRNA
taatgggatgatccggccgtgctcctgccctgtcagcaagtaagctggcaagaggcactagatgaaaggagcacaccatggctgagaaacttaacagtgtgatcgccgtgatcggtatcgatatcggcaagaactcgttccacgtcgtcggtctggatgaacgcggtgcgattttgttgcgtcagaagtggtcgcggggccaggtggatagccggctttccaatatgccaccctgcctgatcggcatggaggcctgtgtcggtgcacatcatctgagccgccggcttagggcgcttggtcacgatgcccggctgatgccggcgaagtacgtccgcccctattcgaagggacagaagaacgacttccgcgacgcggaggcgatcgccgaggcggtccagcggccaacgatgaagttcgtggccacgaagagcgcggaccagctcgacctgcaagcgctgcaccgcgtacgcgagcggttggtcagtcagcgcactggcattatcaatcaaatccgtgccttcctgctggagcgcggtattgcggtgcggcgggggcaacgcttcttgcgtgccgagctaccgggcatcctggccacgccctccgatgtcctgtcgccacacatggttcgcattgtcgaggacttggctggcgattggcgccggctcgatgatcgcatcgaggctctgtcagcagagatcgaggatctggcccacaaggactctggctgcgaacggctgatgacggtgcccggcatcgggccgatcatctccagtgcgatggtggctgcgatcgggactggagatgcgttctccaaaggccgtgactttgccgcctggctgggactcgttcccaagcagatctcgaccggggaccgcacgatcctgggcaagatatccaagcgcggcaaccgctacctgcgcgtcctgttcgtccaagcggcttgggtcgtgctgatcaagccgaagagttgggagcgccacgggctcaagccctggatcgaggctgccaagaagcggctgcaccacaacgtgctcgcgattgcgctcgccaataagctcgcccgcattgcctggagtgttctggctcgtggccggggcttcgaggtgcggtcgatcgccaccgcccaacctgtttgatcgtccagcccgtgataaggggcacgcaatgatgtagttcgaaaaccgttacctgccgaggtctgcgagaggctcagaagagatggaggatcggtcttcccggcgcctgcgaacactggtgaccctaatggccccttgtggcctgtccgctaatgagatcgcacgcgcgctgatatccatgatggcccggagcgccacaagctccaatcgaaggccggatacattgatgcaagaccgtacatcccccttctcgacgaatacctcttgcgacgcacggccggaccataca

SEQ ID NO: 6764 - DNA, 1405 bp, unidentified
  source 1..1405: mol_type = unassigned DNA; note = element_a8043ca
  misc_feature 1..2: note = core
  misc_feature 3..78: note = LE
  misc_feature 79..1107: note = CDS
  misc_feature 1108..1405: note = RE
  misc_feature 1105..1392: note = bridgeRNA
tgttggggtggacggcccccgaacggcatcaaaaagtgccagagtgagtcgttggatctcaaacataggggaccgtccgtggacaagattatccgtgtcggtattgacacgtcaaagaatgtttttcagttgcatggggtaaacattgccgagaaaccggtgttgcgcaagaagttgcgccgcaaggaaatggtggatttctttacgaaatgcccaccgaccgtgattgcgatcgaggcttgtggcgcttcccatcactgggctcgattgctgacctcgctcgggcatgaggtgaaattgatcgcgccgcagctcgcaaagccctatgtcaaaagaaacaagaatgacgctgctgaggcgctatgcgaggcgatgagtcgcccgacgatgcggttcgtaccagtgaaaaccgccgatcagcaagcttcgctaatgttggtcaacatgcgtgagcgggctgtcgccgagcagacgcggttggtcaatacaatccgtggccatgcggcagaattcgggttgatcgccgcccagggcatctctcatattccgcagcttcttgaacgtatcatggtcgatgaaaatattcccgccttggctcgtgacctgttcgcctctctcgcccaggagtttgcacagttacatgaacgcgtgaaagagctggaggcaaaactgatgaccatatatcgcggcaacgaatgctgccgccgtctttcaaaaatccccggtgtcgggccgatcggggcagtactgctcgtgatgaaagcgccatcacctgagctgttcgcctctggaaggcagtttgctgcctggatgggcttgacgccaaaggatcattcgactgccggcgaagtcaggcttggggttataacgagagccggtgatgaggctttacgcaagacattggtggtaggcgccaccgctgtgcttcagcaggtccgtgcgggacgtgggcgcaacgcttctctctggctagatcaattgctcaagcggaaggtgccgaagcttgtggctgtcgcactggcaaacaagattgcacgcattgcctggaaaatgatggtgagcggggaggcatacagacaaactgcgcagccagccagcgtggcatagaggtcagctcgtttaggcacgtggtatgacgccgccttaattagctgacacgtaaacttgcaagaaacgacagatggtatggtcgatcgatcgaggctgatattactccgtggcatgcaatgatcgctgtggtcgtcaatggcagcggcagatcgcaaatatgtttggaatatcagtcgcgaaacccatcttggccagcgatcatgtgcgagcgcaccaacaggccggacatatgcacgcaagcgatccgatcagaaatcatcaaaaacattcttgcaggaagggggccgtccacata

SEQ ID NO: 6765 - DNA, 1341 bp, unidentified
  source 1..1341: mol_type = unassigned DNA; note = element_a819fa5
  misc_feature 1..2: note = core
  misc_feature 3..82: note = LE
  misc_feature 83..1093: note = CDS
  misc_feature 1094..1341: note = RE
  misc_feature 1078..1328: note = bridgeRNA
tgatggggtggatggccccctcccaccggtgctgtggcaggatggttgccatcggaccccagcaggacaggagtgcgccaagatgcagatcacgacggtcggcctcgatctggccaagcatgtcttccagcttcatgccgtgaatgccgccggcagcgtcgtcgagcggcgtagtctgcgccgcgggcaggtcctggcctattttgcaaagctctctccctgcctggtcggcatggaagcttgcgcgactgcgcattattgggcacgggagttgcgcaagctcggccatgaggtctggctgatgccagcccaatatgtgaaggcctatgttcggcgcgggaagaccgatgctgcggatgcagctgccatttgcgaggcggtgagccgcccaagcatgcggttcgtctcggtcaaatcggaggatcagcaggcggtgataaccatgcaccgggcccgtgacctcctggtccggcaacgcacacagctggtcaatgccgcgcgcgggcatctggccgagttcggcttggtccaatccagaggccttgcgaacatcccagccctgctggacagcatgcgccaggacccggccattccggccctggcccgtgaggtcgttgaactgctcgcggcacagctggatgcggtggagaagcgcatcgcggacctcgaagcaaagatcaaggcttggcatcaggcgagtccgacaagccggcggctggcaaccatccccggtatcggtccgctggtcgccagcgccattgcggccgccattgccgatcccatgttcttccggaacggccgggagttctcggcctggctggggctcgtgccgcggcagaaatcaaccggcggcaagcagcgcctgggacggatcagccggcagggtgatcagtacatcagacgcttgctgatcatcggagcgcagaccgtgctgctgcggtccaggatgatgcggtccaacccatggatccagggcatgctggcacgctgcccgcgcctgaaagtcgccgtggccctggcgaacaaaacagcccgcattgcctgggcggtgatggcgaaggcggagccctacaggggagcggctatggcataagcagagccgtccaccgaaggaacgcttgctggggagaggtgatgggatggtcggcggcgtgccgacgggttgggagaacctggagaagagatgggccttgaacccgagtatctgatgaggacccgacctgcggacacccataggggccagcggccatgtgcgccgcgtgaaaggccggacacatgactgcaagcaacctgcccgccaaacctcaacttttcccttgcgagccgggggccatccacaca

SEQ ID NO: 6766 - DNA, 1203 bp, unidentified
  source 1..1203: mol_type = unassigned DNA; note = element_a82365c
  misc_feature 1..2: note = core
  misc_feature 3..225: note = LE
  misc_feature 226..1188: note = CDS
  misc_feature 1189..1203: note = RE
  misc_feature 28..201: note = bridgeRNA
cttgtatgttcctcccggctcctacgctgtatgtaggagccagggtggagggaccgtcaagcatgcatctgcggataccagccgacagacgagtcgagcgatccccatcccgcacacgaacgtcgataaaggatcgtacggcccccaaggggatcgtcgatgtaggcaagctaacgtcggtgcggtaccaccccagccctttaaagatagctgggagccgtacaaatgtctgattctctcgatattggcgtggacgtggactccaaggagttcgtgccggcggtggccgaccgcaaggccggtgacagggtcgccaacacccgggccggcatagccaagtggctcaaaaccttgccccagcgatgccggattggcatggaagcgacggggcggtactacgagttgttggctcggatggctggccaggcgggccacgttgtctatgtaatcgatccacggctgatcaagaactacgctcgggcgacgggctcgcgcggcaagacagatgccatggatgcccaagcgatcgcccgctatgtgaagaaggagagcgaccgcctgcgtgaatacgtaccgcgtaccgacgagcagcagcagatgcatgatttgctgcgcaagcggcgagcgctggtggagacgcgcgcgcgcctggagcaatccttcggggtaagcaaaagtgaccctggggagctatcagatctgttctgcgctctggctgggacgctgtccgagctggaaagcgaactgcagcgcttgggccgcgatggagagcatggcgcactctacaagcgcctgctgaccatcccgggtatcggccctgccgtcgcgtcccacctgatttactacatgacgcgctggccgttggccaacgccaacgcgtggatcgcctgcactggcctggatcctcggcccaacgagtctggcggtagaactggacggcgtcggctgtccaaacagggcgcaccgatgctgcaccagatgctctacatggccgcaatggggctcaagcggtgtcgccgggggcaaccgctctacgacgagctgtcaaaacgcggtcaccccagcaccgccgtcttcaacattctggcaaggaagctggccaggatcgcctggggcgtgttcaaaagcggccgagacttcgatccggccatgctgaaggtcggtcaagcctgcttccagcaggcttgaccacgaacataggat

SEQ ID NO: 6767 - DNA, 1478 bp, unidentified
  source 1..1478: mol_type = unassigned DNA; note = element_a823b4f
  misc_feature 1: note = core
  misc_feature 2..245: note = LE
  misc_feature 246..1463: note = CDS
  misc_feature 1464..1478: note = RE
  misc_feature 44..211: note = bridgeRNA
cgttacctttttcgtagcccgggtcctgttgcaggatgagggtgtgttggccggtcggtcccggcatggttgctgcccccagtcataaatgatccggggggtgttgtcaccgggaccggcttgggcggcagctgatcgctgatagaggcacgacgagggtccttcgtaacgtggatgccgacacctgccgccgctgaccggccagcacgcgactgtgacagtgacagacgaacgagggagcgggcatggcggtgatcgtggatcagcaggacgtggacgtattcatcggtttggacgtcggcaagtccggccaccatgcggtggccgtgaaccggtccggccggaagcttttcgataaggccctgcccaacgatgaggcgaagctgcaggagatcctcgccgggctcaccgggcacgggaagatcctgctggtggtggaccagccggcgaccatcggggcgctgccggtcgcggtcgcccaggccgccggcgccgccgtgggctacctcccgggcctggcgatgcgccggatcgcggacctgcacccgggccaggccaagaccgatgcccgggacgcgatgatcatcgctgaggccgcccgcaccatgccccacacgctgcgctcgatcgccctggatgatcagctgctggccgaactcggggtcctctgcggcttcgatgatgatctcgccgggcagatcaccgcggtctccaaccggatccgcgggctgctcacccagatccacccggccctggaacgggccctgggcccgcacctggaccaccctgccgtggcggacctgctcacccggtaccccacaccggccgcgctgcgcaccgccggacgaggccatgtccgggcccggctgaagaaacacgcaccccgggccgccgaacgcctcaccgaggccgtcttcaccgcgctcgggcaacaatccgtcgtggtcgtaggcaccggcgccgccgggatcgtgctgccgaaactggccgagcagctgctgtccctgcggcgccagcgcgatgagatcactgcccaggtcgaggccctggtggaggcccaccctctttaccgggtcctgacctcgatgcccggtatcggcgtcaggacctgcgcccggatcctcaccgaagtcaccggcaaacacttcgccagcgccgcccacctggcctcctacgccggcatcgccccggtcacccgccgctccgggacctcgatccgcggcgaacacaccagccggcgcggaaacaagaaactcaaacgtgccttgttcctctcggccttcgccgccctgcaccacccgccctcacgggcctactacgaccgcaaacgcgccgaaggcaaacgccacaaccaggccctcatcgccctagcccgccgacgctccgatgtcctcttcgccatgctccgcgacggaaccctctaccaagacccacaaccacggaacctgccatcagcggcttgacgaaaaccatagagg

SEQ ID NO: 6768 - DNA, 1359 bp, unidentified
  source 1..1359: mol_type = unassigned DNA; note = element_a827b62
  misc_feature 1: note = core
  misc_feature 2..71: note = LE
  misc_feature 72..1076: note = CDS
  misc_feature 1077..1359: note = RE
  misc_feature 1124..1357: note = bridgeRNA
taatgagatggtcacccccaccttaacagcagtacgctgttaaggtgaatccctttaacggagagaccatcatgcagaacatcacacttattggtatcgatctcggaaagcactccttccacattcattgtcaagacaagtttggtaaggctcttctgcgtaaaaaatttacccgtactaaactgatgcagtttctggcgacatgtccgccctcagttgttgtaatggaagcctgtgcgggtgcacactttatggctcgtcgtatctctgattttgggcatgaaactaagctaatttctccacagttcgttcgcccgtttgtcaaaagtaataagaatgattttgttgatgcagaagccatatgcgaagcggcttcacgaccatcaatgcgttttgtccagccaagaactgagcccctgcaggccatgagggcgttacaccgggtccgagaatcactcatcagagataaggtgaaaacaaccaaccagatccacggtttcttgctggaatttggaatcagcctgccgacaggtgatgctgtaataaaacggttgtctctcgtgttggctgaacacgaaatccccgaatatctgagccgccttttggtgaggttgcatacccactacctttaccttgttgagcaaatagcagagctggaatcagaattaagtcagtcaatcaacgctgatgataccgctcagcgcattatgacaattcctggtgttgggccgattactgccagcttactatcgtcgcaacctggtgacgggaaacagttttcatgcagcagagattttgcggcttccacagggctcgttccccggcagtatagcacgggaggaaaatcgactctgttgggtatcagtaagcgaggcgataaaaatttgcgccggttactggttcagtgtgcccgctcattcatgatgcggcttgaacgccagcatggaaaacttgccgaatgggttcgggagcaactcaacaagaagcattcgaatgtggttgcctgcgctctggcaaataaactggctcgaattgcctgggtaatcactactcagcaaaaagaatatcaggcttgatataaatgctgatataactcaattggcgtattgtaaacaataagatacaaagttgcctgtctggttttgcgaagactgattattgatgacatgaacggcaaatcgacctgattaaaaacctaataaataaaatggctcactgaagccgaggggctttttaggattatcaggtgcgaaactcatcggggcgcaggcatccttgcctacagagacgccggatagatttaagcaagcccaccattaattaaaaaatcagtgttgcaaaaacgggggcgaccataga

SEQ ID NO: 6769 - DNA, 1399 bp, unidentified
  source 1..1399: mol_type = unassigned DNA; note = element_a827bd7
  misc_feature 1..2: note = core
  misc_feature 3..130: note = LE
  misc_feature 131..1165: note = CDS
  misc_feature 1166..1399: note = RE
  misc_feature 1166..1360: note = bridgeRNA
acatggcgtaatcgcgggagcgagtcgcccttgagacaatcatgcatggaagcaggtggctgttccccgataagatgaggatacgggctcacgactgatagccgggcccaccattgaacggagaacaaccatggaagaatatatcggactcgacgtgtcgttgaaagagacggcagtttctattcgccgcgatggcaagcggatttggcgcggcaagtgtgcctccgatccgaaggtgatcgcggaagtcattcgcaagcgtgcgcctgcagcactccggatcgtgtttgagaccggtccgttgtcggtgtggttttatcatgcgctgagtgccgaaggatttcctgcgatctgcatcgatgcacgccatgccaaagctgcactcgatatggcggcgaacaagacggatgccaacgatgctgacggactggcgcatctcgcagaggtcggcttctatcgtgaggttcgggtcaagggctttgacagcatgctaacgcgcactctggtcgcagcacgcaccaagctggtccacatcaccaccgaactttccaatcaaatccgaggtctgatgaagacgttcggcttggtcgttcctccaggcaagggaagcaagtttgaagagcacgttcgcgaacttgttattgatcgaggcgatcttgcgaccatcgtgattccacttctggaatcctggcgtagcatccgcttgcatgccgccgaacttgggcgccagctcgttgctggtgcacgccaaagccaagcctgtcagcttctcatgtcgatccctggcatcggtgcgatcaccgccacttcgttcgccactgcaatcgaggatcccggcaacttccgacattcacgttcagtcggcgcctggcttggtctgacgacgcgccgttaccagtcaggagaagttgactataacggtcacatctcccgacgcggcgatagtcacctacgcacccttctctacgaagcggcaaccgtcatcctgactcgtagctcggcggagagcagcttgcggacatggggcctccagctcagagagcgcgtcgggttcaaaagggccgccgtggctgtcgcccgtaaactggctgtaataatgcatgcgatgctgaaatcgggcgagttcttcgatcggaccgcgggagccccggctccagcggcttaaaggtttgcgttcgccttgaacgcttagatacgtccctgccggggcgtggacagagccattccgttgatggggttgcactgctggttaccagcacagtgcgtcatccacattggaagactcctcccgcgaagctccatcatgcggcggcttctgccgaccgcgaagacgaccctgcacccggcatacggcatcgaagtgaagaaaggcacttgcaatttgacccgcaattagacg

SEQ ID NO: 6770 - DNA, 1586 bp, unidentified
  source 1..1586: mol_type = unassigned DNA; note = element_a8355c5
  misc_feature 1..4: note = core
  misc_feature 5..355: note = LE
  misc_feature 356..1561: note = CDS
  misc_feature 1562..1586: note = RE
ctcactgggctaccctccccgagaggtgagagaggacgtcatccgagggggtatcaaggtattgcccgcgcctcgatcgtcgatcctgagggcaatgggcgatcccatttcttgggcggcgccggttggggcgctcattgtagacgggaaccgaactggacggattcggggagagccgagctcgcttgccgctcgacggccacgatgagacctgctcccccgaaccaaaccgagagaggcccagaccggccacaggatgaagcgccaagtgccgcgacagcccagagcgcctatcagtgagcgaccggcaggacctctcgccctgcagtgtctcgccgtcccccgaggtgacgcaatgcaattctccgtaggcatcgactgggcgagccaggcgcacgccgtctgtgtcatcgacgacaccgcgcgcggccactggcacgggtccgttgcgcacaccgccgaggggctcgccgaactgcttggccacctgcggcgcttccgccggcgcggccccgtgcgcgtcgccctggaacgcccctcgggcctgctcgtcgacacgctcgtcgacgccggcttcgaggtcgtgcccatccaccccaacgtgctgaaggccagtcggccacgctattccgccgccggcggcaagagcgaccccggcgatgccttcatcctcgccgacctgctccgcaccgatggccatcgcttccggcccctccgcccgccctccgacgacacgcgcgccctgcgtgccctcgtgcgcggccgggacgatctcgtcgcccggcgcgtcgccctcgccaatcagctccgcgcgctgctcgagcgcttctggcccggcgcggtcgggatcttcgcggacatcgattccccgatcgccctcgccttcctcagtcgctaccccaccccccagagcgccgcgcgcctcggcgaaaaacgcctcgcgcagttcctccggcaacatgcctactgcggccggcgccccgtcggcgatctgctcacccgcctccagagcgccccggccagccaggtcggcgaggcggaagccgacgccgggggcgaagtcgtccgggccctcgtcgccgtgctcacgccgctcgtcacccacatccagcacctggccgccggcatcgacgccgcgctgtcccagcatcccgatggcccgctcgtgcagagcctgcctcgcagcggcgccgtgaatgccgcgcagatcctcgccgagctcggggacgatcgcgcccggtttccgagcgacgcgcagctcgcggccgaaggcggcctcgccccggtcacccacgcgtcgggcaagcaccacgccgtcgtcttccgctgggcgtgcaacaagcggctgcgccgagccctgaccaccttcgccgacaattcccgccacgcctcgcgctgggccgccctcgtgtaccagcgcgcccggcgccgcggctgtcgccaccaacacgccgtccgcatcttggcccgcgcctgggtgcggatcctctggcgatgctggcaggaccgcaccccctacgacctcacccgacatcgcgccgcgcaggcggtcgccgcctgacgtggcgagggttgacacaggatgt

SEQ ID NO: 6771 - DNA, 1455 bp, unidentified
  source 1..1455: mol_type = unassigned DNA; note = element_a83bc7b
  misc_feature 1..2: note = core
  misc_feature 3..237: note = LE
  misc_feature 238..1440: note = CDS
  misc_feature 1441..1455: note = RE
  misc_feature 12..201: note = bridgeRNA
tccttacctttcttggagggtgttcgttgccgctggccttaggcttcgagtcacccaggggcagcgggtatggctttcatgttgttgccgtaggtgatggccgaaggagattggccgcctgttgtcccgcgacgactcgaccgctaattgagagatgcgattggatcgctgtgtaaggacacgacggcgtggtcgtctgctgggttgacagaaacgacagcgagcagggaggtggttgtggcgcaacccttgtgggccggagttgatgctgggaagtcggatcattactgcgtggtcatcgacggtgacggaaagcggctgttgtcgcggcgggtaactaacgatgaagccacgctgcaggaattgatcgccgacattgctgcgctggctgatggtggtgagatcacgtgggcgatcgacctcaacgccggtggagcggcgctgttgatcgccctgctcattgccgctgagcagctgctgctctatatcccggggcgtaccgtgcaccacgcttcgggtggctatcgcggtgagggcaagaccgacgccaaagatgctgcggtgatcgccgatcaggcgcggatgcgtcgcgatctggccccactgcgggctggggatgacatcgcggtggagttgcgcatcctgaccagccggcgcaccgatttggtggccgatcgcacccgggcgatcaaccggctgcgcgcccagctgttggaatacttcccagcgctggaacgtgcgtttgactacagcgccagcaaggccgcgttgatcttgctcaccggctatcaaacccccgatgggctgcgccgcgccggcgccgcccgactggcggcctggttgcgtaaacgcaaggcccgcaacgctgatggaattgcagccgccgcgatcgaggcggctaacgcccaacacaccgtggtccccggtcaacaactggccgcggccatggtggcccggctggccgtggaggtgatgacccttgacaccgaaatcggcgacaccgacgcgatgatcgaggagcgatttcgccgccaccgccacgccgaaatcatcctgagcatgcccggctttggcatcatcctcggcgccgaattcctggccgccaccggcggagacatcgcggctttcggtaatcccgaccgcctcgcggccgtcgccggcctggccccagtgccccgtgactccgggcgcatcagcggcaacctcaaacgcccccgccgctacaaccgacgactgctgcgcgcctgctacctggccgctcacatcgccatccgcaccgaccccgcatcgcgggcctactacaaccgcaaacgcaccgaaggaaaacgccacacccaagccgtgctggccctggcccgtcgacgcctcaacgtcctgtgggccatgctgcgcgaccacaagacctatcaacccaccgcgcctaacgccgcggcggcttgacatcttcattgagaa

SEQ ID NO: 6772 - DNA, 1417 bp, unidentified
  source 1..1417: mol_type = unassigned DNA; note = element_a845e93
  misc_feature 1: note = core
  misc_feature 2..95: note = LE
  misc_feature 96..1133: note = CDS
  misc_feature 1134..1417: note = RE
  misc_feature 1188..1412: note = bridgeRNA
caatgggatggactcctcctcaccccactccggcgttaacgcgccataataatgagtgagtcaaacgatcatcttgaggatgaggagtagcctaaatgaccattattcgagttggcgtcgatatcgcaaaatccgtttttcatgttcacggcgttgatcgtcatgatcaggttctctggacgggtaaatactcccgccagaaatggctggatgctttatgcaagcgagtacccgcaggggctgaggttggcattgaagcctgcgcgtccgttcatcactgggcgcgagagctacaggctcgcggatatcatgtgaagttgattgctgcgcagtttgttaagccgtatgtaaaaagcaacaaaaatgatcgagtcgatgccgccgccatctgtgaagcaatgagtcgcccccacatgagatttgtatcggttaaaacggtggctcagcaagacatccaggcgatgcaccggattcgggaagagctggtgggtcaacgaacagccaaagccaaccagattcgaggcctcgtgggtgaatatggcatcgttgcgcctgttggcatacaggaattgcgcaaagcgctaccctgctggctggaaggtgcggacaatgggctgacggatgcttttcgttgccttttaaatggattagctgaagatcttcgtcacctcgacgatcggatcacgtcactggatgaaaggatttctcagagcgttcaacaagaccccatcgcaagcaagttaatgacattgcgtggtgtggggcccatgacggctagcgctttagcgggggcactggggaacggagaagccttccgtaaagggcgcgactttgccgcttcattaggactgacaccgaggcagcacagcaccggtgggcgagaccgcctactcggcattagcaagcgaggcgacagttacctgaggaaactgctcgttcatggtgctcggtccgtgctctgccacgtaggtgaaaaggacgacaacttaagtcagtggatcaaagggttaagggctcgaaagcatgtcaacgtttccattgtcgcgttagcgaacaaaacggcacgaatggcctgggctttggttcgccacgatatggaatatgacccaaggctggcagccgcagcgttataaactggaaagaggaggattaagttgctcctcgaacagccttaaagagcagaccaccacgattgcagagcagtttggttgatggcgaacaggtagaaccgatgctgggaaacccctgccggacggagagcttaaagctcgtgtaagcgtttgggaaccagcatgcgaatagcccatcagggtccgatgcctacgaaacggcatcattacagagaccggatacacgtaggcagtcgtaccttatcgcgatcgaacaaagtgcttgcaatagaggaggagtccataca

SEQ ID NO: 6773 - DNA, 1670 bp, unidentified
  source 1..1670: mol_type = unassigned DNA; note = element_a8469db
  misc_feature 1..3: note = core
  misc_feature 4..293: note = LE
  misc_feature 294..1565: note = CDS
  misc_feature 1566..1670: note = RE
taatctccattccgccgccttcggctggcggcacaaataataatgaaagtgtttcaactctctacgttatgctttaaaatggtttgcagaagctatactacaaagcacgtgaggagggttgtaataactttcttcgtttttagacaacataataatcagtgtaagttctgccttttcaagcacaaataagtggcatcacgaatccgtacactaagaattgcttaagcgccttagtttaattgtgtggcagttcagtcaatggcttcttatcattttacgaaaggagtctgactatgaaagttacttaccaaacctgttgtggtgtcgatgttcacaaatcttttctcgttgccacgattgtaaaaactacgggtggcattgaaccatcttaccaaaagaagcgcttttccacctttaacaattcaattcttgagttcaagcaatggcttctcgacaatgattgtcgtgatgtctgcatggaatccacaggtaaatactgggttcctgtctttaatcttctggaagatgagatcaatgttgtcattgccaatcccaagtgggtaaaggctgtgaaaggcaacaaagatgataccaaagattctaaatggattggggatttattccgtctcggacttgtcaaaggcagctatatcccttgtaagatagtccgtattctcaggggaatacactcgctatcgttgcaaagcttgtttcctgccgttcaagtgaaaaagaatcgataccagaatgctcttactgtttgtaatgttgcattagattctgttgtttccgatatctttgggaagtcatccacgtccattatcgactatctacttgaacaatcgggtacatccattaaccacgaagaaatcgcatctaagcttcttcggagcctcaaatccaaagaagatgctgttatagaatccgtcgaaggatatcagatgactgatgcccaaaaataccgtatgcgcctcgtccgcgcacatatggattatatcacagcagaaatcaaagatgttgataaaatgatagaaaatatgatttcttctaatcctgattttgaaaatgctgtccagttcctctgtaccattccgggtgtcaaatgtgatagtgcaataactatcatctccgaaatcggtacggatatgtctcagttctcaagttccaaacgtttatgctgttgggctggtttaacacctggcagcaatgaatctgctggtaagaagaaatctgttcggattacacgtgccggagtctacctcaaacctgcattagtacagtgtgctcatgcagccgtaaaatctgaccaatctccttactacaaaaagaaatatgaatctcttgttaaacgtcgtggcaagaaaagagccattatcgctattgcccgtatgattcttactgccatctaccaaatgctgtctactggcgagcagtggaatccgagcgaccttataaaatcgatgtgcctgaagctcttattgaaaaacaaaaaggcaaaaagctatcaaagcaagccaagaaactattgcaacgagagggactacttcctcctgatgagccagtagcttcttaatcgaattttctaactcaataacacttcaaaaagttgcctgccttagacagcttagttaagtgcgccaatctggctatccctatactttctttcacac

SEQ ID NO: 6774 - DNA, 1545 bp, unidentified
  source 1..1545: mol_type = unassigned DNA; note = element_a847da0
  misc_feature 1..2: note = core
  misc_feature 3..249: note = LE
  misc_feature 250..1422: note = CDS
  misc_feature 1423..1545: note = RE
  misc_feature 3..227: note = bridgeRNA
ctcgtattatataaatatacccattctttacctcttctataggtatagggtatgctgttgaagatgctgtggattggttgcaatttcctaccgctgagacggtttctcataggctccgaccacagcctctttgtcaaaaatgttaatcagttagataccgcacgacggtttatatagaacgaggttacatcggcagagagttttgtggatcaacagcagcatcaaatacttttaaggaggatcatgtgtatgatctatgttggtattgacgttgcaaaggataagcatgattgctgtatcctgggttcggatggtgaagttctattctcaccatttactatccaaaattcgttacagggatttgacgagttgtacgataagatttgctcattaagctcagactcttcagaaataaaagtaggtctggaggctaccgggcattatcatatgaatctcctacgctcgctccttgataacggcctggacagctatgttatcaacccgctacatacaaatcttttcagaaaaggtcagagccttagaaagacgaaaacggataaagtcgatgcatcttcgattgctatgatgttattgaccgataagacactcaagccctactcggattcatcataccacaacgaagaattaaagtctctcactagatatcgtttcaacaaagtttctgaacgttctaggttaaaagtctctatatccaggcttgtaagcattctttttccagagttagaaaagctagtgcctacccttcatatttcttccgtctacgctctattatctgaatatccgggagcatcatatattgcatcagccaaccttactcacctaaagcaccttcttagcaaaaaatcaaaaggtcactatggacgagatatggcaattgccataagaactgccgcagcttcatccattggaaccatcatccctgctaaatccatggaactaaaacatacaatacgtctggctgaagtcataaccgaagagattgatgaaatagaaaccacaatcaattcaatcatgaaaacattagaatcaccaataacttcaatcccaggtattaacactcgtatgggcgccatgattcttgctgagattggagatttctcgcgctttgataatgctgaccaaatcttagcttatgctggcctttctccatcaacatatcaatcaggcaaactaaccgcctcatactcacatatggagaagcgaggatctcgctatttgcgatatgcattatttaatgctacgcggtatgtttgcttatgggatccaacttttagtgcatacctagccaagaagagagccgaaggcaaacactacaatatagcaatctcacatgcttgtaaaaaactagtaagaatcatctacaggatgcaattaactggcgagctctatcatcaagcataattaccaaaatatccctcattctttttgagcgcccatcaggatgctcttttcgtcatgcagttttcaaggtactgatcgtagaaacaaatgtctttgtttctggcttgacatttaatagttagt

SEQ ID NO: 6775 - DNA, 1302 bp, unidentified
  source 1..1302: mol_type = unassigned DNA; note = element_a84a691
  misc_feature 1..2: note = core
  misc_feature 3..227: note = LE
  misc_feature 228..1217: note = CDS
  misc_feature 1218..1302: note = RE
  misc_feature 7..213: note = bridgeRNA
tcctttagattcgaaaaatgaatagaatgttagttttgttaaaaaacaagacaaaccgaaaaagagtttgggtgaactatccgagtctttaaattatagatttatgccccgaataagtcccttactcttttagttgaaatgtgccagttagaattataagaacaatgtcttactaaaggatttagcaaattcaacaatttcggtttgtccaaactaaaaacaaaattatgaaaagaaattggtttatcggaattgacatttcaaaaaagactcttgatgtcgtaatttatgatcaggaaaagaaaaatgcgagcaagcattttaaagtgaacaatgaattaaaaggctttaaagaaatgattaagactctaaaagcaggaggagttgtgcttaaagaggcttttatatgtcttgagtattgtggagtctacgggttagaattaggtttgtttctggaaggaaagattgatttctgcttttgttctcctttacacataaaacgcagcttaggtttaaccagaggcaaaaatgacaaacttgatgcatataaaattgcctggtttagttatttgttcagggatgaactatcaccatctaaaatgcctacagagacaatgcttaagctgaaaagcctgatgggcgaaagatatagggttgtaaaggcatctgctacagaaaagcaggtattaagggagttatccagacagctagacagtaaatcaattagaaggataaaacacagacttaaaatattagcagctgatataaaagcaatagaaaatgaagtaaaggagctaatccagagtagtcctgcattaaaaaagaattatgaattgttaattagcataacaggtatagccctggttaatgcaacaatgatgatattatgcactaataatttcgaaggaataatcaatgccagagcatttgcctgttactgtggtgtggccccatttgaatacagctcaggaacaagtatacgtggaagaaccaaagtgagtaacctggctaataaacgcatgaaggcggatctgacaaacgccgctcgctctgcaatagttcatgatccggaaatgcgcatctactataaacgaaaaagggctgaagggaaggaatatggaacagtaataaacgcagtgaaatttaaaattattacaagagcttttgctgtgataaaaaggggaaccccttttgttaaattaagacaagctggataaaaataagaaacgacttaatttgaaaaattaacttttaaaaaaataattaaaataatatccgaattgtttgatttagtcttagaat

SEQ ID NO: 6776 - DNA, 1571 bp, unidentified
  source 1..1571: mol_type = unassigned DNA; note = element_a84eb8b
  misc_feature 1..2: note = core
  misc_feature 3..247: note = LE
  misc_feature 248..1426: note = CDS
  misc_feature 1427..1571: note = RE
  misc_feature 19..226: note = bridgeRNA
ctcgtattataaagtagtagtgtttatagtccctctccaaggactgtatgctatactattggagatactgtggattggtttccacctcctaccacttgatggttcttgaaaggctccaaccacagtctctttgtatatttgttaatcagttagttaccgcatgacggtttatttagaacgaggttacaatcgcaaagagtaccagtggttctaaacagtatcaaattttatgcaaaggagtatttttatgatttacgttggaattgatattgctaaagataaacatgattgttttatcactaactcagatggcgaagtattattcaaatcgttcaccatctctaacaatcgggaagggtttgaaaccttatttcaaagaattaaatctatttcagatgatttaactaaagtaaaagtaggactggaagccaccggacactacagctacaatcttctgggattccttcttgataaaggtctgaccacctgtgttatcaatccgttacataccaatctttacagaaaaagtctaagccttagaaagacgaaaacggataaagttgattcccataccattgccgctatgctaatgtctgatttgaacttgaagtcctactcagacatatcttaccacaacgaagaactaaagtcacttactcgttaccgtttcgataaagtaaaggagcgggctaaattgaagtcttctatttccagactggtaaatattctgtttccggaactcgaaaaactggttcctacgcttcatatggcttcgatttatgctatgttatccgaatttcccggtgcttcccatgtggcatctgcacaccttacaaagctggcaaatctattttctcaaagctcgaaaggacattacggcaaggataccgccattcttttcagagaagctgccagaaactccatcggctctgttatgccagcaaagtctttggaactaaaacataccatcaaactaattcaggaattaactactgagattgatgaaattgaaacagctatcaagcagatcatggatgaagaaatcaaatcccctatccttaccattcccggtatcagttaccggatgggagctatgattcttgctgaaattggtgatttcagccgttttgattctgcggataaaatacttgcatatgccggaatgtcaccctccacttatcaatccgggcaactggataattgttattcacatatggaaaaacgtggttccagatacctccgctatgcactttacaatgctaccaaatacgtttgccactgggatgaatctttcggtgcatatctggagaagaaacgttccgaaggcaagcactataatgttgccctgtcccatgccacgaaaaaacttgtaagaacaatttttgctatggaaaaatcaggacaggcataccgagtaaccgtttagctttattctgtaaatatctccttttagagcacctgcaaagatgctcttattgtcatgcagttttcaaggttcaaataaagctgaaatgcatttctgcaattcattcaaaaaacttcatttttagatttgacttttaatagttagt

SEQ ID NO: 6777 - DNA, 1189 bp, unidentified
  source 1..1189: mol_type = unassigned DNA; note = element_a85e42d
  misc_feature 1..2: note = core
  misc_feature 3..208: note = LE
  misc_feature 209..1186: note = CDS
  misc_feature 1187..1189: note = RE
  misc_feature 33..194: note = bridgeRNA
tcctttagatttgaaaaagattaaattgtaaaaaaagaagagaatagagtttgagtacactataatgaattcagagctatattaatctcataagctgataaagactcaactctttcttatcaaattctcaaatagaaattcgggcttataacccattagtaaggaatcgagttattgataagtttctcttctcattaaattcaaatttatggaaaaaattattattggaattgatgtaagtaaattaactttagacatctgtattcaagaaactggagtgaatcgttttgataacattcctaatacagaaaaagcaatcaaagtttttttcaaacagtttgataagaaacaagatattttgattggaatggaaaacaaaggtcgatttaacgctatgctttatagtgttttaatccatttttcttttactgtttatgtaatcaatcctttgcatttgaaaagaagtatgggattggttagaggtaaaaacgataaaattgatagtgaacgcatcgttcaatttttatcgaaaaattatatggatcttcagcaatggaaacctaattcaaaggtcattgaaaaaattaaactattgaatgctgaaagaaaacatcgagttaaaataagagcaggattattagctcaaacacaggacgatcaattcttaaaaccaactatggataaagctgtattgcgtttaaacactaaactcatcgatatattaaccaaacaaattaatgaaatagaagatagaatctatcagctaatttgtgaagatgaacaactttacgatcattataaaagaatacaatcaatccctggagtaggaaaagttttagcatttaatatgttgataaaaacagatggttttacaactataaatacgccaagacaaatggcttgttatgcaggagtagctccatttgattttcagtctggaacatctataaaacgaagaccaaaagtatcaactatggcagataaagagttgaaaaaactattgcacttagcagctatgagtgctattcggttagaaaatgacttggcgatttactatcatcgaaaagttgaacaaggtaaaaataaaatggctgttttaaacgctgtgagaaacaaaattattcatcggatttatgctctaattaaaaatcaaactatttataaaaataacttgattttgtcatagaaa

SEQ ID NO: 6778 - DNA, 1271 bp, unidentified
  source 1..1271: mol_type = unassigned DNA; note = element_a860649
  misc_feature 1..2: note = core
  misc_feature 3..227: note = LE
  misc_feature 228..1259: note = CDS
  misc_feature 1260..1271: note = RE
  misc_feature 19..239: note = bridgeRNA
ctgacttgttgaatcgcggccaggacgccagggtctgcagcccgtagcgtccagggtgccggccgtctggctcgcaggctccttgccacctgtgggttggctcactgatagcgtgccgggttgcggccggcacccgccgtgacgtggctcaacagaggcgtgtgcccacctgaagtcaggctgcccgtcgcgggatcgcccctgtccgccgcgacgaaaggccgtctgtgatcaccatcggtatcgacccccacaagcgctcgctgaccgccgccgccctggatccccacagccgcctcctgggccagctgcgcgtgtcggccagcgctcaggcgggcagccagctgctggcctgggccgagcagtggccccagcggcgctgggcggtggagggcgccagcggcctgggccgcggcatcgcccagctcctggtggccgccggcgagcaagtggtcgacgtgccggccaagctggccgcccgggcccggctgctgtccaccagcagcgcccgcaagaccgacctggccgacgcctgctcggtcgccaccgccgccctccaccaccgccggctgcgcccggtcgccctcgaggaccagacggtgatcttgcggctgcggtccgaccgccgcgacgacctggtcgccgaacgcacccgcatcctgagccgcctgcatgtgctgctagccgacctggcacccggcggggccacccgggagctctcggccacccgagctgccactctgctgcgccgggtccggcccatcacggtggtcgacgtcgagcgcaagcggatcgcccgtgagctgctggccgacgtgcaccgcctggaccgccagctcaagacggccagccaggccatccgccaagcggtccgcgaccacggcaccaccctgacccagatctatggggtcgggccggtcctggccgccaagctgctcggccatgccggtgacgtcacccggttccccgaccgtgaccacttcgccagctacaccggcaccgccccggtggaggcctccagcggcgacgtacgccgccatcggctgaaccggggcggcaaccgccagctcaacaccgccttgcacctgatcgcggtctgccagatccgcgatcccagccccggccagagctactaccggcgcaaactcgaccaggccaagacccccgaggaggcccgccgcagcctcaaacgccacctcgccaacgtcgtctacagccacctgaccgccgatcaccgttgccgcacccgggcctgttgacacacagaggcg

SEQ ID NO: 6779 - DNA, 1382 bp, unidentified
  source 1..1382: mol_type = unassigned DNA; note = element_a8628e0
  misc_feature 1: note = core
  misc_feature 2..69: note = LE
  misc_feature 70..1101: note = CDS
  misc_feature 1102..1382: note = RE
  misc_feature 1141..1377: note = bridgeRNA
caatggtatggaccccgccctcccgccgggtcgaatgtcggacgtgaactgcagcgaaggagaaccatcatgcaggtcgttcgaataggcttggacttggcgaagtacgtatttgaggttcacggcgtcgacgagcgtgggaatgttgtcatacgcaaaaccttgcgtcgtggatcggtggcgacgttttttgctaatctgccgcgttgcttggtcgggatggaagcttctaacggcgcgcactattgggcacgcgtgcttgcggaacttggtcacaaggtgcgactgataagcccgcagtttgtggcgccgtacgtgaagtcaaacaaaaacgatcggaatgatgcggaggctatctgcgaggcagtcggccgaccgacgatgcgctttgttcctccgaagtcacccgaacaactggcgatccaagccctccatcggattcgccagcgtctggtgcaaagccggacgaggctcgtcaatcagatacgtggcgtcctctccgagcatggcattgtcatcgcccgtgacatctggaggctgcgacgggctcttgccgagatcacgggaaatgccacggacgacctcaacgcgctggtccgtgtgctcaccatggaagtccaaaccgaattgatcgagcttgaccgtcggatcgcattttacgatcggcggatccgagagctgtatcgcactagcgagctgtgccaaaagcttggggaaattgaaggcatcggaccggtgaccgctaccgcccttgttgccgccgtgggggatcggagctgcttcaagaatggccgtcagttcgctgcatggctggggcttgtgccgaagcagcgatcaagcggcgggcgaaaccgattgttcggcatcagcaaacgcggcgatcgctatttacgcacgttgatgatccacggcgctcgcgctgctcttgggaaagcagggggtaagcaagacccgcgaagccgctggctcgctggcctacggcaacgtcggcatccgaacatcgccgccgtggcgctcgcaaacaaaaatgctcgtatcgcctgggcaatgctcgccgggaatgtctcttacgaaccggcgcgatccgttcaggcagcttgatgcgaggtaatcgacgaaggacgtgaggaagtcttacctggcaattgcaaccaaatgacaggagatggtgaaacggtcactccgtcgcttcccgaacctggtgtgtggaccggcatggcacaggccaatgtcttggcgccgttgaggtggaagcgcgcgaaaatccatcggggctcgcggcgccgattctcgggccgcatcaagaagccggatatacgtcagcagttgtgaccgttgcgccggatcacgtcagagtgttgcaatcgggcggggtccatata

SEQ ID NO: 6780 - DNA, 1353 bp, unidentified
  source 1..1353: mol_type = unassigned DNA; note = element_a86e31e
  misc_feature 1..2: note = core
  misc_feature 3..83: note = LE
  misc_feature 84..1097: note = CDS
  misc_feature 1098..1353: note = RE
  misc_feature 1120..1340: note = bridgeRNA
tgatgaagtggatggctcccgcttccggcatcgcaatgtgccatgttgggtgccgagaacacggccaacaaagggagccatccatgaatgagattacaacaatcgggatcgatctggcgaaatctgttttccaactgcacggggtcgacccgaaagggactcctgttctgcgccggcaactcaggcggagtcagatgcttgaatttttccagcacctaccgggctgtcttatcggcatggaagcctgttctggtgcgcattactgggcgcgcgagttgacgagactggggcacgacgttcggctgatgcagccttcatacgtgaagggctacgtgaagaggggcaagacggaccaagcggatgcggaagcgatctgtgaagcagttacgcgcccatcgatgcggttcgtgccggtgaaatccgagaaaacccaaagccagttgatcacccacaaggctcgagaattccttgtgcgccaacaaacgcagatcgtgaatgcgatccgagcgcatctcggtgagttcgggatcgtcattgcgaaagggatccagaacaccggccggctaattgaggccagcgacaaggcaacgcttcctggcgccgcccgcaaagcattgaacctcctggccgatcaactggtggacacgcagaagaagatcgaagacctgactgctgacgtggctagcgacgccgcgtccaacgaggccgcccggcgtctgcaaacgatcccaggcgtcggcccgatcaccgccagtgcgctggttgccgcgctgccagccgtctcggatttcaaatccggccgcgatctctccgcttggatcggcctgacgccaaagccccactcatccgggggcaaggagcggctggggcgaatttcgaagatgggaaaccgatacctccgacgcctgctctatctcggtgcaatggctcaggtcagcgcccggcgacgaggcgcacccggcgacgactggctgtggaaaatcacccagcgcaagaaacccaagcaggcggccatcgcgctggccaaccgaatggcgcggacggtttacgcgctgctgaagaacgggacgaaatatcaggcagcctgggccgcctgaacggaaccggggatcaccccgacagaaaggcaagtgcatcgtgagatgatggcaaaaggcgggaaaatcgcgaaggacaccctgttcgaaccggagcgcccgagagcgcgtgccattgattgggacccaagcgaccgcggaattcatcagggcgcgcagtcagtgaactgcaattcagacgccgtatacatggccgcaaccgaccagacgccaaatttgaccgatccgctcttgccacgcgggagccatccataca

SEQ ID NO: 6781 - DNA, 1354 bp, unidentified
  source 1..1354: mol_type = unassigned DNA; note = element_a8721ab
  misc_feature 1: note = core
  misc_feature 2..75: note = LE
  misc_feature 76..1104: note = CDS
  misc_feature 1105..1354: note = RE
  misc_feature 1122..1348: note = bridgeRNA
gaatgacatggatcccctctataccccgatctgccacacttaggtgatcgcggtaagaaaatgcaggaggtttccatgtctcagctactttgtttttgtggtgttgacctggctaagcaccacttcacactccacgccgttgacgcgaatggcaaggttatccttcataaagccgtttcgcgcgccaagctactggctaccgtcgcgctactgccgacttcacgtatcggtatcgaagcctgcagcgggtcgcatcactgggcgcgtcagttcaataagctcgggcacgacgcacggatcatagccgctaaatacgttacgccttaccgtaccaaaggcaaaaatgatctcaatgacgccgtggcgatttgcgaggcagtgcaacgtcccaatacgcgatttatcccgattaaatcaccagagcggcaagccatcttagcgatacatcgaatgcgcgaacattgggtgcgtgaacgaacagcgctcatcaatcgtcttcgcgcaatgctggcagagttcggtcttatcatgcccgttggacgagctgccgtgcagagaatgatcccagagtaccttgaagatgccgacaatgagttacccgatattgccagagctatcgtggctgatggttaccaacatctacacgtacttaaccaacgtatcgatgaaacggagcagagcttcgaactcgtgctctctgccagtccgcaggcgcagcgtattcataaagtaagaggtgtggggcctcaaacggcgacggccattattgccgctatcggtaaaggcgaccaatttgataaaagccgagatttcgcagcgtggttaggcttggtgcctaagcagtattccactggcggcaagccaaggctgggacggatcagtaaacgtggtgataaatatctacgaacattgcttgtgcacggcgctcgagcagtgataaccaatcttggggagaaagaagataagttaagtacatggtgccgcgagcttttagcagggcgaggaatgaaccgtgctatcgttgcactcgcggccaaaaatgcgcgcattatttggtctctattacacaaccaaaccgagtaccaagactacgccgccagttaatactgacgacgcagaaataccaccaaccgggtcattgcagacgctaatgatggagataggttcagaccatttgcggatagcctgttaatgcggcgggcacaacagatgccttctaacgaatgaggcaccgcaaccgcgtaacgtcatcagggccacgacgtgagtcgataaaaggccgtatgtagagcggcagtccacaacccatcaactgaagtttagcggatgtttgacaaccgaggggatccatgta

SEQ ID NO: 6782 - DNA, 1384 bp, unidentified
  source 1..1384: mol_type = unassigned DNA; note = element_a8776db
  misc_feature 1: note = core
  misc_feature 2..89: note = LE
  misc_feature 90..1124: note = CDS
  misc_feature 1125..1384: note = RE
  misc_feature 1149..1379: note = bridgeRNA
taatggaatggtcgccccctactcgaaacggcatcgaggtgccaaagtggagatggtgtagttccacttaaaccgagaggaggcgacagatgaaggttacgacagtgggtatcgatttggcaaagaacgtgttgcaggttcatggcgtggatgggcggggtaagacggtgttaaggaagcagatcaagcgtgaccaggtggcggcgtttttcgccaatctgccgccgtgcctgatcggcatggaggcctgcggcagcgcgcatcattgggcgagaaagctgcaatcgttcggccacacggtgaagctgatggccccgcaattcgtcaagccatatgtcaagacgaacaagaatgatgtggctgacgccgaggcaatctgtgaggcggtagctcggcccaacatgcgcttcgtgccgatcaagacggctgagcagcagagcgtgttgtcgctgcaccgggcgcgccaaagcttcgtcaaggctcgcacggggcaagccaaccagattcgcggtttactcggcgagtatggcgtggtgattccacagggaatcggttatatcgccgagcggctgccgcagattctggaagacggcgagaacggcctgcctggccagttccgcaggctcttggagcggctgggagagaacttgaaggaaatggatcgacaggtggatgagttggagcgggaaatcaagacgtggcaccgggaaagcgaagcgagtcgaacactcgaggagattccagggatcgggccgatcacagcgagcgcgctagctgcatcggtaggggatgggaagtgtttcgaaagcgggcggcagatggctgcctggctgggtctggtgcccaggcagcactctacaggcggaaagcaaacgctgcttggcatcagcaagcgcggggatacgtatctgaggacgttgctcatccacggggcgcgttcggtagtccgggtttgcgagcgcaagcctgaaacggatagctggctgatacggctgacggggcggcgcaacaggaatattgcggccgtggcgctggctaacaagaatgcacgtatcgcgtgggcactgttggcccacgagaggcagtacgcgtcggattacctgccgacaccagtaaatgggtagcacaacgcaaccggcataacggaggcacaccacagattgctcaggcaagcatgacatgatggcaagataggtcagaccgtgatcggacaaacctggccccggcagtgcactttaagtgcgaggctttgctgaggacccgatcagcggattccatcagggacagaggcgtcagtcttatcgaaagtccggatgtatggctgcaatcttttccttctggctgtcatggattgagtgcttggcaaaccgggggcgaccatgta

SEQ ID NO: 6783 - DNA, 1374 bp, unidentified
  source 1..1374: mol_type = unassigned DNA; note = element_a888c79
  misc_feature 1..19: note = core
  misc_feature 20..327: note = LE
  misc_feature 328..1314: note = CDS
  misc_feature 1315..1374: note = RE
  misc_feature 131..301: note = bridgeRNA
aaaagaggagatccttcggccttcggccttcggcctcaggatgacgaaaacattaatgatgtcatcgtatattaaatatactaaaaattttttaaactataagagaataagttttataataattatagacatgggagaaaaaaagaaggacagatcaagtttctgtcattggtcttttaagaccgatcaggatgttttagactgtccttcctctacttcctaaaacctgaatcagaacattaggcttttaagcctgtatttaactacgatgataggttatcaggaagtttctttcatgtcaagtattttatgaaaggaggtactattatgaacagctacaaaattgttataggagttgatgtatctaaaaactcattcactgctacagttttgtatgataacaagaaagaaacttttgaagttaaatctgacccagttgagtttgaaatgaaagtaaagccttaccttaagaagtttaaaaagtcagatatgcttatcataatggagcatacgggagtttaccatttaaagcttgctaattatctgtatgaaaatgactataaagtagcagtagtaaatccattttcaataaagaaatttatggaagctaaaatgacaagagttaaaacagataaagctgattcattctttatagcagagtatggaagaacgtttttcgatggagagctttataaaccaaaatcagatgtagaaaaagaaatagaagtaaaactaaagatattggaagacttacaacagcagcttacaatgctaagaaacaaaagagaatcattaagtcatgtaccaatgaaaaaattgaaagagaatttagaatattacgatgagctaattagaaaaatagaaaaaaacataaaagaacttgagaaagagataaaagaattgtctaagaagaattatcaagaggaatacaaacttttaaaaagcatacctggtataagtgataggactataggaatgataatatcagtatatggaaattttgaaagatttaagagtgtaaaagatatatcgagttttataggaattaatccaagcccatatgaaagtgcagcatgtgtaaagaaaagtggctggataaaaaagatgggaaatccatatgcaaggaaaatattatacatggcagcattatcagcaataaggtttaacaaatactgcagagaattatacgaaagattagtaagtaaaggtaaggctaaaaagttagcattagtagctgtagcacataagttattaaggcaggcatatggtgtattaaagaataaaagaccatttgatgaaaatttttgtacttgacatttaacatagaacatcctgagcgtcagcgaagaatctcattttttaaatcaaaaaatc

SEQ ID NO: 6784 - DNA, 1397 bp, unidentified
  source 1..1397: mol_type = unassigned DNA; note = element_a890797
  misc_feature 1: note = core
  misc_feature 2..78: note = LE
  misc_feature 79..1128: note = CDS
  misc_feature 1129..1397: note = RE
  misc_feature 1159..1388: note = bridgeRNA
taatggaatggtccggccgtgctccggccccgcgagcaagcgaagctggcaaggggcgccaaagccaaggagcacgccatgtcacacaagctcaattctgcaatcgccgtgatcggtatcgatatcggcaagaactcgtttcacatcgtaggccacgataaacgcggtgcaatcatgctgcggcagaagtggtcacgcgggcaggtggaaacacggcttgccaacctgccgccgtgtctaatcggcatggaggcttgcgtcggcgcgcatcatctcagtcgcaagctccggatgcttgggcacgatgctcggctgatgccggcgaagtacgtgcgcccgtattcgaagggacagaagaacgacttccgcgacgccgaggcgatcgccgaggcggtgcaacgtccgaccatgaagttcgtcgcgacaaagaccgccgagcagctcgacttgcaggcattgcaccgcgtgcgtgagcggctggtcagtcagcgcaccggcgtcatcaatcagatccgcgccttcttgttggagcgtggcgttgccgtgcggcaaggcttgcgcttcttgcgcgctgaattgccacgcattctcgccacgccctgcgatgtcttgtcgccgcgcatggtgcgggtgatcgaagacttggctggggactggcgccggctcgatgagcggatcgagaatttatcgagtgagatcgaggttcttgcacgccgcgatgtcggctgtgaacgcttgatgagcgtaccggggattggaccgatcatctccagcgcgatggtggccgcaatcggcaccggcgatgcgttcacgaaaggccgcgacttcgccgcttggctggggctagtccccaagcagacctcgaccggggaccgcacgatcctcggcaaaatatcgaaacgcggtaatcgctacctgcgcgttctatttgttcaggccgcatgggttgtactgatcaaacccaggagctgggatcgtcacgggctcaagccgtggctcgaggcggccaagaagcggctgcatcacaacgtcctcgccatcgcgctcgctaacaagctcgctcgcattgcgtggagcgtcctggctcatggtcgaactttcgaggcgagcaagactcaggtcgcatgattattcaacgcgactagtcaaaaccctttaacctgccgaggtctgcgagaggatgagacgagatggaggatcggtcttcccggcgcatgcgaacactggtgacccaaatggcccgttgaggcctgtccgctaatgagatcgcacgcgcgctgatatccatgatggcccggagcacaaaaggctccaatcaaaggccggatacattgatgcaagaccgcacatccgccaactcgacgaaatcctcttgcaacgcacggccggaccataca

SEQ ID NO: 6785 - DNA, 1393 bp, unidentified
  source 1..1393: mol_type = unassigned DNA; note = element_a891a16
  misc_feature 1: note = core
  misc_feature 2..79: note = LE
  misc_feature 80..1123: note = CDS
  misc_feature 1124..1393: note = RE
  misc_feature 1125..1381: note = bridgeRNA
atgatggtgtggacggccccctacggcatcgagtgtgccagaatgaggttgttgcaaatctcagacaagggagccgtccgtgaaccagattatccgcattggaatggatacgtcgaagcatatttttcagctgcacggggttgatgccgccgagcagccggtgttgcgccggcggctgcggcgcaaggaaatggtggcatttttttccaaactgccaccgaccgtgatcgggatggaggcttgcggagcttcgcactactgggctcgggagttgggacagttcggccacacggtgaagctgatcgcgccgcaacacgtgaagccctacatcaagcgcaacaagaacgacgggcgtgatgccgagggcctgtgtgaagcgatgagccggccgacgatgcagttcgtggcggtgaaaactgaagagcagcaggccgccctgatgctggcgggcatgcgcgagcggctggttgcccggcgaacgcagctgagcaatgcgatccggggctacgcggctgagttcggcctgactgtggccaaaggtctcgacaagatcgagccgctattggctgacatcgcggccgacgaagcgttgccgggactggcgcgtgagctgtttgcgatgcatggcagagaatatgcgcacctgcaggccgagctgaagaagatcgaggccaggctgatggcctggcaccgcgccaatgccgacagccggcgtctggcgcagattccggggattgggccgatcggcgccacggcgctggtcatgaaggcgcccgatcctcgcctgttcccgtccggccggcacttcgcggcctggatcgggctgacaccgaaagaccattccaccgccggcaagacccggctcggcacgatcacccgcgccggagacgagatgttgcgcagcgtgttagtggcgggagcgaccgcggtgatccagcaggcgaggcaaggccgcggccatgcgtcgccctggttgctcgcgctgctggcgcgcaaatcgtcgccgaagctcgccgcgatagcgctcgccaacaagattgcccgcatcgcctggaagctgttggtgacgggcgagagctatcatgcaggcggcaagccgatcgcatcggcgcacgccgcctaacagagatcggtcgggcggcccccttcgggctcgccacctcgaccggtgccggagctgcaagaggagcagatggtaggatcgatcgatccgaggtgcgagacactccgtgggacccattggcccgtaaaggtcgctggcgtgtttggaactcgcgtcgcggaaaaccatcttggccagcggtccaccgaccgtatcaacaggccggacatatggatgcaagcgatccgatcagacctcgaaaaactcttgcggcacgggggccgtccacat

SEQ ID NO: 6786 - DNA, 1551 bp, unidentified
  source 1..1551: mol_type = unassigned DNA; note = element_a89c026
  misc_feature 1..4: note = core
  misc_feature 5..268: note = LE
  misc_feature 269..1456: note = CDS
  misc_feature 1457..1551: note = RE
atcatgtataattctaaatataaagatttcaaagttaaaattttgatttttttatgtttttttgctattataaatggcaatcggtaaagacggagtataacaggcacttagagtgcgtttttgtgaatgtctaccatatgattatttattaattcggttgtagataatggaaactaatagaaatattaaagttcggatgattaagcatgtaggaatataagtggtcgaatatggtttaaccgaaatatttaagaaaggagtttaaattatgagtcatattttaagttttgatattgctaaagataaaagtgtttattgttttattgatgaattaagaaatgtaattattgatgcaacattaattaaacataaaaaagatgaatttgatttattatttaataaagttaaaaatcattctaatttaattgttattatggaatctacctcaatttatcatttaccagttgaaaattttttcagatctaaaggtatagatacaattgttatgaaccctaaacttgttaaacaatttaaagatactttaaataaatctaaaactgataaacttgattgttttaaaattgctagatgttatttaggtactattgataatttttatcaaaaacaagatgaatattttatgtgcaatcctcttgctcgtcaatattggtcattagttgagggacaaactagattaaaaaatagatacagacaactcattgatattgtttttcctgaatttgctttaattttcaacgatttatatgatgatttagctttaaattttatccatgattttcctcatccagtattatttgttaatcgtagaattgattatttaatgaattatttaaaggaaaagaatggaacaactcaagcttatagattcaagaataaagttttaaaaatgaaagaacttgcttccaattctttatgttttgttgcttttgattcttatcaagttcaaaatctagttcaagtaattgaaatgattcaatatcataaatcagaaattaataaaatcaaaaaccaacttattaatgatatgaaagataaagagttatttaagattattaattctattcctggttttggtgaattctctactgctttgtttctagccgaagttggtgacataactagatttgatgataagtatcaatttatatcatttataggaattgattcagtcacttcacaatctggtgtttctgcttatcacggaccaatttctaaaacaggttgtaagtttggaagaactattttatttaatatagttacaactgtattacaaatatctgctcacacagacaaaactaattctatttatctgtttttcagaaaaaaacaatctgaaggtaaacatcattataaatgcataatcgcctgcgaaacgaaattatgtaaaattatttataaattatgttcttcaaattgtctatacgaaaacaaatagactaatttaccaatttttttaaaaattgagaaatctcagttctttttgtcgtgtatataatatcacatttttttaaatttgacaaaacttagata

SEQ ID NO: 6787 - DNA, 1213 bp, unidentified
  source 1..1213: mol_type = unassigned DNA; note = element_a8a5a98
  misc_feature 1..2: note = core
  misc_feature 3..223: note = LE
  misc_feature 224..1198: note = CDS
  misc_feature 1199..1213: note = RE
  misc_feature 6..201: note = bridgeRNA
cttgtatctcgaccaaggcctttaagtgaggctatggttcccgactgatcatcgggggaggagttgcaagccgtatccacccttaagccttgagcctgtaacgtagattgcgctgcgctcctccgcactcatccagtaagtccgaacggtatccagagcttcgagctcgcataaacaaggttggacggatgcagtgacgatcagctacccaaaggaggagatgatgagcacagttgtgggtatcggcatcgccaagcacgccttcgacatcgcgacccttcaggccaacggcaagcatcgcaccaaggctaaactgagcaacgccccgaaggggtttgaagttctgctgcaatggttggccaggcatgctgaaccgcaggcttggatcgtgatggaggcgaccggcatctatcacgaagcgctggctgaatggttgtacgagcatgactataagatctgcgtattgaatccggcgcagattgcgctttatgcccgtagccagttgcagcgcgtgaagaccgacaaggtggacgccaagctgattgccgattatggccatctgcatcagcataagttgcgtgcctggaagcccgagcgaccggagatcaagcgcctcaaagccctgaatcatcgcctgaaagatcttcaggagttggagcgcatggaacagaaccgtctggacgtgaccagcgatgccaaagtcgctgcgtcgattcggtcggtacttgagcatattcgccagcagatcgctgagacgctgaaagcgatcaagcagcacttcgatgacaacgatgacctacgaggccagcgcgacttgcttaaaagcattgatggcattgccgacagaaccgctacgttgctgctggcagaactgggcgatatgcagcgtttcggttacagtcgcgatgttacggcttttgcaggtttgaaccctaagctgcaggactcggggaagcacaaagggcatgtgcgcatatcgcggatgggctcttcagtgttacgtgcagggctttacctgccagcagtggtctccctgacccacaacgccgcgatccgagcgatggccaagaggctaaaggcacgaggcaaggctggcaaacaaatcgtctgcgcggccatgcgcaagctgctctgcatcgcttatggtgtactcaaatccggcaagccttttgacccgcagctagccattgcgaactgacgagtaagacggtat

SEQ ID NO: 6788 - DNA, 1677 bp, unidentified
  source 1..1677: mol_type = unassigned DNA; note = element_a8a8dab
  misc_feature 1..2: note = core
  misc_feature 3..270: note = LE
  misc_feature 271..1452: note = CDS
  misc_feature 1453..1677: note = RE
  misc_feature 3..248: note = bridgeRNA
ctcgtataatatagagcagtagtttttagcgttcctctccaagaactgtacaaaaatgctatactgtaatggatgctgtggattggtcgcatcacctaccgcaagacggtttcaagtaggctccaaccacagccctttacgagattgttaattagttagataccgcaggcaagtggagatgcaagacggttcatttagaacgaggttacaagacgtaaagtgccctgtggattcattcagcatcaaacaaacacactgcgaggtatcattatggtttatgtcggaatcgacgtaacaaaggacaagcacgactgctttatcgcaaactccgacggtgagattctgtacgatgtatttaccatacagaacggcatggatggctttgaagatttgctgttcaaaatcaagaccgcttcaaaagatttgagcaaagtaaaagtaggacttgaagccacgggacactactcctgcaacattctcggatttcttcataacaaaggtctgactaccatcgttatcaatccgctgtacaccagtctgagccggaagagcgtcagtctgcgtaaaacccaaacagacaaagtggacgcccgtacaattgcgagtatgatcatgtctgacgtgagcttaaagccctactcagacacagtataccacaatgaagacctaaagtcactatccagatacagatttgataaagtttctgacagatcaaagctgaaacaatctgtttcccgccttgtaaatatcctgtttccggagcttgaaaagcttgtttcaacacttcacgcaaaagctgtgtatgcgcttctttccgagttccccggcgctcatcaggtcgcttctgccaacctgaagcatctgacggctttgctttccactgtttccaaaggacatttcggcagagagaaagcaaacgaaatccgtgaagcagcgagacgttcgatcagctcatatcttcctgcaaaatcattggagctcagacataccatcaagctgattcatgaattgaatgcagaaattgccgagatcgagacagagatcaaaaagatcatggattccatcgattctcccactctttccgtgccggggatcagctatgctctcggctctgtcatcgtttccgaggtcggcgatttctcacgttttgacaatccggacaagctgcttgcctttgcaggctgttctccgtctacataccagtcgggtcaaatctattccactcatgcaaagatggaaaagcgaggttcaaaatatctgcgctgggcactcttaaatgcagcaaaatatgtctgcaaatgggagccgacctttgccgtttatctcaggaaaaagctggcggaaggcaagcattacaatgttgctgtgtctcacgccgcaaagaagctcgttcgtttgctctaccatcttgaaactacgggcgagaagtacattccacaaactctctcttgaacccgagctaacaaatacatactgtaccagccagcgcagcgtacacttgacgaaccgaagcattcagatgctacaatttttcaaaacgagggcgcattccggctttgtcgtcttgctctctccgtcgccctcgctgtcttttctcagcatctgtatgctgtttgtcaagggcggcgtatttttttacacaatcttcattttggggcttgacatttaataattagt

SEQ ID NO: 6789 - DNA, 1581 bp, unidentified
  source 1..1581: mol_type = unassigned DNA; note = element_a8adc35
  misc_feature 1: note = core
  misc_feature 2..246: note = LE
  misc_feature 247..1455: note = CDS
  misc_feature 1456..1581: note = RE
  misc_feature 6..225: note = bridgeRNA
tcgtattatgagatcaaccatttcttttctggttgatcctttttgcatttgcttcgaggattagagtagccgggtcgaacgtaactgcccgtgggacttgatcccgagcgctataatgttcacccctacttgtcatgaccatgattgaggctggctaggacatagatcccgtatcacatgcgatgctgtggagcgacaaggaggctcataggggctaaaggtaaatctatttcaaggagagataaaatgaatcctgttataggactagacatttctaaagaagaaagccacggacaagctttcttagatcgaggaaaaccataccgtggggtataccatttcgaacatacacgggatggtctcgagatattgcttcaagttattcatgacattgaacatgaatcggggcatcgacctacaatgattctggaagcaaccgggcattatcaaagccctgttgttcgatttctagaggagcatcactatttatttatcgttatcaatccgctcatttctaatcggcttcgcaaaaccaatctgcgtaaagtgaaaacggatgctgctgacgcttatcttctgggtgaactttattatagggaggaattcgaaccattcaaaaaaagaggtgtgcaactgcttaatatgcgttatctgacgcgacaacacgagtccttctctaagatgtgcgtgcagacgaagctgcaattccaagccgttctggatcaggttttcccggcgtacaaaggtgttttcggagctatgtattctaacgtgtctcttcgcttcttacttgagtttccgacttcatcctctgtcctacaagtcagtgaagagacgcttaaaatcacaatcaatgctcttttaacttcaaaacgtggacgatcagagaagtggattaatgaacgagttcaacggtggatggaagctgcaaagcaaaacccatttcagcaaacgatgtatgagagccacttaattaatcttaagatcttgatcagtcttatccttcagtaccaagagtatctttctgtgttggaacagaccatagataccctggcttctaagattgaagagtatgatttaatccagtcgattcccggtattggtcctaaaattgctgcaacaattttagcgaaaattggagaagtcgacaggtttgatcatccaaagaaactggttgcctttacaggaatagaccccagcgtttttgcttcaggaaaatttacaacgacacgtaatcgaatcaccaaacgtggttccaggcatcttagatacgcacttgtaatggcggtacagtgtggcctgatccgctctcgcaacacgcggataaaagagttttacgaacgcaaaagagctgaagggaaacctcacaaggtggctctagtggcgtgtgcaaataagttagttcattggttgtatgccattttaaaaagtaagaaatcattccgtccagcttaaaaagcaataatggtacaaccttacaatgtaactcgaattggagggttatttggtatgctcattaatcaatataacacaagtcctcctgttgttttgctggtaatgttgacaagctattagctggta

SEQ ID NO: 6790 - DNA, 1669 bp, unidentified
  source 1..1669: mol_type = unassigned DNA; note = element_a8b8fad
  misc_feature 1..2: note = core
  misc_feature 3..262: note = LE
  misc_feature 263..1540: note = CDS
  misc_feature 1541..1669: note = RE
  misc_feature 26..196: note = bridgeRNA
ctcatatactaatagtataagaacagctttaagcatagttcttaaaaatgaacctaatcatctatgataaagatgaaatgggattgttttatgtgcttgctgggtttccaacttaggaattactcatttagtagactccaccctcattccattacctttcatcttttcggttggttaggttcatttattgattacctgtataactcgtgagcctgttgtggttttggattaacagggcatcccaaattataggaggtatattatgtcagaaaaaattgttgtaggaattgatgttagtaaagctttcagtgacatctgtattctatcacctaataatgacatcatcaaaagacttaaaatttctaatgatattaatggtatgaagtcgctcatctatgtacttgaaaaggtagaagatgagtacgaagatagagcagtaattatcatggaagctactgcacactatcatcaaattttagctaattttttccgtaagcataattacgaagtcattgtaattaatccgattcaaagtggagcgttgaaaaatattaatatccgaaaaattaaatcagataaaacagatgcatataatatagcgttgctatatcgtattaagaattacaacgaaacaattacacactcagataccgttaacagtatcaaaaagctttgcagacagcataaagaattgacggatgaaattgtggaacacatcaaccgattaatcgcttttttagatatttcctttccagatttcaagaaagtatttactgatttgcaagggaaaacacctttgtctttgcttgaaaaatatcctactatacaggaagtcttatctcctgaaaataagcaagatattattcaactgataaaagaaaattcacataaaagcaactcctatgccgaagcaaaatatgaaaaactagtgaaagctgctgaaaaatctattgaagtttgtatagtaaaccttagttcagcagtacttattcaaacaactgtaagagttatttttagtttacaggaagctttgaaagcaatcgatgatgaaatcaaaagactatctcttttagatgaaaagtttcataaagaaatagtgcttttacaaagtattccaggcgttggagagtatacagcatgtgtcgttttatcagagcttggagatatttccaatttctcgaaaccgaaagaattagttgccttctttggattggatccaggagtatcccaaagtggaacatacaataggaaaaacaataaaatctctaaaagaggttcgcctcatgttcgttcaattctccatatgctggctaaatctaatgtgtatccgaatcgcaacagagagtatttaaatcctgttatgcgagcttatttcgaaaagaaaatagctgaaaaaccatacaaagttgtaatgtgtgcaattatgcgaaagatggttcaaattatttttgctgttctcagaaaccaaaaatcatttgaattaagaacacccgaagaacatcaaaaactaattcgagaaaaaagtaagttagtagcataaattattaaaagtgctgcctcaaaaaaaagaaagtgtatgaggcttatttgctatgcacatttttaagttttgtgacttaaaaatttttaaaaaaatttttaaaaataactattgacttccttagttggt

SEQ ID NO: 6791 - DNA, 1440 bp, unidentified
  source 1..1440: mol_type = unassigned DNA; note = element_a8c8330
  misc_feature 1: note = core
  misc_feature 2..226: note = LE
  misc_feature 227..1426: note = CDS
  misc_feature 1427..1440: note = RE
  misc_feature 12..241: note = bridgeRNA
ctactagaggattcccgtaggaccggtgtccggccagactcggtctaggtgtccggtgggttcgctctcttttgggccgcccacctgccctgtgcgggtgtggctcgattccggtttgcagcccccgggcaccgctgacgaggcgtggctcaagaggggactgcccagctcgtagtagcaatgcccacctcgccgtccacatcggtacgagcgcagggagcagcgcatgaagcaggtcgtcatcggggtcgattcccacaagttgtccgcgacgatcgaggtcgtcgaccagcaggagcaactcctcggatctggtcgcttcaccaccgatcaggccgggtacgccgcgatgcgcgcctacgccaaggcctggccggatcgagtctgggcagtcgagggagctaatggtgccgggcgtccactcgcccagcggctcctggaagccggcgagcatgtcgtggacgtgccggccaagctcgccgcccgtgtccggctcttcgacaccggccacaaccgcaagaccgatgcccacgacgcgcacgcggtcgccgtcgtggccgtgcgtacgaggaacctgcgggtgctgaaggtcgacggggcgctcgaggcaatgcggatgttggccgatcgacgcgaagcgctcacgcgacgtcgggttcagaccgtgtgccggctccaggcgctgctcgcagaactcctgcctggtcaggtcaaacgcgacatcaccaccggtcaggccaaggccatgctggccacggtccgccccagggacatcgccgggaagacgcggcgccgtatcgccgccgaagaactcgccgagctgatcgcggtcgaggcgaagatcaagaaagccaccgcagagctcagggccatggtcctggcgcgggattcacggctgatggacatccacggtgtcggtgccgtggtggccgccaggatcctcgctgacgtcggcgacgtcgcccggttcgccgaccgcaaccggttcgcgtcctggaccgggacggcgccgctggatgcctcctccggtgagcagaaccggcaccgtctctcacgcgccgggaaccgcagggtcaaccacatgatccacatcgccgcggtcacccaggtgcgcctcgacaccgaaggacgcgcctactaccggcgtaagagagcggccggcaagaagccccaagaagcgctgcgttgcctcaagcgacgcatctcagacgccatctacaagcagctcgtcaaagatgccgtacgagctggtggggcggacccgggagggcactgcggggcgtctcaagaatccagcgcggtcgacctgcccccgcgaatcgacacttcggatcagccactcccggacccgcagacccgacgctacgccgcaccaccctccacccggaagagcccggcggccggacccttcgcgagcactggttgacaacagaggggagc

SEQ ID NO: 6792 - DNA, 1374 bp, unidentified
  source 1..1374: mol_type = unassigned DNA; note = element_a8e0337
  misc_feature 1: note = core
  misc_feature 2..308: note = LE
  misc_feature 309..1199: note = CDS
  misc_feature 1200..1374: note = RE
  misc_feature 1169..1335: note = bridgeRNA
tgatgctgtggacggctcctccaccggcacgcgagtgccaaagatgtgggcgctgttaaggctcccacgattcggaggagctacccaatgcaaacggtttcgacaatcggtctcgatatcgcgaagtctgtctttcaagttcattgcgttgatgaggccggtgaagtggtcatccgccgtcagctgaagtggcgctccatgctggcattcttttagaagttgccaccatgcctggtcggcattgaggcttgtgcctcatcgcaccattggtcacgtgagatcagagcgcttggccatcggtgcggctgatgccaccggcctacgtgaagccttacgtcaagcgacagaagaatgatgccgcggatgcggaggcgatctgcgaggcggtgaggcggccgacgatgcagttcgtcgagaccaagacgccggaacagcagagttgcttgatgctccatcgcacgcggcatctcatcattcgtcagctgaatgcggtaacgaatgcaattcgtgcccatcttgccgagtttgggattgttgcaccggtcgggcgccgcggggttgaagaccttcgtaaagtcgtcaccgatgtgaatgacgcacgtgtgcccgaggtagcgcgcgcatgtcttattgctctcggcgatcaaatgcgcggcttaaaggcatatgtcttgaagttcgatcgcctgaccacggcctggcatcggtccaacgagatgagtatgcggcttgatgcgcttcccggcgtcgggccggcgttggctacggccttggtcgccagtgttcctgatccgaagacttttcgatcaggtcggaacttctcggcctgggtgggcttggtgccgaagcagaactcgagcggcggcaaacagaggctgagcagtatcagcaagcaaggtgatcgatatctgcgcagcctgttcaccgtgggggcgctagccgtcattcgttatgccaagatccatggcaccggacatcggccctggctcacagcattgttggcacggcgatccacgaaggtcgccgccgtcgcgctcgccaacaagatcgccaggatggcatgggccatcatgaccagggcgagtgctacagagaacccgctgcactggcagcgtaaacgagatcgcgccacttcggtgcgatgtgaaggttgggagggcgaacagcacgtaatgcagagccgatctatccggcgataaggacaacccacaagtgccattgcatcatcgaatgcggccttttgaccgggacctgatccgcggagggcattatggccagcggtcatgcgagccgcataaacaggccgaacacatggccgcaccgaccagcctgcgacgtgaagattctccctgccaactcggagccgtccacaca

SEQ ID NO: 6793 - DNA, 1580 bp, unidentified
  source 1..1580: mol_type = unassigned DNA; note = element_a8eae72
  misc_feature 1..2: note = core
  misc_feature 3..103: note = LE
  misc_feature 104..1231: note = CDS
  misc_feature 1232..1580: note = RE
  misc_feature 1313..1506: note = bridgeRNA
agaccgtatgtcccttcccttgaagaggcgactcgccctcgatgcagtttgtcgagggttgtccggataggccgggcagagcctcaagcaaggagggcgagtcatgaccaatcatagcgaagctttcgtggcctttgatacgtccaagttgcgtaatgcggttgcgatagcggacgccggccgatcgggcgaggttcggtttgtcggcgagatcgagaacggcggggcggcgaccgcgaagctggtgaggaagctcgccgccaagtacgagcggctgacgttctgctacgaggcggggccgaccggctacgggctctaccggcagatcaagagccttggttacgagtgcttggtggctgcaccgtcactgattccgacgaagcctggcgatcgggtgaagaccaaccggcgcgacgcgctgaacctggccaagctgctgcgggctggcgagctgaccgcggtctgggttcccgacgcgcgtcacgaagcgatgcgtgacctgagccgcgcgcggggagctgcggcggaggatctgcggcgcaagcgccagcaggtatcgtcgttcctgttgcggcacgggctgcactatccgccgggccgcaagacgtggaccaagtcgcacatgatctggcttgcgagccagaagctcgagcatctggagcagcggatcgcgttcgaggagatgctgttcgcgctgcgccaagcgcaggagcggatcgagcggctggagcaggcgatccgcgcggcggtgccggactggtcgttggccgaggtggtgacggcgctgatggcgatgcgcggcatcgatctgatctcggccacgacattcctggcggagatcggtgatctgtcgcgctttcaaacgccacgtgagttgatggcctatctgggcctggtgccgtcggagggttcgaccggggatacggtcaaacgcggtcccatcaccaaggccggcaaccggcgggcgcgacgcactctggtggagtgctcctggagctatcagcatccggcgcgggtgggaaaggagaagcaggagaaggtggcggcggcgccacgagcggttcgcgagatcgcctggaaggcgcagtgccgcttgagcgcacgctaccgggcgctggtcaggaagggcaagcccaagaccgtcgccgtcaccgcggtcgcacgtgagctcgcggccttcatctgggcgatcagtcgcgaggtgaccacggcccgtgcggcggccaagtaaggcgggtctttcgaggtagcaaggagacacgctcgacatctattgcagggagcccgcgccggggcagcggtccggcgaagacaatctcgtgcaacggcgggggcggagccacggcaggggaactcccgacggcgctctgaagccgatcgcaagatcgacgcacgtgtggagacagggacagccccagacgaagattcggacatgcggtcaaatacgcggatcagagaatgatcaccgacgtctcaaggcttcgcccctaccgttgcacgatcatcgcttcaataacctctaacggaatgcgtggagagggtgagatgttgcgccacctcggcttgacaggggacatcag

SEQ ID NO: 6794 - DNA, 1377 bp, unidentified
  source 1..1377: mol_type = unassigned DNA; note = element_a8f3afa
  misc_feature 1: note = core
  misc_feature 2..69: note = LE
  misc_feature 70..1089: note = CDS
  misc_feature 1090..1377: note = RE
  misc_feature 1134..1372: note = bridgeRNA
caatggtatggaccccgccctccaggcgaggtgaaatctcgaacgccaactgcaacgaaggaggatgtcatgcagatcgttcgaataggcctggatctagcgaaatacgtcctcgaggttcacggtgtcgactgcctcgggaaagtcgtcgtgcgcaaaacgttacgccgcgatgcggtagcccgcttcttcgccaatctgccacgatgtctggtcggcatggaagcctcgaacggagcgcattattgggcgagggtgctttccgatctcggccatgaggttcggctgatcagccctcagttcgtgacgccatacgtcaagtccaacaagaatgaccggaatgacgctgaagcgatttgcgaagccgtaggccggccgacgatgcgttttgttctgccgaaatcagccgatcaattggcaattcaagcggttcatcgcattcgcagccgtctggttgcagatcgggtcaagctcgtcaatcaggttcgtggacttctagccgagcatggagtggtcattgcccgcgacatcccacggctgcgccgggtccttgctgatagcgacgatggtctcaatgaattggtgcgggtgatgatccgagaagtgcaaacggagttggtcgaactggaccaacgcattgcatcctatgatcggcgggttcgggagctctttcgcaacagcgaactatgtcagcggcttggaaagatcgaaggtatcggccctgtgaccgcgacagccttgatcgctgccgtaggtgatcgaacttgcttcaagaacggccgccagtttgcggcatggctcggtctcgtgccgaaacagcgatccagtggagggcgagcccgcctgttcggtatcagcaagcgcggcgatcgctatctgcgcacattgatgatccatggcgctcgcgctgcgctcggcaaagcagcgggcaagcaggatcctcgaagcctttggcttagtaagttgcggcaaaggcggcatcccaatgtcgcggctgtcgcgctcgccaacaagaatgcgaggatcgtgtgggccatgctctcgggcggcacagtctacgagcacgcaccatcggtgaaagcagcttaaggcgacgcggcaaacgaaggaataacagaaggaggtctcaccccagcaattgcagcaaaatggtaggagatggtgaaacggtcattccgtcgcttcccgaacctggtgtgtggaccggcttggctttggccaatgtctaggggccgatgaggtggaagcgcgcgaaaatccatcggggctcgcggcgacgacgttgtccagccgcatcaggaagccggatatacgtcagcagttgtgaccgacgatcttgatctagccgacctgttgcgatcgggcggggtccatata

SEQ ID NO: 6795 - DNA, 1974 bp, unidentified
  source 1..1974: mol_type = unassigned DNA; note = element_a8f7be6
  misc_feature 1..2: note = core
  misc_feature 3..272: note = LE
  misc_feature 273..1484: note = CDS
  misc_feature 1485..1974: note = RE
  misc_feature 11..249: note = bridgeRNA
ctcgtataatgaatttacggtttgaatgaggtggtaaaccgcatgaaacccacttgttgtaccacaagccatgtgggataataaggccagcagacagagggcgcagtatcgctccttgaagcacggcttccacgaaaagaattgcgcctctgtctttgcgggttgacacgaatgagctggatagcgaagctgcgctgcatatctaacgaggttgtgtcccgcaaagaagtgcgagggaactctgtctgtcattttagatcggaggactcagcatgttctactgcgggattgacatcgccaaatacaagcacgaagccgctgtcatcgatgaatccggcaacgccatgttggatagcatttcgtttgccaacagcaaggatggctgtgagaagttgctggcactgtttcaaagattggatgtttcaagagaagacctgcttattggcatggaggccacaggccattactggatgagcgtctatgggtatctgctggaacatggcttcgaggcaaaggtcatcaatcccatccagtctgaggcgttccgtaagatgtacatacggcaaacgaagaatgaccgtaaggacagtttcatcatcgcccagattatgcgtttcgggcagttctcttccacaggcctgtctgaggaaaccatagtggcgatgagacagttgagccggtaccggctggctctggtggatgcctgcggggactgtaagcgccgggtcattgcactgctggatcaggtgttccctgaatatgacgcattgttttcagatacctttggagtagcgtccaaggaagttcttgcgaattaccccacgccagaagatctgctgaatgtttccactaggaagctttctgctctgctggagaaagccagccgtgggaggttgggtaaggagaaggcagagcagctgaaagatgctgcagccaattcctttgggctgagctttgccaaggacgcctttgcatttcagatacgccaactcatcgaacagctggagttcctggagggacagattgcggagctggaggagcagatatccttcctgctaaagcagaccggcagttacatcactaccatccccggcatcggtgacaccctgggcgccattatactgagcgagattggtgacatccaccgcttcgacgctcccaataaactggttgctttcgccggcctggatgtgcgtgtaacgcagtccggggagtttaccggaaccaggcagaaaatctctaagcgtggctcaccgtatctcaggcgagctatctggctggccgcatccagggcagccttttgtgaccccattctctctgcgtactaccaatcgcttcgtgccaggggcaagcatcatctcactgccatcggcgctgtctcacgtaagctctgcaacactatctacaccatcctcaaggacaacaggccttggcagccagtaccgcccagagataaaaaagtgtcgaataataccgagcaatagcgacaaagcgcaatctcactgtttgtggctgtgttatcttctcaaattcatatatttgggaggatgtgcaaatgatggccattcaggatattctgcgccagttaggaattaccagatgttacaaagggttcaaccatacagcttatgccattcaactcgctgttgaagatgaggatcgccttgcagctgtaacaaagggcatttacatggagacggcttcacacttcaactgtaaatggactgctgtagaacgtaatattcggactgctgcagaaagagcatggaaggtaaaccgtcctctactgtgtgagatggctccatatcccctgccttgttcccctagcgcctcagaatttattgagatcctgacttcttacatactccgctcttcccagccgcagtctcagctgcggcctcttgtcttgccataactcttattctccttcagcaaaatatttttgcttttacctcttgactttttatagctggt

SEQ ID NO: 6796 - DNA, 1409 bp, unidentified
  source 1..1409: mol_type = unassigned DNA; note = element_a8fa437
  misc_feature 1: note = core
  misc_feature 2..133: note = LE
  misc_feature 134..1135: note = CDS
  misc_feature 1136..1409: note = RE
  misc_feature 1171..1405: note = bridgeRNA
atggtatggacgcctccccccggcaacaagcaggcccgaccatgagagtcggaatccgagggatcctcgccgcgacggcaacgctgtgccagagtggagatgtcaagtaaccacccgagcgggaggacccaaaatgaagcttactgtaatcggcatggacattgccaagcatgtctttcaattgcacgcggtcaaccctagcaccggcgaaatcgagcgcatcaagctcaggcgcagccagcttctggagttttttgcgaagcgggagcgttcgttggtggcgatggaagcttgcggtggcgcgcatcactgggcccgagagttgttgcagctcggacatgacgtcaagctgatctgccctcggtccgtacgccccttcgtgttgcgcaacaagagcgacgctgccgacgcgcgtgccatctggacagcagtgcaacaacccgaggcacgccttgttgcggtcaagagcgaggcgcaacaaaccatcctcgccctgcaccgcctgcgcgcccaactgatgaagttccggatcatgcagaccaacgcgctgcgtggcttgctccacgagttcggcgaagcgttgccggaaggctatcaggccctctcaaaggagattcctgcggcccttgccaaggtctcggatcgcttgccggccatgctgatcgacagcctgcgcgagcagtgggctcgcgtgcaggctacggacaaagacatcaacctacttgagcatcggctcaagctcgcacttcgcgacagtcagcaatgccaaaggatcgctgaaatccctggtattggcttgctgactgcaaccgccgccgtcgccaccatcggcgacccccataccttccgctccggccgcgaatttgctgcctggctcgggctggtgccaaaacaagtcggaacgggcggcaaagttcgacaacttggactgagcaagcgcggcgatacctatttgcgaacactactgatgcacggtgcgcgatcagttattactcgcggtacgcgatccccgtggctcgacggcctgcttgctcgacgtccctttaacgtggtggttgccgcactggcaaacaagctcgcccgcacgatctgggcggttctatctcgaggtactccgtaccatggtgcggcctaaacaagccgacattgctgggttcgagtacatcggttcctcttcaccaaggagcgcaagcaactacgcatgatggctaacaggttggaccgggacgaggaaagtctggtaagaaaaatgaaccttcgtgttcgattgttagatgagaccctcgtcagcgaaatccatatgggccagcaggccaaacggcctgcatcaacgggccggacataagcgtgctgcctttacctgcagaccaacatgccaaacagcttgcaatccgggaggcgtccacata

SEQ ID NO: 6797 - DNA, 1400 bp, unidentified
  source 1..1400: mol_type = unassigned DNA; note = element_a8ff684
  misc_feature 1: note = core
  misc_feature 2..88: note = LE
  misc_feature 89..1120: note = CDS
  misc_feature 1121..1400: note = RE
  misc_feature 1160..1391: note = bridgeRNA
caatgggatggaccccttctcacccaccggcatccatgtgccagactggagatgtcaatcatcagtcatagagaagaaagggaccatcatgaagcttattcgggttggggttgatttggcaaagaacgttttccaattgcatggggtggatagagatgagcgtccagtgtggcgtcgccgtctgtcacgtgctgaatggctcaaggcgttacaagagacactggagcctggctgcgaaattgggatggaggcttgcgccggatcgcatcactgggcgcgtctgctagaggccaaggggtatcgggtcaagctgatcgcgccgcaattcatgaagccctatgtaaaaagcaataagaatgatgccaacgatgcggaagccatctgcgaggcaatgagtcgcccctcgatgcgttttgttactgtcaaatcggtcgaacaacaagatattcaggcagcacaccgcatccgctctggactcattgaggctcggacggctaaaaccaaccagattcggggcctggtgtccgaatatggcttggtggctcccaagcaaattgccagcttgcgtacaggtattcccgactggttggaagatgccgagaatgggctgacggcccggttcaggcgtctcttgcatggcctgtggcaggacttgcaggcactggatacacgaattggggaactcgaccgcgagattcagcagattgcccgaagtgttccggccgcccagcgtcttcagcaattacggggagtcgggccaatgatagccaccgccttggtagctgctgtcggacggggagaacaatttgccaacgggcgtcagatggctgcggccttaggattaacgccacggcagcaaagttcaggcggcagagagcggctcctgggcatcagcaaacgcggcgatagctacctgcggatgttactaattcagggagccaggtcagctctccaaactgccggcaacaagacagatcggctcagcaagtggatcaccagcctatgtgcccgtagtcatcccaatgtcgccaccgtggctttggccaataaaacagttcggattgcttgggcgttgctctctcgtgaaagtgactaccaaatcgactacgtggcagcctgacgccatctgatcattctgccttacgtgttagaggagcaacctacttacgattgcaaagcaagccgaacgatggcgaacaggtcgaaccggcatcggcaaaacccgcaaacttccaggtgcttaatcagcccgcaaaagcgattgggagccgatgcgcgaatagcccatcatggcccagcatccttctgaaagggtgcagcagaacgaggtcggatatacgtgagcagtcgtcctcacgccattagtcgaaatgcttgcaaaccgataaggggtccatata

SEQ ID NO: 6798 - DNA, 1447 bp, unidentified
  source 1..1447: mol_type = unassigned DNA; note = element_a900b49
  misc_feature 1..2: note = core
  misc_feature 3..232: note = LE
  misc_feature 233..1432: note = CDS
  misc_feature 1433..1447: note = RE
  misc_feature 12..198: note = bridgeRNA
tccttaccattttgcttgggcctctaagttgccgtttctaggctatgagcgaccctggaacgccgggtatggctccgtttcgtcagcctgcggatggctcacagtgattggccgctcggcgttccgcgacgactcgaccgctaattgagagacgcgatgtgatcgctgtgtaaggacgcgacggcgtggtcgtctgcagggccaaatatcacaacaacactgggaggtagatgtggcaggaccatcgctgtgggcaggcatcgatgccggcaagctcgatcaccactgcgtcttgatcgacgcatccggcgaaaggctgttgtcccggcgtgtacgcaatgacgaggccccgctgaccgccctgatcgatgacgtgatcgcattagctgacggcgggttagtgcaatgggccatcgacctcaatggtggcggcgccgccctggtgatctcgctgctcctggcgcgtgatcaacacctgctgtacatccccgggcgcatcgtgcaccacgcctcggcggcctaccgcggcgacggcaagacggacgccaaggacgcggccatcatcgccgaccaagcacgcatgcgcagagacctactagagttccgtcaccgtgacgaattcaccgtggaactgcgtaccctgtgcgcccgccgcactgacgtcgctgccgaccggaaccgggccatcaaccgtctgcgcgcccaactactcgagtatttccctgccctggaaagagctttcgactactcccaccgcagaggcgcactcatcctgctcaccggctaccagacccccgaagcgttacgccgaaccggccgcacgcgcctagagaaatggctccgcggccgcaacgcctacaacccggtcgccatcgccgatcgtgcgatcgccgccgccaatgcgcagcacgtcgtcgtgaccggccaacgcctcggctcgacgatcgtcacccgcattgcccagcagatcctcgacatcgacgcggagctatccgatctcgacgacatgatcgaggaacgattcactcaacaccagcaggccgcggtgatccgcagtatgcctggattcggtcctttgctgggagccgagctcatcgccgccaccaacggcggcctggacagcttccacagcgccgacaggctcgccgccgtcgccggcctggcacccgtaccgcgcgactccggacgcatcagcgggaacctcaaacgcccacgccgatacgaccgccgactgctgcgcgtcttttacctcgccgctaacaacagcatcaaaacctgcccccaatcccgggcccactacgaccgtaaacgcgctgagggcaaacaccacaggcaagccatactctcgctcgcgcgccgccgcgtcaacgtcctctgggccatgcaacgcgacaacaccgcatatcggagcaccgcgaaaactgcggcttgacaatctcattgagaa

SEQ ID NO: 6799 - DNA, 1409 bp, unidentified
  source 1..1409: mol_type = unassigned DNA; note = element_a90dd7d
  misc_feature 1: note = core
  misc_feature 2..310: note = LE
  misc_feature 311..1108: note = CDS
  misc_feature 1109..1409: note = RE
  misc_feature 1189..1403: note = bridgeRNA
taatgagatggtccgccgctgtaaccctccgctgaggcggaggatataggcggcagttcagaggaggatcatcgacatgtagattcgttcggtaggcatcgacctgggcaagacgacgtttcaccctgttgcattgggagcatcgggcaaggtgctggtgaagaagaagttcacacggaggcagctgctggagttcgcggcgaacatgcagaccgcgttgatcggtctggaagcatgctcgggagcgcacttcctcgggtgagccctgcggcagcagggtcacgacgtgcgcccgatcccggcttagttcgtgaagccgtttgtgaagtccaacaagaacgacttcgtcgataccgaagccatagctgaagccgttgagcgcaagaacatgcggttcgtgccgatcaagactgacggtcagcttgatcttcaggcgatccaccgcgttcgcgaccggctcgtctcgcgacgcacggcgatcatgaaccagatacgcgcatttcttctggagcgtggcatggtcttcgcgcagaagccggccaagctgaaggctgggatgaccgacgttctggaaaacgcagacaacgcgctgacaccgatgatgcgcaacatgatcggtatcttgtgggacgagtggaagaccgtcgagcagcagatcgaagacttgacagacaagctcgaacagatcgctgcgagcgatgcagattgctgccgcattcgccagatcccaggcatcggtcccatcgttgcgacagcgatcgtcgcggccatcggcgacggtgcagccttccgcaagggacgagactttgctgcatggctcggcctcgtgccgcgacagtactcgaccggcggcaacgcaaggctgttgggcatcagcaagcgtggcaacatctacttgcgcaagattctgatacatggcgcacgcgccgcggcgatgcgtataaaacgagatcgctttccgatcggagcatggatgaacgctctcgaagccagagctccacgcaacgttttggtggtggcgatggcaaacaagctcgcacgcattgcatgggctgtactctcaaccggagaagattacaggcccacggcgagcatggcagcggcatgagatagagcagaaaagacgcctccggcttggaagcgctccgcgctcccactttcccgctctacgacgacggctttcccaaccaaggtctgcacaggaaagtaaggacgaaagaacagtcacaacggcgtatctaaaacctgtttccgataatggtcttaacgacggctcggcttgttaggacagatacgcagcggaactcatcatggccaggagcacgcggctccactaaaggccgaatacattgccgcagacttgtcttctcgaccaaactaccccttgcagtcacgcggcggaccataca

SEQ ID NO: 6800 - DNA, 1324 bp, unidentified
  source 1..1324: mol_type = unassigned DNA; note = element_a92267b
  misc_feature 1: note = core
  misc_feature 2..68: note = LE
  misc_feature 69..1109: note = CDS
  misc_feature 1110..1324: note = RE
  misc_feature 1108..1312: note = bridgeRNA
ctatgtatggactcctccaacccagttacttaggttggaggtcgaccaaaacccaagggagtccatacatgtcctattcaacaacagttggggtcgacttagcaaagaacgttatccagatctcggtggtatcgggccgaggcaaaatgctttcgaaccgatcgctcacgcgtaagaagtttgccgagttcttgggcaagcagaatccgtcactcgttgcctttgagtcgtgcgcgacagcgcactactgggcgcgtgccgcagagcggcacggtcacgaggcgcggattatttctgcgaaggcggtggcgccgttccggcaaggtcacaagaccgacagcaatgacgccttggctgtcgcagaggcagcgcgccggccgaacatcaaagcagcgccgctgaagacgctcgagcagcagggtctgcaagccgtgcagcgattccgcgatctgctggtgcaggagtgtacggcgctgtcgaaccacctgcgtggcctgttgatggagttcggtgtggttatcccgcaaggctttgcggcgttatggcgccagctgccggagatcctggaagatggcgacaacgaagtgccggacctgtaccggccgacgctgcaccgtctttacgttcgctttctggaactgcgtgacgatatccaggcgatgaaccagcaggtcaaagagttggtgaagcaacaccccggctgcaaccggttaaccgcactcgagggcgtcgggccgatcagtgccgtgctcttgtatgcctcactcggcactggcgaggcgttctccggtagccgcgagttcgcggcctacctggggctcacgcccagacagctcagcagcggcggcaagaccaacatcgttggcctgagcaagaaggtcggtaactgcaggttgcgatcggtgctgatccagggtgctcgcgcctatgtgtacaggctcaaggagccgaagacctcaaaagaccgctggttaatggcgctcattgagcgagccggtcatggcaaagccgcggtggcgctagccaacaagaatgtacgtaccgcctgggcgatgctgacccagggaaccgactatcaacgtcgaccgcaacaggaggcagctgcgtaacgagtcccgcaaacacagaccacgatctgataaagatatccgctccggtagaacctgttccgcttcgaggccgtagagtccattgacccttagaggtgccggggtgcgcatacatagagggccaggagttagcgactccaacaaaaggccgaatatacatacgcgtctgacatctgatcgccggaactgtttgctagactggaggagtccatata

SEQ ID NO: 6801 - DNA, 1424 bp, unidentified
  source 1..1424: mol_type = unassigned DNA; note = element_a924a4d
  misc_feature 1..4: note = core
  misc_feature 5..207: note = LE
  misc_feature 208..1410: note = CDS
  misc_feature 1411..1424: note = RE
  misc_feature 1..194: note = bridgeRNA
ctccgtaagttgttgggcggcctgggagggccggatgtggcttatgggttcttgccttcagtggcttccaaggagtggccgtccggttctccggggcgccctggctgctgattgagatgtgcgcgctgtgtgcggtcgctgattacggagatgacagcggggtgttcctcgggccggcggcatgctgtacggaacgaggaggggcgagtgagtaagcgacaggtccgggtctgggccggtatcgacgcgggcaagggccatcactgggccgcggtggtcgacgacaccggcgccacactgtggtcgaagaagatcgacaacgacgagtccgcgatcctgaccgcgctgggggagatcctcggcctggcggacgaggtgcactgggcggtggacattgccggcacgtcctccgcgctgctgctggccttgctcgccgcccacggccagcggaccgtctacgtgcccggccgcacggtcaaccgcatggccggggcttaccggggcgaggccaagaccgacgcccgtgacgcctacgtcatcgccgaaaccgcccgccaccgccgggacttcaccacgatcgacgtgcccgcgcagctggccgccgacctcgcactgctgaccgcccaccgcgccgacctggtcgccgaccgggtgcggatgatcaaccggctccgcgacatgctgaccggcatcttccccgcgctggaacgggccttcgactactccgcccacaaaggcgcgctggtcctgctgacggggtaccagaccccggccgcgatccggcgccgtggccgggcgagactgacggcctggctggccaaccgcgcagtgcgcggcgccgacgccgttgccgcgaccgcactggaagccgcccaggcacagcagaccgcgctgcccggcgaggacgtcgccgctcagctcgtcgccgacctggccacgcagatcctggccctggacgaccggctcaagcagatcgacaagcagatccgtgagaggttccgcagccacccccaagccgagatcatcgagtccctgcccggcatgggcccgatcctcggcgccgagttcatcgtcgccgccggcgacctgaccgcctacaccgacgccggccacctcgcctccgcagccggcctcgtgcccgtcccacgcgactccggccggcgcaccggcaacctccaccggcccaagcgctacagccgccgcctgcgacgggttttctacctctccgcgcagaccagcatcatccgcgaaggcccgaaccgggacttctacctcaagaagcgcgacgaaggctgcaaacacgtccaggccgtcatcgccctggcccgccgacgagccagcgtgctctgggcactcctgcgcgacaaccgagcattcacccccgccccaccggccacgcagacggcttgacttcatcattgaga

SEQ ID NO: 6802 - DNA, 1395 bp, unidentified
  source 1..1395: mol_type = unassigned DNA; note = element_a925934
  misc_feature 1..2: note = core
  misc_feature 3..87: note = LE
  misc_feature 88..1119: note = CDS
  misc_feature 1120..1395: note = RE
  misc_feature 1090..1382: note = bridgeRNA
agatggggtggttgccgcctccctcgacggcatcgcgatgtgccaaaaacgtggtgtgattttcacttagagcgaaggacgtcaaccatgacgaaagatacaatgatcggggtggacctggcaaagcatgttttccagctccatggagcttcgatgaatggcgatgtgaagttccgaaagaaactgtcgcggccacagtttctcaggtttatggctgaccacgacccggcggtcgtcgtaatggagacctgtgggggcgccaactactgggcacgagagttgtcccggctgggccatgtggtgaaattgatcccgacgcggtacgtcaaaccgttcgtggagcggcagaaaaatgacgccgccgatgccgaagcaatcgtgattgcggcacaacggcctgagatgcgctttgttgagccgaaatccgaagacaagcaggcccgggcgatggtgttccggagccgggaacgactggtacaccaacgaacggaacttgtgaacgcgctgcgatcctatctctacgagttcggatatatctttccgcagggcattggccatctcaaaagagtcgaagcattccttgaggatccgaactccggcttgccggaactggtttgtggcgaatgccatgatctcctgcatcaaatctcggaaatgaccgctcgcatcgacgccaagacccggcagatcaaggtcttggggactgagacggatacagcgcggaggcttcagacaatgcccggtgtcggcccgatcatcgcgctggcggttgaagctttcgcaccggacatggcgagcttcaggcgcggccgggacttcgcggcctggctggggcttgtcccgaggcagcactcctcgggtgggacggaacgattgggacgcgtatccaaggccggacaagctgacatacgcaagttgttgattatcggcgccatgtcgcggttgaactggctcggacgcaaatcgatcggtaaagagtcgtggctcggacgcatgcttgccaggaaaccgaaaatgctggtcgccattgctttggcgaacaagatggcccgagcgatctgggcaatggtgacaaacaacgaagattatcgggatccagctccgactgccgctgggtgaaagaggacacccgtatggcggatcgaagctgttgaaagggagggtgagaagtcgacgaattgcatgggcgaaatgatcgaacagatctggagcaggaaaaccagtgctggcccgcaagccgatgagagctcggtcatcagatttggacctgtcccgcagatcaccttaccggcccgcggcttccgaaagaccgcacaacgaggcctgacagaagaccgcactcgatctcaaatccatgcttcagaaacttcttgcatttttagcggcaaccacaga

SEQ ID NO: 6803 - DNA, 1273 bp, unidentified
  source 1..1273: mol_type = unassigned DNA; note = element_a925a94
  misc_feature 1..3: note = core
  misc_feature 4..184: note = LE
  misc_feature 185..1135: note = CDS
  misc_feature 1136..1273: note = RE
  misc_feature 10..164: note = bridgeRNA
cttgtatgtttggggaaggtggcagaccgattctatctgggtctttaaagaccgttgcgaagcatgggtcgccacctgtttcaactcgcagtcaaagctcgcactatcgcccggatcattgaatccgcattgaattgcaaggacgatgctcgtactgcgaacccctactttgagcatagcggctatggaaacacaacaacagtggattggcattgatatctcgcaaactcggttggatgtcgccctgtacccgttgggcgtgagtttcagtgttaaccagactgaaggaggacgggcagaactggtgagcaaactcaccgggtatgcgattgctggcattgtgctggaatcgaccggtgggctagaacgatgcgtcatggcagaactggaagcccatggctacgaaacgcggcgggtcaaccccgcccaagtgcggcactttgcgaaagcaatgggcaggttggcaaaaactgaccggattgatgccgagatgattgcccggttcggcgaaagtcgcaacccggaggtgacgcgactcccggaagcgacaatccgagaactgcaagcgctggtcgctcgtcgtcagcaagtcgtagaactgatcacgatggagaagaagcgcctgcacagttgtgaatcctgggtgcgagaaagtgtgaacagcgtcttgagtgcgctcgaaaccgaactcaagaccctcgaagcgcgccttgccgaattgagtgccaagcgtccagaatggcaagagcacttagcgattctcaccagtgtcaaaggcattggcacagtgatttcacaagccttgctcgtgtcgttgccagagttgggagcgcggtctgggagaaccattgcggccttggtcggtgtggctccgttcaaccgcgacagcggcaagttgaaggggcaacgtcggattcagggaggacgtaaggaattgcgctccttgttgtacatggcagctctgtgcgcggtgcagcataatcccgtgattcgagaccattatcagcagttaaccaaacgcggcaaagcgaagaaagtcgctttagtcgcctgtttacgcaaactgctggtgattctcaatgcgatgctgcgtgaccgacaaccttggcgtcaccctgcgccatctgcggtctaagctatcactgaacgcaggatatgcggtcagctttgctgtgccggaggcaacggacttgcagttcaacgaagtgtttgaattgcggctttcggctgtcaactctagcaaaaatcgatgacttgacagagaacataatcg

SEQ ID NO: 6804 - DNA, 1535 bp, unidentified
  source 1..1535: mol_type = unassigned DNA; note = element_a9269e8
  misc_feature 1..2: note = core
  misc_feature 3..241: note = LE
  misc_feature 242..1417: note = CDS
  misc_feature 1418..1535: note = RE
  misc_feature 3..219: note = bridgeRNA
cttgtattatagagtcgtagtttttagtgtccctctccaaggacatatgctacactgtaaaggatgctgtggatcggtttcattctcctaccgcacgacggttcccgaaaggctccaaccacagctctttacagtattgttaatcagttagataccgcctgacggtttatgtggaacaaggttacaagagtaaagtgtcctgtggaaccagcatcaaataaacataccggaggtattcattatgatttgtgtgggtatcgatgtcgccaaggacaagcacgactgcttcatcctcagctcggaaggcgaagtcctagcggatgtgttcaccatcccaaacaacgcagagggctttagcgcacttctgcaaaccattcgtaactgcactcgtccggcagacaaaataaaggtaggacttgaggctaccggacattacagctacaacattcttgggtttcttcttgactgcggtctgccaacctatgtcataaacccattgcacaccaatctctaccggaaaagtctgacccttcgaaaaaccaagactgaccgtgttgatgcaagaaccattgcgactatgctaatgtctgatgtggacctcaagtcctacacagacacatcatatcacaacgaggagctaaagtcactaaccagatacagatttgacaaagttcacgaaagggcgaagttgaaaacttctatttctagattggtcaacattctgtttccggaactggaaaagttggtttcaacactccatatggcatctgtttatgcactcctcagcgagtttccaggcgcacaccagattgcggctgcacacctgactcacttgaagtctgtgctgtctgacgcttctaaggggcgttatgaccgcgacaaggctattgagattcgagatgctgcaaggaactctattggctccagaatgcctgcaaagtcattggaattgaagcatacaattcagctcattcgtgaattagacgcagaaattgaagaaattgaaatcgaaatcaattccataatggatgaaatccattctcctattactactatcccgggtatcggtactcgcatgggtgctatgatcctggcagagataggagacttctcaaacttcgcttctgctgataagattttggcttatgccggtctgtctccatctacgtatcaatctggccagcttgcgaactgttacgcccatatggagaaacgcggctccagataccttcggtacgccatttttaatgcagccaaatatgtctgcaattgggatccaacttttgctgcctatctggctaggaaacgcgctgaaggcaagcattacaatgttgctgtctcccatgccgccaagaaactcgtacggctgatatacgccatggaaatatctggacagccatatcgatcccgcgtgtaacaatctcaacaacttttcgcagagcgccgtcaacgacgctcctcttgtcatgccgttttgacggtagtaactttttctgcaacatcctcagattggggcttgacttttaatagttagt

SEQ ID NO: 6805 - DNA, 1391 bp, unidentified
  source 1..1391: mol_type = unassigned DNA; note = element_a92a41e
  misc_feature 1..2: note = core
  misc_feature 3..85: note = LE
  misc_feature 86..1123: note = CDS
  misc_feature 1124..1391: note = RE
  misc_feature 1157..1377: note = bridgeRNA
gatgaggtggatggctcccgctcacggcatcttggtgccaatatgggttgctgtcatgcaaacccgagcaaaggagccacccgtcatggagattagcacaatcggcctcgatctggccaagaatgtttttcaggttcacggcgtgagcgccaccggtgaggtggtgctccgcaagacactgcggcgagcgcaggtcttgccgttcttcgcaaagctaccgccgtgcctggtgggcgccgaggcctgcgggacgtcgcatcactgggcgcgcgagctgacgaagctcgggcacgaagttcggctgatgccggcgtcttacgtgaagccttacgtgaagcgcggcaagaacgacgctgccgatgccgaggcgatctgcgaagcggtgacgcgccagacgatgcggttcgtgccgatcaaatcgcgcgagcagcaggccgcgctgtcgatccaccgtgcgcgcagcctgctgatcaagcagcgcacgcagctggtcaacatgatgcgctgcgtgcttgccgagctcggcattgcgatcccggtcggcgttgaaaaggcgttgcagatggcgcgaaagatcgtcgatggtgaggccgagctagatctgccggacgaagcggcgaacgtcgtcggtgtgctagccgggcaggtgctccaactgcacacacagttgcgcaagctcgatcttcgtcttgctgctctgcagcgcagtgacgaacgggcccggcgccttgcaacgatccctggcatcggacccgttggcgctactgcgctcgccgcatcggtaggcgacgccgcacagttcaagtcgggacgacagttcgcagcctggctggggctgacaccgcgccagcgatcgagcggtggcaaggaacgcctcgggcggatcaccaagatgggcgacaactatctgcgccagctgctcgttgtcggtgcaaccgcattgatccgatctgccaggagcaagcccgagacggtcgatccgcgctttgttgctctactcgccagaaagcccgcgcgcgtcgcctcggttgccatcgccaacaagatggcgcggatcgcatgggcgatcatggcgcggggcggagtcttcgagcgcggtcatgcgccgatactggctgcatgagagatcaagagcttagctgaggagatcagcttcacgacgttgtgagagcaaagcgatgtgatggaacgaaccggtcggaccgggaacaaggacaacccaacgaatggcgaaggcgttacagcctgcaaagccgatcgggaccatgttcgcggaccccatcagggccagcagtccatgccgactgcatcaacaggccggacagacgactgcacccgacccatcacctgatcatcactttatgcttgcaacgcgggagccatccacagag

SEQ ID NO: 6806 - DNA, 1521 bp, unidentified
  source 1..1521: mol_type = unassigned DNA; note = element_a92dd7e
  misc_feature 1..2: note = core
  misc_feature 3..255: note = LE
  misc_feature 256..1419: note = CDS
  misc_feature 1420..1521: note = RE
  misc_feature 3..232: note = bridgeRNA
cttgtatgatatacacatagcaaaagccagtgaaatcatactctcctttcttggtttttgttatgattgaggtagacactgtggactgttgatatttcctatagctaagactattcataggagtttatggccacagtttctatcttaattgttgattggttggataagccaaagagcttttatttcaggcaaggctacgaggatagattcttgtggaacacagttgtcgtaaatgatacaaggagtgatgtatacatgatctacctcggcattgatattgccaaaaactcgcacgttgccgccgctatgacatcagagggagaaataattcttacgccattctcctttactaacagcgccgctggttttgctctgctgaaggaaaggttggacagcctgccaaagatgcctctactggttggtctggaatccaccgcccattatggtgaaaatctggtttactttctctgtgggaacggatatcatgtcgccatgatcaatcctcttcaaacatctgccatgcgaaagtccgccatccgtaaaacaaagacagacaaagtggatgctttcgttattgctaaatcattgatggtggaaggctatacagaattaaagcaaacagatattaatctcctaaaactaaaaggtctctgtaaaacaaggcaaaaccttattctcatgcgcacccgctgtaaaatccagcttggcagctttgttgatcaactctttccggagttgaatcaattcttccgggctggccttcatatcaatgtctcctatacacttctgaaagctcatcccagacccgcagaggtgcaatcacttcaccttacttacctttcaaaccttttgcacaaagcatccagaggcaggtatacgaaagaagatgccattcgcttgcgtgaacttgcaaaaatttctattggtactgatagtccggcgttagccttgcagattcgtcaggctgtttctcaaatcgaacttttttcagcacaacttgagcaagtagagagcgagatatcctctatcatgaactcacttgcttctcctattatgactatccccggaattggacatctgaacggggctatgatcctctcctgtattggaaacatacagcgtttttcttctccggctaagctccttgcttatgctggtcttgatcctgctgtcatccaatccggaaactttaatgctaaaagcaccagaatgtccaaacgtggaaattctatgctccgctatgcgctaattaacgccgcgcacaatgttgttcgcaacaacgaaacctttgctctatactacagatccaaaatcgcacaggggaagtctcattattgcgcattaggccataccgctcataaacttatccgtgttatctttatactacttactaaaaatattgcttttgacttagcttgatcatttccttttccatgcgggctgcgaaagcagctctgctttgctatacccattttttccttgaatttttttagctttcactattgactttccatagttggt

SEQ ID NO: 6807 - DNA, 1380 bp, unidentified
  source 1..1380: mol_type = unassigned DNA; note = element_a93014d
  misc_feature 1: note = core
  misc_feature 2..285: note = LE
  misc_feature 286..1365: note = CDS
  misc_feature 1366..1380: note = RE
  misc_feature 1..295: note = bridgeRNA
cagtcagaagatggtcgccagttcccgggcggtttgtctcaaacactgatcgaccgcggtagactggcgccgcaaggtgcctcggtgcggcctgacccgcactccgatcgaccgacgtgtctttccctggacctgtcggccgcccgggaacacctcgcggtgaggctttgcctcggccattgcctgtgacccgagaagggcctgaccgaaccggtctcgtgactgtcctgtccaagcattggatcgtgggtgagccatgggttttggcaaccacggaggtgaacgatggacggaaacgacaaggcggcgcatagcatcacgggcggcgtcgacacccacaaggacctgcatgttgcggcggtcgttgacgactgcgaccgggttctcgatacccgcagcttcgcgaccacccggcacggttatcgtcagatgttggcatggatgcgctcgttcggtgagcttcagcgtatcggcatcgagtcgacgggcagttatggcgcgggccttctgcgctacatgcaaaccgccgggatagaggtcctggaggtcacggcacctgaccgtcaagatcgtcgcaaacgcggaaagaatgacgatctggatgcccaaagcgccgcccatgctgcctttgcggggcagcggaccgttaccccgcgaagccgggatggaatggtggaatctctcagagttctaaaggcttgccggaaaacagcggtgaatgcccggcggatcgccctgcagatgatccagaacacgatcatcgccgcgccggacgcgctgcgcgaccaactccggggaatgacgcggatgcaactgatccgcaccctcgccgcctggcgcccggatctgacggcttatcgcgacatcgaggccgcgtatcgcatctgcctcaaatcgctcgcgcggcgctaccttgagctgcacgatgaaaccgctgatctcgacatgatgatcgaagcgatcgtaaatgatctcgccccggaactgatcgcgcagaactccatcggccacaacagtgccgcccagctgctgctgacggctggcgataatcccgagcggctcaagtccgaagccagcttcgcggcactctgcggcgttagccccgtcccggcatcatcgggaaagacggtgcgacaccgtctcaaccgtggcggagatcgcgccgccaacagcgcgctgcacatcatcgcgatcggccgcctcaggaccgacgaaaggacaaaagcctacgtctcgcgccgcgtcgccgaaggtcattcgaaactggaagccatccgcatggtaaaacgctacgtcgcacgagaagtcttcggcataattatgcggcgccagaaagacattaaccgaacgcgcatcgccgcttgacaaacagaagggcgt

SEQ ID NO: 6808 - DNA, 1153 bp, unidentified
  source 1..1153: mol_type = unassigned DNA; note = element_a931166
  misc_feature 1..3: note = core
  misc_feature 4..213: note = LE
  misc_feature 214..1134: note = CDS
  misc_feature 1135..1153: note = RE
  misc_feature 18..196: note = bridgeRNA
gcttgtgtctaaagaaaggaataaagtctggggtgagagcggtgaatggcaggttgttcggcagcagtgttagtaagcacgtgtagcagcagaaccgccattcacctctccgctctggctacaagcccgaacagttgaacgagcgcacctcgaacatcacaagcatgggcatcaccagagtgctctcatccttgagtgtaagaggtgtttgttatgatttcctggctcggtatcgatgtagctaaatccactctgtccgtttggctccacccccaagacgtcagctttaatgtccccaacaactcagcaggttacgcgcagctggtcgaaaagctgagcgaatacgacgtacagaaggctctgcttgaggcgaccggtggttacgagcggggcgtgatgatggcgttaagtctggctggatttatcgtcatccgcataaatcctcgccgtgcacgggcgtttgccgaggcaatcggcaagcaagccaaaacagaccccattgatgcccacgttctcgcgcagtttgcgcaaacgctaaaggcaagcaatccgcagatggtctccacgcaggcccagtgtttgcgggagttggtccaacaacgcgagcgcttcgtccagcagcgtgacgatgatcggcgccgcatccatcaagctcacctgcccaaggttatcgaggcattgaaaggtcatatcgccttcctgaaagtacaaatcttggatctggaaaaggctatcgaagaagcgatgcaggcgctcgacgcgctcaagacgacgcaactgacatctgtcaaaggcatcggcacgatcaccgctgccagcctgatggcttacctgcgggagctaggtgaactcgaccgtcaccaaattgcggcactggccggcctggccccgtataacaatgacagcgggacgttccaaggcaagcgcaagatctgcggtggacgcagtgctgtgaggcgtgcgctctacatgtcgtgctggacggtcatccgctacgatgcctcgttcaaagcgcgttatgaagggctatgcggcaaaggcaagagcgcaaaagtagcgctggtggcatgcatgcgggtgctgttgatccggcttaacgccatgctgcgcgacggcacagcatggcgaacgtgaatgactgggcaagacagtt

SEQ ID NO: 6809 - DNA, 1207 bp, unidentified
  source 1..1207: mol_type = unassigned DNA; note = element_a932b15
  misc_feature 1..2: note = core
  misc_feature 3..217: note = LE
  misc_feature 218..1204: note = CDS
  misc_feature 1205..1207: note = RE
  misc_feature 37..194: note = bridgeRNA
tcctttagatttgtttagcagtatttcattaaatttagaatagagaaaagtgtttaagtaaactaatactcactccgagtaaaactcatagttcgatatagacttaaacactttaaacatcaaaatctcagatagaaattagggatccaagcccattataaaggagttgagttattgatggttttctctaatcttttaatcacttaaaaacaaaattatgaaaaacatttttattgggattgacattagttctaaaacattggatctctgtatcaaaaaagacgggcaggtcgcttattcaaccattgggaacaccataaaagagtgcgacaaattctttaaaaaatatgcagctatcaaggatgcggcaatctatgtcgccatggaaaacacaggtaggtacaattacaatctgtatgaagcactagagggtttttcattcttggtctatgtaataaaccctatccatatcaaaaaaagtttagggttggtcaggggaaaaaatgaccgcatagatgctgaaaggatcacattgttcattgagaaaaaccatatggatttgccacaatggaaaccaagtacagaatccattaaacaattgaaagttttgcaagcggaaagaaagtatagggtcaaaataaaatcaggattgcttaggcaacgatcggattataaagtaatgaatgccaatggaatggacaaagagctacttaaactaaatgaaagcttgatcaggaacattgatgcgcaaataagcaagatagaagctaagatacaatttataattgggaatgatgaacggttaagggaacaggtaaataggatccggacgatccctggggtgggcaaggtattggcctggatggtgctgtccaaaacggaagggtttacaaaaatagataacccaagaaggatggcctgctttgccggtgttgtcccttttgaacatcaatcgggaacatccttaaaatataggcctagggtatccatttttgcagataaagaattaaaaaaagtactccatttggcagccatgagtgctattaggctagaaaatgaccttagggtatattacctaagaaagattgaagagggcaaaaataagatgagtattttaaatgccattaggaataaaattatccatcgtatttttgccttgattaaaaaccaaactttttataaaaatgatttggttgtgtcatagaaa

SEQ ID NO: 6810 - DNA, 1346 bp, unidentified
  source 1..1346: mol_type = unassigned DNA; note = element_a93d83f
  misc_feature 1..5: note = core
  misc_feature 6..260: note = LE
  misc_feature 261..1331: note = CDS
  misc_feature 1332..1346: note = RE
  misc_feature 11..242: note = bridgeRNA
ctcctatcttttagttgttgcatttgggagccgaatatcgaatgctttcaggtgcaatgcagactctggcgggcagggatgccgacatctcggctgaggcgacgggtgcgacctcgtaaaggagaatggcatcctgccccgttcgggaaaggccgcggattagctggatgaggggcggcatgccacctcggatctcttttgggaggttgcggtcccgggcgctcgggcaggccccgccgcatcgcaggagggagccgggaatgatctacgcgggtgtggacatcgccaagacggaccacgtcataggggcggtcgacgagcgcggggcggaggtgtgccggccgctgccgttcaagaacaccgaggccgggctcgagagggccgtcgcgtggctcgagggccttgcggggtcgccgtccgacgtcgtcgtgggcatggaggccaccggccgctactggatggcgtgctactcgttcctcgtcgcccggggctactcggtcgccgtgataaaccccatgcaggtcaaggcggtgcgcaagctcaaggggctcgacaaggtcaagaacgaccgcgtcgacgccgggctcatagccgaggcgctgcgcataggccggtacgacgagaccaggctcgccaccgacgaggtggcgtcgctgaggtcgctgtcgcgctacctgcagtcgctgcgcggcatggtcgcggagctcaagacccagtgcgtgtgcctgatggacgcgcacttccccgagtacgccggggtgttctcggacatgttcggggccggcagccgcgcggtgctgtccaagtccccgctgcccttcgagctggcgcggaggcgcgccgactcgctcgcccgcgacatcgccgaggcgtcagggcgcggcggcaagtcggccggctacgccgcgaagatcaaggccgcggccaggtcgtcgatcggcgtgaggctcggccaggaggccgcctcgttccaaatcaagtccctgataaggcagatcgagttcgccgactccgagtgcgcgaaggtcgaggcgagggtgagggccctgctcgacgaggtcgagccgctcgtgctcacgatacccggggtgtcctacgtcacgggcgcccagatagtctccgagataggcgacgtgtcgcgcttccgaagcgcgcccgccctggtgagctacgccgggctgaactcgtcggtgagccagtcgggcaagttcgacagcggaggcggccccgccgcccacttcgccatgcccggaaagcattcgatattcggttctcaagctgcaacgttcggacaattaacagttctcgaaaacctacggtttagcccttgacttcatatagctggt

SEQ ID NO: 6811 - DNA, 1430 bp, unidentified
  source 1..1430: mol_type = unassigned DNA; note = element_a93e88f
  misc_feature 1: note = core
  misc_feature 2..80: note = LE
  misc_feature 81..1115: note = CDS
  misc_feature 1116..1430: note = RE
  misc_feature 1203..1424: note = bridgeRNA
taatgagatggtccgccgtttgattcatctgcgtaagcaggttcatcgtagcggaagctttgccaaggaggatcatcgatatgcagataaattcggttggcatcgatctcggcaagacgacttttcacctagtggttctcggcgaagccggcaaggtgctcgtgcgaaagaagttcaatcaacgccagttgctgacgtacaccgcgaacctgcctacatcgctgattggactggaagcctgctccggtgcacactttctgggacgcgcgctgaggaagcaggggcatgatgtgcggctgattgcagcacagttcgtgaagccgttcgtaaagtccaacaagaacgactttgtggatgccgaggcgatcgccgaagccgtggagcgcaagaatatgcgctttgttcccattaagaccgatgaccaactggatctgcaggccatccaccgtgttcgagatcggttgattgcgcgacgaaccgcggtgatcaaccagctccgggctttcctgctcgagcggggcttgaccttcgccaagactccagccaagctacggaacgcgttgccggacattctggagaaccccgaggttgacctgacaacgcagatgcgcaacctgatcgatctgctttgggctgagtggaaggcagtcgaagatcagattgaaagactcagccgcgagttggagcgtatctctgccgccgatgcgggctgtactcgcctccggcggatcccggggattgggccgatcgtggccacggccatcgttgctgccatcggcaatggcgcagcctttcgcaagggacgcgactttgctgcctggctcggggtggtgccacggcagtattcgacaggaggtaaaacgaggctgctcggcatcagcaaacgaggcaacgtctatttgcgtaaggtcctgatccacggagcgcgggctgccgtattgcgtatgaagcgggatcgggcgccgatcggtgcctggctggatgcgctcgacgcccgagctccgaaaaacatagtcgtagtcgcgatggccaataagctggcgcgcatcgcctgggcggtgctgtccagcggagaagattacaaaccagccagcaaccagctcaaagcagcatgaataagcgcggaaaagacgccttacggcttggaagcgctaacgcgctcccactttaccgcactacggctacggcttgaacttacccaccgaggtctgcaaaggaacagcaaggacgaaagaacagtcacaacggcatgtctccagcctgggagacgagaatggtctcgaaagagcaaccgaccgacttataaggacagacatgcgcgcaactcatcatggccaggagaactgatctccattacaggccgaatacatttgcgcagacttgtcttctcgccctcaacttttccttgcagtcgggcggcggaccataca

SEQ ID NO: 6812 - DNA, 1431 bp, unidentified
  source 1..1431: mol_type = unassigned DNA; note = element_a94f7ce
  misc_feature 1..2: note = core
  misc_feature 3..224: note = LE
  misc_feature 225..1415: note = CDS
  misc_feature 1416..1431: note = RE
ctgatatacgtccttgtacggggtcggatgatgacaccgaccccacggggagaccggcaagtggctatgcggcagatgaccgtttgggctagataccggcccccgacccctggccgtgaacggtgatcgggatccagcggcacgaacgagaccggtgatcggacccatcagctgacgtcggccgggaggagcgggacccctgggtgtcggaaggagatggaccgatgatgaccgtgggtatcgacatcggcggcaagcagcacgcggtggcccgctgccgggagggcatggacaaggccgagcgggaggtcctgcacatgacccaggaccgtgccggcttcgaccgtttcgacgcctggctgcgagcgcagccggagccggtgggctcggtcacgatggaatcgagcggccactactggatgtgtctcacgagccacctcaaagggggtccggtgccggtgaaggtggtcaacccgctcgaggcgaagtactttgccaagagccggatgagccggacgaagtccgacccggccgatgcgaggatcctcgcgctcatggcccagcacgacccgtcgcccgcccacgatccgctcgagggtgtcgagctgcgccaggcctcgcgcttcgcgatgcgcctggtgaccgagcaggcccgggtctgccagcgcctcatccgcctcgtggagctgggcttccccgagctgggccagctcttcgacgatccggcctgtcgcaccgcccgggaggtcctgcgcgtggcccccaccgcggcggtggcgcggaggcggcgggtctcgaccctcgcggatgccaacgccggtccgggacaccgtcgtctcggtcagacgaaggccgtgcgcctcaaggaggccgcggccacctccatcgccgtgacggaactcgatgacgagatggccttcgaggtgggcctgctgcttgaccagtacgacctgctcgaggcccagatcgaacgggccgaggcacacctcgcgaccctgctcgacggggagctggcccggcggttgcggaccatccccggcgtcggaccggccatcaccgccacgctcatcgccgagatcggcgacatctggcgtttcgacgacgccgaccagctgctggcctatgccggggtccaccccgccgagcgcagctcagggcggaagggtgcgaaccccgagacctcctggcacatgtccaaggccggcaacgcgcacctgcgggccgcggcgtatcggatggccgtggtgggcgtcacccacaacccggtcatcaaggcccactacgagcgcaagcgcaaggccggcaagtccaagatgaacgctctcggccactgcatgtccaaggcgctcaacctcgtttggggcgtctggcgcaacgaggctgactgggaccccgactggggctcacgctcttgacaagaccctatgggat

SEQ ID NO: 6813 - DNA, 1470 bp, unidentified
  source 1..1470: mol_type = unassigned DNA; note = element_a94fb12
  misc_feature 1..2: note = core
  misc_feature 3..250: note = LE
  misc_feature 251..1324: note = CDS
  misc_feature 1325..1470: note = RE
  misc_feature 2..226: note = bridgeRNA
tcgtataataaagtagtagtatttatagtccctctccaaggactgtatgctatactgttagagatactgtggattagtgagcgcgaactaccactagatggtttaagaaaggctctaaccacagtctctttgtatatttgttaatcagttagataccgcatgacggtttatgtagcacgaggatacaatcgcaaagagtacccgtggttctaaaacagtatcaatttctattttttatgaggtgatttttatgattctagttggtattgatgtcgcaaaggataagcatgactgctttattatgaattcagatggcgaaatacttgcaaaatcttttactttcgctaatactaaagaaggctttgatttcttctatgaacgactatgttcagtatctgtttctgccgacaaaataaaagtaggacttgaagctaccggacattatagctacaatcttcttggattcctacttgataaaggtctacccacctttgtcatcaacccgttacatacaaatctttacagaaaaagtcttagccttagaaagacgaaaacggataaagtcgattccagaaccatagctatgatgttattgtccgatgtagacttaaagccctactcagatatatcataccataacgaaaacctaaagtcattaactcgttacagatttactaaagttcaggaacgtgcaaaacttaaaacttccatttctcgtttagtgcagattctttttcccgagctcgaaaaactagtacccacactccatatgatctctatttacaagctgctagaagaatatcccggcgcttctttcatcgcttctgctcatcttactaagctgacaaaccttctaaaagaaagttctcacggacactataatcgtgatacgtctcttaaatttagagatacagccagaaactctattggctctcatatgtctgcaaaatctcttgaattaaagcataccattaagcttattcgtgaattaaacctagaaattgaagagatagaggcagaaatcagaaaaatgatggatagtatggcttctccaattactactattcctgctacataccaatccggcaagcttgataattgccattcacatatggaaaaacgaggttcacgatatttaagatatgctttattcaacgctgctcagaaagtatgcatttgggacagtacgttttcggaatacttatctaagaaacgtgctgaaggaaaacactattacgtagccttatctcatgccgtcaagaagctggtacgggtaatttgtcatttggaaaggaccgggcaaccttacataaaaaccatttaaaatagacttaactcaatactgttttttagagcaccagtaaagatgttctatttgttatgcagtttttcgactaactacaaatcttactataaatttcgcaatttaataaaatatagccgatttatatcttgactctttatagttag

SEQ ID NO: 6814 - DNA, 1735 bp, unidentified
  source 1..1735: mol_type = unassigned DNA; note = element_a95012c
  misc_feature 1..2: note = core
  misc_feature 3..355: note = LE
  misc_feature 356..1579: note = CDS
  misc_feature 1580..1735: note = RE
  misc_feature 54..329: note = bridgeRNA
ctcgtataataagatttgcagatgaatttaaagtgaatctgcatggttcactccaattggccaacaggctatgagatgcccgtgatacaatagctgtaggacagcagggtcaagttctcaattaccttgtcgagctgaaaggctgcttcagatggagtccgttcccctgaaccggaagttagctgcaaactcattagctgtttaccgggagcagggccgcccttccagcagtgagggctatcgcattggcccgccccggaatgattctgataagcgaggttgcggatgctccggatatcatgggtatctcaaagcctgctggcctgaaatctccacgcggggggaggtgaaaatcatgaacccactttttgtaggcattgacgtgagcagcaagaacaatgtgacctacctgatgaagccagacggcagcaagcacagcagtttttccgtgcaaaacaacctgggcggtgctaaactgatgtcagagaagatcgtgttggcaatggagaccatggggctcaacgatgtggtgatcggcctggaggccacatccatctacggggacagcctggtctacgcgctccgcgaggacaggcggctgggccggtatcagaggaaactccatgtactcaaccccaagcaggtcaggaagttcaaggaatcctacccggacctgcccaagaacgattgggtagacgcctttgtaatcgccgaccatctccgtttcggcaggatcggcaaggaggtctacatggacgactatcgctataaatccctgcaaaccctcaccagggccagatttgatgtcgtacaaaacctgacacgggagaagcagcacttcgccaattacctgttcctaaaatgctgcggcatggcccaggacaaggatatcgccaactccagcgccaccaccatcgccttgatggagcggtttgaaacggtggacgagctggcctacgccgacctggacgaactcaccaaattcattgatgaaaccgggcgtaacttcgcggacccggcggccaaggccaaagcaatccagaccgccgccagaaactcctaccgtctgcccatcactgtgaataactcagtcaatcaggcgatggccgtttctatcgccaccatgcgggctttggggaagcagatcaaggtcttggacaaggccattgagcagcagtttgagatcatccccaacacgctgacctccatccccggtatcggcaaggtctactccgccggtatcatcgccgagattggcgatatccaccgcttcagctcccaggcgtccgttgccaagtttgccggtcttgtctggacacagcatcagtccggcgacttcgaggcacagcacagcaagctcatcaagtccggtaaccgctatctccgttactacctgctggaagccgccaactccgtgagaagatgcgactctgagttccggcgctactatgacctcaaattcaaagaggtcaatcagttccagcataaacgcgcactcgctttaactgccagaaaactggttcggttgatctatcggctgctgatggacaaccgcctgtatatcccgccggagagttaggccgatgcctgccgctctgacgtaataggccctgtttcaaaaatttgcagggacagggcttgggttggtgttgcctttttaccgccaacatagccttttgccccctatttcccttgaaattttcttgcatcacctacttgacttcataccattaga

SEQ ID NO: 6815 - DNA, 1566 bp, unidentified
  source 1..1566: mol_type = unassigned DNA; note = element_a95573e
  misc_feature 1..3: note = core
  misc_feature 4..255: note = LE
  misc_feature 256..1458: note = CDS
  misc_feature 1459..1566: note = RE
  misc_feature 23..275: note = bridgeRNA
tttagtaccatagaaagtgtaattgttagagagtaattaactcagacagttgcactttttcttataatacggggagtaattggcctgacgtatggcccattggatcttgcatccgccataaaaactgtcagccaatccccttattataagcattcgcttaagcaggtagggatcagctcccgcgtaaccaactaaactgaatggtaataagtgcggcttggaacaattactaaattcagatttaggaggtatcacatgatcagcgtgggaattgatgtatccaaagaaaagagcactgtttgcattctcaaaccctacggagaagtagtttgtaagccgttcgagctgcaacacaacaagaaatcactggaatcactagacgaacttttacggagattggacggcgaagtaaagatcgtaatggaagctacaggtatctataaccttccggtactgacctttctcgacgagaaaggttattttgtttccgttataaatccttgtgtaatgaagaaatatgccaggaacaacaactttagaaacgttaaaacagacaagatggattctattaccattgccaactatggaatagagaagtggttcaaacttaagaggtacgaggcttcagaatccacatatacggaattgaagttgttaggcagacgatatcgtcactacatggagatgcatattcaggcattgcaagagcttacacacgtattggattacgttatgcctggtattaagggcttgttcaacagttggacagaatccaacaacagagacaagttgagcgattttgtagaaaagttttggcactacgatctgattacttcaatgagttgcgaagaatttgttaaagcatataacgattgggcaaaagaaaaagaataccatcagagcaattccaaggcagtgcaagtctacgaattagcatctaatggcattcccacattaccgtccagcctcccatcgaccaaaatgctagtactggaagcgataaacacattaagaaccattgatggttctctgcacactatcttatcgcgaatgaaggaacttgcgaagagcctgccagaatattcaacggtaaggtctatgggtggcgtaggagatacacttgcccccaaattgatagcagagattggtgatgtcaggagaatgcacagtgccaaagcattaatagcctatgccggaatagacccaccgccccatgaatcagggcaatttgtaggtgccaaacgccagattaccaagaaaggttcttccacattaagaaaagtaggatatgaagtaatgagggtgcttaaatcccacaaagcacctaaagatagtgccgtttacgaatatatagttaagaaagagaacgagggaaaaagcaaaaaacaggcaaagatagccggtctgaacaagttcttgcgcatctactatgcgagagtgacggctgtataccaataacaaaaaggtcgcataaagcaagcagaccggaattaaccggtctgcttgccatgcttaaatcttaaacgtatccatttactaaactagctcttgatttttgttagcagg

SEQ ID NO: 6816 - DNA, 1624 bp, unidentified
  source 1..1624: mol_type = unassigned DNA; note = element_a9573ac
  misc_feature 1..2: note = core
  misc_feature 3..284: note = LE
  misc_feature 285..1505: note = CDS
  misc_feature 1506..1624: note = RE
  misc_feature 14..310: note = bridgeRNA
ctactacaatatatttatggttaatattccttacagccagtaaggaattatccatcttgttgcttaagctgttagaatgtaagagcaatcggtatagcggattcctccttgggctttgcgcccgtaaaaaagtctgctaaccagctcttcattcgcagcattcgttttatgcaggttgagccgcccttcggggtgcgttcgtgtcacaccacagtagattgaataggcaatgagtaaaactggtattgaccaattgcaacctaagataaaggagtgacatttttatgaacttgaacgcagtaggtattgatgtttccaaaagaaagagcacagtggcagttcttcgtccgggtggcaaggttgttgtaaaaccgtttgatgttccccacttatcgaatggtttcctatccttggttcatcttattaacgctttggatggcgaatcacgtatcgtcatggagtgcaccggacgttactatgaaccggtagctcgtgagttatcacaggcaggcttcttcgtaagcgcggttaatccacaaatcatccgtaactttcagggacaggataatcccctccggagagttaaaacagacaaagccgattctataaaaatcgcgcgatacgcacttgacagttgggcaaaactgaaacagtatagtcttatggacgaaatacgcgctcaacttaaaacaatgaaccgccagtttgatttctatacgaaacacaaaacggcaatgaaaaacaacctcattggtctcatcgaccagacttatccgggtgaaaatacctattttgacagtcccgcccgcgaggacggcagtcaaaaatgggtggatttccttgacacctactggcatgtcgattgtgttcgtaaaatgtcattaaacgcatttgtcgaccactatcagaagtggtgcggtcgcaagaagtacaacttcagtaaatctaaggctgaagaaatctacggaacagctaaggagctgattcctgtacttccgaaaaatgactttaccaaacgcttgatcagacaggcggtagaacagttaaacgctgcttcccggaccgtagagcagcttcgttcccttatgaatgaaacagcctctcagctaccggaatacccgattgtaatgatgatgaaaggcgttgggccatctctcggtccacagttaatggcagaaatcggagatgttactcggtttacacataaaggcgccatcactgcatttgccggagtagatcccggtgtcaatgaatctggggattattcccagaagagtgttcacgcctccaaacacggttcacctgttttacggaaaactctgtttcaggtcatggacgttcttatcaaaaccaaacctgatgatgcagtgtatctgttcatggacaaaaaacgtgcacagggcaagccttactacgtctacatgactgctggcgccaacaagtttttgcgcatctactatggaagggtgaaagaatatcttgcgtccctgcccatgtcagagtaagcttcatacaccttttctctaaaccggcattacctggcggtctttttttgatacctatttttcaatctgtataaaattttaatgttcttcaaaatttagcttgactttttatttgcagg

SEQ ID NO: 6817 - DNA, 1478 bp, unidentified
  source 1..1478: mol_type = unassigned DNA; note = element_a95a110
  misc_feature 1..2: note = core
  misc_feature 3..77: note = LE
  misc_feature 78..1208: note = CDS
  misc_feature 1209..1478: note = RE
  misc_feature 1209..1465: note = bridgeRNA
tgttggggtggacggcccccgacggcatcgctgtgccagaatgaggtcgttggagatctcaaacgagggagccgtccgtgacgaagattatccgcattggggtagacacgtccaagagtgtttttgtgctgcatggagttgatgcggccgagcgtgtggtgctgcgcaagcggcttcggcgtaggcaggtacttgagttgttcgcccagttggagccgacgaaggtcggactggaagcctgcggagcggcgcattattgggcgcgcgagctgcaggggttggggcacgaggtggtcctgctgccgccgcaatacgtcaagccctacgtgaagcggaacaagaacgatgcggccgatgccgaggcgatctgcgaggcgatgagccggccgacgatgcggttcgtgccggtgaagacggcggagcagcaggcggcgctgatgctggtgggaacgcgcgacgcgctggttcgccggcgcacgcaattgaccaacgcgatccgcggctatgcggccgagttcgggctgatcgccgccaaggggctcgacaagatcgagccgctgttggcgcgcatcgcggcgcacgcgccgctgcccgggctggcgcaggagctgtttgcggcgcatgcgaaggaatatgcccggctgcaggcgcagatcagggagatcgaagccaagctgagggcctggcacaagcacaacgagctgagccgacggctcgcggaggtgcccggcatcggcccgatcggtgcgacgctggcggtgatgaaggtgcccaatcccaaggcctttcgctgcggtcgggacttctcggcctggatcggattgacgccgaaggatcactcgaccgccggcaagacgcggctcggcgtgatcacgcgcgccggcgacgaggcgttgcgcagcgcgttggttgccggggctactgcggtcattcagcacgtcaagcaaggaaaagggcatccttcgccctggctgatcgagcttgtgaggcgcaagccggcgaagcttgcggccgtggcgctggccaacaagaacgctcgcatcgcctggaagctgatggtcagcacagagcgctacaatcccgcgcacggtcgggcggtcgcagcgagcggggggcgcggccctgcgcttcgtgggggctccgcgccgcgccccccgctcgcgccgcatgacaagtctcgcgagatcaccgcgacgaccagggcctaacgagttcagcgcaagagcgaccttcgcctcgcgctgaggccggcgcttgctcgagaagcggcagatggtgtgatcgatcgatccgtgacgtgagatactccgcgagacccaatggcgctcattcgaaaccgccatgttgtttggacctcatgtcgcgaaccccatcttggcagcggtcatgtgcgaccgcgacaacaggccggacatatgatcgcaagcgatccgatccgctgctgccgccactcttgcaagccgggggccgtccacata

SEQ ID NO: 6818 - DNA, 1361 bp, unidentified
  source 1..1361: mol_type = unassigned DNA; note = element_a95b9b3
  misc_feature 1..2: note = core
  misc_feature 3..75: note = LE
  misc_feature 76..1101: note = CDS
  misc_feature 1102..1361: note = RE
  misc_feature 1077..1349: note = bridgeRNA
tgatggggtggacgccccccgacggcatctgcgtgccagagtgaggtgttgaagcttcacttgagggaggcgcccatgggcgaggttaccaccattggcctggatatcgcgaagacggtgtttcaggcgcacggagcagatgcatccggcgcggtcgtgttccgcaagaagctgagccggggccgtctgctgacgttcttcgccagccagccgccctgtctcgtggcgatggaggcctgtgcgggctcccaccactggggccgtgagctgacccggctgggtcacacggtccggctgatcccgccggcgtatgtgaagccgttcgtgaagcggcagaagaacgacgaggccgacgcggaggcgatctgtgaagcggcccagcggccgacgatgcgcttcgtggccgtgaagagtgcggagcagcaagccagcgccgtggttttccgcgcgcgcgatctcctggtgcgccagcggacccagatcctcaacgcgatccgcggccacctggcggagtacggccgggtcgcgccgaagggggtctgctacgtcgagcgcctgatcgccgagatcgagagccctaagagcgatctgccggagacggcgcgggcgagcctgcaggccctcgtcgacgtcttgccgaagctggaggagcagatcgccggcctggaccgggagatcgcccggcgcgccaaggaggatgcgaccgcgcgccggctgacgacgatcccgggcgtcggcccgatcaccgcgagcgcgctggtcgcgctcgccccgccggtcgaggccttccgccgtggtcgggacttcgccgcctggctggggctcacgccggtccagcgatccagcggcggtaagcagaagctcggccaggtctcgaagatgggcgagcgaaccttgcgacggctgctggtgatcggcgcgagcgcggtcatcaagcaggcgctcatccggggcgcgccagcgggctcctggctcgcgcagatgctcgcccgcaagccgcgcaggctcgtggccgtcgccctggcgaacaagatggcgcgcgtggtctgggcgctgctggtgagaggcggcgtctaccgaactccggcgctggcggcctgaccgccgtcagctccaggagcgtcgaagcgtaggatcgggcgaaggagggtatggcgcacagtcggcgagacgggaccgggagagccagagctttccaccgtgccttgagcacgcaatgggtgatgtggccccggtccgcgaacttccatacaggccagcgccgccccggcgacgcatcacaggccggacagatggcagcaaccgatcacgcgcccgccactcccaaaatccgaacttgcgctgaagggggcgtccacaga

SEQ ID NO: 6819 - DNA, 1682 bp, unidentified
  source 1..1682: mol_type = unassigned DNA; note = element_a965c18
  misc_feature 1..2: note = core
  misc_feature 3..556: note = LE
  misc_feature 557..1555: note = CDS
  misc_feature 1556..1682: note = RE
  misc_feature 39..211: note = bridgeRNA
ctcatatactaatagtataagaacagctttaagcatagttcttaaaaatgaacctaatcatctatgataaaattatagatattagggatgaaatgggattgttttatgtgcttgctgggtttccaatttaggaattactcatttgatagactccaccctcattccattgcctttcatcttttcggttggttaggttcatttattgattacctgtataactcgtgagcctgttgtggttttggattaacagggcatcccaaattataggaggtatattatgtcagaaaaaattgttgtaggaattgatgtgagtaaagctttcagtgatatctgtattctatcacctaataatgacatcatcaaaagacttaaaatttctaatgatattactggtatgaagtcgctcatctatgtacttaaaaaggtagaagatgagtacaaagacagagcagtaattatcatggaagctactgcacactatcatcaaattttagctaattttttccgtaagcataattacgaagtcattgtaattaatccgatttaaagtggagcattgaaaaatatcaatatccgaaaaattaaatcagataaaacagatgcatataatatagcgttgctatatcgtattaagagttacaacgaaacaattacacactcagataccgttaacagtatcaaaaagctttgcagacagcataaagaattgacggatgaaattgtggaacacatcaaccgattaatcgcttttttagatatttcctttccagatttcaagaaagtatttacggatttgcaagggaaaacacctttgtctttgcttgaaaaatatcctactatacaggaagtcttatctcctgaaaataagcaagatattattcaactgataaaagaaaattcacataaaagcagctcctatgccgaagtaaaatatgaaaaactattgaaagctgctgaaaaatctattgaagtttgtatagtaagccttagttcagcagtacttattcaaacaactgtgagggttatttttagtttacaggaagctttgaaagcaatcgataatgaaatcaaaaggctatcacttttagatgaaaagtttcataaagaaatagtgcttttacaaagtattccaggagttggagagtatacagcatgtgttgttttatcagagcttggagatatatccaatttctcgaaaccgaaagaattagttgccttctttggcttggatccaggagtaacccaaagtggaacatacaataggaaaaacaataaaatctctaaaagaggatcacctcatgttcgctcaattctccatatgctggctaaatctaatgtgtatccaaatcgcaacagagagtatttaaatcctgttatgcgagcttattttgaaaagaagatagctgaaaaaccatacaaagttgtaatgtgtgcaattatgcgaaagatggttcaaattatttttgctgtcctcagaaatcaaaaatcatttgagttaagaacacccgaagagcatcaaaaactaattcgagaaaagagtaagttagtcgcataaactattaaaagtgttgcctcaaaaaatgagaatatatgaggtttatttgctatgcacatttttaagttctgtgactgaaaaatattttaacatttttttaaaataactattgactttcttagttggt

SEQ ID NO: 6820 - DNA, 1462 bp, unidentified
  source 1..1462: mol_type = unassigned DNA; note = element_a96c0c8
  misc_feature 1..2: note = core
  misc_feature 3..237: note = LE
  misc_feature 238..1275: note = CDS
  misc_feature 1276..1462: note = RE
  misc_feature 17..183: note = bridgeRNA
cttgtatgttgcggtcagaggcgtgaggatgatttcatgtcttggcggtaaggccgtcccttccttaggccaattgtagttgagcctgtcccttagatcggccaccgcccctctgtttgcacgccgtggagaatcgaaggccttttgagcctgcatgttcaaggttggcgcaaacagacagtccgtcaaggtaggacggggcggcagccgagaccatcttaactctggagaagatcgatgaacaagcccacttccacttccacatccaccctgttttgtggcatcgatgtcagcgcccgttcgctgtctgtggccctgatcgagccggatcactccgtcagccagcgtgagtttgccaacagcaccagcggtcacaaggcgctgcttggctggttggtcaagcacaacgccccggtgcgcgtttccatcgaagccaccggcatttactcgctggatctggcgctggcactcaatgctgccccgcatatcgaacttgctgtgctgaatcccagacaggtcaaccgcttcgcgcagacgctacgccgatcaaagaccgacgcagctgacgctatcgttctcgccgagtacagccagcgcatgcccttcaccgcatggcagaggcctggcgtagagcatttgcatctgcgtaccatcagccgtcacatcgagtcgctggtggttgatctggcggaggtgaaaaaccgcctgcacaccgtcgcgaacagctccaccacgccacgtgtgatcctggttgatctgaaacaagcgcaggcggcgttcgagcggcgtttggtgaagatgcgtagcgaggcatcgaaactgattcaagccgagccggtgctgcgcctacgatttcagttgctggtcagtgtaccgggcattgcgcaggtcagcgcactgcatatcctgagcgaactgctgttgctgccacctggaatgacggtgcggcagtgggtggcctatagcgggctggacccggtgcatcaggtatcgggcacttcgctgcacaagccctcgcatatcagccgtgctggcaatcgccacctgcggcgtgcgctctatatgccgagtctttcggcagtgcgcttcgatccacatctgcgagcgttttaccagactctcaaaacgcgacataaaactggcttgcaagcgttgatggcggtcgagcgcaaactgctgcacgcaatctatggaatcttcaaaagcggccagccgtatgacggaaaacggttgtttccgaacatccagttggaggtagaatcaatcgccgggtgaaacagaagctggcaatgctgggaagcaaccatgccgagggataacccggtgggctcatcctgacgatgaaccgagggggcgggcaggagcagagatcgctcgccccaaaatcatcagagggatagaccccatgccttgaaaatccaaagcctaaaataccaaaaatgcttgactttcaacagagaat

SEQ ID NO: 6821 - DNA, 1647 bp, unidentified
  source 1..1647: mol_type = unassigned DNA; note = element_a96fd79
  misc_feature 1..2: note = core
  misc_feature 3..272: note = LE
  misc_feature 273..1517: note = CDS
  misc_feature 1518..1647: note = RE
  misc_feature 12..292: note = bridgeRNA
ctgttactatatatttgccccttgatttatggcagccagccataggcatgggacgtctcgttgcccaaactgttagaatgggatggtaatggtctgacattcgcccccaagggctttcacgtccgttcgtgagtcagtcagccatcctcccgttcgcagtgttcgatttgtgcaggtagagcctgagcgttcgtgtcagcaaacagatggaatcggcaatgggtaaagatggcatcctccattacaaacttcatcgacaaggagtattgaatatgaacgcagcaggtattgatgtttccagcagaaagagcaccatagccgtcctccgtcccttcggcgaggtagtaaaggttccctttgaggtcagtcacacagccgaagggcttgcgtccttggcacggcaactcaaggcgattgacggggaaacccgtgtagtcatggagcatactggtcggtattacgagtccgttgctaatgtgctgcacgaatcaggtctttacgtcagcgcagtcaatcctcttctcatcaaagagtacggcggtaattctctgcgtaaagtgaaaacagataaggccgacgctatgaagatcgctcggtatgctcttgacaactggtgcgatctgcgggactatactcctatagatacagttcgttatgatttaaaaaccctgaaccgccagttccagttggcttccaagcagaaaacagcatcctccaacaacctgattgccctgcttgaacaatcctttcccggtattcgtaagtgctttgaaggtcctgtacgcaaggacggcacgcagaagtgggtggattttgcccatacattctggcacgcagactgcgttcggaagctcagcctgaacgcctttgcggagcgttaccgcaagtggtgcaagcgaaatcgctaccaattcagcacggagaaaacagatgaggtgtatgagctggctaaatccgccgttgtactagtttccaaaactgaagtaacgaaagtgttgattaaagaggctgcaaaccagcttaccagtatctcacgttctgtggagacctaccgcactgagatgaaccgtctggcctcccaactgccggaatatcccgttgtcatggagatgtacggcgttggggaatccttcggccctcagcttatggcagagattggagatgtgcgtcgctttgagcgcaaacagtctcttgttgcctttgccggtattgaccccatgccgaaccagtctggagaaaagaatgtgaggagcaacaaatcctccaaacggggctcgccgtatctgcgaaaaacgctgtttaacattatgactgttcatcttcagcgtgcacccgcaaacgagccggtgtatcagttcttggacacgaagcgtgccggtgggaaaccatactacgtctacatgatggccgctgcgaacaagttcttgcggcgatactatgccaaggtgcgggattatctcgcttccctagacagcctgccgcctgtggatatggactccactgggctgaacaagtaactccattacctctaaatcttaggccggcgctttacggtggcctatttgttatattcatttctacttacctgccacctgcaaaattttctttcgccaagttcgattttgagcttgactttttatttgcagg

SEQ ID NO: 6822 - DNA, 1372 bp, unidentified
  source 1..1372: mol_type = unassigned DNA; note = element_a971e53
  misc_feature 1..2: note = core
  misc_feature 3..73: note = LE
  misc_feature 74..1108: note = CDS
  misc_feature 1109..1372: note = RE
  misc_feature 1118..1361: note = bridgeRNA
ttatggaatggcccgccctcctttgaggcatcggctaggatgcctgtgtttggaaagcggagaaggacgagccatgacgatcatgatgctgggaattgaccttggcaagaacagctgcagcgttgcggggctggattcggatgggaatgtggtgctgcgtcgccgcatgcagcccaagagggtcttgagcttcgcctcgaagctcgcaccctgcactgtagcgatggaagcgtgctgcggcgcacattatctgggacggcttctggccgaacaagggcacgaggtcagattgatgtcgccggaatatgtgcgtccttacgtgaaggcgcagaagaacgacgaccgggacgcggaagcaatcgcagaagccgccacacgtccgacgatgcggtttgtcgaactcaagtcccaggcgcaactggatgtccaatcgttgcaccgggcccgctctcggctggtcggcgcgcgcacgacgctgaccaaccagttgcgcgccatcctgcttgagcgtggcacggtcatcgcgcagaggcgccataagcttgagcaggcagtggatgccttgcttgcagatccggacttcatgagcggcagtcgcattcgtcgcttgctcgccgatatgcggcaggaatggatagatctcgatcgccgcatcggggctctggaccgggaattcgtcgaactcgctcgcgacaatgtggccgctcggcggctgacgtcgatccccggcatcggcgccctcaacgctaccgcactcgtggctgctgttggcgacggcgcgaccttcgccaaggctcgcgatcttggcgcatggctggggctcgtcccgcgacagcacacgaccggaggcaagccgagactgcttggtatctccaagcgcggcaacaaatacctgcgcacgctactgatccatggggccagggccgccttgccgtcactggcccgaagccagaccacgctgggcgtttggttacgtaatctgctggcaagacgacaccgcaatacggtggtcgtcgcgctggccaacaaactcgcccgtatcgcatggatgatattgcgacacgaggtaaccttccaggccaaccgagccacggcgatggcagcttgaaacaatcaggtcagcggcgacacgaaatgaacgccgtgtgacccatgatgtctgcgggaggactttgaaagatggcctgacggtcaagccgacgttctggaagcctggttcaaaagatggcgcgtcgacgccgtgagttttatcaggcccggagcgtgcggatctccatcttggcgacggcttcagccgacacgccgtatacgttgatgcagaccaatagttgccatcagaaataaacctcttgccgacgggcgggccatacgt

SEQ ID NO: 6823 - DNA, 1367 bp, unidentified
  source 1..1367: mol_type = unassigned DNA; note = element_a9749e8
  misc_feature 1..2: note = core
  misc_feature 3..79: note = LE
  misc_feature 80..1099: note = CDS
  misc_feature 1100..1367: note = RE
  misc_feature 1105..1353: note = bridgeRNA
tgatgctgtggacggcccctgatgcggcatcgatgtgccaggatgaggtcgttggaacttcatttcaaaggagccgtccatggtcgagattatcacaattggtttggatatcgcgaagagcgtgttccaggttcacggcgtcgatgcgtcgggttcggttgtggtccgtcggcagctgcggcgcggcgagctgctgaaatatttcgggtcgctgccgccgtgccttatcgggatggaggcgtgcggttcggcgcattattgggctcggcagatgggtgcgttggggcaccaggttcgcctgctgccgccggcccatgtgaagccctacgtaaaacggggcaagaagaacgacgcggccgatgcggcggcgatctgcgaggcggtcacgcggccgcagatgcggagcgtgccggtcaagagcgaggcgaaccaagcggtgctcctgctgcaccggtcgcgggatctacttgtgcgccagcgcacgatgctgatctgtgcgttccggagccatctggccgagttcggcgtgatcgccggccagggcaagggcaacttcgccaaactggtcgcgggcctggatcagcaggcgttgcccgcgccggcgctggtggcgctgcggctgctggcggcgcagatcgacgatgcgcgcgcaaaggtcgatgcgctcgaagatgaaatcgtcgctcagcatcgccgcgaggacgcgagccgccggctggcttccattcccggcatcgggccgatcatcgcctccgccatcgccgcctcggtgccggatgcctcggtcttcaagtcggggcggcagttcgcggcctggctgggcctagtgccgcgacagaactcgaccggcggcaaggagcggctcggcggcatcaccaaggccggcgaccggtatctgcgacgcctgctcgtcatcggcgcgaccggcctgatccgctacaagcgcaagaccatcccaggcgggttggcgtgggtgagcgcgttgctggttaagaagccggtgcggctcgtcacggtcgcgctcgccaataagatggcgcgcatcgcttgggcggtcttgtgccggaacgaggtctaccgggaagccgccgccgcctgacccggcagggccgctgccgccgacaaggttctacgattgcgagggtgagaacgtgacgtgatggcgaaccgggtcgaaccggggatcggcaaaacccgcgcactggcatgcgctcgcgagcgcgctacggtgatttgggagccgatccgcgaacttcatcagggccagcggtcacatgtaccgcgccgacaggccggatacatgaccgcacccgaccagaacgccaaaacgtcaaaaatcaccttgcaacgcaggggccgtccataca

SEQ ID NO: 6824 - DNA, 1409 bp, unidentified
  source 1..1409: mol_type = unassigned DNA; note = element_a978ff7
  misc_feature 1..2: note = core
  misc_feature 3..87: note = LE
  misc_feature 88..1128: note = CDS
  misc_feature 1129..1409: note = RE
  misc_feature 1144..1396: note = bridgeRNA
tgatgttgtggaacgaccccgctcccgcggcatcatgtgccagaggtccggtcgttttggctggaccacagaggaggaggtcgttccatggttgaaactacgacaatcgggctcgatgttgccaaacggtttttccaggttcacggagtgtcggcggatggcaaggttacgatcaaacgacagcttcgccgctccgaggtgcttgggttctttggcggattggagcgctgtactgtcggccttgaagcttgcggcggttcacacttctgggcacgcgagatcagagccctcggccacgacgtccgattgattccaccggcctatgtgaagccgtacgtgaagcgtggcaagacagatgcagccgacgccgaggccatatgtgaagcggtagcgcggccaaccatgcgcttcgtcccaatcaagacggccgatagccaagctgccctgatggtgctgaagacccgagacctcttggtccgccagcggacccaggcgatcaacgcggtgcgcggccatcttgctgaaatcggaattgttgcagctaagggattggccaaggtcgcgacgctgattgcaatcgtgcgcgacgggaacgaccaacggttgccgcccgcggcgcgaatggcactcaatttattcgctgaccagatcgagatgctgaccgagcgtgtcgacacacttgggcgtgagattgccgccgaggtccggcgggacaatactatgcgacggctcgcaacaatcccgggtatcgggccgatcactgccgcaacgatccaggcatcggtgccggaccccggcgccttcaagtcgggccggcacttcgccgcatggatcgggttgacgccgaagatgcattcgagcggtggcaaagatcacttggggaagatctcgaagatggggaacccgacgctgcgttctcttctcgtcgtaggcgcgacagcagtgttacagcatgctcgccgcggcgccacgatatcaccttggctgaccgcattgttggcacgccggccagccaaggttgcagccattgcgttggctaacaagatggccaggatcgtctgggcgttacttaccaaaggcgggacattcatccgaaaaaaccgagctgcagaacctgcggcagcctgacacgaatacggtctgacgaattggtcggcgtcaccgccgctggccaaggcaaggtgcactcaaacaacgatgaccccacaggacgacatcccggtaagacagaggccgcgattcccaaagcgcttaacgagcgcgctgatttggttggccaatcctatcgcgaacgtcatcgaggccagcgggccctaggtctgcaactataggccggacatatgggcgcaccgctcctgtatggggtcagaattgaagagagtcccttgaccgcggggtcgttccacata

SEQ ID NO: 6825 - DNA, 1538 bp, unidentified
  source 1..1538: mol_type = unassigned DNA; note = element_a97a587
  misc_feature 1..3: note = core
  misc_feature 4..225: note = LE
  misc_feature 226..1422: note = CDS
  misc_feature 1423..1538: note = RE
  misc_feature 8..222: note = bridgeRNA
tttcgtattattaggtcaaccagaatatactggttggcctatttatttaggtatcttatgatggcggtagccgggagaacgtgcggcttttaggggcattgaccccgaaataaaaactgttctcctactacctccaatgaccatgtttgagctggtagaggcagtgacctcgtatcacaagcgaagctatgggtttggaaccatcgtaggagtgccggcgcaattatggctagggaggttgttatggaaccggtagtaggcttagacgtttcaaaaggcaatagtgttgtgcaggcttttttggcacgaaatgaagtgttcgggaaaatggagatgatcccgcacgatgaatggggctatttgcaactagatcgtctgctaacggagttgcggaaggaaacggagatggagccagtcattatactggaagcaacggggcattatcatcgtggacttgtcctgcacttgaatcgacgtggatggagacatattatcattaatccgttacagtcgaagcgagcaagagggacgcaacttcgaaaggtaaaaaccgatgcagccgatgcttggcatctagcggaaatgtactaccgaggagatgtaaaacctcaccgaacgtgggaagaagcgtacagggaacttcaacatgtaacgaggcaacatgagtttatcactggaatgtttgtacaggctaagttaaacgcacgggcattgcttgatcaggtatttccgatgtacacacaactgtttcgggatatattttctgctacctccttactagtcttgcagcgatgtttacgaggtgagacgcaaaatatggataaggtgtttggtggagcgactggcagggcacgctcaaaacaatgggtaggtgagaaattgaaccaacttgagcacttgcttgaggattggatgacgcatcctaagagtgactcgcaaacgaaggttttggagggtatgatcgttttgttactggcttttttggagcagttaaacgatctagaggagcgaatgcagcaattagcgagtgaactacctgaagtagagctagtgaaaagcataccgggcgttggagataagctggcagctaccatcatagcggagataggcgatgcaaaacagtttaaagaccctaaacagctggtggcttacgcggggctagacccgggcatatttagctcgggaaagtttacagcaatgagcagccgaattacgaaaagaggatctaaacgattgaggagagctttgtatttagctgtacaatgtggtcttaggcggagtgcgaacgtcaagatcaaagcatattatgataagaaaaggaaagagggcaagccgtataaggtggttgtgattgcttgcgccaacaagcttctccatcacgtttatgccatcctcattaaaggcgaacccttcaaaacctaaccatatttacccataaaccttcttctccaatgaaggtttatttgttgtgcctagattgaagtataccagcaaatgaatttccaaccaagatgaaatgcttgacaagtattagctgg

SEQ ID NO: 6826 - DNA, 1219 bp, unidentified
  source 1..1219: mol_type = unassigned DNA; note = element_a97e117
  misc_feature 1..2: note = core
  misc_feature 3..209: note = LE
  misc_feature 210..1124: note = CDS
  misc_feature 1125..1219: note = RE
  misc_feature 12..191: note = bridgeRNA
cttatctgatcggaatctggcagcgtaggtgtcgagagccggcgtgggccgccgtgtaagcctggatctcgacgatcgccatgtagcttggcgcccacgccggaatctcccttgatccgcccgaacagttgctggagctgacactcgcagtgataagactgggcaagcgggggagctctcgacccttccagactatacggagtccggtgatgaacgggatcgggattgatgtcagcaagcgccaactggatgtcggtacgacggatggagagaccctgcaggtctggaacaaccgctccggcttttctgaattggatgtttggctgaagaagcgtccggtcagccagatcgtgctggaagccaccggcggttacgagcggccggtgctggattttctgcacgcagcgggccatccggtggtccgcgccaatgccctgcgggcccgcaggctggcccaggggatgggccagatggccaagaccgaccggttggatgcctatgcattggcgcagatggcggccttggtgaaacttcccgcctaccagccgctggagccttggcagcagaaaatgcgggaagtcgtgcgggcacgtcgacaggcgatgcacgcgctgaccatcgcgcggcagcagcaggaaatggtcggtgatcgtgaattgcgccggctactgcaggccaacatcacccgcttgcagacgctggttgaacgtctgggaaagcaaattgccgagcaggttgcccagcagcctcaactggctgtcctgaagtcgatgaagggcgttggccctggcctgcaggcggtattggcaagctatcttcccgaactggggaggatcagtggtaaggccatcgccagcctggtcggtgtggcccccatgtcccacgacagcggaaccatgcgcggcaaacgaagcatccatggcggcagggccgagatccgccaggtgctttacatggccagcatgtcggccatgcggcatgaacctcgactgcgcgatttctaccagtcgctgcgagcccggggcaaagaaggaaaagtagccatcgtggcggtgatgcggaaaatgctggtgattctcaacgcccgggtgcgcgacgctgaaaacgggctggtccctgcctgaggccagccagggcacagaccaaaggctgccggccagcggccggcactaccgtgcccgtctcctggaggggccaagcccctccatcaacacagttg

SEQ ID NO: 6827 - DNA, 1379 bp, unidentified
  source 1..1379: mol_type = unassigned DNA; note = element_a987e75
  misc_feature 1..2: note = core
  misc_feature 3..86: note = LE
  misc_feature 87..1118: note = CDS
  misc_feature 1119..1379: note = RE
  misc_feature 1149..1367: note = bridgeRNA
tgatgctgtggacggctcctccaccggcacatgagtgccatggatgtgggtgctgctaaagctcccacgattcggaggagccaatcatgcaaggggtgaccaccatcggtttagacatagcgaagtcggtgtttcaggtgcacggcgtcgacggggaaggcaaggtgatcatccgccgccaactgaagcgccgctacgttctggcgttctttgagaagctgccaccctgcctggttggcatcgaggcctgcgccacgccgcatcattggtctcgccaactcacggcgctcggacacacagtgcgcctgatgccgccggcctatgtgaagccctacgtcaagcgacagaagaacgatgccgctgacgccgaggctatctgtgaagcggtgaccagggccaatatgcggttcgtcgagaccaagacgccggagcagcagagctgcctgatgctccatcgcacgcgccagctgttcatccgccagcagacctcggtgatcaacgccatccgcgcccacatggccgagttcggtatcgtggccccagtgggacgcaagggcgtggtggctctgctcgaagtcgtcgcggatgctagcgaccaacgcgtgcccgaggttgcacgggcgtgtctcgccgcccttggcgcccagctgcggatgttgaaggtgcagatcctggagtttgaccgccggatcatggcctggcgccgctccaacgagataagcaggcggctcgatgccattccgggcattggtccggcgctagccaccgctctggtcgcaagcgtcgccaatccaaaagctttccgctcggggcggaacttctcagcctgggtcgggctcgtgccgaagcagcactcaagcgggggcaaggacaagctcggtagcatcagcaagcaaggcgatcgctatctgcgcagcttgttcaccgccggcgcactcgccgtgatccgctatgccaagatccatggctcccagaatcgaccctggctcacggcattgttagcgcgacgtccaaccaaggtcgccgccatcgcacttgccaataaactcgccagaatggcttgggccatgatggctaggggcgaacgctacaaggaacccgtcgcccttgcggcgtgaacgagatcgcgccggtcattcggcgtgatgtgaaggttgggagggcgaacagcacgtaatgcagcgccggtcgatccggcggtcgggacaccccacatgtgccagtgcatcacagaattcgggcttttgaccgggacccgatccgcggagggcattatggccagcggtcatgcgaaccgcgctaacgggccgaacacatggctgcaccgaccagcgacgcaacgtgaagttttgacttgccaacctggagccgtccacaca

SEQ ID NO: 6828 - DNA, 1452 bp, unidentified
  source 1..1452: mol_type = unassigned DNA; note = element_a98a6db
  misc_feature 1: note = core
  misc_feature 2..143: note = LE
  misc_feature 144..1190: note = CDS
  misc_feature 1191..1452: note = RE
  misc_feature 1209..1450: note = bridgeRNA
atgtaatggacgcctcccttcttagggtgctgcaaggtgattgaggtgggtagaacggagagcggcccccttggatcccgacggcatcagttgtgccaaagtggagatgtgtgtgtttccactgaggatcaagggggcctgtcatgaagcgtacgacgatcggattagatttggcaaagcgagtgtttcaggtgcatgcggttgaggtcaatacgggtgagatggtgcgagtggcattgaagcgcagccaagtgttgaggttttttgcgaaccgagagcctgcggtagtggcgatggaagcgtgtgggtcggcgcagtactgggcgcgcgagttattgaagttgggacacgaggtgcgactgattacagcgcaatttgtgcgcccgttcgtcaagacgaacaagacggatgcagcagatgctgaggggatctgggaagcggcgcaacgccccggcatgcggtacgtggcgctcaagagtgaggagcagcaggcggtgctgggactacatcgcttacgagagcagcgcgtgaagatgcgcaacatgctcgtcaaccaactgcatgggttgatggctgagttcggagtagctctaccgaaaggctggacggtgatgctcaagcaagcgggtgagctgctcgcggacagcgaaagaagcccgatccccgcgctgctgcgaggggcgctgctggagcagattgagcaggttcgcgccttgagcgaccaggtcaaggggttggagcgccagatcggcgcgtggcagcggcgtgccgaggactgtcagcgtattgcagcgatcccaggtgtcggggtactgaccgctacggcggcggtggcgacgatcggagatgcacgcagttttcggtcggggcgagagtttgccgcgttcctcggactagtaccccgacagtcggggaccggaggacgggtgaagctgctcgggattagtaagcgcggggatcggtacctacggactttgctgattcacggagcgcgcaccgtattgagctggcagcgccggccggggcgagaactcgatccgtggctgaaaggattgctcgcgcgccgagcacccaacgtagtgattgttgcgctggccaacaagatggcccggacgatttgggcattgttagcccatggaagaacgttccaaaggggcttcggtcaggcagcggcttgtaccgcggcatagttagactttaaccaagaaggatggatcgccaaaggttgcgcgggtaaatatcatgtgatgacggaacaggtcggaccgtgagggaatgagcctgaatgatgtctcggacttcgagtccttctcggagatgaggcttctctcagcggatttcatcggggccagcagagctagatctgcacaaaaggccgaatgtaagactgcaaccgtacctcgacgtcatcatccgaagatttatctcgcaaaatcgggaggcgtccatgta

SEQ ID NO: 6829 - DNA, 1584 bp, unidentified
  source 1..1584: mol_type = unassigned DNA; note = element_a98f2e9
  misc_feature 1..2: note = core
  misc_feature 3..282: note = LE
  misc_feature 283..1467: note = CDS
  misc_feature 1468..1584: note = RE
  misc_feature 10..260: note = bridgeRNA
gtataatatatttaggttattaaatagggaaacctataaacctttctttatttatctcttaaaatcagagataattgtattattagattgagaggattatcgaatcatccttgagtctttgaactcgtaattgaaagactgatacctttctctaataagcagtttacgaatgagttggatgttggttgctttttagcttctctccgaatatacaacaaggtagtaacgcttattagtagagcggactcacaatctaaaatatttctttatgaggtgctatttatgttgtatttaggaattgatattgctaaaaataatcacgttgcttccctaatcaatgagaatggaaagactttttttaaagctttttctttctccaatacttctgatggaggagaagctttgctttccaaattaaactctttttctcacaatgtctctgactttgttataggcatggaagcaactggtcactactggttagctttatattcttttctttatgataatgggttcactattcatgtaattaatcctattcaaacagatggttggcgtaaaggaaccgaaattcgcaagagaaaaactgatagtattgattctttattaattgctgatctcattcgttatggctccttcgtggaaacatctctttcccatgaggatatattttcacttagaaatttaacccgttttcgttcttatctcgttcaatctattgctgacttgaagagaaaggtaatcagtgttcttgaccaagtatttcctgaatatcaatctattttttctaatgtttttggtaaaacatctaaagaacttttactacaattctcgtctctcattgattttgaggacatatctactgactctttagccgaattgattaataaattaagtcgtaaaaaattgggagatatcaaagctgagttaattaaatctaaagctgaaaactcttttggaattaccttcagtaaagatagctttacctttcaattaaaggctcttattcagcaaatgaactttattgaatctcaagttcaagatacagaaaatgaaatcaataggcttatgtccttgattgattctccagttactactattccaggtattgggaacataatcggagctactattcttggagaaattggtgatattgataaatttgactctccaagaaaacttgttgcttatgcaggtatagatgctgtcgttagtagttctggtgaattccaggctactcataccgttatgagtaaaagaggatctccttatttaaggaaggcactatttcaagctgctttagtagcttcatttaatgatcctgttttaaatgcctattatcttaagaaacggggtgaaggtaagcatcatcttacctgtgttggagctgtttcaagaaaactatgcaatattatttatgctgttcttaaaaatcaaagtccttatgaagtaagattaaatgaatgatacctaactttccctacctttttaaaacttgttatttacaagtcttatttgttgtgttcattttaatatcaaaattttaaaatttattttaatttattgattgactttttatagttg

SEQ ID NO: 6830 - DNA, 1112 bp, unidentified
  source 1..1112: mol_type = unassigned DNA; note = element_a99ab58
  misc_feature 1..2: note = core
  misc_feature 3..167: note = LE
  misc_feature 168..1103: note = CDS
  misc_feature 1104..1112: note = RE
  misc_feature 1..169: note = bridgeRNA
cctgtgtgtttgaggtgtcgtaggatggttgcgcgaaggaggccgttaggtccctggcgcttgtgacgccgtgtgccggctcgggccccttcgcgcgtgtctgcgttcagcctgaacagttgcacgacgccggttgcaacggacgtcgcatcacagggacagacttcatgagcttacatctggattacatcggaatcgatatcgccaaggcgcatctggacgttttcgatcccaaggcgggtcatctgcgccttgccaacaccgccgccgccatcgccggctggaccgccacactggccggacggtccgtcttcgtcgtgctggaagccacgggccattatgacagcgccctgcgtcacggcctgcacgcggcggatctggcccatgcccgcatcaacccgatgcaggcccgccgcttcgccgaagccaccggccggctggccaagaccgaccggatcgacgcggccatgctcgccgagctgggccgctgcctcaagcccaccacccggccggtgcgctcacaggcgcgcgacaccctggccgggctgcataaacgccgcgaccagctggtccagcagcgcgccgccgagaccgtccggctcggcgagaccgccgggctgcccgaggccgtacgcgcgaacctcatcgcccatctcgactggctcaaggccgcgatcaaggccctgcaggacgagatcgatgccctcatccaaaacgagaccgaactggccggacaggcccgcctgatgaccagcacgcccggcatcggtccggtcacggccaccaccttgctcgccctgatgccggagctgggacagcgctcctccggtaccatcgcggccctggccgggctggcccccttcaactgcgacagcggcctccacaagggcgtgcgccgtatccgcggcggccggccgcgtgtgcgacgcgccctctacatggccgccctggccgccgcccgcgcaaacacccgctacagggccgtcttcaaccgcctcgtcaacgccggaaaacccaagaaactcgccctcatcgccgtcgcccgaaaactcctcgttaccctcaacgccatgctcagagaccaaaagccatacgcaccataaacacagttg

SEQ ID NO: 6831 - DNA, 1166 bp, unidentified
  source 1..1166: mol_type = unassigned DNA; note = element_a99ddb1
  misc_feature 1..2: note = core
  misc_feature 3..222: note = LE
  misc_feature 223..1152: note = CDS
  misc_feature 1153..1166: note = RE
  misc_feature 34..227: note = bridgeRNA
cttgtatctttaatctttgctgctttgcatgcaaaaaggggcaggtgcgagatccgctaagcggcaggtgctgaagcaaaatcaagaccgctctgtagttcgatccgcacctgtccatggttatttgaaactcgaacagttactggagcgaccaggtcggcccacccaagggcaggtccgggcctggtcagctcgcatttacaagcaggagtaattaaacccatgaagcaagaaattgtctatgttggaattgatgtggctaaagcgcatttggatgtggcgtgggaaaaacagttccatcgtctgcctaatgatgtggccggaacaaaacagctcctctgtctgcttaaagcaatcgctgggcaggtgcaggtgatttgggaagccagcggaggatacgaacgaagtgtcatgcaaactctgcagcgtggcggtataaaagcgagcgtggtacaggccagtcgggtgcgacagtttgctcgcgcgatcggcatcctggccaagaccgattgcattgatgcagcggtgctctgtgcctttggcaaagcgatgcagccgcaagtgactgctccgagtaatccacagcaggagcgcttacgcgaaatggaaagtcatcgccggcatttaagtcggctgctggtggcggaacaaaatcgccgagcacagctcactgatcctacagtgctggcattgaccgagaggcttgtcggccaaattcaaaagcagatcgagcgaatcgatctgctcatcaaggaattgatcgagggatcgccggggctctcgtctaaagcgcaaaaactcatggccctaacctgggttggcccacgtaccgctgcgttgctcctggcgcagatgcctgaactcggacaactcaatcgccgtgaagcggcggcactggcgggactggctcccttcaatcgcgacagtggcaagctgcgtggcagacgcaccatctttggcggccgtcgggccgtgcgcaccggcctctacatggcagcgctagtggccactcgccacaatccgatcctagccgctttttatcgacgactacgcgctgctggtaaaccacccaaacttgccctctccgccaccatgcgcaaactcctcctcgctctcaacacctccctcaaaccccaaccaatcctcgcttgaactcaacacagtta

SEQ ID NO: 6832 - DNA, 1517 bp, unidentified
  source 1..1517: mol_type = unassigned DNA; note = element_a9a24d6
  misc_feature 1..4: note = core
  misc_feature 5..256: note = LE
  misc_feature 257..1507: note = CDS
  misc_feature 1508..1517: note = RE
ctcactggtgcaccctccttgtgtccgagtcggatcgttgatccaggattcgggcgcacctgaggttcccaccgggccatcgccctgctcgctcgaccttcgaggtccggcgtgagttcagcgaggtccggtggcccaggacgcgccgactggctacagggctgagcaccgtcgagtgccgatcagtgagcgaccggctgccgcgtcccgggaccaccgggtgtcttcccactgcgccaacagcgaggagacgaccatgagtgtcaccgagaccgcgccgtcggtcgacccgcaccgcccgaccggcggggtggactgggccaaggacgaccacgccgtctgcgtcctcgccccggacggcgaacagctccagcgcttctccgtcacccacgaccggaccgggctgcgcacgatggtcgggcgcctgtccaaggccggggtggtcgaggtcggcatcgagcgcccggacggccccgtggtcgacgccctgcgacaagccggactggtcgtgttcgtgatcccacccggacagctcaaaaacctgcgttcgcgctacggctcggccgggaacaaagacgaccgcttcgacgcctacgtcctcgccgacaccgtccgaaccgaccgccgccgcctgcgccccctgctggtcgacacccccaccaccaccgcgctgcgccagagcgtgcgggcccggcgtgacctggtcgcccaccgtgtcgcggtggccaaccagctgcgcgctcacctgcagatctgcctgcccgccgtgatcgggctgttctccgacatcgactcgcagatcagcctgcgcttcctggagcgcttcaccacccagacccagatcgactggctcaccccacgacgactggcatcctggctggcatcggtcggctactgcggccgcatggaccccaccgtcctgcacacccgcctgaccagcgcaccccgcggccacaccggacccgaagccgacaccgctgctgcggtgaccgccgcctacgtcacagtgctgcgcacactcaccacacagatcgccgagctcgccgcccgcatcagcgagcagctcgatctccaccccgacgcacagatcttcaccagcctgccccgcgccggccgagtccgcgccgcacgcatgctcgccgagatcggcgacgcccgcggccgcttccccaccccggactcgctggcctgcctcgccggggtcgcaccctcgacccgccagtccggcaaggcccgcgccgtgtcgttccgctggggcgccgacaaacaactccgcgacgccatctgcgacttcgccggcgacagcatcaaaaccaacccatgggccgccgacctctaccaacgagcccgaacccgcggtcacgaccacccccacgccgtccgcgtcctggcccgagcctggatcggtgtcatctgggcctgctggcacagccacaccccctacgaccccgaccgacaccacgcccttcaacgcgtcctcaaccaagatcaaccagcggcggcttgacacagggcaa

SEQ ID NO: 6833 - DNA, 1619 bp, unidentified
  source 1..1619: mol_type = unassigned DNA; note = element_a9af473
  misc_feature 1..2: note = core
  misc_feature 3..298: note = LE
  misc_feature 299..1555: note = CDS
  misc_feature 1556..1619: note = RE
ttcctccatttccccgcgcctaaggtcgcgcggacacaaatatttcatcaataaatctcacacgtctcattttttcgtgttaccatataagagaggtggtacactacagagcacgtggaggtgagtaggaattctactcaattgaatatcctgtatatatataagttgctgtcatcatctcaagcacaaataagtaggactttgagcctggacacttatgattgttcaatcaactgttgtcgattcgctttgatgacagtcaatgccacctctccttttgcatgaaaggagtttttttatggtaatgaaaatcgttcgtttcaactgttgtggcatggatgttcacaaaaacctggttgtcgctactattgggatcaccgatagaaagaccaacattacagaatacttccaacgatccttctccactttaaactccgacctataccgtttaaaggattggctgcgatctcatcactgttctgatgtctgtatggagtctaccggtaaatactggatcccgatctttaacattcttgaagatgagaccaatgtccatttaactcaccccaagtatgtcaaagccatcaaaggcaagaagacagataagaaagattccaaatggatctgtgatctcttcaaacatgatctgatcaagttttcgtttatccctcccaaagaaattcgggagatgcgtgagatcgcacgttacagatacaaactggtctgcatgcgttcttcagaacggaatcgttatcaaaactgtatgaccatttctaatgtcggtctggcttctgttgtttcagatccttttggcaagacggcttccaacattatgaaagaagtcatgaaatccaatgtgatcgatgatgacaagatcctaaagctcgttcacaaaaactgtaagaacaaagataagatactggactctcttcatggctatcacattgaatcggatcaacgattcaagatggaaaaatctttggatcatatggaatatttagatcagctcattgattcatgcgaagtggaattgattaagcgtgcgtatccttttcgcagatcttttcagcacatcacacaaataaaaggaatcagtgctttatctgctattcttatcatctctgaaataggaattgatatgtctcagttcgaatccgacaaacagcttgtcagttgggccggactttctcctgccaacaacgagagtgccggcaagaaaaagtcagtccgtatctcaaaagctggacagtatctcaaacctctgcttgtccaatgtgctttatcggccatcaaagataagacatcttattttggaagaaagtattccaatatcaagaaacgacgaggtcataagaaagcaatcattgcgatcgcacgcatgatgctggtcagcatctaccacatgatccttacaggagaagaatttaatccatgtgaccatgaatcctttatggatccaaaaccaaacgccaatccttcacttacagttgaaaaagcattgaactttttaaaacaatctggcattgatatttcttctattccagtcaacttataaattttttcgatatcttttacctcctgtttttaagtcggccctttttgcgcatttttattcacac

SEQ ID NO: 6834 - DNA, 1390 bp, unidentified
  source 1..1390: mol_type = unassigned DNA; note = element_a9d10e4
  misc_feature 1..2: note = core
  misc_feature 3..86: note = LE
  misc_feature 87..1115: note = CDS
  misc_feature 1116..1390: note = RE
  misc_feature 1160..1377: note = bridgeRNA
tgatgtagtggacggcgccccgcgcggcatctgagtgccataaggtgatcgtcgtagacagatcacattaaaggggagccgcccacatgcagattacgacgattggcttggatctggccaagcacgtttttcaggttcacggcatcgatgcagacgacaaggttattgtccgcaaacagttgcgccgcagccgggtcattgcgttttttgagaagttgcccgcctgccttgtcggcatagaagcctgtgcctcggctcactattgggcgcgcgagcttgccaagcttggccacacggtgaggctgatgccggcaaaagacgtgaaggcttacgtgaagcgcaataagaacgatgccgccgatgcggccgcgatttgcgaagcggccacccgcgcgtcggtgcgcagcgtgccggtgaagtcgcccgagagccaagcccggctgatgcagcaccgggcccgtgatctgctcatccgccagcggacccagctaatcaatgcgctgcgctctcatctggctgagctcggtatcgtatcggctcaggggcgtgagggcctcaagaggctgctcgcgatcttggccgacgagagtgatgaccagctaccagccgatgcgcgcgcgagcctggccgtattggtggcacagatcgaagcttgccaggagcagatcggcacgctcgacaagcgcatccacacacagcatcgcgcaaacgaagcaagcctccgactggagacgattcccggaattggggtcattggtgcgactgctattgaggccactgtcccggaccctgctgtcttccgctcagggcgcgacttcgccgcctggatcgggctcgtgccgcgcgaagactcgagcggtggcaagcaacggctgggacacatctccaagcaaggagaccgctacgtgcggcgcatcctcatcgtgggagcgcatgccgtgctgaagcaagcgcgtctgcgccctgaaaagtatccctggctcgtgcggcttttggcgcggcggccggcgaaggtggtcgcggtggcgcttgccaacaagatggcgcgtatcgcctgggtgctgctcgccaggggtggaacctatcgtgtgccgccgatcacggcggcatcgtgaaaggttcaccaaagggtcattgaggacgcgtaagccgtgaagactaaaattgcaggggtgatgatggcgtgatgcgaaacggtcaagccgtcgatcgggagaccccgctatgtgccaagcgactttgagcgcgcgcctttgattgggacctgatccagcggatcacatcagggccagcggccatgcgtgccgcaacaacaggccggatacatggctgcacccgaccgactcgccaaacgtcagattcctcttgcaataagggcgccgtccataca

SEQ ID NO: 6835 - DNA, 1336 bp, unidentified
  source 1..1336: mol_type = unassigned DNA; note = element_a9deed0
  misc_feature 1: note = core
  misc_feature 2..101: note = LE
  misc_feature 102..1106: note = CDS
  misc_feature 1107..1336: note = RE
  misc_feature 1119..1331: note = bridgeRNA
gaatgaaagggacttcccctactcgaagcgggtgttggcccgcacggcatcgaagtgccaagattgagtttgcgtgttcaatctgaacgagaggggaagtcatggaaaaggttactacgatgggcattgatttagcaaagcgggtgtttgcgctgcatggagtggatgctgcggggcgcgttgcacttagaaagactgtgcggcgcgagcagttggtggagacggtagcggccttgccgccgtgcttgattggcatggaggcctgctcgggagcgcacgaatgggcgcggcggttccaggagctgggacacacggtgcggctgatggccccggtgttcgtggccccgtacaggaagagcggtaagaacgacagcaacgacgccgaggcgatctgcgaggcggtggcgcggcccagcatgaggtttgtgccggtgaagagcgccgagcagcaggcggtgctggcactgcaccgggtgcgccagggctggatcgaggagcgcaccgcgaccatcaatcgattacgtgcagtgttgaccgagttcggcgtggtgctccccaaccgtgcgcagtatgtgcgccgcggggcccatgccgcggccgaggccctgcccgcactggcacgtcgggccgtagaggatctgcgtgcgcacctgggcgtgctcgatgagcgcattgccggctacgaccgggagttgcaagcccaagcggggcaaagcgaggcggcacaacggctcatgcagatccgcggcatcgggccgctcactgccgtggccatcgtcgccacggtgggtaacgcgcgcgactttcgctcgggccggcagttcgcggcgtggctgggcctgactccgcgccaacactcctccggcggcaaacaccgtctggggcacatcagccggcgcggtgacgcgtacctgcgttgcctgctggtgcagggggcgcgctcggtgctgctcaccgcgatgcgccactcagatcgcatgtcgcgctggaccgtatcgttgcaagctcggtgcggttaccacaaggcgttggtggcagtcgccgccaagaatgcacgcatcgcctgggcactgttgagcaagaaccaaacgctgcgagctgtttaatcgagttcacttccttgccagactgcattcgttgatgacacacaggtcagaccggcgtccggacactccgatgattttggcggcagcaacacgatgccgactaacgtatgggaatcgggcgcgcggctttcatcagggccagagcaatctcttgctcacaaacaggccggttatagtcacgcagtccttcctgtgcccatccgccttgcagttccggggaagtccttata

SEQ ID NO: 6836 - DNA, 1469 bp, unidentified
  source 1..1469: mol_type = unassigned DNA; note = element_a9dff88
  misc_feature 1..2: note = core
  misc_feature 3..241: note = LE
  misc_feature 242..1453: note = CDS
  misc_feature 1454..1469: note = RE
  misc_feature 1..215: note = bridgeRNA
ccttaccttggtcgtaggccatgagggagacttgtggctgaccgctcgacacggcgggtagggctttgtgcccctgtcactttgatggcctggggggtgttgccgctcgtcgtgttcgggtccggttgacctctgacaggaacatgcgcttcggggctgattcgtaaggtggttgacggcagccaggcccgtgagtcggacggtcgaactcagacagagattcgagaccgaggagggtgtgatggaactatccgagatcggggtgttcgttggcgtcgacatggccaagaacgatcacttcgcgcaagcaaccacgaccgacgggaccgaggtgttcgcccgctcggtcctcaatgatcagaccgcgatcgagcaactcctcgacgacgccggcagccacggcaacgtcgcgttggtgatcgacatgaccgcgtcggcggcacagctgttgttgacgatcgccgctgaacgcgctgtgccggttgcgtatgtgaccgggttgcagatgcgacgtgccgcggacctctatgccggttccgcaaagactgacccgcgtgatgcgtgggtgctcgcggacttcgcgcgccgcaacgccgaccggctcgcgtggctggatgtcagcgacgaactgctgctccgcttgcgcgtgctgaacggtcgagatgtcgacctcgcgaccgacgcgaaccgggttatcaaccggtgccgggatgctctcacagccgtctcaccagggctggaacgagctgtcgggcaacgcctggtccaggccggcgtgcgcgatctgatcgcgaagtggtcgacgccgacggcgctgcgctccgccggtcggaccaagattcgcaacgcgatcaagaagcgctcaccgagaattgccggcaaggtcgccgacgagatctgggcagcgctcgacgcacagacggtcgttctcccggccgaggacacctggggtgaagtgatcgctgatctgctcggcgatctcgagcgaatcagcgctcggcgagtcgaactcgccacccagatcgaggagacgttcttgtcgcaccctctcggccaggtcctggtgaccctctgcgggttcgggcccaggaccggagcacgaaccctcgccgagatcggcgaccccacccgcttcgccaacggcagccggctcgccgcatacgcgggactgtcaccgaccgattggcgatccggccgatcgatcaacggcgcattccagcaccgagggggcaaccaccgcctcaagaacgcgatgttcctcgcagcgttcgtcgcgactcaacacgaccccgacgcccgcgcttactaccaacgcaaacgagccgaaggcaagaagcacaacgccgctgtcatctgcgtcgcacgccgccgctgcaacctcatccacgccatgctcaccaccgcaaccccatacgacccatcacgccccagaaatctcgccgaagcggcttgacaacgagacaggaaca

SEQ ID NO: 6837 - DNA, 1357 bp, unidentified
  source 1..1357: mol_type = unassigned DNA; note = element_a9e83ff
  misc_feature 1..2: note = core
  misc_feature 3..74: note = LE
  misc_feature 75..1100: note = CDS
  misc_feature 1101..1357: note = RE
  misc_feature 1076..1345: note = bridgeRNA
tgatgctgtagacgccccccgacggcgtcggcgtgccaaggtgggtttgtgaagatccacattgggaggcgtccatgggcgaggttagcacggtcgggctggatctggcgaagaacgcgtttcaggcgcatggcgcggatggagaaggacgcacgacgttacgcaagtcattgagacggggacaggttctggagtttttctctcgcctgccgcgctgcgtggtcgccatggaggcgtgcggcggctcgcattattgggcgcgcgagatcggcaaactcgggcacgaggttcggctgattgcgccggcctatgtgaagccgttcgtgaagcgccagaagaacgatgcggcggacgcggaggcgatcagcgaggcggcgcagcgtccgaacatgcggttcgtggcggtgaagagcgaggagaagcaggcggcggcgacggtgtttcgggtgcgcgaactgctggtgcgccaacgcacgcaagcgatcgccgcattgcggggccatctcggagaattcggcgtcatcgcggcgcaaggcgcgaccaacgccgtcaaattggccgcgcgcgtcgaggatcagacagtcgacttgccagcgccggcgcgcgcggcgttgttggtcctgatcgcggccttgcgctatctggaggagcatatcgccgcgcttgacgccgagatcgcccgtcgcgctcgcgaagacgagacggcgcggcggttgatgacgatcccgggcgtcggcccgctgatcgccaccgccttcgccgcgctcgcgccggacccgacgacgttccggcggggacgggatttcgccgcttggctcgggctgacgccgcgccagcattcgaccggcggcaagcaacggctgggggcgacgacgaagatgggcgagcgctccttgcggcggctgctgatcatcggggcgaacgccgtcgtgcaatggcgcgaacgcaagggcgcgaagcccggaacgtggctggcgggaatgctggcgcgcaagccgccgatgctggtgcgggtggcgctggccaacaagatggcgcgcatcgtctgggcgctgatggccaagggcgggatttacaaggctccggccgcggcggcgtaatccgccacggtcgcgaggcgtcggagcgtaggaggtcttcagaaaggtttggcgcaagggtcgtgagacgggatcgggaaaaccagcctgcaacagagcgccttcgagcgcgcggctttgatctggacccgatccgcgaacaccatacgggccagcggcatgtcgaacaccgcgtcagcaggccgaacacatgtccgcacccgatcacgcgccgatctccgaccgaagatttctcttgcgcatggggcgtctacaca

SEQ ID NO: 6838 - DNA, 1492 bp, unidentified
  source 1..1492: mol_type = unassigned DNA; note = element_a9e8b76
  misc_feature 1..5: note = core
  misc_feature 6..200: note = LE
  misc_feature 201..1466: note = CDS
  misc_feature 1467..1492: note = RE
  misc_feature 1..234: note = bridgeRNA
cccccttaccttcttgggtgtgcccgggccagtagggtccgggctcgggaagtccggtggggccggcatggctcattgccccctgcagctggtatggcctggggggtgttgccaccggcgccgctggtgcgcagacctctgatggggacatgcggcttgatcgctgattcgtaaggtggatgacggcgagcgcaccacgggtggccttcccgcaactgttccggcaacaggtgggggaaggggcgctggtggctgtacccgggcaggtggatgtctggatcgggctggacgtcggcaagcaggcacacttcgccgacgtcctcgacaacgatggtgagcggctgttcgcccaggccgtggccaacggccagggcgacctggaggcactgctggaccgcgccgccgggcatggcacgccgggcctggtgatcgaccagcccggttcgatcgcccagctcgccctcgcggtggcggccgggcgtggtgtgccggtggcatacgtgcccgggctggtgatgcgccgtgccgccgacctgtatcccggtgaggcgaagaccgaccgccgcgatgcctacgtgctggccgacaccggccggacccgccgcaagcaggtgcactggctggacgccggctctgatgagctgctggcgtcgctgcgggtgctcaacgggttcgacatcgacctggccgccgaccagacccggctggccaaccggctgcgggacgccctgacggccacctccccggcactggaacgggccctcggcgagcggctgcaccagcccggcgtccgtgacctgctggccaggtacccgacgctgaccgcgctgcgcgccgccagccagtcccgcatcgagcgcaccatcaaggcccgctcgccgcggatcgccggcaaggtcaccatcgccatcgccgcggtcctggccgcccaggacgtcaccgtcccggccgaggccaccaccggccgcgtcatcgccgaactggccgccgaactggaccgcgtctgcagccggcgcgaagcgctggcggctgagatcgaggagacgttcctcgcgcacccttccggtgagctgctggcgtctttgccagggatcgggccgcagaccggcgcccgcatcctcgccgaaatcggcgacggctccgcctacgcaaacggcagcaaactcgccgcctacgccggcctggcccccgtcacccgccagtccggcaccaccctcaacgccgagacccgcagccgcagaggcaaccaccggctcaagaacgccatgttcctggccgcgttcgcgtccctgcgcgaccctgcgtccaaggcgttctacgaccgcaagcgagccgagggcaagcgccataacgccgccctcatctgcctggcccgccgccgctgcgacgtcatcctcgccatgctccgcacccaccagccctaccagcccacccggccagcatcaggactggccgacgccgcctgaccagcttgacaaagaacatggggaca

SEQ ID NO: 6839 - DNA, 1363 bp, unidentified
  source 1..1363: mol_type = unassigned DNA; note = element_a9e9d5b
  misc_feature 1..3: note = core
  misc_feature 4..245: note = LE
  misc_feature 246..1037: note = CDS
  misc_feature 1038..1363: note = RE
  misc_feature 3..219: note = bridgeRNA
cttatattatatttagcgcagttagctactgccaaagcccaagtggtatacttggaataagccactgtggattagttcatttcctccaatcgcttgacgatttccgaaaggctctaaccacagcttttgtttcaattggtaatgagtttgataacgcatagacgttttatctcgtctaaggtaacaaggcaaaaagttcgtggataaccaagtagacttgaaatactatatctggaggtactcccatgctttatgtgggcattgatatcgctaaaaataaacacgatgttacagccttgaatgttccaggaaaaactgttcttaaaccactcactttttcaaataataaagctggttttgaactcttagatctgtctcttcgacagctcaaccaagactgtctcatcgctcttaaacttctttctgaccccaatcgtgaacaatttcaacacgataatcggcaagtagaactaaaaatactggctagacatattcatcgtctcaagaaaaaacagtctgattggaaagtacaatacactcgttgtcttgatatcatctttcctgagttggataaaatcgttgaaaagcattcagaatatacctaccaactcttgacatgctaccctaatcctcagaaaaggcttgaggcaggatttgataagctgatagaaattaagcgattgaccgcttctaaaattcaggatatcctctcagtcgcacctcgttctatcggaacaacatctcctgctcgtgaattcgaaatcatcgaaaacatcaaacattacaagaggctcattgacaaggcggaaaaatatgtcaatgacttgatggctgagttcaactcggtcatcacgacggttactgggattgggaatcgtttaggggcggtcattttagccgagattcaaaatattcatgcctttgataatcctgctcaattacaagctttcgctggactggattcttctatttatcagtcaggtcagattgatttagctggaagaatggtcaaacggggttcccctcatctgcggtaggtactcatacaagctgccaaagcatgccctcgcttttcacctgcttttaagacctatcttaagactaagttagaacaaggaaaacattacaatgtagccatcatccaccttgcaaaaaaacttatccgaaccctgttttatatcctaaaaaagagctgccatttgacgaacaaaaagtgatgtaatttctgaaattaacacaggattacctttgaaaaaatggactttttcaagggctttttgccgtgctctaaaatcatcgccaaatcatcaaattgaaataagaaatagtttagataaaactattgacttttcttatagtttgt

SEQ ID NO: 6840 - DNA, 1531 bp, unidentified
  source 1..1531: mol_type = unassigned DNA; note = element_a9ef4e8
  misc_feature 1: note = core
  misc_feature 2..188: note = LE
  misc_feature 189..1121: note = CDS
  misc_feature 1122..1531: note = RE
  misc_feature 1303..1522: note = bridgeRNA
taatgggatgatccgccgcttgcttcctcaagaagcaggatagattctgggcgcgcaaccatttttggcatcgacggaggattcccacgaaggttcacacaattggcatcgaccttggcaaaacgagtttccatctgatcgggatggacgagcgtggcaacgtagttcttaggcggaggttttcgcggatgcaactcatcacttacatctccaagctagatacctgcctgatcggcatggaagcttgcagcggttccaatatcctggggcgaaccctaagagcccaaggccacactgtgcggctcatcccggcgcagttcgtccgtccctttgttaagtcgaacaagaatgattacaacgatgcggaggccatcgccgaagccgtccagaaacccaacatgcgttttgttccgatcaagactgaggaccaactcgatcttcaggcaatccaccgaacacgcgagaggttcgtcactcaacgtacgcgcgtgatcaatcaaattcgagcctatctgctggaacgtggaatcgtgctgcggacaggaagactgtatctgcaaaggcaaatggcttcgattttggaagatggagagcaaagactatccggtctggtccgcaggctcctcgacatactctggcaggaatggaaacatcttgatgtacagattgcggaactgcaacagcagatcgagaccattgccgaacaggaccaagcctgtcagcgcttgatggaaattccaggaatcgggccgttggcctcgacgctgatgatcgccgcggtggggaacggatcggcgtttcgcaggggaagggacttctccgcatggctgggtatcgttccggcgcaagccacaaccggaggtaaaacccgcctgctgggtatcagcaagcgaggcaacaaatacctccgtcagctttttgtgcatggcgctcgctcctgcaaaacgcatatgaatcgggaaaagcatccatttggagagtgggtgactgcactggagaaacgatcgcacagcaatgttgcctccgttgctctggcgaacaaaattgcgcgaatcgcctggtcggtgctggccaggggagaacgataccgcgcccacgatccggtggtacaagtggcctgaaggcaattcattcatggagaaagaggtttcttttttgctggtgttcagcgttgcgcgttgtgcagaacccgtcaagggtccgctccgccgcgcaccgaacgcgcgcccttgactgaacctgcacaacgcgcttcaggtctttctgccagcaaaaaagaaaattagttgatgtcttcccggcttccaccgaagtctgcgtagcgagagaaggagatggcagaacagtcaaacggcgcaccccaaacccggccccggatgagatcgcaaagatcgctcacgctaaaagggagggtgcgcgcagattccatagtggccaggagcaaatgctccacacacaggccggatacatatctgcagactgcttccaccatttccggattcccgcttgcagtccagcggcggatcataca

SEQ ID NO: 6841 - DNA, 1642 bp, unidentified
  source 1..1642: mol_type = unassigned DNA; note = element_a9ef7ff
  misc_feature 1..4: note = core
  misc_feature 5..273: note = LE
  misc_feature 274..1506: note = CDS
  misc_feature 1507..1642: note = RE
  misc_feature 13..293: note = bridgeRNA
ttgctacaatggtgttggttctgagaagctcacagccagtgagctatacagatgcccaaacctaagctacaatgaagatgtgctgagagaacgaagcattgcttgagctgaacgctcgtacgcgcaaactgttctccgccatctccattgcagcgttcgattgacgcaggttgagttatcggcagataaaatgttgccgtacattcgtgtcacaaagcaagctgaatcggtaatgggcataggcggaaccggcatgaaaaaggaggtcagaaaatgaagtctgctgttatcaacgctgtcggagtcgatgtgtctaaaagcaaaagcacagttgcagtacgtagaccgggtggcgagatcgtgatgtaccctttcgatgtacgccatacaaacagcgacttgaaaaaactggtctcaactctcaaaaagttaggaggagatattcgggtcgtaatggaacataccagtatgtactggaggccgattgccttgaccctcaaaaaggcgggcttctttgtctctgctgtaaatgcgatgctgatccatgatttcagcgacaattctatccgaaagctcaaaacagatcgtgccgatgctctgaaaatcgcaaattacgcgctgactttctgggatacactgccactgctcaacgatgaagaggaaaccagattgctacttaaaatgcagtcgagagcaaatgaaagaatcactgcaaccgcaacagttcttcgcaacgggctgattgctttggcagatcagacctttgcaggggtgaatcttgccttcgatccgaacacgaaaaatacagatggccacgaaaagtgggtggatttctttctgcgctattggcacagggactgcgtatgtcagtatttcatggaagtttttacggagtcctatcgaggctggtgtaagcgcaagaattataagtttcgtaccgctaccgctcataagatctatattatggcgcaggaatgcgtggctacccttcccaagtgcgaaagcacaaagactctgatcggacaagcctgcaaaagtttgaatgccgtctgtgaagccagacacaacacgcagcttgaaatgcagcgactggctgcactgcttccagaatatgaaatcgtgatgcaaatggaaggtgctgggcctgttactgggccggctcttatggccgagattggcgatgtccggcgattaaagaacaagaaagccctcgttgcttttgccggaattgacgcaccaccattccagtccggtgcttttgaatccaaatcacgccatgtttccaaacgaggatcaccgcatttgagacggacaatattccttgtctctaatattatcctgacgctctcaaacccagagaatgccgttttctgctttatgggaaaaatgctcagagggaaaacattactatgtctatactgttgcaggaagcgcaaagttcttgcgcatctactatgctcgcgtgaacgagtaccttcgctctcaagtagcagcggttgtttatgaatgacatttgacagattgctactatggagaatttcagctgacaggctgcgccgtcggcttattaaagttgccggatgctcactgcacccggcaaccattcttttttcgattccgctattgacacaagttagcaggt

SEQ ID NO: 6842 - DNA, 1215 bp, unidentified
  source 1..1215: mol_type = unassigned DNA; note = element_a9f6a0b
  misc_feature 1..2: note = core
  misc_feature 3..228: note = LE
  misc_feature 229..1200: note = CDS
  misc_feature 1201..1215: note = RE
  misc_feature 6..201: note = bridgeRNA
cttgtatctcgaccatagcctcctgcgaggttatggttcccgactgatcatcgggggaggagctgcaggccgtacccacccttaagccttgagcttgcctcgtagattgcgctgcgcttctccgcactcatccgccaagtccgaacggtatccagagcttcgagctcgcatcagcaaggttggacaggatgacgtgatgatcggtgcaaatctgtggaggaggacattatggcagcggtagtgggcgttgatatcgccaagcgcaccttcgatctggcgatcttgcaacctaacggcaagcaccgaaccaaaagcaaactgagcaacgacaaggcaggctttgcggtcttcgccgactggctacagcgacatgccgagcctggcgcatggatcgtgatggaggccacgggcatctatcacgaggcgcttgccgagcacttccatgaactgggttatcggatcgcggtgctcaacccggcgcagatcgcccgttatgcccagagccaactgcagcgcagtaaaacggacaaactggatgccaagctgatagccacctatggccagctacacgtcgaacatttgcgtgcctggcaaccggagccggcgtcggtgcgtcagctgcgcgccttgacgcggcgcctggaggatctgcagtcgctgcggcagatggagctcaatcgactcgacgtcagctcgagcactgttcaaagctcgattcaggcggttctgcaaaggctcgatgaacagatcgcctggacgctagaacagatcaagcgacatatcgacgatgacccggatttgcgtggtaaacgcgacttgctcgtgagcatcaatggtatcgccgagaagaccgcggctctgataatggctgaactcggtgatatcgaacgctttaccgatgcacgtgccgtcacggcatttgccggtttagatccacggttacaagagtctggtgtcgcccgaggccatagcggcatctcgcgcacgggctcggccagactacggactgcgttgtacctgcctgccgtggtggcgctcacttataacccagcgatcaaagcgcaggccgagcgtctaagagccaggggcaagaggggtaaacaaaccgtctgcgcagcgatgcgcaaactgctgtgcatcgcttatggcgtactgaaatcgcgcaaacctttcgatcttgctttggcaattgcacggtaaggcgcaagacggtat

SEQ ID NO: 6843 - DNA, 1393 bp, unidentified
  source 1..1393: mol_type = unassigned DNA; note = element_a9fecfb
  misc_feature 1: note = core
  misc_feature 2..87: note = LE
  misc_feature 88..1113: note = CDS
  misc_feature 1114..1393: note = RE
  misc_feature 1162..1385: note = bridgeRNA
caatgggatggactcctcctacctatcggcatcaatgtgccaaactgatatgatcagcttatcagaaaagcagcggaggagtccgacatgaatattaaacgagtaggcatagatttggcaaaacaagtattccaggtgcatggtgttgatgtccaagaaaaggcggtgttacgcaaaaaattaccgagagcacaaatgctggcttattttcaacagttgccgccttgcttgatcggcatggaggcttgcggtagtgcccattactggggaagggaattacaaaagttggggcataccgttaaactaatggctccgcaatttgtaaaaccttatgttaaaagcaacaaaaacgatgccaatgatgctgaagcgatctgtgaagcggtggcacgacctactatgcgttttgttgccattaaaaccatcgcccagcaagacattcaggcgctgcatcgtatccgcagcgagctggtgcatcaacgtacggccaaggtcaatcagattagaggcttgctcggtgaatatggtctagtagttgggcgacgtgttgatgtgcttcgtacggcgctaccgctattacttgaagatgctgaaaatagtttaactattgattttagagagcttcttcaggggttacagcaagatctcatcacgctggatgagcgagttgatgagatggataagaaaataaagttactagctagcagcaacgttgacgccaagcggttgcaacaaataccaggcataggcccgattaccgccacggctttgatttgcgctatcggcgacggtaaacaatttaaacgcggaagagacatggcagcatggctgggtctgacgccaaggcaacacagtagcggtggtaaagatcgcttgttgggtatcagcaaacgtggcgatgcttatttacgcaccctgctaattcatggtgcccgtgcagtcttacgagtcgctggtgaaaaggatgatccgcgtagtcgttggttacaaaacttatgtgatagacgcaataagaacattgcggctgtggccttggcaaataaaaatgcgcgaatagtttgggcgctgttaaccaagaaaaccgatttcctgccggagggcaaaccggcttgagttcgaaggcaagccttcaaacccaagtcggttaagagaaaggaatcgtccacccacgattgtgtagcaataattactgatggaaaacaggtcgaaccggcgtttgcaaaaccttaactacgcgctgtgccttgagcacgatagagcgattaggagcaaacgcgcgaatagcccattatggccagagcgaatagctcaacttaaaggccggatatacgtgtgcagtcgtaccccaatccagaagtgatgaaatgcttgcaaaacgggaggagtccatata

SEQ ID NO: 6844 - DNA, 1459 bp, unidentified
  source 1..1459: mol_type = unassigned DNA; note = element_aa07dac
  misc_feature 1: note = core
  misc_feature 2..244: note = LE
  misc_feature 245..1444: note = CDS
  misc_feature 1445..1459: note = RE
  misc_feature 43..217: note = bridgeRNA
cgttacctttttcgtagccctttcctggtgcaggatatgggtgtgttggcctgccgtcccggcatgattgtgacgctctgtcgatgcatgatcctgagcgtgttgtcaccggggcttggcaggtgccagggagaccgctaataggggcaggacagtttgggatcgtcgtgcgtaacgtggatgccgggccctgacaccgctgacgggccggcactggaggatgacccgcgactggaggtgccaggtgatcagaaaccacgaaaccgttgacgttttcattggcttggacgtcggcaagggcgaacaccacgccgttgccttggaccgggccgggaagaagctgctggaccgggcattgcccaatgacgaggcccggatccgtgagatcctggccgagtttcaaggccacggacaggcgttgctggtcgtcgatcagcccgcgacgatcggggcgctcccggtggccgtggcccaggccgccggcatgcccgtcggttacctgccgggcctggcgatgcggcggatcgcggatctgcacccgggagaggcgaagaccgatgcccgggacgcgttcatcatcgccgacgccgcacgcaccatgccccacgccctgcgctcggtccaactcgccgacacccagctcgccgagctgagcatgctctgcggtttcgacgatgacctggccaaacagatcactgcgacttccaaccggatccgcggtctgctcacccagatccacccggcactggagcgtgttcttggcccgcgcctggaccaccctgccgtgctggacctgctgcggacctggcccaccccggaggccttgcgtcatgccggccggcgccggatcgggaaccggctgggaaagctcgcgccccggatgggcgaacgcctcgccgatgagatcatcgaggccttgggcaagcaaaccgtggtcgtggtcggcacgaacgccgccacgatcgtgctgccccagctcgcgggcatgctcgccgcgttccacgaagcccgcgctaccgtttatgcccaggtcgaagccctcgtggaggcccaccctcttcaccacgtcctgacgtcactgccggcggtcggcgtcaggacagcagcacggatcctcaccgaagtcgtcgggaaagacttcgcctcagcggcgcacctggcatcttacgcaggcctgacaccggtgacctggcgatccgggacctccatccgtgccgaccgcgcctcccggaaaggcaacaaagtcctcaaacgcgccctctacctctccgccttcgccgcactgaaagacccgctctcgcgcgcctactacgaccgcaaacgagccgaaggaaaacgacacaaccaagccctcatcgccctcgccagacgccgctgcgacaccctctacgccatgctccgagacggaaccctctaccaagcacgaacacccacagcagcttgacaaaaaacatagggg

SEQ ID NO: 6845 - DNA, 1446 bp, unidentified
  source 1..1446: mol_type = unassigned DNA; note = element_aa0916d
  misc_feature 1..2: note = core
  misc_feature 3..230: note = LE
  misc_feature 231..1430: note = CDS
  misc_feature 1431..1446: note = RE
  misc_feature 10..223: note = bridgeRNA
tccctacgttgttctgcgggacgcggtgagcccttcgtatggttgacccgcccagggatgtcgggtgtggctttcacgcttctgccgtttgtggcttgcccggattggccgcccgacgccccacgacgactcggctgcccatgaggaattgcgaatgatcgctccgtagggaatcgacagcgaggtcgtccgtcgggaggcaccagcagcacaccgcacggaggcaccacatggccacgatctgggccggcatcgatgcaggcaagactcaccaccactgcgtcgcgatcgacgagggcggccgtcggctgctgtcgcgacgcgtcaccaacgacgaacccgagctgctcgaactcctcgccgctgtcctggccctgggcgacgaggtgacttggggcatcgacctggccgacggcggagccgccctggccatcgcgatcctgatcaaccacggtcagtcggtgcgctacatctccggcagggccattcaccgcgcctccgagggctaccgcggcgagggaaagacggacgccaaggacgccaaggacgccgccgtcatcgctgaccaggtacgcatccgccgcgatccgcactccttacgcgccagcgacgagaccgtcaccgacctcaggattctcaccaaccgccgcacggacctggtagctgaccgcacccgcaccgtcaaccggctccgtgcccagctcaccagtatcttccccggcctggaacgggccctggacttcgccaacacaggcccgctgaccttgctgacgggctatcagactccggcagctccccgccggatcggcgtcaaacggctggagacctggctgcgcaaccgcaagggcatccgcgctgaccggctcgccgagaccgctgtccaggccgccgaacgccagcacacaagccttcccggagagaagctgaccgcccagctggtgcacacgctggcgaaggaggtagtcgtcctcaaccagcggattgccgaaatcgacaagctcatcgaggcccggtttcgcgaccaccacaccttcgaagtgatcaccagcatgcccggcttgggcgtcatccccggcgccgagtttctggccgccaccggcggcgacatggctgccttcggcacccctgaccaccttgccggcttcggtggtgtcgcgcccgtaccccgcgactcaggcaagatcagcgggaatctacggcgtccccagcgatacaaccgccgcctccagcgcgtcttctacacctcggcgttgttcagcatccgctactgcgaagactcgcgccggttttacgaccgcaagcgcgccgagggcaagcgtcacacgcaagcggtcctcgccctcgcccgccgccgtgtcaacgtcctctgggctctcctgcgcgacgggcggtgctcccaaccgacgcaccccatcgtcctggcggcttgacaaacaccattaggaa

SEQ ID NO: 6846 - DNA, 1462 bp, unidentified
  source 1..1462: mol_type = unassigned DNA; note = element_aa0ede2
  misc_feature 1..2: note = core
  misc_feature 3..424: note = LE
  misc_feature 425..1441: note = CDS
  misc_feature 1442..1462: note = RE
  misc_feature 6..225: note = bridgeRNA
ctaatgggactggaaggtttgtctcggatggggcaggctttccactgagccgctgactggtgagcacttctgacgactgaaccgtgagttctagttctagatcgtgccccagtcggtcggtgaggttgacggagaaggctggaggggtgtcgtgcctggagcactaatccattagttcgctgccgttgccctcgaggctcgattccatcgaccactggaggtgaccatatgattttcgtcggagtggattgggccgaggcccaccacgacatctgcatcctcgacgaggcaggagaggttctcgcccgaaagaggatccctgacacgcttctcggtgttcgggcgttgcacgacctgctgggcgagcacgccgaagaacctgaagaggtggttgtcggcatcgagaaggaccgaggacttatcgttgaagcaatgctgggcgccaattaccgcgtctacgccatcaaccccatgtccgccgcgcgctaccgcgaacgtcacgtcacctcggggtcgaagtccgaccccggcgacgccaaggtgctggcggacctggtcgaccgaccgccacaaccaccgcgaggcggccggcgactcgcagaacgccgaggcgatcaagattctcgcgcgggcccaccagagcgccatctgggcccgccagcgcgaggcgaacgccctgcgcaacgccctgaaggactactaccccggtgcgctgctggtcttcgggaccgacctcgacgaccgcgacgcggtggcggtcatggagatcgcccccacgccggcgctcggacgtcagttgtccacgtccaagatcatcgccgcactgaagcgagcgggaagagagcgcaacctcgagcgacgagcgagcgagatccacaacttgctgcgcgaggagcaactcgcccagggcccgatcgtcgaggccgcatacgggcgcgctaccaaggcccacgtcgcgatgatccgcgcctacaacaccgagatcaccgagctcgaagaggcgttgacgtcgggttttgagcagcacccggacgctgggatcgtccgctccctgccaggaatggggacggtcctcggcgcccgggtgctgggcgagttcggggacgacccgaaccgctactgcaacgccaagtctcgcaggaactacgccggcacgtcaccgatcacgagggcctcgggcaagagccacgtcgtcttggctcgccacatgcgcaaccgacgtctggccgacgccctcgaccagtgggccttctgctcgatcacccggtcgctgggtgcgcgcgcctactacgacgaactgcgagggcggggcaagacccaccgccaagccattcgccaattggcgaatcgatgggtcggcattctgcacgcctgcctcgaacagcgtgtcaactacgacgaggacattgcttggaagcatcgagtcgacatcgcggcttgacaggttaggggccaggggtgt

SEQ ID NO: 6847 - DNA, 1161 bp, unidentified
  source 1..1161: mol_type = unassigned DNA; note = element_aa151be
  misc_feature 1..2: note = core
  misc_feature 3..198: note = LE
  misc_feature 199..1152: note = CDS
  misc_feature 1153..1161: note = RE
  misc_feature 44..208: note = bridgeRNA
cttgtatgttcgatggctgctagcttgtgggggtcttccgggacgtccgcctgacgctgacacgccaggcggactgtcggcggaggggccgtgtccccctgagcccattgggctgcgcgggagctgggccgccgctgacgtttcactgacccggatggttgcagggactttgaggtccgtatccacaaggaggggtcgatggaacatcgtcagcctaacacgaagatcgccgggatcgatgtcggcaaggcgcggctggacgtggcgatccatggcctggaagacgaggtggcggtcagcaacgatgtggccggcgtcggcgagttgatcgcctggctgaaggcccgcgaggtgggccgcgtggggctggaggccaccggcggctatgagcgaggggtccgccaggcgctggaggccggcggcctggccgtggtggtccaccagccgctggagatccgcctgctcgcccggctgaagcggttgcgggccaagaacgaccgcatcgacgcgcggctgatcgcggccgccaccgctcaggtcgacaccctgcgcgccgcccaggacccaaggctcgccgacctcgccgagcagctcaccgcctatgagcaggtcaccgaccaggcggccgagctgaagaccttccgcgagcacctcaccttgcccgacatcgtccgggccatcgacacccagatcgccagcctcgtcagcctcaaggcccggctgctcgccaaggtgctcgccggcctcaaagcccatgccgacctcgctcagcgcctgcgcctgctctcgagcctgccgggcttcggcctcgtcgtcgccgccagcttcgtcatccgcatgcccgagctcggcgccatgaagaaaggccagcccgccgcccttgtcggcgtggcccccttcgatcgagactccggccagtggaagggacagcgcttcatcagcggtggccgcgaccgaccgcgccgcatgctctatctcgccgccctcgccgccaagacccacgacaccggcttcaaggccttcgcccaagccctcatcgaccgcggaaagcccaagaaggtcgccatcgtcgccgtcatgcgaaaactcgtcgaggccgccaacctcatcctcgccagagccacaccctggcaaacacaacccgctacctaaacatggttg

SEQ ID NO: 6848 - DNA, 1223 bp, unidentified
  source 1..1223: mol_type = unassigned DNA; note = element_aa15bc8
  misc_feature 1..3: note = core
  misc_feature 4..237: note = LE
  misc_feature 238..1215: note = CDS
  misc_feature 1216..1223: note = RE
  misc_feature 51..218: note = bridgeRNA
catcctatgtttgtaggcgccggatttaaaggcaagaaagaataaatttatcgcagaagaaaaagggtaaagagaaagattaagtgttgtcattagccaattaaggctgttcagaatgctaatctctttacccgatctgccggagcttgaacagttcattaggcctggagagcctgtatgcaggattgataagcacagagcagtttcttctacttcttattgtcttaaaacaaagttatgcaaacccaatcgaattacacaggtattgacatttcaaaagcgttctttgatgtagcagttatggaaagcggcagcatccggtatcatcatttcaacaacgatcaggcaggtttctcagcattgtttgctatcctgccggaaagcagtcacgtggtaatggaggcttcagggccttattatctgcgcctggcctgctatctgcatgctaaaggtatagcagtgagtgtggtcaatccgttggtgatccggcgtttctgccagatgcggatgtcaagggcaaaaacggataaaaaagacgccggtatgatcgctcaatatgccaaaatggagaagccggctttatggcaaccgccgcaggagcatgtcatagccctgcaacagatggaagcgcttgtcgctggattgcaaaaggaatatacggcaatcagcaatcagttggaaagctttttgagcacaggtatgatggataaaaaagtcaaaaccttaatggaaaatgagctgatacacaaacagaacctgattgacaggcttacgggcgaaatggaggaactggcaaaaaagcattactcccggatgctgactgatctggaaagcataccgggaataggcagaaagacagccatgctgctcattgtagtaagcggcggcttcagtcggtttgatgattacagaaagctgagttcctatataggcatatgcccccggatatttgaatccggcagcagtgtgaaaggtaaggctcggatatgtaagatgggtatgtccagaataagggctttactatacgtctgcgcctggagtgccaggcgttgcaacaaggcatgtcgggaactttatgagcggctactggctaaaggaaaggccaaaaagttggcactaattgccgtagcaaacaaactgcttaaacaagcttttgccatagctacaaaacagaacacttacaacgaaaattattgtaaaaatatttgcttttaaacacagtt

SEQ ID NO: 6849 - DNA, 1356 bp, unidentified
  source 1..1356: mol_type = unassigned DNA; note = element_aa27613
  misc_feature 1: note = core
  misc_feature 2..282: note = LE
  misc_feature 283..1098: note = CDS
  misc_feature 1099..1356: note = RE
  misc_feature 1102..1346: note = bridgeRNA
tatggaatggcccgcccctccttccggcgtcgtaggctcgccggcgaatcaggaggaggaagggatggatatctctgtgcttggcgtcgacctcggcaagaacgtctgcagcgtggttgggctggatgcgtccggcgcggttgtgatgcgtcgcaaggtaaggcgggagacgctgattgctctggcggagaagcttccccgtgctttgtcgggatggaggcctgctgcggggctcatcatctcggccgcgtgttcgccgcccacggccacgacgttcggctgatgtcgcccgaatatgtccggccctacatcaaggcgcagaagaacgacgatcgcgacgccgaggggatcgcggaggcggtgacccggccgacgatgcgctttgtcgaactgaagagccaggaccaactcgacatgcagacacttcatcgatcgcgagaccggttggtcggggagcggacagctctgatcaatcagttgcgcgccattctgctggagcgaggaatggtcgcgccgcagggcaagtggaagctcgagcagttcctggccgtgctgatggatgagcagggcggagcgggattgagctcgcggatgatcgtgctcgtcgccgacgctcgcgcgcaatgggcggaactcgatcgacggatctctgcgttcgacgccgagttcgtccgctgggtgaaggagaacgaagaggctcggcggctgacgacaatcccaggcgtcggcccgatcgttgcatccgcccttgccgccgccgttggtcgggcggaaagcttcgaccgcgggcgcaatctcgccgcgtggctcggcctggttccccgtcagttcacaactggcggcaagccgaagctgctcgggatcagcaagcgcggcaacaaatacttgcgcaggcagctgatccatggagcgcgtgcggctctgccctatgtggccgagcgcgacacgccgcttggccggtgggtgaaagggctgatgagcaggacccatcgcaatgtcgtggtcgtcgccttggccaacaagctggcgaggatcgcctgggcggtgctgcagcgcgggaaaccgtttgacgccagcgcggtatccgtggccgcgtagaattcgttcggtcggagcgaaagcgccggtcgtgcaagcgaggtttgcgagagggtgacgacgagatggcctgacagtcaaacggcgctcaggaagcctgatgttgaaaacggcgcacgacgccgaagagtttgtgaggaccggggcgcgcgtatctccatcttggccgggaggagacctccgaggccggatacgttgtagcagactgatcagccgccgatctcgacaaaaccccttgcagacggggcgggccatacg

SEQ ID NO: 6850 - DNA, 1545 bp, unidentified
  source 1..1545: mol_type = unassigned DNA; note = element_aa3032b
  misc_feature 1..3: note = core
  misc_feature 4..563: note = LE
  misc_feature 564..1415: note = CDS
  misc_feature 1416..1545: note = RE
  misc_feature 8..225: note = bridgeRNA
tttcgtattataaggttagccagatttttctggttgacctatttttattaggttttatgattacagtagccagggtagaacgtagctgccattgggacattgatctcgtcaactaaactgttctccctctacttatagaaacatgtttgaggctggttgggacctagatctcgtataacaagcgaagctatgaaactataagaagagctagaggttactggtgaaaattaaattaaggagtgaaataaatgaatccagtaattggtctggatgtttcaaaaggagaaagtgaagtacaagcctttttaaataaaggtattccttacggaaaaagctttaaaatatatcacactagcgaaggataaatttcttttttacattttctaattgatttagaaaacaagagcttagttaaacctactgtcattcttgaatcaacaggacattatcaagcacctatcatacaattcttagagaaatacaattacttgtatatcgttattaacccaatcctgtctcatcagtctaaaaaaacaagcttaagaaaagtaaaaactgatgccatggatgcctttcacctatgcgaattgttttataaagtagacttagagcccaataaaaaacgaggtgttaatctcttaaatcttcgccatttaactagacaacacgaggctataactggtctgtatgttcaagctaaactacaatttcacacaatgttagatcaaatattccctgaatgtagacgtgtatttggtgatttattttcaaaggtttctttaaatctattaaatgaatttcctacttctgaaacatttttagaagtaagtgaagtaactttagctgataaaattcattccctatgcaaaacacgttcataccaatgggcattaaaaaaagcagcaaaattaaatgaagctgccaaaaataatccatttgagaatattgtgtatcaaagccatttagttagtttaaaaatgtttattaaaatgcttcttcaatatcaagagcatctatcaatcttagacgaacaaatagatactctcgctagagacattgaagaatatgagataatccagtctattccaggaatcggagaaatagaacggtttaatcttcctaaaaaattagtagcctacgctggtatagatcctagtgtgcatcagtctggcaaatttacagccactattaatcgtattaccaaaagagggtcaagtagacttcgtcacgtcctatacatggctgttctttgtggtataagaagttcaagaaataaacgattaaaggaattttacgatagaaaacgtgaagaaggaaaaccttcaaaagtcgcaataatcgcttgtgtaaacaaactacttcattggatatatacccttatgaaaaggaaagaaactttccttgatttaagctaaataccaaaattacgaagtaataacaaaaccttccaattaggtgatggaaggctatttggtatgcacatttttagtatagcatgtgactattaagttgtttattgaaaaatattgacatcctattagctgg

SEQ ID NO: 6851 - DNA, 1613 bp, unidentified
  source 1..1613: mol_type = unassigned DNA; note = element_aa31065
  misc_feature 1..2: note = core
  misc_feature 3..269: note = LE
  misc_feature 270..1490: note = CDS
  misc_feature 1491..1613: note = RE
  misc_feature 25..289: note = bridgeRNA
ctgatacaatataattggccgagaaagtgcggtatttggaatagcactttccaacttccgttacctaagctataatggaaaggtatttaaggtctgacgttttcctccttgtgcttttacgcacgtaacataagactgtcagccggctttccattatagcgttcggtttctgctaggaaagggcttcgcgtccgggtcacctattagattgaatctgtaatggttcttgtcggtcacctttttactaatccatatcagagaggtctcttatgaacgctgtcggtatcgatgtttccaaaggtaaatctaccgttgctgtcctgcgtcctggcggggaagttgttatttccccgttcgatgtatcacacaatccaaaggaactttcgaagttggtcacgctccttaaaactttgaacggcgatacgaagattgttatggaatatacaggtaattactatcttcccattgctctgttcctccgcaacaacggcttatttgtttccgttgtcaatcccattttagtgaaagattacggttccaaatctttttctgtccgcaagtgtaagaccgataaaaaggactctcttaaacttgccgcttttgctttataccgttggttggaattgcccgagttcaacgctcaatcccaagcgagattattgttgaagtcttataacaggcagtacaaccaatataacaaactcaaagtcatgttgaagaataatcttatttctcttttagacctaacctttcccaacgccaattctttgttctctactcctacaagaaaaacagacggtcacgaaaaatgggttgatttcgttcttaaatacccccattgcgagtgtatttcaaagaaatctttttctttattctcgaagtcttatctttcttggtgcagaaaatgtagctataacttctccgaaagcaaggctcaatccatttacgatttcgcttgcaactgctccccgtctttgccacacaacgaaagttcttcgcttttgatttctaacgctatctctcaattaaattgtattaacgaaaccattgcttctcttgcaaaacagatgaactctctttcttccaccttacccgaatacgacgtcgttctgtctttcttcggggttggctctgttctcggctctcagctcatcgctgagattgacgacgtttctcgttttcccaataagaaagctctcgttggctttgccggtttagatgctccgccctttcagtccggttcgtttcattctctatcccgtaaaatctctaagcgcggttcttccgatttgcgcaaaactttatttcaggttatgtccgtcattttgcagaaagcaccgtctaacaattccgtctttcaattcatgaacaagaaacgcgacgaaggcaaacatttttacgtctatatgaccgctgctgctaacaagtttttacgcatttactttgctcgtgtgaccgagcttcttatttccttacaaaccgtatcctaacaacccttgataagccttttgcaagcctgcgttctttacggaggcttttttcttctaccgtttttttgcctgaaaaattattctgactttctccttattttcccttgacttttatttgcaggt

SEQ ID NO: 6852 - DNA, 1478 bp, unidentified
  source 1..1478: mol_type = unassigned DNA; note = element_aa333bc
  misc_feature 1..3: note = core
  misc_feature 4..234: note = LE
  misc_feature 235..1458: note = CDS
  misc_feature 1459..1478: note = RE
  misc_feature 6..234: note = bridgeRNA
ctaatggggtcgaccacctcgcttcttgagtaggtgaggctggtcaccgagccgccaacaggtgagcactgaagatgccagggcctcgagtcctacctctagatcgtgcccctgttggtcggtgaggtctccttcgacggctggtgggatgtcgtgcctcgagcactggtccattaggaagctgctggggtcctccgggctcgatactggtgctgtccgatcgagaggagcgaaatgatcttcgttggtgtggactgggctgaagcccaccatgatgtgcacgtccaagatgaggacggcaagcggttgggaggaggccgacttccagaaggagtcgagggcatcgcccggttccacgagctggtcggtgctcacgttgaggaccccggcgaggtgatcatcggcatcgagaccgaccgaggcctgttcgtcgccgctctggtggcggccggctacgaggtgttcgccgtgaacccgatgtcgacgtctcgctaccgggaccgccattccacttcaggggcgaagtcggatcccggagacgccaaggtgctggccgacatggtccgcaccgaccgccacaaccaccgtccggttgccggggacacagagggtgttgaggcagtcaaggtcctggcccgggctcaccagtcgatggtctggtccaaaggacgccagaccaacatgttgcgctcgaccctgcgtgagttctaccccgctgctttggtcgtttttgacgacctggccagcggtgatgccctcgaagtcctgaaggtggcgcctactccgaccctgggagcgggactgtcccgttccaagatcgcagctgctcttcgccggggcggcagacaacgccgggtcgacgagcgtgcgggcgagatccaggccgccctgcggtccccccagctgcaggcctctgccgttgtggccacggccatgggttcctcggtcagtgcctcggtggcggtcatcgccaccatggtcgctcagatcgccgagctggccggggagctcgaatcggattttgatcagcacccagacgccgaagtggtccgctccctgccaggattagggaccatcctcggcgcccgggtgcttggcgagttcggtgatgatcccaaccgctacgccaccgccaagtgtcgcaaaaactacgccggcacgtcgcccatcacccgagcatcgggcaccaaacgggtcgtccttgcccgcttcgcccgcaaccagcgcctggccgatgccatctacctctgggccttcgccgcccttaatgcctcaccaggagcccgcgtcttttacgactctcatcgggccgccggcgacacacaccacgccgccctccgatccctcggaaaccgcctggtcggcattctccacggttgcctcacccaccacagcgcctatgacgaaaccattgcctggggacaccgctccgagaacaatctcaccgaagccgcttgacatctacagccgtgggatat

SEQ ID NO: 6853 - DNA, 1149 bp, unidentified
  source 1..1149: mol_type = unassigned DNA; note = element_aa33d62
  misc_feature 1..2: note = core
  misc_feature 3..205: note = LE
  misc_feature 206..1027: note = CDS
  misc_feature 1028..1149: note = RE
  misc_feature 13..208: note = bridgeRNA
cttgtcttatggaattcttggctcctgaggcaaaaaggagccgctgcccagcaccgcaaattgcggggcagcggcgggggcggcgtcgtgcggagcttggtcttgcaggagcgcggtcgagtttgacgagcccccgtcttttctaacgacctgaacagatacgtgggctgcgggcccgaacgacaagcataggtaggaagaaaagatggctaaggataccatcggtattgacgtttcgaaagacagtcttgacgcattctggcattcccggacggaggcgtgctgcttacccaatacgcctgaaggcttcaggcaattgtacgactggctggcaaatgaggaagactttctcatcgttttcgaggcgaccggtgcctatccccgggggcttgagtggtatctcagcttggcagaactgcccttcatcaaagtcaatccaaagcaggcgcggcgctttgcgcaggccatcgggcgactggcaaagaccgacagcgtcgacgccagaatgttggcgcgcatgggcgttgtgcttgacctggcgcctcaagtcgtcgagggcgaagatgttcatgatctcagagagttgctgactgcccgccgcgctttggtcaaagatcaggtgactgcgaagacgcggcttgctactgcactggacccgctcgcgcgagagcaacttggtcgccgcattgaagacatcggtgccgatatccaagcgcttgatgaggtcatcgcccagatcgccaagcagcgaggtgaagagcgcatctgccgtttgatgaccatcctggggattggtcggctgaccgcgaccaccatgcttattgatatgccagagcttgggcaactcgacggcaagaagatcactgctttagcaggacttgcgccaatgtccagcaatcgggaaagtggcagggcaaggagagggtcaccgggggtcggtcatcaattcggcgcgcgatctacatgcccgcacttgtcgccatccgcttcaaccgggaccttcacgacaagtatcagcaactactaaaggtcggtaaagccaagaaagtcgccattaccgccatcatgcggcgcatcatcatccttgcaaacaccttgctgcgcgaaaggcgagattggctgcctgaccgcccttgaccaagacagata

SEQ ID NO: 6854 - DNA, 1306 bp, unidentified
  source 1..1306: mol_type = unassigned DNA; note = element_aa35b03
  misc_feature 1: note = core
  misc_feature 2..190: note = LE
  misc_feature 191..1291: note = CDS
  misc_feature 1292..1306: note = RE
  misc_feature 1..226: note = bridgeRNA
cagtgatgatgtgggagcgggtcacccggccggtctgactcaccctctgactgaccttgggtgtcttctaggggattcgtcggcttgtccgggtgacccgttcctgcactcacctgctgggcgttcgtgacctgataggagcctgtgcaagaggtcccgtcactgtcctgtccgcccgtcccggcggtgcgtgccgaccctgttcggtgcaagcgaaagggacgacggtttcagcatggcagccaagaagcgtcaggtcacaggcggcgtcgacactcacggcaaaactcatcacgccgccgccatcgatggtgccggccgggtactgggcgaccaggaatttcccgcttcggcgtcgggctaccggcaactcctggcctggctacgccggttcggtcaggtgatcaaggtcggggtggagggcaccggcacctacggcgcgggcttggcccgccatctcaccgcgcagagcgtcacggtggtcgaggtcgaccgcccggaccggcgcgcccgccgcgccaagggcaagtccgatcctctcgacgcgcttgccgcggccagggcggccctgtccggacaggccagcggcaccccgaagacccgcactggcccggtcgaggccatccgcgctctgcgggtggcccgccgcggcgcgatgaaggcccgcaccgccgcgctcaaccagctccacggtctgctcgcctccgcgccggagtctctgcgccacgacctcagccacccgcaagcaccactggtcgaccggtgcgccgcgctaatcgtcgacgagacccgactcaccgatcccgtcgaggccaccaaagccgccctggccgccatcgccgcccggatccaggccctgaccgccgagatcacccacgccgaccggcgactacgacccgccgtcgcccgcaccgccccacacctgaacgccgtccacggcgtcggcaccgacgtcgccggtcaactcctgaccaccgccggcgacaaccccgaccggctgcgctccgaagccgccctggcccacctctgcggcgccgcacccatccccgccagctcaggacgcaccgaccgacaccgcctcaaccgaggcggcgacagagccgccaactcagccctgcacaccatcgccctggtccgcatgcgccacgacccccgcacccgcgcctacgtcgacaaacgcaccaaacaaggactcaacaagaaagaaatcatgcgctgcctcaagcgctacatcgtccgcgagatccacaccgccctcctcgccgacttcaccaccctcaacaccgcttgacttctataggagcat

SEQ ID NO: 6855 - DNA, 1340 bp, unidentified
  source 1..1340: mol_type = unassigned DNA; note = element_aa4128b
  misc_feature 1: note = core
  misc_feature 2..279: note = LE
  misc_feature 280..1080: note = CDS
  misc_feature 1081..1340: note = RE
  misc_feature 1102..1294: note = bridgeRNA
gaatggaagggacttcccctcgttatgcgcctgattaactcttgtgcaatcatggggtaaacattgccctggagggattcgttatgaccatcactactgtttgctgttcatggtgttgaccacaatggtacaaccgttctggttaaatccagagtaacccgcgccgctcttcccgggttgattgctggtttgccgccctgtgttatcgggatggaggcatgctccggggctcactactgggcaaggttatttcggtagtatggtcatgaaccgcgcctgatggccgcaaaatttgtatcaccttatcgcatggctggtaaatcagggaagaacgatgctgtcgacgctctggctatctgtgaagctgttcgtcgtccgcatatgcggtttgtatcagtaaaagacgaaagtcagcagtcaatgcaatgcctgcatcgtacccgccagggttttatcgaagagaaaacagcaacgtataatcgtctgcgagggttgatatctgaattcggcataatcgctacgcaaagtactgacgccctgcaccacatagtttctgagcagaagagttttttatcgcttcaggttcagcagtgtgttgatgatttactggaacacgttgatcgcattgaagctcacattgctgagtatgaccaaattttgttccgtatggccaaaactgatcaccgcagtcagcggctgatggagctgaaggggatcggtcccacaacagcctgtgagctggtcgcccgtatcggtaatgcacatgattttaagaatggacgtcaacgggcagcttggctggggttgactccatcgcaatacagcagcggcggaaagtcgaagcttggcaggataacgaaagccggtgattcgtatttgcgaactctactggttcagggggcccgttcggttctgattggagccggaaaaagaactgactcatttagccgttgggtttgctcactggttgagcgtagaggatactggcgcgccgttatagccatctctgcaaaaaacgccaggctgtgctgggcatcattgcattacggcgatgatttcaggctgtactcagccagctaaaacataaagctgtataaccatactacttgcaactcgttgataataaagggttagagcccgtgaggtatatctgattattgtacaggatatacgtatccgcttaacgaacaagagcctcacgcgcgactttcatcagggcccgaatcgataacgattcattatggccgtttatagtaccgcagtctctcctctttatttttaactgtagtgcagacagcaaccataaacaccggcgttgacatgccggggaagcccttata

SEQ ID NO: 6856 - DNA, 1545 bp, unidentified
  source 1..1545: mol_type = unassigned DNA; note = element_aa45f41
  misc_feature 1..2: note = core
  misc_feature 3..241: note = LE
  misc_feature 242..1423: note = CDS
  misc_feature 1424..1545: note = RE
  misc_feature 19..219: note = bridgeRNA
cttgtattatagagtagtagttattagagtccctctccaaggacttgtgctacactgtaagggatgctgtggattggtttgcacctcctaccgctagacggttcttgaaaggctccaaccacagtcctttaccagtttgttaatcagttagataccgccagacggtttatgtggaacaaggttacaagcgtaaagtgtcctgtggactcagcatcaaataaacataccgggaggtatcatcatgatctgtgtgggtattgacgttgccaaggacaagcatgactgcttcatcctcaactcggagggtgaaattctggcagatgtattcaccatcccaaacaacgcagaaggctttagaacacttctgcaagccattcgccgatgcacctgttcggaagacaaaataaaagtaggacttgaggctaccggacattacagctacaacattcttggatttctgcttgacaaaggtctggccacctatgtcattaatccgttgcacaccaacctctaccgaaagagccttagcctccgtaaaacgaagacggaccgtgttgatgcgcgaaccattgcaactatgctcatgtctgatgtggacctcaagtcctacacagacacagcataccacaatgaagaactaaaatcactcacaagatacagatttgacaaagttcgtgagcgagctaagctgaagcagtccgtttcccgtttggttactattcttttccccgaactggaaaaaatggttccaactcttcatatggcgtctgtttatgccctcctcagtgagttcccaggtgccaggcagattgcctgcgcccatctaacgcacctgacggcactcctgaacaatgtttctagaggtcgctacgggcggggtacggcaatggaactccggggtgccgccaggtgttctgttggctctgttatgcctgccaagtcgctggaactgcagcatacaatccgcctgattcgggaactggataccgagattgatgacatcgagggtgccatccagtccataatggaagaactgcaatctcccattacaaccatcccgggtataggtgtccgcatgggcgctatgatcctggccgaaatcggcgacttctcgcgctttgactcgccggataagattcttgcttatgccggcatgtcaccatctacctaccaatctggacagctctcgttatccgggacatactcgcacatggaaaagcgagggtccagatatttacgttatgctctttacaacgcaactaaatatgtttgcctttgggatccgacctttgcagcctatctggcgaagaaacgcgccgaaggcaaacactacaatgttgctatctcccacgccgccaagaaattagtccgattgatctacgccatggagaaatcccggcaaccctataacagcgctgcataatctttttactttcataaactcattcaggcgcccaaacggacgtcagctttgctatacctttttgagccgtctccaatttcttgccaagccacactttttagacttgacttctaatagttagt

SEQ ID NO: 6857 - DNA, 1329 bp, unidentified
  source 1..1329: mol_type = unassigned DNA; note = element_aa4926b
  misc_feature 1..2: note = core
  misc_feature 3..251: note = LE
  misc_feature 252..1289: note = CDS
  misc_feature 1290..1329: note = RE
  misc_feature 38..201: note = bridgeRNA
cttgtatgatcaaaattaatgaaatattgctaaaaagatcaagtaagctgtaaccgtttattgggaggccgtcacgccctgaggacgggttgttaacccaatcctgctccgtagattggcccccgccctattcacccataccgtggagtatccaaggcttagagcctgcatacacaaggaaggtaggtgcatgtgcagggtcgggaaccgatgaatagtctactttctttaaccccatcagacaaaccgctatgacagtccttaacatcaagaaaaataatcatgaagcaaaactatcgctccaagcaggtattgatgtcggttccgaggaattgatcctggtgatccgtaagaacagtaaacccttcaatccgcaaaagttcagcaacacgcctgctgaccgggctcggttggtgaaaaaactggtcaaattaccaggcattatcgtctgtctggaagcgaccggcatctatcactttgatttgtccatcgccctgcatgatgccggtgtgtcactgatggtcgttaatccaaaagcgtcacataactttgctaaggtattgatgaaaaacagtaaaacagatgcagtcgatgccaacaccttggccgaatatgccgagagaatggattttgtcgcctggacccggccatccgatgaaaaaatagcgcttcgctgtttctctcgccgcattaatgcgttaacccatcagaaagcagcggctaagaatcatctacatgcgctaacggccacccaggcaacacccaaagccgtattgcgcgatgccaagctggcgattacgcacttgcaaaaacggatcgaccgcttaaaggctgaggccttagtcttgatcggcaaacattccgagctcgaacgcgtgctggagctgctgactggcatcaatggcattgccgaaaccagcgctattgcgctaatgggagagctgctgttgttgccgcccgacctttcccatcgggaatgggtgaagtttgccgggctcgatccgagggctttcgattcaggtaaaagtgtccacaagaagacgcggatagccaaggccggtaaccgttatattcgtgcagccctctacatgccggctttgagcgcccatcagcatgatccacatgtcggagcttatttccagcatctcgtggtggataacggcaaagaaaagatgcaggctctctgcgccgtcatgcgcaaattgcttcacgctatccatggcatgttgaaacacgacaagccattcgacaacacccgtttttatgcaattccggcagttgtcggatagttaaaaatcaacgaaataagattgactttaaacagagtat

SEQ ID NO: 6858 - DNA, 1365 bp, unidentified
  source 1..1365: mol_type = unassigned DNA; note = element_aa54961
  misc_feature 1..2: note = core
  misc_feature 3..79: note = LE
  misc_feature 80..1099: note = CDS
  misc_feature 1100..1365: note = RE
  misc_feature 1106..1352: note = bridgeRNA
tgatgtcgtggacggctctcgcaccagcctaaatatggcaaggtgcagtcgttgtaggtccacgtctaggagtcgttccatggagaaagaggttgttaccgtcggattggatctggcgaagaacgtatttcagatacatgcaattggaagtgacggtaccgtgcttgtccggcgaaagctgcggcgggccgaggtgatccgcttcttcaccgatttgccggcatgcctggtcggcatggaagcttgtgcatcggcgcatcattgggggcgcgagctaatggctctgggccatgaggtgcgtttgatgccgccagcttacgtcaaaccatacgtgaagcgggggaagaccgatgcggcggatgctgaggcgatctgcgaggcggtgacccgtccaacgatgcgctttgtcgccgtgaagacggtcgaacaacaagctgtgttgatgctccacaagagccgagatcttctggtccggcaacgaacaatgttgatcaacgcactgcgagggcaccttgctgaatatgggatcgtcacccgcgtgggcgccgggggagttaccgcatcattgcaagcgctccacgacgagcaaagtaaattgccggatcatgcgagatcagcgctgcacggcattgctgcacagcttagagcgctctccagcgagatagaccggctggagacacagatccttgcatggcaccgcaatgacgagacgagctgtcgtctcgcgacgatcccgggcataggcccgattaccgcatcagccattgcagccgccgtgccagatgcatcgctgttccgatcgggacgacagtttgcagcgtggcttgggctcacgccacggccgcacagctccggcggtaaggagcggcttggcggcatcacgaaacagggcgatggctatcttcgacgacttctcgttgtcggcgcgaccgcagtcatgcgcatggcgcgcaaggatgcgtctcgccaaccctggatggcgcagctcctcgagcgcaagccgacaaagatcgcgacggtggcactcgcgaacaagacagcgcgcattgcctgggcggtgatggcgcggaaggaggtttacacgcccgtggccgtgtagaagttatcctcgccgctcgctcaactttgagtggcaggagggcgcaagggcagctcagtagtgatgacgaaccggtcagaccgggggttggtgaaacccaaggggtcacagcgcttcgagcgcgatgacgtgattagggagccgacctgcggacttcatcagggccagcagccatacggtgctgcgcgaacaggccgaacacatggatgcacccgaccgatctcatcactgcagaaaactcttgcgcagcgagagccgtccacaca

SEQ ID NO: 6859 - DNA, 1399 bp, unidentified
  source 1..1399: mol_type = unassigned DNA; note = element_aa603f6
  misc_feature 1: note = core
  misc_feature 2..226: note = LE
  misc_feature 227..1306: note = CDS
  misc_feature 1307..1399: note = RE
  misc_feature 13..241: note = bridgeRNA
ctacttagagactgggggtaggaccggtgtctggccagactcggtccaggtgtccggcgagatgctccactttgcggctgcccgctgtggttcggtgtggctctctcatggcttgcggtctcgtcgggcaccgcgcggggagtggctggaaaggggtctgttcttgctcgaagtagcggtgccctccttgccgacaaccctcagttcttaggcaagggaggcaccgatgacggtgatcatcgggatggatccgcacaagcggtcggcgacgatcgaggtgatcgacgagcgggcgcaggtgttggcgaccggcaggtatgacaccgataacgccggttacgggcggctgctgcgcgccggtcgggagttctcggaccgggtctgggcggtcgagggttgcaacggcatcggcaagcacctggcgcaccggctggtgcacgacggcgagaccgtggtggatgtgccggcgaagctgtcggcgcaggtgcgggtcttcgctgtcggcaacggtcgcaagaccgacccggttgacgcgcactcggtcgccctggcggcgttacgcacgccgaacctggtgacggtgcaggtcgatcccgagttggtcgtgctggggttgttggtggatcggcgcgatgagctggggcgggccaggacccagacggtcaaccgtgtgcaccggctgctgctggagctcgttcccggcggcgccgagcggttcctctccgcggcccaggcccgcgctctggtggcgaccatcaagccgcgcgacatcgtcgggaagacccgccggcgtctggtcgtggaactgatcggtgagctcgagagcatcgaccgtaagaccaagaccatcgacaaggaactcacccagctggtgacggcgcgcgggtcgactctgctgggcctgcatgggatcgggccctccggcgctgcccggctcctggccgatgcgggtgacatcagccggttcggcactcgcgaccggttcgcctcgtggaacggcaccgcacccttggacgcctcatccgggcagcagcaacgacaccggctttcccgcgccggtaaccgccggatcaaccggaccctgcacatcatggccgtcgttcagctgcgtaatcccaccgaaggtcgggtctacttcgatgccaagaaggccgcgggcaagacctcgatggaagccatgcgtgccctcaaacgccgtctgtccaacgtcgtctaccagcggatggtccatgatcagcaggacagacaggcggcgagcccgggagggcacccgggaacgactctgactccagcgcggccgacctaaccccggacatcgacccttcggaccagccacaacccggactcaccacagccaccttaaccccgctcccaaccagcacttgacacaaaggggagc

SEQ ID NO: 6860 - DNA, 1390 bp, unidentified
  source 1..1390: mol_type = unassigned DNA; note = element_aa6ba89
  misc_feature 1..2: note = core
  misc_feature 3..88: note = LE
  misc_feature 89..1123: note = CDS
  misc_feature 1124..1390: note = RE
  misc_feature 1091..1377: note = bridgeRNA
agatggggtggttgccgccctcccggatggcatcgcgatatgcaaaaaaagtggtgtttagagccactgagcggaaaggatggcaacaatgcaaaaggatactatgattggtgtggatctggcgaaggcagtcttccaactgcacgccgcatcgatgaatggggagccgaagttccgcaagaaaatggctcgacaggcttttctcaggtttatggcccagcagccttcctcgctggttgtgatggaagcgtgtgcgagcgcacattactggtcccgtgagatgatcaggctcggccatgaagttaagctgatcgcgccgcagtacgttaagccgtctgtgaagcgtcagaagaatgatgccgcagacgcagaagccatagtgatcgcagcccagcgacccgagatgcgtttcgtcaatccaaaatcagcagagcagcaaagccgagcgatcttgttccgcgggcgagaccggctcgttcatcagcgtactgaactggttaacgccttacgggcatgtctctacgaatacgggcacgttgttcctcaaggaatccagcagatccaccggatagccgagatcctgaaagcgccgaacagcgacctgcctgacttgatgcgggaggagtgcctcgatttgctggaccagatcgccgagcagacggttcgcatcaatgcccgcaccgagaagatcaaagctctggcaaccgaggccgatacagcacggcgtttgcagacgatacctggtgttgggccactgaccgctctggcagtcgaagcttttgcgccgccgatggaaaacttccgatgcggtcgcgacttcgccgcctggcttgggctcgttccacgccagttctcctctggtggcaaggaacgacttgggcgcgcttccaaggctgggcaggccgatatccgcaggcttttgatcattggcgcgaggtcgcggctgaactggatgggccgtaaatcaatctcggaaagttcgtggttggcgcgcatcgtcgcacgaaaaccgcggatgctggttgcaatcgctttggccaacaagatggcgcgaaccatctgggccatggtgacgaagaatgaggattatcgagttccggcacaggcagtagctgcagcatgactaagttgccgtcgcctaaggtcggatagggaggtgtgagaagacgaaaactcgaatgggtaaaatgatcgaaaagatctgggtcagaaaaaccagttcaggactctgagcgacacagctcgtcaatgagatttggatctgatccgctgatcaccataccggcccgcggcctctgcaaatgccgcaaataaaggccttacagaagaccgcactcgatcacccccttaaggttgagaagcttcttgcataacgggcgggaaccacaga

SEQ ID NO: 6861 - DNA, 1507 bp, unidentified
  source 1..1507: mol_type = unassigned DNA; note = element_aa6f80f
  misc_feature 1..2: note = core
  misc_feature 3..7: note = LE
  misc_feature 8..1090: note = CDS
  misc_feature 1091..1507: note = RE
  misc_feature 1228..1479: note = bridgeRNA
agacggtatgggtgactccccgatggtgtgttggggggttgcgggccggagcctcacgcacaaagactcgtgggttaccgagcaggaggcgcctgcccggcctatccgacatttgtgggaggccccggtgtttacagagcgtacgagtgtaggactcgatgtgcacgcacgatcgatcgtcgcggctgctcttgacggccaaacaagtgagcttcatcaggcgcggctgacgccgtcgtttgagcacgtcagatcatggctggcgacgttgccaggccctgtcgcggtggcctatgaagccggtccgaccggcttcgggctgtaccgggacctgaccgcggcagggatccgctgcgaggtggttgcgccgagcaagctgcagcgtccggtcggtgaccgggtcaagaccgatgtgcgcgactcgattcacctggcgaggttgctgcggcttggcgagaccacttcggtgtgcatcccgactgtcgcccaggaagccgcgcgtgatctggtcagggcccgcgaggactgtcggggtgatttgatgcgggcacgtcatcggttatcgaagctgttgctgcgtcacggcctggtctatgacggtgggacggcctggaccggcgcgcatgaccggtggttgcgaacagtcgcagcgtcggcgttgaccggggcggccacacgggtggccttcgatgccgattacgaacacgtattgacgatgaaagctcgacgtgaccgtttggacgtggcgatcgtagcgatggccggtgatagtgagttcaccccgatcgtgcggcggatgtcgtgcctgcgtggagtgagcacgctgaccgcgttcgcgttgaccgtggagatcggtgattgggatcggttcaccggcaacagcattggctcattcgtcgggttggttcccagcgaatattcttcaggaatgtcgtcgggtgcagggggcgatcaccaagaccggcaacacccatgcccgccgattgctcgtcgaagcagcctggcaccatcgggcgcgctatcacgtcggtgcggtgatgcgggaacgctgggaacaggctcccgcagcggctcgggtgcgtggcgatgaaggtaaccgtcgcctccatcagcggtgggtgaacttccttgaccgccggaaacgccccgtcattgccaacgtcgccatcgcgcgtgagttggccggctggtgctggtcgttggccgtgatggactgctgacagcaattggcctgctttatgagccgatcggtggtgacagcgcgtggatcgacccgcgatacaactatgagcaaacccggtcacgggttgacgctcgaccctagacacgcggtcgcgatccagccgaaaccccgtcctgcggtacccaatccgcgaatatcagtctgaccgcgcgtcgtgatacgacacgctcaccacacagatcgctcatgaagcacagaggtaccgccgggatagcttcccggcggtacctcgccctgcgaacttgacaaacttctctacatatc

SEQ ID NO: 6862 - DNA, 1306 bp, unidentified
  source 1..1306: mol_type = unassigned DNA; note = element_aa7851e
  misc_feature 1..2: note = core
  misc_feature 3..259: note = LE
  misc_feature 260..1261: note = CDS
  misc_feature 1262..1306: note = RE
  misc_feature 42..212: note = bridgeRNA
cttgtatattaaacatatctcttaaacacaagattatttaacacaaaacaattatagtaataactgattttctggggaagccggcccaaccttaagctttgagcttgctcgtagattggctccccaccctcgtcatccatgccgtggagtatctgagacctgtaagctatgcttctgagtctgcattcacaaggacggtaggtgaagtgtcagggttgggaaaccagtgatcattataatacttaatatgggataaaaaatgaatactgtcggaattgatgtgagttgcaaggaattagttgttgtcgtcatggttaatggtaaggcacgtaaagcgaaatcctttgataatacccctttaggtcatcaatcaattattcagtctttaacaaaacttaaaggagaaacaaaggtttgcatcgaggcaacaggcatctatcattttgatttagctgtcgctcttagtcgagcagacggtattgaagtgatggtgattaaccccaaagccgcacacaactttgctaaagccttaatgacgcgcagcaaaaccgatgcgattgatgcagagaatttagcgatttatgctgaaagaatgccttttgaagcctgggagcgtccagccgatgaatgtattagcttaagagcgactgcgcgtcgtattgccgccttaagtaagcaaaaaacacaaactaaaaaccagcttcatgctttggaatcaacagtggaaacacctgtgctggtgattgaacagacagagcagttgattgatattttagacgcacaaattaaaaccttgcgcgacagtgcacttaaccttattcatcaaaatgaagatctgaagcaagcttatacattaatcaccggcatcaaagggattgcacaagcctcagcggtacaaatactgagtgaactgatgatcttgcctaaggatatgactgcgcggcagtgggttgctcatgcagggttggatccaaggatatttgattcaggtagtagcgtatctaaaaagccacgcattagcaaagtgggtaataaatatattcgtcaggccttgtatatgccagctttggttgccagccgattcgagccgaatattcaaggctattatcatcacttgattgaggataatggcttaaagaaagtacaagcggtctgtgctgtgatgcgtaaattattacacgccatccatggcatgttacgtactaacaaaaaattcgatggggctcgtttttatacgttacctatcactataaatgcataaaaatataaatttttatgcattcacgcttgcgttttaatagagtat

SEQ ID NO: 6863 - DNA, 1483 bp, unidentified
  source 1..1483: mol_type = unassigned DNA; note = element_aa786fd
  misc_feature 1: note = core
  misc_feature 2..150: note = LE
  misc_feature 151..1200: note = CDS
  misc_feature 1201..1483: note = RE
  misc_feature 1220..1481: note = bridgeRNA
atggtatggacgcctcccacctgctgacggatgcagagattggctgcgaaggccgagaaagcggctgagcaatagggggcctcgcagtcgacggcatcaagtgccaaagtggagttgtgtttcgcaaccacttgagacggaggccccgaaatgaatcgtacgacgtatggcttggacattgcaaagaacgtgatgcagcttcactgggtcgacaccgagacgggcgagatcgggcgcaagaagctcgcccgagccaagctcagcgagttcttcgcgcagctgcagccggtgcgggtggtgatggaagcgtgcggcagcgcgcaccactgggcccgggtgctgggcgctctgggtcacgaggtcgagctgctgccggcgcgccacgtgcgagcgttcgtgcgcagcaacaaggacgacgccgccgatgcgcgggcgatctggctggccgcgcagcagtcggacatccggcgcgtgccgctgaagagtgtggcgcagcaggcagcgctatcgctacaccgcacgcggcagcactgggtgagcgtgcgcaccgccacgctcaacgcgttgcgcggaacgctctacgaattcggcgtggtgttgcccgggggcaagcaggcgggattgaaggttctgggggcccatcgtgcgcagatcgacgcgatgatgccggcgacgatgcaacggctcatcgacgggcagctcgcgacgctcaaggacatccaacgtcgaatcgacgagctcgaggcggagatcggcgtgcagcacaagcagctggacaaggctgccaagctgcgcgaagtgccgggcatcgggctgctgggcgccacggcgctggcagccacgctgggcgacggcagcggctggaagagcgggcgggagttctcggccagcctggggctcgtgccagcgcacagcggcacgggtggcaaggcgcgcgtggggcacctgagcaagcgcggcgacccgtatctgcgcacgctgctcatccacggcgcgcgctcggtgatcaggcacgccaaggccaagccgaagtggctcgagcagctgctggcgcgccggccgatgaatgtggcggtggtggcgctggccaacaagatggcccgcacggcctgggcgctggtggcgcacgggcgggaatatcaacgggagtggaagagcactccgcccaagggctgtgccgcgcaagcggcggcagcgtagatcaaccgcaattgaaggagtggaagccgcaaagagtgcgcaagtcgagtcgatgaagtgatggcgaagcggtcggaccgcgggtcgggtaaagctgaatgtctgctaggacaagcctcgtgcgaagtccctaccggagatgagcaccgacctcgcgaatgaccatcaaggccagcagcgggcttggcccggactgcatcaacaggccggatataagaccgcagtcattaccgccaagtcagaacttcaagaactcgcttgccacacgggaggcgtccatata

SEQ ID NO: 6864 - DNA, 2093 bp, unidentified
  source 1..2093: mol_type = unassigned DNA; note = element_aa7b2bf
  misc_feature 1..2: note = core
  misc_feature 3..276: note = LE
  misc_feature 277..1323: note = CDS
  misc_feature 1324..2093: note = RE
  misc_feature 12..299: note = bridgeRNA
ctattacaatgtatttacggtctaaggcacggcagccagccgtgtctttttccgcatcgttgccaaagctgttagaatgagagagtcttggcctgatgtgttcctccaaggaccatagcgtccgtagtgaagtccgtcagccagcctctcattcgcagcgttcgatttatgcaggttgagccacctccttggtgcgcccgtgtcatcaaatagattggatcggcaatggtggaatggctggtcgccaaaacaaatccatgatgaggagcgatcaatatgaacaatgttgcagggatcgatgtttccaaaggaaagagcatggtgtctgtcctccgtccttttggagaagtggtagcaaaaccattttctattggtcacaccggcagcgaactcaaggagctggcagactacttgaaaagcctggacggtgagacacgggtagtcatggagcacaccggacggtactatgagccagtagcccgctttcttcatgatgagggcgtcttcgtcagtgcagtcaatccgaagctcatcaaggactacggaaataacaccctgcgcaaagtgaaaacagacaaggcggattcccgcaagattgcccggtacggtattgacaactgggcagaattgcgccaacatacacccatggatacgattcgaatgcaactgaaaacactgaaccggcagcagagtctatacaccaagactaagacgatgatgaaaaataacctcatcgcccttcttgaccagacctatcccggtgtcaacgccctatttgacagccctgtccgtgaggacggcagccagaagtgggtggactttgccacgaccttttggcatgtggactgtgtgcggaacatgagcctcactgcctttgccgagcgttaccgcaagtggtgtaaacggcatggctacaacttcagccagagcaaagccgttgaggtccacgccggagcacaggacctgatcgccatgctccccagggacgccctgaccaaaaccatggtccggcaggccattgatgcgctgaacgctatctctgcctctatggaacggctcaaggctgaaatgcaggccctggcagcgcagctcccggaatatcccgtcgtcatggccatgcacggcgtaggcgattctcttggccctcagctcatggcggagctcggggatgtgacccggtttacccaccgaaacgccattaccgctttcgcgggtgttgaccctggcgctgaccagtccggcactcacgaggccaaaagtacgagggtttccaaaagccggagctgcgccgcgccttattcctggttatggactgcctactgaaaacacagccccaggatgatccagtgtaccgtttcatggacaagaaacgagccgagggcaaaccctatctggtttacatgacagccggcgccaacaagttcctgcgcatctactatggcagagtaaaagaatatctggcatccttggagggaaattaaggaagcatccttccttgttggggaacgatactgcatttacgctaaaaacatcttatgacagaaagagagcgattaagatgtttttagacaatttatccacctccgtcctcaaattatgtgatactcgaagactcagctatgaagccgcctcggaacgatgcgacctcagctccagatacttcgctgacattgcccggggcaagactgcgcctacgatcctgacgctggaaaagctctgcgttggttttgatctgacgccaaatgacctgttgatcccctcagaactctggcgagagatggccttccgcgaaccaatgccggttacacatatccgctgctttcacttctttcacggcctgactggtttcccagtttgcccccaatgtgggagaactctcgaacgggaataccagccttactgtgaccgctgcgggcaatgcttggattggaaaggtttctccaaagcaacgattatcctgcctcagaaataatccttactgctacatacctgctaatccggccagcgtcctttacctgctggctgcttttggcatgtccttttcccctcctctcaatttttcttcatttccctattgactttttatttgcaga

SEQ ID NO: 6865 - DNA, 1180 bp, unidentified
  source 1..1180: mol_type = unassigned DNA; note = element_aa7c21c
  misc_feature 1..2: note = core
  misc_feature 3..205: note = LE
  misc_feature 206..1165: note = CDS
  misc_feature 1166..1180: note = RE
  misc_feature 6..210: note = bridgeRNA
cttgtatgttcagaccagaccagtgcggtagagtctgagcgtcgttgaggcggccagaccggctcgtgcagtttgatagccgctagggtgatcgagcccgcgcctgagtacagaacgcacggtcgccgtgctggtcttcctgaagcccgaacggttacgcgcgccttgtgtgagcgcgcatgcacaagcaagggatctgaagaccatgtctgttatctcagttgttggtattgacgttgcgaaggcacacgtcgatgtctgtgtactgggcgccaatcgcgatacccagcagtttgccaacgatgccgagggccattcggcactggccgcgaccttgcagccgctggggattggcctggtggtgatggaggccaccggcggctacgaggcggcactggtctgtgcgctgcaggcggcaggccaacctgtggcggtgatcaacccgcgccaggcccgcgatttcgccaaatccatggggcgcctcgcaaagaccgacaccatcgatgcgcgcatgctcgccgaactggcctcggtactggtgcaacgcgaagaccttgcgcgcttcctgcgcccgctggccgacgcccagcagcagtggctggcggccctggttacgcgccggcgccaactgctgaccatgttgaacgccgaacgccagcggctgcagatcacgccggccgggctgcacccgagcatcgaggccatcgtggcggccatcaaggcccaactggacgacgtggaggcgcagatggtgggccacatgcgtgagcactttggggaactagatcggctgttgcagtcggccagcggcatcggcccggtggccagcgccacgctgattgccgaattgcctgagctcgggcggctcagccggcgcgagatcgcggccctggtaggtgtggcgcccatggccaatgactcgggcagcagcagggggcggcgccggattctgggagggcgcttcgagatccggcgggtactgtacatggcgacgctcaccgcaacccggcacaaccccgccatcaaagccttctaccagcgcctgacagccgccggcaagctgcccaaggtggcgttagtggcctgcatgcgcaagttgctgaccgtgctcaacgccatggtcagaaccagcaccccttggggcaaatcgcttcaccgaacttgactttgaagacggtta

SEQ ID NO: 6866 - DNA, 1630 bp, unidentified
  source 1..1630: mol_type = unassigned DNA; note = element_aa8bb99
  misc_feature 1: note = core
  misc_feature 2..116: note = LE
  misc_feature 117..1316: note = CDS
  misc_feature 1317..1630: note = RE
agtaattatgtaagaaaagcatagtgcagtatgtgcagtcatcccaaagaggagctgaaattttaattttagtttgcgatctaggtcgccattattaacaattaaaaaactgcactatgccaggtacaaatttgcaaaattctattgactttaaaggtcagaatttttacgtgggacttgatgttcacaaaagatcctgggctgtgactattcgcagcatgggtattgaagttggccgttttacgcaaccaccttcagctgcggccttagcaacatatctgcaaaataattttccgggcgggcgatatttttcagcttacgaagcgggcttttgcggaaccggaacccacgaacaattatgcaagctgggaataagtaatattcttgttcatgccgctgacatcccagctacggacaaacaaaagaagaacaaaacggatctgcacgatagtcgctccattgccgagcgtcttgaaaaaggggatttaaaagggatatatgtaatgacccgggaacaacaggaactgcgaagtctgttccggctccgggaaagcaaagtcaaggacgtgaccatggctaataacaggctgaaaagccacctgatgttctttagtattgaattgccggaagatgtaggcaaaaaagaatatctatcagtaaaagcattgaaatggctgagtaaccttgagatggcaacgacggcgggcactatagctttacagcaatatattgaagggctgaaataccagcgtaaacagttgtaccagataacgaagttattgagagaacaggtgcaggcagtacacggtacaacgtatcagtgcttattatccgttcccggtatcggaggggttacagcaatgggtctgatctgtgaaattgctgacttcagccgcttcaaagaccctgaccaatacagcagctttcttggattatgtccatgggaagacagttcaggggataatattaagactaaggggatgcagccaagatgtaacagacacctgcggccactattggtggaggcttcgtggacagctataaaaaggtctccggctttgttcgcttattacagcaagcatgcggtccgcaatcccaaacgtgcaatcattaaagtagcccgaagattggcaatgatcgcaagaggagtagcaataacacaacaattatatcaactggaatatttacaaactatgagacagaaacaacaagatgaaaaaaagatcaggaaaacagaaaggttttcttcaggcattgcgaaccagcataaaaacaaaaaatcgggcaacaatataccaatatcattgcccggctaatatgctcattcgactgtaatatccctggcaggttgctcctcagcagagcccgcttccgtttcttacagtattataaatttaatcattaataactgttcagaaaattaaataatcttcaaatttttaaagaggaaaacgcacaatcaggattgtattaaattacaattgaaagtattcgtgcctctttgacttcatacaattactggcggcctgaccgcatatagcagttggagatattttgttgaactgaataaaaactataattttatgtgactgacaatctcatactgccacttattgcttttctacatagc

SEQ ID NO: 6867 - DNA, 1186 bp, unidentified
  source 1..1186: mol_type = unassigned DNA; note = element_aa8c3f7
  misc_feature 1..2: note = core
  misc_feature 3..208: note = LE
  misc_feature 209..1171: note = CDS
  misc_feature 1172..1186: note = RE
  misc_feature 6..213: note = bridgeRNA
cttgtatgtttaagccagaccagtacggtagagtctggttgccgctgaggcggccagaccggaccgtgcagtttgagcgcgcctggggtgtccgagcccgtgactgagtgcagagcgcacggccgccgtgctggtcttcctgaagcccgaacggttacgcgccccggttcgaccgagcgcgcatgcacaaggaagggatccgaagatcatgtctgtgacctcagtggtggtgggcatcgacgtcgccaaggcgcatgtcgatgtcgcggtgatgggcgccaagtttgatgctcagcagttcgataacgatgccgagggccactcggcgctggcggcagccttgcagccgcaaggggtggcgctggtggtgatggaggccaccggcggctacgaggcgaccctcgcctgcgcgctgcaggcggcgggcctcgccgtggcggtggtcaatccgcgccaggcgcgccacttcgccaagtcgatggggcgcctcgccaagaccgacgcgatcgacgcgcgcatactggccgagttcgccgcggtgctggtgcgccgcgaggatctggccagcctcatccgcccgctcgccgacgctcagcagcaggccttggctgcggtggtcacccgccgccgccagctgctgaccatgctgctgtccgagcgccagcgcctgcaactcgcgatccccgtggtgcgcccgagtatcgaggccatgatcgaggccatccgcaagcagctcgacgaggttgaagcgcagatggtcggccacgtgcgcgagcactacgccgcgctcgacaagctgttgcgctccgcgagcggcatcggccccgtggccagcgccaccctgattgccgagctgcccgagctgggccggctcaaccgccgccagatcgccgcactcgtcggggtggcgccaatggccaacgactcgggcaccagccgcggccgacgccgcgtgcagggcgggcgcttcgagatccgccgcgtcctctacatggccacgctcaccgccgccacccacaaccccaccatcaaggccttttaccagcggctcatcgccgccggaaagctgcccaaggtcgccctggtcgcctgcatgcgcaagctcctgaccactctcaacgccatggtcaagaccaacacgccttgggctgccgacttccattctgcttgactccaaagacggtta

SEQ ID NO: 6868 - DNA, 1396 bp, unidentified
  source 1..1396: mol_type = unassigned DNA; note = element_aa9148d
  misc_feature 1..2: note = core
  misc_feature 3..82: note = LE
  misc_feature 83..1108: note = CDS
  misc_feature 1109..1396: note = RE
  misc_feature 1134..1383: note = bridgeRNA
tgatgatgtggacggcctctcctcaacggcatcatagtgccaaggcgtggtcgcaggagcgccacaaagagggagaccgtccgtgaagcagtttatcagaatcggcgtagatttggccaagaactattttcaggttcatgcgcttgagagcgcaaacggcccggccctgacgcgcaagttgaagcgctcaaagatgcacgagttcttttcgcaaatcgagccctgcctcattggcatggaggcctgcggctcggcgcattattgggcgcgtgaactcaaggcgatgggacacgaagtgctactgatgcccccggcttacaccaagccctatgtcaagcgcggcaagaacgacgcggtcgacgcggacgcaatctgcgaagcgatgtcgcgccctggaatgcgcttcgtgccgatcaagagctcggagcagcaagcgacactgatgctgcacaagacgcgtgaattgctggtcaaacagcggacgatgagcgtcaacgcgcttcgcggccatctttcggaattcggaattatcgccgccaagggaatcggtcgcgtcgacgagttgcttgagctggccgaaagtgatgcgacgcttccagatgccgccaagacaggcatgagggtcctggctcagactcttgaggggctcgacaaagcgatcgacgatttggaagacgaaatcaccagcgcccatgcgcaaaatgaggtggtccggttgctggacaaggttcccggcatcgggaagctcatcgcttcggtgatcgcagccagcgtgccggacccgagtgtgttcaaatcgggacgcgatttcgctgcctggcttggcctcacgccgaggcaaaattcgagcggcggcaagcagacgctcgggggcataaccaagcagggcaaccgatacataaggaagctgctcgtcttgggggcgacctcgctgctaaacgtcgtaggcaagcgcaaaggcgccttgcgcgactggatcgtcatgcttttggcgaagaagccagcgcgaatggttactgtggcgctcgctaacaagctggccaggatcctctgggcgatgatgaagaccggcgaatgcttccgcaccgagatgttcgcgaaggcataaggaagccgctcgccgccgcaacgcgtgttcacaggggagatttacaggttcgagtttggcaagcgcgacgagacgtgatgaacgacacggacgccaccgaagaccaggaacaacccgccagctctcatgagcgtaaagctcgttcgtttgatagggatcccagtcgtcggacttcatcaaggcccgcggacatatgctccgcaccgactgaggccggacatatgaccgcagccgaccaaatcgttcgaagcgtcaaaaaagtgcttgccatggagggccgtccacata

SEQ ID NO: 6869 - DNA, 1393 bp, unidentified
  source 1..1393: mol_type = unassigned DNA; note = element_aa9898b
  misc_feature 1..4: note = core
  misc_feature 5..87: note = LE
  misc_feature 88..1119: note = CDS
  misc_feature 1120..1393: note = RE
  misc_feature 1139..1380: note = bridgeRNA
atgatgtggtggacgacgcccgctcccgacatcgaatgtgtcaaagggtgatcgttgaacaacgaatcaccggagggggtcgtccatatgcaggttagcaccatcggcgttgatctcgccaagaacgtgttccaagtgcacggcgtggatagtgcgggcaaggttgtcatcgcccgccaattgcggcgcaagcaggtcatcgacttctttagcaagagtcctgcttgcctggtcggcatggaagcctgcggaaccgctcatcattgggcacgtgaagtctccaagctcggtcacaccgtgcgcctaatgccgccgagctacgtgaagggctatgtcaaacggtcgaaaaacgatgctgccgacgcagccgctatctgtgaggccgtgacacgcccatcgatgcggttcgtgccgatcaagtcggccgatcagcaagccttgctgatgctgcatcgaacgcgggatcttttaatccgtcagcgcacgcagctgatcaatgcgctccgagctcacctcgccgagttcggcctcgttgcggcgacgggacgggaaggtctcgcgcagcttgccgcgatcatcacggacgagagtaatcgcgaagctcttccatctgcgatgaaacaggcgttgcaggccatcgtcgatcaactcgctgctctggaattgcagatcgggaccctagatcgcgccattcacgcccatcatcgtgccaatgatatgagctgtcgcctcgagaccgtgcccgggataggcgtaatcggggccacggccattgcttccactgtcacagacccgaatgacttcaaatccggtcgggattttgcagcatggatcggacttgtgccgcggcagcactcgacggggggcaaggagcgactaggcggtatctccaagcagggagatcgctatcttcgacggttgcttgtcatcggtgcaacagcggttgttcgacacgcccggcagcatccgcaaaagcatccctgggtcatcaggctgctggctaagaagccggccaagctcgtcgccgttgccgttgccaacaagatggcgcgcatcgcttgggcgatcatggccaagggaggatactaccgagcgccggagcttgctgtagccgcctaaagaggcttggcaatgggagcgtgaggcgacggcggagcgagacaatcgaattgcgagggtgatgatggcgtgatgcgaaacggtcgagccgtcgattgggacaacccgcttctgggtcatgggcgtcaaagcccgtgcgaatgattgggacccgatccgcggactacatcagggccagcggtcatggtgccgcgtaaacaggccggacacatgacttgcacccgaccgcaagctgaacgtcagattctccttgcaacgcgggcgtcgtccacac

SEQ ID NO: 6870 - DNA, 1522 bp, unidentified
  source 1..1522: mol_type = unassigned DNA; note = element_aaa19ec
  misc_feature 1..3: note = core
  misc_feature 4..491: note = LE
  misc_feature 492..1274: note = CDS
  misc_feature 1275..1522: note = RE
  misc_feature 3..220: note = bridgeRNA
cttatattatatttaacgcagttagctactgccaaagcccaagtggtatacttggaataagccactgtggattagttcatttcctccaatcgcttgacgatttccgaaagggtctaaccacagctttttgtttcaattggtaatgagtttgataacgcatagacgttttatctcgtctaaggtaacaaggcaaaaagttcgtggataaccaagtagacttgaaatactatatctggaggtactcccatgctttatgtgggcattgatgtcgctaaaaataaacacgatgttacagccttgaatgttcgaggaaaactgttcttaaaccactcactttttcaaataataaagctggttttgaactcttagatctgtctcttcgacagctcaaccaagactgtctcatcgctcttgaagatactggacattatgcctttaatctactgaacttcctgcatgaacaaggatataaagtttacacctacaatcctttgctcatcaagaaatttgccaaatcattatcacttcgcaagactaaaacggataagaaagacgctcatggcatcgctcttaaacttctttctgaccccaatcgtgaacaatttcaacacaataatcggcaagtagaactaaaaatactgactagacatattcatcgtctcaagaaaaaacagtctgattggaaagtacaatacactcgttgtcttgatatcatctttcctgagttggataaaatcgttggaaagcattcagaatatacctaccaactcttgacacgctaccctaatcctcagaaaaggattgaggcaggatttgataagctgatagaaattaagcgattgaccgcttctaaaattcaggatatcctctcagtcgcacctcgttctatcggaacaacatctcctgctcgtgaattcgaaatcatcgaaatcatcaaacattacaagaggctcattgacaaggcggaaaaatgtgtcaatgacttgatggctgagttcaactcggtcatcacgacggttactgggattgggaatcgtttaggggcggtcattttagccgagattcaaaatattcatgcctttgataatcctgctcaattacaagctttcgctggactggattcttctatttatcagtcaggtcagattgatttagctggaagaatggtcaaacggggttctcctcatctgcggtgggcactcatacaagctgccaaagcatgcgctcgcttttcacctgcttttaaggcctatcttaagactaagttagaataaggaaaacattacaatgtagccatcatccaccttgcaaaaaaacttatccgaaccctgttttatatcctaaaaaagagctgccatttgacgaacaaaaagtgatgtaatttctgaaatcaacacaggattacctttgaaaaaatggactttttcaagggctttttgccgtgctctaaaatcatcgccaaatcatcaaattgaaataagaaatagtttagataaaattattgacttttcttatagtttgt

SEQ ID NO: 6871 - DNA, 1646 bp, unidentified
  source 1..1646: mol_type = unassigned DNA; note = element_aaa2461
  misc_feature 1..2: note = core
  misc_feature 3..279: note = LE
  misc_feature 280..1515: note = CDS
  misc_feature 1516..1646: note = RE
  misc_feature 14..299: note = bridgeRNA
ctattacaataagatttacggtaagaggcacggcagccagccgtgtctttttcctcattgttgccaaagctgttagaatgggaaggcattggtctgacgtatcactccagggactgacacgtccgcaggaaagtccgtcagccagcctctcattcgcagcgttcgatttatgcaggtagagccgccattctggtgcgtccgtgtcatcaaatagattgaatcggcaatgatggaagggctggccgccaaattacaatctacgacaggagttgagaaacaatgaacgcagtgggaatcgacatttccaaagggaagagcatggtgtctgtcatgcgtcctttgggcgaagtagtggcaaaaccttttagtgtgcgccacaccggcagtgaactcaaggagttggcagactacttgaaaagcctgaacggtgaaacacgagtgatcatggagcataccggacggtactatgagccggtggcccagttcctccatgacgcggggctgtacgtcagcgcggtgaatccgaagttgatcaaggactatgggaacaactcgctgcgcaaggtcaagacagataaagctgattcccggaaaattgcgaagtacggtcttgacaactgggtggaactgcggcaatatgcttccatggacaaaattcgttaccaactgaaaacgctgaaccggcagtgcaatctgtataccaagacgaagacgatgatgaagaacaatctcatcgcgcttctggaccagacctatcccggcgtgaacgccctgttcggtagccccgtccgggaggacgggacgcagaaatgggtggactttgccgcgtctttctggcatgtagactgtgttcggaacatgagtccggccgcatttaccgagcgttaccgcaaatggtgcaagcggcacggctacaacttcagcagcgacagggccgccggaatccatgctggtgcgaaagaccagatcgccgtaatgcccaaggatgacctgaccaagatgctgatccggcaggccattgtctccctcaacgctgtctccaagactgtggagcagatgaaagcggagatgctccaactggccgcacagcttccggagtatccggttgtcatgggaatgcacagtgtgggagattcccttggcccccagctcatggcggagattggggatgtgacccgctttgcccgcagaagttccattacctcttttgccggtgtcgatcccggcgctgaccaatccggaggccatgaggctaaaagcgttccaacttccaaaagtggtccgccagaactgcgcaaggcccttttcctggtaatggacaatttattgaaatccatgccccaagacgatccggtctaccggttcatggacaagaaacgcgccgagggcaagccttacctggtctacatgacagcgggtgccaacaagttcctgcgcatctactacggcaaggtgaaggagtatcttgccaaactggaacaaccttctgagccagtctccaacgagcgcatctgaatctttctgtaattctttcccagaccagcgttcctgcggtggtcttgttgttgtgccttttttacccccttttacccccttcttccttcttcacttttctgtaaattttctattgacttttcctttgcaga

SEQ ID NO: 6872 - DNA, 1516 bp, unidentified
  source 1..1516: mol_type = unassigned DNA; note = element_aaa7a87
  misc_feature 1..4: note = core
  misc_feature 5..109: note = LE
  misc_feature 110..1228: note = CDS
  misc_feature 1229..1516: note = RE
  misc_feature 1244..1442: note = bridgeRNA
ctagacgttatgtccccagtttgaagtcggtggcccgtccctgctcatgccaagaatcgagggttgcttggacaggccaagccgagcctcaggcatggagggacggaccatgggagagcatagcgaggtgtatgtcgccttcgatacggcaaagcggaagcacgcggtggcgatcgcggagggaggtcgagcaggcgagatccggtttgtgggcgagatcgagaaccggccggcgacgatcgagcggctgatcaagaagctggcgcggcgctacaagaaactgcaggtctgcttcgaggcagggccgacgggttacgggctttatcggcagatgcaggccctgggacatgactgcctggtggtggcgccggcgctgataccgaggcgctctggagagcgagtgaagacgaaccggcgcgacgcgctgacgttggcccgactgtttcgtgccggcgagctcagcggcgtctgggtgcccgacgaagtgcacgaggcggtccgcgacctggttcgtggacgtacgacagcagccgaggatgctcgtcgcaagcgccagcaattgctgtcgttcctgctgcggcatggccggatcttcaccggcggggatcactggacccgtgcgcatcggcgctggttggccgagcagagcttcgatcatccggcgcagcagatcgtcttccaggacgcggtcgcatctatcgaggatgctgtcgagcggcagcgccggctcgaggagcagttggccagccttgtccccaagtggtcgatggcgcccgtgatcgccgcctatcaagccatgcgcggcgtatcgttcctggtcgccgtgaccttcgcggccgagatcggagatgtgcgccgcttcgatactccgcgccaacttatggcgttcctcggattggtccctgccgagcgctcaaccggtgagacggtgcgccgcacaggcctgaccctggcgggcaaccggcgagcccgtcgggtgctggtggaagcggcctggagttatcgccatcccgctcgcgtcagcgagaccctgcgagttcgcctcgaagcactgccaaagacggtccgcgacatcgcctggaaggcgcaggtcaggttgtgcggccgctaccgtcggctcaacgccgctggcaagaagctgcccgtgatcatcgcggccatcgcccgcgagatggcggcgttcctgtgggcgatcggccgccagatcacgccggccgcgggcacctgagcggccctattcctatcccggctgcgcagcgttggggatggagcaacggaggggaactcccgtcgctagttatgtggccgggcactgcccgacgcccgtcctctagacagaggaaagccccgagacgaaagcacggaaggcggtaaccaacccgcggataagagcctgatcaaccgtcgtctcgacgctccgtccccaactttgcgcagctcacagcccgatcgcccggtgcctcgctggcaccgaccaaccacctttgccttcgctcttgaccggggacataagaga

SEQ ID NO: 6873 - DNA, 1461 bp, unidentified
  source 1..1461: mol_type = unassigned DNA; note = element_aaac4a7
  misc_feature 1: note = core
  misc_feature 2..223: note = LE
  misc_feature 224..1447: note = CDS
  misc_feature 1448..1461: note = RE
  misc_feature 12..238: note = bridgeRNA
ctactagacgattcctttaggaccggtgtccggccagactcggtctaggtgctcgacgggtcgctctgtttcgcggctgcccacccggcgtgggtgtggctctctaccggtctgcggtcccgtcgggcgccgtgccggtgcgtggctcgcgaggggactgcccagctcgtagtagcaatgcccgcccggcgtcatcaacaacgacggcggaaaggtgaggctcatggcaagggtgtttatcggggtcgatccgcacaaggtgtcggcgacgatcgaggtcgtcgacgggcgggagacggtgctggcgaccggtcggttcggtactgacaaggctggatacgcggcgatgcgcaaacaggtggcggcctggccggagcggacctgggcggtggagggcagtaacggcgccggccgttccctggcgcatcggctgctggccgacggcgagcgggtggtcgacgtgccggccaagctcagcgcccgggcgcggctgttcgacaccggccacaaccgcaagacggacgcccacgacgcgcacgcggtggcggcggtcgccgtccgcaccaaggtcttgcgggtgttgtcctacgacgagcagctggaggtgctgcggatgctggtcgaccgccgcgaggagctgaccaggacccgggtccaggcggtcaaccggctacaccggctgctggctgagctgaagccggggaaggcgaaggaggacatcaccgcgttgcaggccaaggcgatcctggcctcggtacgcccccgcgacgtggtgggcaagacccgcaagatgctcgcgctcgagcagctggccgagatggttgtcctggacaagaagatcaaggcctccaccaaggagctgaagatcctggtcctggccagaggctcgaccctgatggacctgaccggggtcgggccggtggtcgcggccaggatcttggccgacgtcggcgacgtggcccggttcaccgaccgcaaccggttcgcctcttggaccggcaccgcgccgctggacgcctcctccggtgaacagatccggcaccggctctcccgcgccggcaaccgcaaggccaaccacgtgatccacatcgccgccgcctgccagatccgcctggacacttcaggccgggcctactaccggcgcaagctcgcagctggcaagaagcctctcgaggcgatgcgctgcctgaaacgccgcatctccgacgccctctatcgtcagctcgtcgccgacgccaaagccaccgcaaacgcaggcgtggatccgggcgttcaggcgggtccgggagggcaccgcggggcgtctcatgcatccagcgcggccggctcacacccgcacaccgacacttcggatcagccacttcccggacccgcacccacgacgctacccgcgcgtgaaccgaggagaaagactacgcccgcaaggccactccagcccgcctcttgacaacagaggggagc

SEQ ID NO: 6874 - DNA, 1477 bp, unidentified
  source 1..1477: mol_type = unassigned DNA; note = element_aab52a9
  misc_feature 1..2: note = core
  misc_feature 3..236: note = LE
  misc_feature 237..1457: note = CDS
  misc_feature 1458..1477: note = RE
  misc_feature 7..232: note = bridgeRNA
ctaataggggttggtcgtcgtggccgggttggctgggccaggatgatcgctgagccaccggcgggtgagcactgtttccggctgggcgtggagccctagcactagatcgtgccccggccggctggtgaggccccctgtgatggctggtgggatggcgtgcctggagcactgatctattagcgggctgccggggtcctcgggcttactgtctgatttcacggcggaaggagctggggttgatctttgccggggtggactgggcagagtcccaccacgatgtgtttttccaggatgaacagggccgcaggctggccggtggccgcctgccggagggagtgggcgggatcgcccgcttccacgagctggcggctgcgcacgccgctgagcccggtgaggtggtcatcgggatcgagactgaccggggcctgttcgtggccgccctggtcgcggcgggataccaggtgttcgcggtcaatccgatgtcggcatcgcgttaccgggaccggcacggagcttcgggtgcgaagtctgaccccggcgatgcgaaggtgctggccgacctggtccgcaccgaccggcacaaccaccgtcccgtagctggcgacagcgatctggcgcaggggatccgggcgctggcccgcgcgcaccagtcgatgatctgggctcggcgccggcaggccagccagctgcgctcggcgctgcgggagttctaccccggcgccctcgccgcgttcgacgatctgaccagcggcgacgcgctcgccgtgctgaaagcagcgccgcagccggcgctcggcgcggcgctgtcccgggcgcagatcaccaccgcgttgcgccgcggcgggcggacccgccgcctgcccgagcgcaccgctgcggtccaggccgcgctgcgcgtcccgcaactgcagcccgccccggcgctggccgccgcgatgggcgcggccgtcgccgcccaggctgcggtgatcacggagatgaacacccagatcgccgcccttgagcggcagctcacggcggattttgagcagcacccggacgccgaggtggtccgttccctgccaggactgggggccatcctgggcgcccgggtgctcggcgagtccggcgatgcaccaggccgctacgccaccgccaagtctcgcaagaactacgccggcacgtcacccatcacccgagcctccggcacccgccgggccgtcctggcccgccacgcccgcaacaaacgcctcgccgacgcgatctacctgtgggccttcagcgcgctcaccgccagccccggcgcccgcacctactacgaccagcgccgggccaccggcgacacccaccaccaggccctgcgcgccctcggcaaccgcctcgtcggcatcctccacggctgcctggccagccacaccccctacagcgaagaaaccgcctgggcacaccgagtcagccagcacactcgcgccgcttgacaactacagccgtgggatgt

SEQ ID NO: 6875 - DNA, 1619 bp, unidentified
  source 1..1619: mol_type = unassigned DNA; note = element_aabcef7
  misc_feature 1..3: note = core
  misc_feature 4..188: note = LE
  misc_feature 189..1487: note = CDS
  misc_feature 1488..1619: note = RE
  misc_feature 8..223: note = bridgeRNA
gttcgtattataaggtcaccagatatttctggttgaccattttttatatggttttattattacggtagccggggtagaacgtaagcacccgtggggcttagatcccgtaaagtaaacagttcgccccctacttgtagaaacatgtttgaggctggttgggacattgatctcgtataacaagcgaagctatgatactgcaagaaggattaggggtaccggtgaatttcattattggaggaggagatttaaaaatgaatccagtcgtaggtctggatgtagctaaaggtgaaagtcaggttcaagcttacttggaaaagaaaaagccatacaaaactagttttaaagtaacacatacccttgagggactagaaaatttacaccaatttcttagagaaattgagagtttaactggggttaaacttccgatcgtactcgaagctacagggcattatcatacccctgttgtacagtattttgaggagaaggattatttattaattattgttaatcctcttatctcctatcgagctaagagctcgagtttacggaaagtaaaaacagatataatcgatgctaatcatctctgtgaattgtactataaagaggatttagagccatataaaaagcgtgggattcaactcttaaaccttcgtaatcttacaagacaacacgaaaacttaacaggaatatatgtacaagctaagctacagtttcaagcagttcttgatcaggtttttcctgagtatagaggtgtttttggggatttatattctgttgtttctttacttactctactagaatatcctacatctaacgatgtcttagaagctgaagaagaaagaatagcagctaaaatcaaggagcactgtaaaagtcgttctcgtaagtgggcggctacaaaggcaaaggaactgatagttgcagcagcacggaatccttttcggaaaaccttatatcaaagccatatattaaccctaaaaatgtatatcaatatgcttttagaataccaaaagcacctatctgtgtttgaagttgagatagatgctttagcaaaagaacttatagaatataagattatccaatccatccctggtatcggagaaaaaatcgctgcaacgattatttctgaaattggtgagattgatcggtttaatcacccaaaaaaacttgtagcatttgccggaattgaccctagtatctttgaatcaggaaggttcaaaggaactgtaaacagaataacaaaaagagggtccagcagactaagacgtgcattatatttagctgttaaatgtgccatccgtgattgtcgtaaaaagaaaacgaccaaagatatcatcccgcgcaacaagagattacgagagttctatgataagaaacgcgaagaaggaaagctttataaagtagctgtaatagcctgtgcaaataagcttttacaatggatctacgcaatattaaaaaacaactcgactttccaagatatagcttaaataataaataaaactaatcaatacaaaaccttccaaaagtagaatttaggaaggttatttggcatgcacatttttagtatatcatgaaacattttaagtttttaataaaaaatgttgacaaactattagatg

SEQ ID NO: 6876 - DNA, 1320 bp, unidentified
  source 1..1320: mol_type = unassigned DNA; note = element_aabd51e
  misc_feature 1..2: note = core
  misc_feature 3..29: note = LE
  misc_feature 30..989: note = CDS
  misc_feature 990..1320: note = RE
  misc_feature 1080..1305: note = bridgeRNA
agataattagactccccacacttaaccctgtggtgtaccttacatttgtatcatcacatgttggagtccattatgaaaatactattgttggtgtcgatttagcgaagaaagtaattcaagtttgtaaaactacaaaccgtacagtgcgttctaatgaagaaatgacacctgatgaatttatcttattccttgctaactcaaaacctatgacggtggtatttgaagcttgcggaacatcaagttattggaaacagcaagccttactttacgggcacgacgccgcttatttctgccaaactcgtcgcctcagtgaggccatcccaaaaacggacaagaatgatgctttagcgattgttcaaactgctttgctgcccgatgttaatttcatttcagggaaatcaatcgagcagcaacaacttcagtcaacgatgcgtttaagagagctttgcagtaagcaaaaaacagcgctcagcaaccaacttattgcattattagccgagtttaatatcaactcaagcaatcgtaacggtggtttacggggcgcgatagaatcgacccttgaagatgctggcaatggtttctcacatgaatttagaaaagcactagatgaggcctggaaactgtatttaacggtcgcagaaacacttgtaacctatgatgaatgcctagaagcatcaattgaaacccatcctgaatgcaaaaagttactgaaactagaaggtgttgggccaataaatgctatcaatttgtatattgctttgggctgtgcagaattaggttgttttactagaggaaaagatgcttccgcttgtatagggttaacccctctgcaacattctagcggaggtaaaagcaagttaggctcgataggtaaacatgttaaaaacactgtgatacgaagtcagctaatcactggcgcggcagcgagtgttagcacgttattaaacgggaagctaaaacttgtaaagaaaaatggatacaagacttagtcgataggcgtggcataaagtgcgccgcggtggccttggctaataaaaccgtaagaaccgcttttgcaatgttaactcaaggtactgaatacaaggccaatatgatattgacctcttaacgcgttcaaacaataaaatgcttaatcgaagatgaaaatcaaccagtaaaaacagtgactcgcaaagagcattaagctcgtaaagtagatttgtttactggtccgcgtaaatatcatagagcctgggttcgctaccctattagagctcgtacataagcacgcattaattcatcgataacacattttgttgttgacagtggggagtctacata

SEQ ID NO: 6877 - DNA, 1386 bp, unidentified
  source 1..1386: mol_type = unassigned DNA; note = element_aac1340
  misc_feature 1: note = core
  misc_feature 2..85: note = LE
  misc_feature 86..1102: note = CDS
  misc_feature 1103..1386: note = RE
  misc_feature 1141..1378: note = bridgeRNA
caatggaatggactccccccacctgacggcatcgagtgtgccagactgaagtttccatcaaacagtcgaaggggaaggagtcgagatgaatattacgcgtattggcattgacttggcaaagcaggtctttcaacttcacggggtagatcatcatggcaaagtgttggttcgcaaacaactacgacgtgcgcaaatgctggcctatttcggcaagctgacgccgtgcctcgttggcatggaagcctgcggcagcgcgcactactgggcgcgcgaactcggtcgtctcggtcacgacgtacgcctcatggctccgcagttcgtcaagccttacgtcaagcgtggcaagaacgacgccaacgacgccgaagccatctgcgaagccgtcagccgccccaacatgcgctttgtcaccgtcaagaccgtcgagcagcaagtcatgcaggccgaacaccgcattcgcgcccggctcatcaagacccgtaccgcgcttagcaacgagatacgcggactgttagctgagtttggcatcgtcgtaccgacctcattagggcagcttcgccgtgccctgcctgagctgctggaagacggcgagaatggcctgttggggcatttccggatgttgctcgccgaactggccgaagagctgcgcagtcttgatgatcgcctcaaggtttacgacgtgcgtctggcacaacacgcgcgtgcagacgaccgggtcaagcgcctgctggcggtggaaggtatcggcccggtgagcgcaagtgcgctggtcgcggcggtcggcgacggcaaacagttcggcaaaggacgcgatctcgccgcctggcttgggctcacgccgcgcgaacattccagcggcggaaaacagcgcctgggtgggatcagcaagcaaggtgacaaacatgtccgcacgttgttgatccacggcgcccgtgcggcgatgaatgctgcggtcaacaaggacgacccgcgcagccgttgggtcgcaagccttgcggcgcggcgcaacaagaacatcgcgacggtggcactggcgaacaagaacgcgcggattgcttgggcgattctgagccggggcgaggattatcgggtatcggtgtaaaccgggtagtgcgtgtaaacgggttttaacaggagtcttcacacagcgattgcgtagcaaaacgagatgatggcgaacaggtcagaccggcgcgggtgactcagattattgcgatggctcactaccctgagtaacgggcaaagccgctagggcgatttgaggctcgcgcgcgaattccatcatggctcgggtcgatcagacccaataggaagccggatatacggaagcagttgcaccaaaaaccatcaacacggattgcttgcaaaccggggggagtccatata

SEQ ID NO: 6878 - DNA, 1487 bp, unidentified
  source 1..1487: mol_type = unassigned DNA; note = element_aac8e77
  misc_feature 1..2: note = core
  misc_feature 3..155: note = LE
  misc_feature 156..1190: note = CDS
  misc_feature 1191..1487: note = RE
  misc_feature 1225..1485: note = bridgeRNA
agatggtatggacgcctcccacccgctgaggccagcgaggtctgccgagcagcaggaataccgctgaccaggggatcagggaggcctcgcgtcacacggcatcgaagtgcccaattggcgctgcttgcaacatcgcctgaagacggaggcctcagatggatcgtacgacttacggcctggacctggccaagaacgtgatgcagctccactgggtggatgcccagaccggggagatcaagcgcaagaagatgccgcgagcgaagctggcggagtactttgcaccgctgcagccgacacgggttgccatggaagcctgcggcagcgcccaccactgggctcgcgtgcttggcgatctcggccaccaggtggagctgctgccagcgcagcacgtcaaacctttcgtccgcagcaacaaggatgacgccgctgacgcgcgggcaatctgggtcgctgcacagcatgaggacatccggcgtgtaccgataaagagccgtgagcagcaagccgtgctggcggtgcatcgcacgcgatcgcactgggtcagtgtccgcacggcaacggtcaacgcgcttcggggcctgctctacgagttcggcgttgtgcttcgtggcggacgcaatgcaggcctgaaggcgctggcgcagcagcgcgctgagatcgacgcgcagctgccagcaacgttgcaagtcctggtggacgggcaactggagatgctggtgcaggtggagcagcgcatcgaagctctggagcaccaacttgcagcactgcagaagcaaatcgacagcgcccgcacgctgcgcgaggtgccgggtattggactgctgggagccacagcgctggcggccacgttgggcgatggaaaggactggcgttcgggacgcgagttctccgccagcctgggacttgtgcccgcgcatagcggcaccggtggcaagacgcgggtgggcaagctctccaagcgcggcgactcctacctgcgcactttgttgatcaacggggcgcgctcggtcatcgagcgcaccaagcaccagccgctgtggctcgaaaaaatgctggcacgacgcccggtgaatgttgttgtggtggctcttgccaacaagatggcgcgcacggcctgggctttgatagctcatggtcgtacataccaacgggaatggaagagtaatgtgcccatggcttgtgcctcgtgattgattgatttgtagccaactcaacaaccggagtgatatgccaaagagtgcgtgagtcgagtcgatgaagtgatggcaaagcggttggaccgcgggtcgggtaaagctgaacgacaacttggacgggcaggcaagcaaagtcctattggcagatgagcaccgaccttgcgaatgaccatcaaggccagcagcgggctcatgcctggactgcatcagtaggccggatataagaccgcagtgaattccgctgagtcagagcttcaaaaattcgctcgccacacgggaggcgtccatata

SEQ ID NO: 6879 - DNA, 1570 bp, unidentified
  source 1..1570: mol_type = unassigned DNA; note = element_aad1ef0
  misc_feature 1..2: note = core
  misc_feature 3..248: note = LE
  misc_feature 249..1424: note = CDS
  misc_feature 1425..1570: note = RE
  misc_feature 3..226: note = bridgeRNA
ctcgtattataaagtagtagtgtttatagaccctctccaaggtctgtatgctatactattagagatactgtggattgtttttcgcctcctaccacttgatggtttatgaaaggctacaaccacagtctctttgtacatttgttaatcagttagataccgcatgacggtttatttagaacgaggttacaatcgcaaggagtaccagtggttctaaacagtatcaaatacatttcaaaggagtttttattatgatatacgttggaattgatgttgccaaagacaaacacgactgctttatcactaactcagacggtgaagtattatttaagtcttttaccatcgctaacaatcgcgaaggttttgaaaccttatttcaaagaattcagtctgtatcagatgatttaaccaaagtaaaagtaggactggaagccactggacactatagttacaatcttctgggatttcttcttgataatggtttgccgaccttcgttatcaatccgttacatacaaatctttacagaaaaagtctaagccttagaaagacgaaaacggataaagtggattcccataccatcgcttctatgatcatgtctgatgtaaacttaaagtcctactcagatacatcttaccacaacgaaaagctaaagtcattaactcgttatcgttttgacaaagtaaaagaacgggcaaaactaaaatcttccgtttccagacttgtgtgtatccttttccctgaattggaaaagctcgttcctcagcttcacatagcatccgtttatgctttattatccgaatttccatctgctcatgctgttgcatcagcacatcttaccagacttacacatctgctttctgaaagttctaaaggtagatatggtaaagatatggcaatcatctttcgtgaagcagccagaaattcaatcggatcgaatatgcctgcaaaatctctggaattaaagcataccattaaactcattcgggaactaacttctgaaattgacgaaattgaaatcgaaatcaaatccattatggatgatatcaattctccaatcctcactattcccggtatcagttatagaatgggggctatgataattgcagaaatcggtgatttcaatcgttttaactcagctgataagatacttgcttacgctggaatgtctccatccacctatcaatcggggcaacttgataactgttattcacatatggaaaaacgtggttctcgctatcttcgatatgccctttacaatgcgaccaaatatgtctgccattgggatccaacgtttgctgaataccttgcaaagaaacgagcagaaggcaagcattacaatgttgctatatctcatgccgtcaaaaaactggttcgagtcatttatgcaatggaaaagtcagggcaggtgtacaacaaagcatcttaattcttttttgcaaatatctccttttttgagtgtcgaaaacgacactctgtttgtcatgcagttttcaatgttcaaatatatctgaaatgcatttctgcaattcattcaaaaaattttatttttagacttgacttttaatagttagt

SEQ ID NO: 6880 - DNA, 1294 bp, unidentified
  source 1..1294: mol_type = unassigned DNA; note = element_aaf8d2b
  misc_feature 1: note = core
  misc_feature 2..86: note = LE
  misc_feature 87..1046: note = CDS
  misc_feature 1047..1294: note = RE
  misc_feature 1054..1292: note = bridgeRNA
taatggtatggaccgtcccgcccctctaacggcatcgcaatgtgccagaatggagttattccaatcgaagaaggagcgagacggccatgaagtataatagtgcaaaagatgagatcaaagtagtgggtattgatttggcaaagagcgtgtttcatgtgcatggggttgatgagcatggccgggtggctgtgcgcaaaaggatgggtcgaaacaagctggcggcgtttatggtgcagcttccgccttgtctggttggcatggaggcctgcggtggatccaacgactgggcgcgcaagcttgcagccatggggcacgatgttcgtttaatcagcccgcagtttgtgaagccgtatgtaaagagcaacaagaatgacatggccgatgcggcagcgatttgcgaagcggtcagtcgcccgaatatgcgctttgttcccatcaagagcgtggaacaacaagacattcagagtctgcatcgtgcgcgctctttggccgtgagccaccggacggcacaagccaatcagacgcgtggattactgatggagtacggcattgttgttgccaagagcattgccgcgctgcgcaagggtatccctgagatactggaagatgccgataatgcgctatcgccgatgttccgggagttgctgtgcggactttgggatgagtttctcaggctggatgctcgcgttgccgggtatgatgctcagatcaaatatttgagcgagcagagcgatgtttgcacccggctgatgacgattcccggtatcggtccgatggtatcaacggccctggttgcagcggttgccgatggcaagtcgttcaagagcggcgacgtctatctgcgtaagctgctgattcatggagcgcgggcggccttgcgctgggcggacagaaagcatgaccggcggagccgttgggtcagcgaactcaaagatcgaaggggtcagaatatcgcagcggtggccttggccaataagacggtgcgcacggcgtgggtattgatgaccagaaatgaagaataccgaacagcttcggcaacagtgtaaacgggagatttcaacgaagtgcgtggattgagtgagatgatggcgacaaaggcagacagctgcatttccaaaagcctgacggggacaggggccgcaagaggccgctattgtgatgaggcaggaaatgtgcagcgaattccatcagggccagaagctttcccgcttcattcaaaggccggatatatgtgtgcaacttttcctttgttacccttcaaactttttccttgcaagacggggcggtccatata

SEQ ID NO: 6881 - DNA, 1536 bp, unidentified
  source 1..1536: mol_type = unassigned DNA; note = element_ab03241
  misc_feature 1..3: note = core
  misc_feature 4..241: note = LE
  misc_feature 242..1420: note = CDS
  misc_feature 1421..1536: note = RE
  misc_feature 8..223: note = bridgeRNA
tttcgtattattaggtcaaccagagatttctggttggcctatttttatggctgttttatgatggcggtagccgggagaacgcaggctgactagggtcaacgaacccgttgcaaaaactgttctcctactacctccaatgaccatgtttgggctggttggggcatttgacctcgtatcacaagcgaagctatgggtttggagccatcgtaggattgccggcaaattattgtaggaggttgttatggagcgagtagtaggtgtggacgttgcaaaaggaagtagcgtgattcaagcctttttgacacggaatgtgccgtacgggaaattggagagcatctcgcacaaagaagatggatttgatcgtttaaacgaacttctggctcaattaaaggcagagacagcaagcgaccccatcgtcgtacttgaagcaaccggacattatcatcgtggtcttactgattatctagagcgcagtggatggacatacttcatcgttaatccgttgcaagcgaaacgagcaaaagggacacatttacgtaaggtaaagacggatgctgcggatgcctggcatttagcggagatgtactaccgaggcgatgtaatgccgcatcgcagatggaatgagacctatacggagcttcagcatatgacccggcaccatgaatttataacgggtttgttcgtgcaagcgaaattaaatatgagatcgttgttggatcaagtatttccagcctatgaaaagatctttagcaatctatactctgtcacctctttaaaggtgctggctcattgtttggaaggttgtgttggagggcatggcgaagtaattaaattgaacgcaggaagatcacattccaagcggtgggtaaaagagaaagtggaacgactcgaggaagctctcattcactggaacgagcagccgaaaagtcgatcccagactgttattctccagggtatggtcgctttgctgctatcgttttctgagcaactaagtgaactagaggagcaaatgaccgaaatagcattacgtctacctgaggtagcgttggtgaaaagcataccaggcattggagacaaactagccgcagtaatcgtcgctgagatcggggacgtacgacagtttaatgatccgaagaagcttgttgctttcgcaggtctagatcctgccatattcagctcaggtaaatttacggcaacgagtttacggattacaaagcgtgggtctaagaggctgcgtcgtgctttgtatttagcggtgcagtgcgccattcgaaaaagtgcgaattcgagaattcaggagtactacaaaaagaaaagagaagagggcaagccctacaaggtggttgtgatcgcttgcgccaacaagcttctccatcacatctatgccatcctcagtaagtgccagccctatcgaacctaagtacccatatttacccataaccttcacgccaatgaaggttatttgtcatgcttaaaaagagtataccagcaaaagtgctaatgaccaatacgaatgacttgacaagtattagctgg

SEQ ID NO: 6882 - DNA, 1351 bp, unidentified
  source 1..1351: mol_type = unassigned DNA; note = element_ab04a24
  misc_feature 1..2: note = core
  misc_feature 3..73: note = LE
  misc_feature 74..1093: note = CDS
  misc_feature 1094..1351: note = RE
  misc_feature 1121..1347: note = bridgeRNA
ttaatgagatggtcagcccggtccctcctcggcgttaggctgaggagggatcttcctttttcggagccatctcatgaacgaagtcactgtcattggcatcgacctgggtaagcacagcttccatctgcacgcacaggatgcggcgggtcggatggtttttcgcaagaagctctcgcgccagcagctattgaggacgctggcgaacgtaccttgctgtcgtgtggtcatggaagcgtgtgcgggttcgcattggctggcgcgtcagctcgccggcatggggcatgagccgagactgatctcgccgcagttcgtccgtccgttcgtcgttgggaacaagaacgacttcggcgacgcgcaggcgatctgcgaagcggcctgtcgacccagcatgcggttcgttagtcctcgcaacgaggcgcagcagacggtttcggccatgcatcgcctgcgcgaacggttggtgcgtgagcgcacggccacggtcaaccagattcatggctttctgctcgagttcgggatcagtctgccgagaggcgcagcgctgatgagtcgattgcccacagtccttgaccacgagacgctgcctccgcgcctggtcgggctggtcgtgcgcctgcacgcgcaggtccattacctcgaggaacagatcaggcaggtcgtacaggacctaaaggcgtcgctgcgcgaggatgacaagggtcgtcgtctgctcgagattccggggattgggcccatcacggccagcgctctggcggtcgaactcggcgatgcgcggcagttcgccaatgcgcggcagttcgccgcgtcgatcgggttggtcccacgccaatacagcacgggcggcaagcccaccttgctcggcatcagtaaacgcggcgaccgcaaccttcggcgcctgctcgtgcagtgtgcgcgagcggtgatgcaacataccgcctcgcgcaccgacgccctgagtctgtgggtcaaaacactctcgacgcgacgccactcgaacgttgtggcctgcgcgctggccaacaagctggcgcggatcgcctgggccgtcctcgcaaggggcacacattaccaggcgcgtgcgctgacgacctgagcgcgccgcagcgctgtcaccgcctcgtcccgcctgggtttgcgacgtggaccacgtgatgaaacaaacggctcaacggcccggcgaacaccctggtaaacaaaacagcacctgatgctgcgggctttttgaggatcgccgggcgcggctctcatcgaggagcggggaccagcctccccatcatgactccggatagatttgcgcaacccccccttgtttcaaaaccgaccacgttgcaattaccgggctgaccataga

SEQ ID NO: 6883 - DNA, 1535 bp, unidentified
  source 1..1535: mol_type = unassigned DNA; note = element_ab082cb
  misc_feature 1..4: note = core
  misc_feature 5..262: note = LE
  misc_feature 263..1525: note = CDS
  misc_feature 1526..1535: note = RE
ctcactggtgcaccatccctgtgtcagtgatcgtgtgatcgctgatgcgcccgaggtgctgtcgggtcatcgcccggctcgcttgacacggtcgatgtccaccgtgagatctgcgagatccgacggtcacccgggacgcgcagaccgtcgacagggctgagcgcccccgagcgccgatcagtgagcgaagcggcagccgcgtcccggaaccatcagcacaagagggcgcctccccactgggactagcagcgaggaggctgacgtgaagtctgccagcaccaccccgatcaccgcactgcccgacgagccgcccaacagcgtgaccggcggtctggactgggcgcgtgatgatcacgccgcgtcggtcgtcgacgcgcgcggccgtgaacaagcccggcacagtgtcgagcacagcgcggccggcctggccgaactcgtacgcgtgttcctcgacgcggggtgccgtgaggtcgcgatcgaacgcccggacggaccggtcgtcgacgcgctgctcgcggccggcatcaccgtggtggtgatcagcccgaaccaggtgaagaacctgcgtggccgctacggctcggccgggaacaaggacgaccgtttcgacgcctacgtcctggccgacacgctgcgcaccgaccgggcccggctgcggccgctgacaccggacagcccagccacgatcaccctgcggcgcaccgtgcgggcccgcaaggacctcgtcgcccaccgcgtcgcgctcgccaaccagctgcgcgcgcatctgcgcaacgccctgcccgccgcggtggggttgttcgccgcaatcgacagcgcgatcagcctggccttcctgacccgcttcgacacccaagaccgcgtcgactggctctcgcccaaacgcctggccagctggctggactcggtgggctacagcggccggaccgaccccgccgtcctgcacgcccgcctggccggcgcaccccgcggagccaccggcacccaggccaccgcccacgcccacatcacccacgccctcgtcgcggtgctgcgcggcctgctcgaacagatcaccgctctcgaggcccagatcgacacccagctcgacgcgcacgccgacgcccacatcttcaccagcctgccccgcgccggccgcgtgcgcgccgctcgactgctcgccgagatcggcgactgccgcgcccgcttccccacccccgacgccctgatctgcctcgccggcaccgcaccctcgacccgccaatccggcaaactgcgcaccgtcaccttccgctggtcctgcgacaaacaactgcgcgacgccgtcatcgacttcgccgccgactcccgccacgcacacccctgggccgccaacctctacaaccgcgcccgagcccgcggccacgaccacccccacgccgcacgaatcctcgcccgagcctggctctacgtcatctggcactgctggcacgacggcgtctcctacaaccccgaccaccaccacgccctgcaacgccttctccaagatcaacaggcggcagcttgacacagggctt

SEQ ID NO: 6884 - DNA, 1429 bp, unidentified
  source 1..1429: mol_type = unassigned DNA; note = element_ab089dc
  misc_feature 1..2: note = core
  misc_feature 3..130: note = LE
  misc_feature 131..1147: note = CDS
  misc_feature 1148..1429: note = RE
  misc_feature 1192..1428: note = bridgeRNA
gaatgaaatgaacgccccccacttcggccggtgaggaaatacaggaaggtggatcctcgcgggccgacggcatcggagtgcccgagatgggagatcatacgatttcctaaggcaaaccggaggatccacgatgaactatacgacagttggtgcggatatcgccaagaacgtcatgcagttgtattgggtggatcccgttactggtgagatcgtcaccaaggcaatcaagcgagccacatttcttgagcacttcgctaatcgctgcccctgcctgataggtatggaagcatgcggcggtgcccaacattgggcccgaaggctgcaggaaatgggccatcaggtcaagctgataccggggaagtttgccaaggcgttcaatattcgtaataagaacgacgctgccgatgctcgtgccatctggatggcgacgcagatgcccggcaaatccgtggcaatcaagacagaggcccagcaggcagtgcttgcgctccatcggatccggcaacagaagatcaagtttcgcacgatgcagatgaactgtctgcgtggcctactgaccgaatatggcgaagtgatgggcaagagtcgcgcggcattggacaaagcaattcccggagtactggcgaagctggccgagcgtctaccggccatgctcatcgagtcattgcgcgaacagtggaatgaccttcaaaatctcgacaggcagatcgccgagattgagcggcgcctgcaggcatggttgaaggaagacgaggcatgcaggaagatcgccgcgatcccgggtgtcggactcctgactgccactgccgccgtcgcaacgatgggcgacccaaaagcattcagcaacggtcgcgaattcgcagcctggcttgggctcgtaccaaagcaggtgggcaccggaggaaagaccatactgctaggtataagcaagcgtggcgatgcctatttacggaccctgcttgtccacggggcgcgaagtgtgctctcgcactctcgggagccaggtgcatggatcgatcaactcaccagacggcgacatcgcaatgtggtaatcgtcgctatcgcgaacaagatggcacgcaccatctgggccgtccttgctcacggaaatccgtacgaaaagcgccaccacaacatagcggcgtgattgcgagacgcactgcgaagcagtaaaaccatttacaggacggattgcgcgtccaaaggttgcggtggcaatcgggtgtgatgacatgacaggtcggaccgggactcgcacagcctggattacagagagagccttaagctcgtagacggaatgaggcgcgagtcagcggatttcatcggggcccgcagcgaagcaagctgcaagaaggccgaatgtagaactgcaacctatcctgtcactcagcacacgcgaaaaccctcgcaaacggggggcgttcatgta

SEQ ID NO: 6885 - DNA, 1547 bp, unidentified
  source 1..1547: mol_type = unassigned DNA; note = element_ab08bb6
  misc_feature 1..2: note = core
  misc_feature 3..259: note = LE
  misc_feature 260..1423: note = CDS
  misc_feature 1424..1547: note = RE
  misc_feature 13..240: note = bridgeRNA
tcatttccctcttgtatgatgtatttacactgaaatacatcaatacgctcctttcttttcaactttgttataatcaatagtaacactgtggactttttattttatcatatagctttgactattttaaggagtgtattgccacagttttatctgaatcatttatagttggataagtctttgaactttcatgtcacgcaagtttatgatgataaaactaggtggacaaacacagtgattatttacaaaggagatgtttcttatgatttacgttggcattgatatcgccaagcaaaagcactttgcatccatcatgaactctgatggtgaaatccttgcagaaccatttgcatttacaaatgaccattctggatttcaaaaactactcaaacaccttgattcctatcctaaaatagaagtttttattggtatggaatctactgctcactatgcagaaaatctcacaagttttctcttcaaaagaggctttcaggtttgtatcatcaatcctattcaaacatcctcattgagaaaatcaaatattcgaaaaacaaaaactgactctgttgacacttatcttattatcaaggcactaaccttgaatcattatcgtttgttttcggaacgtgattatgattctttgcaattaaaaaacctctgtcgcttccgtcaaaaactaatgaaggcaaggacaaaggttaaaattcaacttgtatcttatgtggacttattgtttccggaacttcagtatttctttaaatctggaattcacggaaaggcttgttatgatttgttgaaaactcaacccaatcccgacaagattgcgaaaatgcatctcaagaggctcacaggcctattatctaagtcctctcacggacactttaaccagtctactgctgtacatttaaaagagcttgcatcgcaatctgtcggtataaagaatgataccttatctttgcagattttgcaatccataaaacaaatagaaatgtacactgatcaattggctgaagtggagcagtccatccatgacatcatggaacgcatggattctgtgattaaaacaattcctggtattggttctcttaacggagccatgattatcggtgaaatcggtgacatctctcgttttgaaaagccatgccaattgctcgcttatgccggcttagatccttctgtgtatcaatccggaaactatagtgctgcaaggaccagaatgtctaaacgtggttcaaagctactccgttatgctctaattaatgccgcatggcaaaccaccttggtaaacaaaaccttcaaagattattatgatttgaagatatctcaagggcgacgccattacaatgcactggggcacgttgctcataaactggtacgtgtcatccataagatgatgactgataatgtaacatttaatttagcctaagtcttacctattcaactatatttaattttgaaagcacctttttgatgctttatttcttatacccttttttaagtcaaaaacttttttaaatattttgatttttctattgactattcatagttgg

SEQ ID NO: 6886 - DNA, 1401 bp, unidentified
  source 1..1401: mol_type = unassigned DNA; note = element_ab17b32
  misc_feature 1..2: note = core
  misc_feature 3..78: note = LE
  misc_feature 79..1122: note = CDS
  misc_feature 1123..1401: note = RE
  misc_feature 1121..1388: note = bridgeRNA
tgttggggtggacggcctccatacggcatcaaaaagtgccagagtgagtcgttagacctcaaacgaaggagaccgtccgtggacgagattattcgcattggtatcgacacgtcaaaacatgtttttcagctgcacggcgtgaatgcggccgagcagccggtgttgcgcaggaagatgcgacgcaccgagatgattgagtttctcgaaaaactgccgccgacggtgattgccattgaggcgtgcggcagctcccatcactgggcccgcctgctgggttcgttcggtcacgaggtgaagctgatcgcgccgcaactggcaaagccctacgtgaagcgtggaaagaacgatgccgccgacgccgaggcgctgtgcgaggcgatgagtcgcccgacgatgcgctttgtgccggcgaaaaccgcagatcaacaggctgcgctgatgttggtcggaatgcgtagcaggctggtccggaacaagacccagctcgccaatgcgatccgcggctatgccgccgagttcggcctgaccgcagccaagggcatgtgtaagatcgcaccgctcctcgatcgcatcgcagcgaacgcgaccattcccgcgctggcgcgggaactcttcgcagcacacgccggtgaatatgcgcggctggaaaaggaactcagagaggtcgaggcgaaggtgctggtgtggcaccgtgccaatgaggctagccgtcgcctggcgcagatcccgggcgtcggaccaatcggcgcatcgctgctcatgatgaaaacgcctgcgccagagctgtttgcttccgggcgccaatttgcagcctggatgggactgacgccgaaagatcattcaactgctggaaaagcgcggcaaggcatcatcacgcgggctggtgacgaggcacttcggagtacgctggtggccggcgccaccgcgctccttcgatatgtcagggcgggaagcggaaagaacgcgtcgccctggctgcttggcatgctcaagcgcaagccgccgaagctggtagcggtggcgctggccaacaagatcgcgcggatcgcctggaagatgatggtgactggcgaaagttataggaaaaacgctgagctgccagagctggcatgcgcggcataggagatcagtcagtcacggtgagcaggcaatcaaagctaccgtgctgacctgatgcgtgaacttgcaagaaatagcagatggtagatcgatcgatccaaaacgcgtgacactccgcaagagccaggggccatttaggtcgcttacctgtttggagcgcgcgtcgcggaaaccatcttggccagcgttcatgtgcgagcgcaataataggccggacatatgaacgcatgcgatccgatcaaactactgcccacatcttgcagggaggaggccgtccacata

SEQ ID NO: 6887 - DNA, 1450 bp, unidentified
  source 1..1450: mol_type = unassigned DNA; note = element_ab19203
  misc_feature 1: note = core
  misc_feature 2..229: note = LE
  misc_feature 230..1435: note = CDS
  misc_feature 1436..1450: note = RE
  misc_feature 10..233: note = bridgeRNA
ccgttactatcttcacgtcccgataatcggggctttggccagccaggcccggcatgattctcgcccccagtcgcagttatgatccggggggtgttgtcaccgggcctggtgggtggctggtgatcgctaataggggtttggccgggatatcccgacgccgtccgtaacgtggatgccgagacttgccaccgttgttgcaggccaatccgctcactctgctcacacttcgatgcaagacactcaacaacgtgacgccgtcgatgtctttgtcggcgtcgatgtcggtaaaggccaccatcacgccgtggcactcgatcggaacggtaagcgcctgtacaacaaggctctacccaacgacgaggccaagctgcgcgccctcatcgccgaactcaagactcacggtcgactgctgttcgtcgtcgatcagccttccaccatcggcgcgcttcctgtagccgtcgcccgcgccgaaggcgtactcgtcgcctatctgcccggactggccatgcgccgcatcgctgatttgcacgctggcgaagccaagaccgatgcccgcgacgccgcgatcatcgccgaagccgctcgttcgatgccacatacgctgcgctcgcttcgactggccgacgagcagctcgccgaactcaccatgctctgcggcttcgatgacgacctcgccgctcaggtcacgcaaaccagcaaccgcattcgcggcctgcttactcagatccatccagcgctcgagcgtgttctcggaccgcgccttgaccatccagcggtactcgagctgcttgagcgctatccgtcgcccgccgcgctcgcccgcaccagcgagaagacgctcgccaatcgcctgaccaagctcgctcctcgcatgggcaaaggcttggcggccgagatcgttcaggctctgagcgaacaagccgtgaccgtgcccggcacgcaagccgctaccatcgtcatgccccgtttagcccagcagcttgcagccttgcgcaagcaacgcgacgaagtcgctgccgaagtggagcggctggtgcttgctcaccctctttggccggtcctgaccagcatgccgggagtcggcgtcaggaccgccgccagactcctgaccgaggtcgcccataaggcgttcgcttcggccgcccacttggcggcctacgcgggccttgccccggtcacccgacgctcaggctcatccatccgcggtgagcatccatccagacgagggaacaaggtgctcaaacgcgccttgttcctatccgccttcgcggccttacgggaccccgtctcgcgggcctactacgcgcgcaagatccagcagggcaagcgccacaaccaagcgctcatcgcgctggcacggcgacgatgcgacgtcctgttcgccatgctgcgcgacggcaccatttaccaacccaagtcagcccctaacgcttgacgaaggacatagggg

SEQ ID NO: 6888 - DNA, 1365 bp, unidentified
  source 1..1365: mol_type = unassigned DNA; note = element_ab1c633
  misc_feature 1..2: note = core
  misc_feature 3..75: note = LE
  misc_feature 76..1110: note = CDS
  misc_feature 1111..1365: note = RE
  misc_feature 1083..1353: note = bridgeRNA
tgatggggtggacgccccccgacggcatcgatgtgccaaagtggaggtgttgaacaccacttcagggaggcgtccgtgtcggaagttaccacaatcggtctggatatcgccaagcaagttttccacgcgcacggagctgatgctgctggtcgagcggtgttcagtcgccggctcacgcgaggcaagctgctcgacttcttcgcggctcacccgcggtgcatggtggcgctggaggcgtgtggtggcgcccatcactgggcgcgcgagctgcaggcgataggtcacgaggtccggctgattccgccagcgtacgtgaagccctatgtgaagcggcacaagaacgatgcggtcgatgcggaagcgatctgcgaagcggcgcagcgaccgagcatgcggttcgtggcggtgaagaccgagcagcagcaggcggccgcgctggtgttccgcacgcgagaccttgccgtgaagcagcgcacccagctcggcaatgcaatccgcgggcacctggccgagtatggctgggttgcgccgaagggatcggctcacctcgcgatgctggcggacctgcttgatggcggggagatcggcgagacactgcctgaagccgcgcggccgatgttcgcgatgatggtagatatgctggctgggctcgacgagcggatcgcggcgctggacaaggagatcgcgcgtcgcgcccgcgaggacgaggtggcgcgccggttgatgacgatccccggcatcggtccaattaccgcgaccgccatcgcagcgatcgcgcctccggccgaaacgttcgccaaggggcgcgacttcgctgcctggctggggttggtaccgaagcaggcgtcgaccggcggcaagcagaagctcggcgcgatctccaaaatgggagagcgaacgctgcgacggctgctcatcattggcagcagcgcggtcgtgctccaggcgagcaagcgaggcgcgccagcgggctcatggcttgaaggcatgctcgccagaaagccgcgcatgctggtcacggtcgcgctcgccaacaaaatggcgcgcaccgtctgggcattgctggtgagacaagaggattacagagctccggtcgtagtcacggcgtaagccgaggcaggccagaggcgtcggagggcgcagtcggtcgaaggagggtatggcacaacagtcggcgagacggggccggaagaaccagatagacccatcgtgtccaagaacacgcgattgtgaaatggttccggtccgcgaactcccatacgggccagcagcttcatcgctgcattacaggccggacagatggcagcatccgactctgtgtcagaacttccaaataccgcttgcaaccgaaggggcgtccacaga

SEQ ID NO: 6889 - DNA, 1390 bp, unidentified
  source 1..1390: mol_type = unassigned DNA; note = element_ab1e5ed
  misc_feature 1..2: note = core
  misc_feature 3..87: note = LE
  misc_feature 88..1119: note = CDS
  misc_feature 1120..1390: note = RE
  misc_feature 1127..1377: note = bridgeRNA
tgatgaggtggacgacgcccgctcccggcatctggtgtgccaaagggtgatcgttgaaaagcgaatcacatgaagggagtcaaccacatgcaagcttccacgattggtattgatctcgccaagagcgcgttccaggttcatggggtcgacgccaccggcaaggtatcgatctctcggcagctgcgtcggggtcagctgatcgatttcttccgcaagctgccgccgtgcctgatcggcatggaggcgtgcgcgacggctcatcattgggcgcgtgagctgacgaaactcggccatgcggttcggctgatgccggctagctatgtaaaggcctacgtgaagcgttccaagaacgacgctgccgatgctgcggcgatctgcgaagcggtaacgcgcccgaacatgcggttcgttccgattaagaccgtcgagcagcagtctgcgctgatgctgcaccgagcgcgtgacttgctcatccgccagcgcactcagctcatcaatgcgttgcgggcacacttggccgagatcggattggttgcggcgaccggtgtcgacggggtcaaatccctggtcgcgatcgtaattgacggtgcaaaccggcagcagctaccagaggcgatgcggctggccctgcagccgctcgtcgtgcaactcatagctctcggcgagcagataggtaggctggaacgaagcattcatacccaacaccgcgccagctacgagagccagcggctcgaaagtgtgcctggcattggcgtgataagtgcaaccgcgattacagcaaccgtcaccgatccgcacgcctttaaatcggggcgagacctcgccgcttggatcgggctcgtgccgcgccaacattcgaccggcggcaagcaacgcctcggaggaatatcgaagcagggggatcgctatctgcgccgattgctaattgtgggcgccatggccgtcatccggcaagctcggacacatccggaaaagcatgcctgggtgacgaagctgctggccaagaagccggcgaaggtagtcgctgtggcactcgccaacaaggtggcacgtatcgcctgggctatcctggtcaagggcggaacttatagggcgccagcgctattagcgcccgcctgaagggttcggaaatgggcgcatcaggatcgtcgagtcgaagcagcaaattgcgagggtgataatagcgtgatgcgaggcggtcgaactgtaggtcgggagaacccgataccggacacgggcatcgagcccgtcaatctgattgggacctggtctgcggataccatcagggccagcggtcatacgcgccgcgccaacaggccggacacatgacttgcacctgaccgcaagccgaacgccagattcctcttgcaacaagggcgtcgtccacaca

SEQ ID NO: 6890 - DNA, 1203 bp, unidentified
  source 1..1203: mol_type = unassigned DNA; note = element_ab20831
  misc_feature 1..2: note = core
  misc_feature 3..225: note = LE
  misc_feature 226..1188: note = CDS
  misc_feature 1189..1203: note = RE
  misc_feature 28..201: note = bridgeRNA
cttgtatgttcctcccggctcctacgcggtatgtaggagccagggtggagggaccgtcaagcatgcatctgcggataccagccgacagacgagtcgagcgatccccatcccgcacacgaacgtcgataaaggatcgtacggcccccaaggggatcgtcgatgtaggcaagctaacgtcggtgcggtaccaccccagcccctcaacaatagctgggagttgcgcagatgtcagatcgtttggccttcggcatcgatgccgattcaaagacccttgtggtggcccatcacggcaccaagggcagcgcccgcatcaccaattcagcgtcggccatcactaagtgggtgtccgccctgccggccagatctcgcattggagtggaggcaaccaatcgctaccacgagcttgtggttcaggctgcccagaaggccggtcacgccgtctttgtgctcaatccgcgcgacatcaaacattacgccaagggcgtggcctgccgcggcaaaaccgactcaggtgacgcgcaggttatcgcgcgttacatcgctaaggaggccgacaatctgcatgagcatgtcgcccgttcacctgcgcaggagcagctgcatgtgctactccagcaacgcgacagcctggtccggagcaaggcgaagttgaatctctcgctaggcgcgggagcgtcggagtcggccatctttgggcgcatcttcggtggtctgaaagaggccattgccatgctcgaccaacagattcagcaactgtgccgcagcggcgaacagcgcgacctgtatcggcggatcatgaccatcccggggatcggaccgacggttgcggcctttatcacccatcacatcacgcgctggccgttgaccaacgccaacgcgtggatcgcctgcactggcctggatcctcggcccaacgagtctggcggtagaactggacggcgtcggctgtccaaacagggcgcaccgatgctgcgccagatgctctacatggccgcaatggggctcaagcggtgtcgccgggggcaaccgctctacgacgagctgtcaaaacgcggtcaccccagcaccgccgtcttcaacattctggcaaggaagctggccaggatcgcctggggcgtgttcaaaagcggccgagacttcgatccggccatgctgaaggtcggtcaagcctgcttccagcaggcttgaccacgaacataggat

SEQ ID NO: 6891 - DNA, 1433 bp, unidentified
  source 1..1433: mol_type = unassigned DNA; note = element_ab20978
  misc_feature 1..2: note = core
  misc_feature 3..111: note = LE
  misc_feature 112..1152: note = CDS
  misc_feature 1153..1433: note = RE
  misc_feature 1182..1383: note = bridgeRNA
agatgggatattcggcttgagccccatctttgacggaggtgctgcgcttcgagctgatggtaaacgtggtctgcgtggagcagccacaagcatcagaaggagaagcgcagcatgaaacattatgcaggattggacgtctcggtgaaagagaccgccgtttgcatagtcaacgaaaccggcgagatctgccgcgaggtgaaggttgttagccaccccgacgacctcactgcggttctgaaggattctgcctggaattttgaccggatcggtcttgaagccgggcccttatcgcagtggctgttcgaggggcttgccaaagccggcttgccgttgatctgcatcgagacccggcacacgaaggcattcctgaaagcgcagcccaacaaatccgatcgcatagatgcccgcgggatcgctcagatgatgcgggtcaacctgttccgcccggtgcacgtgaagacaatgacaagccagaagcgccgggcgctgctgacggcgcgcaagctgctgcaggaaaaggcgatcgccattgagaacgacatccgcgggctcttgcgcaacttcgggctcaaggttggcatggtcggtgccgtgaaattcgaacaacgtatccgtgaactcgtcgatggcatgcccgatctggccgagatcatcgaaccgctgctcgacgcgcgcagcaagctgcgccggaattctgccgcccttcaccgcaagcttctggtgatcgtccggaatgatcaggtctgccgccggctgatgtcgatccccggtgtcggcccggtcgtggcgctggcctacaccgcgaccatcgacattccggcccgcttccgcaactccaaagcggtcgggccgattttgggtctgactccagtgctccatgagtcaggcgagagccgccgcatcggccggatctcgctgtgcggtgatggcatgatgcgaacgctgctttacgaggccgcgcaagtcctgctgaccaacgtgagaaaatggtcatggttgaaagcctgggcgatgaacgtcgccaagcggcgcggtcggcagaaggccgttgttgcgctcgcacgacgactggcggtgatcatgcatcgcatgtggagtgatggcacacagttccgctggaccaggaaggaaattatgccggttgcggtctgatttggtccgttaagtcaggaaggagacaacaagttccacttgccggtggagaagacgtccttcgcgggacgatggatgagggtgagttcgctgatcaaggagtaccgatcgcatcgcagcgatcaggacgcatgagagattgttccacctcattctggtgaatcccatggagggagggccagagagccgatcccgtagagaagcaagaccccgcgaaagacgtcagacgccagcaaagcggaaagctcgaaagtgcttgctctcaacccgccgaatagaga

SEQ ID NO: 6892 - DNA, 1388 bp, unidentified
  source 1..1388: mol_type = unassigned DNA; note = element_ab25628
  misc_feature 1..2: note = core
  misc_feature 3..86: note = LE
  misc_feature 87..1118: note = CDS
  misc_feature 1119..1388: note = RE
  misc_feature 1153..1375: note = bridgeRNA
gatggagtgaacggctcctgctctccggcatcaaggtgccataaggtggttgttggaaacagaccacatgagaggagccgttcgagatgaatattagcacgattggtcttgatatcgccaaaaacgtattccagatccacggtgttgaccaaggtggggatacggtgctgcgcaagcgtttgcgccggaaagatgttttagcattttttgctggtcttccgccctgcctggttgggatagaggcctgtggtacagcccatcactgggcacgggaaatccgggatcttgggcatgatgtccggttgatcccggcggcttacgtaaaaccttacgtcaagcgtaataagaacgatgcggccgacgcggaggcgatctgtgaagccgtggggcggcctacgatgaggtttgttccgataaagggagcagaacaacaatccgtgctgatgctgcaccgaaccagggatttgctggtgcgacagcgtacgatgctgatgaatgcattacggggtcatttggcagaatatggcatcgttactgcaaaaggggccgggaatgtgaagcgcctttttgaggtcctcgcacaggacaacgaggctttgattccagtactggcacgccgtgcgcttctgttgattgccgaccagctccaacaactttgtcggcaaatccaagccctcgaaatggagatcatggcctggcacaagaccagcgagcctagccaacgactagcaaccataccgggggtcggcccgatcaccgcgacagcaattgtcgccagtgttggcgatccgtcccagttccgatctgggcggcacttcgcagcttggcttgggcttgttcctcgccaaaactcttcaggcgacaaggagcgactcgggaggatctcaaagcggggagacaaatatatccgccgtctgctcgtattgggggcaacaattgttatccaccacgcgcgcgcaaagccatcccagcggacggcttggatcaatcagcttcttgcacgtcgttcggcgcggcttgtctcagttgcgttggccaacaagatggcgcgcatagcctgggttattctggccagaggtgaagtctatcgtgtgcccgcagcggtcgcggcggtgtaaaagggtcaaggcaagattgcatagtagaggtttttacgaattgcgagggtgacaatggcgtgatggaaaaccggtcgaaccggggagcggacaaacccgttagtgtctatgcgcttacagtgcgaaaattagattgggatccgatccgcggactgcatcaaggccagcggtcatatgcaccgcgttaaaaggccggacaaaagactgcacccgaccaaattgaccagatcgccaaagaaagtccttgcaatgcaggagccgttcacaaaa

SEQ ID NO: 6893 - DNA, 1429 bp, unidentified
  source 1..1429: mol_type = unassigned DNA; note = element_ab30f04
  misc_feature 1..3: note = core
  misc_feature 4..138: note = LE
  misc_feature 139..1158: note = CDS
  misc_feature 1159..1429: note = RE
  misc_feature 1186..1427: note = bridgeRNA
agatggtatggacgccaccctcctgccggagggaaaaaacagagaagggagaatgagttgagccctcgctgtacctgacggcatcaatgtgccaaagtggtagtcatgatggaccacaaccggtaaggagggctcggcatgaattgtacagtatttggcttggatttggcaaagcgtgtttttcaactgcactgggtggatatggaaacaggcgaaatctgtcggcgtcagctgaagcggaagcaagtggcggagtttttcgccaatcgcaagccctgtgtcgtggccatggaagcatgtggcagcgcccattactggggccggaaatcagcggcgctggggcacgaggtccgtctgattgccggtcagtttgtccgcccctttgcaaagagcaacaaaaccgatgtggctgacgcccaggcgatctgggaggcggtgcagaggcccggcatgaagtttgtcgccctcaagacgggagaacagcagagtgtattgaccctgcacaggatgcgcgaacagctggtgaagatgcggacaatgcaaatcaatcaattgcggggattgctctacgaatttggcgctgatttaccgcagggtcgcaggagagggatggcgagggtcacggaagagcttgcccggctcgaaggcaagctgtcagcgatggtcatcgaggtgatgcggcaacagctcaggcggatcgaggcattggatcaggacatcgccgggatagagaagaaactcttgctctggaagaaggaagatgaatccggcaagaaactgatggggatccccggcgtcgggcttcttaccgccacggcggcggtagccaccataggcgacgccaaaaagtttaaaagcggacgggaatttgccgcattccttggcctggttcccaggcagagtggtacgggcggccgagtgaaactcctggggatcggcaagcggggcgatgtatatctgcggacactgttgatccacggagcacgatcggtgattcagcatcagaaagagcatgctccctggttgaaaaaactgctgttacgacggcctcataatgcagtggccgtggcgctggccaacaagatggcccgcacgatctgggctttattggcccacgaccggacgttccagaaggattatgtggcaagcgccgcgtaaaaaaaagataaacctcaaccgaaaggggtatggacagctgattggttgcgcaggttgatgcatgaatgatggcggaacaggtcgaaccgcggggaagcaaacctgaatggtttcaagtccttcgaggacaataaggagatgaggacttccccggcgaattccatcagggccggcagacttctggtctgcaccacaggccgaatataagactgcagacagatctcaaacgccggcatcaagtgtctcttgccaaacgggaggcgtccatata

SEQ ID NO: 6894 - DNA, 1481 bp, unidentified
  source 1..1481: mol_type = unassigned DNA; note = element_ab35213
  misc_feature 1..2: note = core
  misc_feature 3..236: note = LE
  misc_feature 237..1460: note = CDS
  misc_feature 1461..1481: note = RE
  misc_feature 7..232: note = bridgeRNA
ctaatggggatcgaccacttcgtgccttgagagcgtgaggctggttgccgagccgccaacaggtgagcactgagagtcccaggacctcgagtcctagggttagatcgtgcccctgctggtcggtgaggtctcctcggacggctggtgggatgtcgtgcctcgagcactgatccattaggaagctgctggagtcctcgggctcatgaagtgaccgtcgacggagaggagcgaggtacatgatctttgtcggagtggactgggctgaggcccaccacgatgtgttcgtccagaacgaggacagcaaacggttggccggtggccgactgcccgaaggggtggagggcatcgccaggttccacgagatggtggggcaccacgccgaggagcccgaggaggtggtgatcgggatcgagaccgaccggggcctgttcgtgggtgcgctggtggccgccggctaccaggtcttcgctgtgaatccgatgtcgacctcccgctatcgggaccggcactcgacctcgggggcaaaatccgatcccggggacgccaaggtgctggccgacatggtgcggaccgaccggcacaaccaccgcccggtggccggggacagtgagctggccgatgccatcaaggtcctggcccgggcccaccagaccatgatctggtcgcggacccgccagaccaacttcttgcgctccaccctgcgggagttctacccggcggccctggtggccttcgacgacctgaccagcggtgatgccctcgaggtactgaaggcagctcccacgccgacgctcggggccgggctgtcccggtccaagatcgccgccgctttgcggcgaggcggtcgtcagcgtcgggtggatcaacgagccgaagagatccaaaaggaccttcggacaccacaacttcagggctcggccctggtggccacggccatggggtcgtcggtctcggcgaccgtgacggtgatcgccacgatgaacacccaggtggccgagctggcacgggagctcgaagcccattttgagcagcaccccgacgccgaggtgatccgatccctgccaggacttgggaccatcctcagcgcccgggtgctcggcgaattcggcgatgagccgaaccggtatgccaccgccaagtctcgcaaaaactacgccggcacgtcgcccatcacccgggcctcgggcaccaagcggaccgtcctcgcccgtcacgtccgaaacaagcgactggccgatgccgtctacttctgggcctttgcctcgatgagcgcttcacctggagcccgcgccttctacgactaccgcagggctgctggagacacgcatcatgcggcactccgaaccctggggaaccgcctggttggcatcctccacggctgtacggtcagccacacggtctacgacgagaccacggcctggggacaccgagcagagctggaacaagcgctggccgcttgacaagttacggccgtgggatgt

SEQ ID NO: 6895 - DNA, 1365 bp, unidentified
  source 1..1365: mol_type = unassigned DNA; note = element_ab37669
  misc_feature 1..2: note = core
  misc_feature 3..73: note = LE
  misc_feature 74..1090: note = CDS
  misc_feature 1091..1365: note = RE
agatgggatgaaaaggaggcgtaccttcctaatacgtgctcgaggcacagagatgctaggaggaaggtacgccatgaagacccacgtaggagtagatctccatcaacgattttgttacttaacggcggtggatgcaagcggaaagacgcgcaagcaggggcaggtggccaacgagggcgctgcgttgcgttgctggttgcggggtttggaacagccacgtcaggtggtggttgaggcgagcggcttctggccggcatttgcgcgggcggtggggccggagagtgagcggctggtgatggttcatccacaacgggtgaaggccatcgcttcggcgaagttgaagaacgaccgggtggattcggagaccttggcgcatctgtcgcgctgcgatctgttgcccgaggcgtggatggcggatacggggacccaacagctgcggctattggttcggctgcggattacgctgggtcggcatcgtgcccgggccaagaaccagttgcaggcagtgttgcatcaggaaggctttaagaagcctgtgacggacgtgtttggcaagcgcgggcgggtatggcttgccgggttggagttgagtgcggcgggtcgcctggtggtggacacatggctgcgcgaggtggatcatctggacgttgagttggccgtgcagacgggggagttggagcggctggccggggcggatgcgcgggccaggattctgcagacggttcctgggatcggcccgtatgcggcgatggtgattctggccgagttgggcgatgtggagcgctttcagaacaagcgggcgctggccagttatgcgggcttgacgccggtggtgcgagagtcggcaggcaagaggaagcggggcgggattacgcatcagggctcgaacacgctgcgctggatcatgctgcaggtggcgcaggtggctgcgcggtgctcgccgggggcgcggagttactatgcggggctgcgcgcgaggaagccggcgcaggtggccaggattgcgctggcgcggaagttgttgaccgtggtgtgggcgttgctgcatcacggagtgtgctgggacgaggattcattcacccgcggctgaaagcaggccatggaaaagtggaaagctgaaaaacgctttccactttcccacggccacgacgacgactacgggcaaaaggtattggcgacggttgcaaggagaacccggccagctcgttcatcctatgtccaccgggacaagtgcaagaccccgggagggccttctcagatggagcggccgggactcgaatcacccttgtgtgccacgagcacgaatagaagtctgtcggcaactattcgcaaataccgctggacaggtgcggcctttttcataga

SEQ ID NO: 6896 - DNA, 1404 bp, unidentified
  source 1..1404: mol_type = unassigned DNA; note = element_ab38190
  misc_feature 1: note = core
  misc_feature 2..87: note = LE
  misc_feature 88..1131: note = CDS
  misc_feature 1132..1404: note = RE
  misc_feature 1147..1394: note = bridgeRNA
tgatgacgtggaacggcccgcactcaacgactcgaggagtgatagaaagcgaccgttggagcaccaccatcagggaaggactattcgatgcaggaagcggtcaccgttggcttggacttagccaagcaagtttttcaggcccacggcgctgatgccgatggcgcgccgctgttcagccgtaagcttcgtcgagccgaagtcttgcgctttttcgagaagctaccgcgatgccttgtcggtatggaggcgtgcagcggagcgcattactgggcgcgcgagattggggcacttggtcatcacgtgcggatgattccgcccgcctacgtcgcgcccttcgtcaagcgaggcaagacggacgcgggagacgctgaggcgatcagtgaagcggtgacccgtaagaccatgcggttcgtcccgatcaagaccgccgagcagcaggcggctgcgatggtgctgaagacgcgatcgctgctggttcgccagcggactcaggccgtcaacgctctgcgctgccatcttaccgagctcggtatcattgccggtgccggcatcgccaagattgattcactgatcgcgattgttcgcgacgagagcgatacacgcctgcctccggcggcgcgctttgcgatgaccgccattgccgaccagatcgaggcgttgaagcagcaggccagcaagctcgaggatgcaatcgttcgtgaggccaaagtcgacgaagatatgcggcgcctcgtcactatccccggcgtcggcgccatcaccgcggccacaatcaaggcgctcgttcccgaccccggcggcttcaagtccgctcggcactttgccgcctggatcggactaacgcctaagcctcgttcgagcggcggcaaagagcggctgggacgcatctcccagatgggaaatccggatctgcgttcccttctcgtggtcggggcaacgtcagtgctccgctacaccgagaagaacgccaaggcgatgccctggctgacgggtattgtcgcgaggcggccttacaaggtcgcggccgtcgcgcttgccaacaagatggcgcggatcgtttgggcggttctgacccgaggcggggtttatcagcgcggcaacagtttagtggctgccacggtcacggcgtgaccttcacaaccgcttgaatgagctgacggcacggtagccggcagaagtgaggtgcatgaagtagacgatgattccttgggacgaaactccgacgcaagataggctgaaacccgtgacgcgcttcgagcgcgcacccttgattaagccacttgcgacgcgaacttcatcgaggccagcggtcataggccgcgctgataggccggacatatgaccgcaccgttcccaagtgatgaatcgactgccgacagctcttgctacgcgggccgttccaca

SEQ ID NO: 6897 - DNA, 1581 bp, unidentified
  source 1..1581: mol_type = unassigned DNA; note = element_ab4a58b
  misc_feature 1: note = core
  misc_feature 2..279: note = LE
  misc_feature 280..1455: note = CDS
  misc_feature 1456..1581: note = RE
  misc_feature 35..255: note = bridgeRNA
cgtataatccaattatcttagatggtaattggatttttcctttctccagattaactctgggtatttaagtccatctctgatatagtttgaaaaggcactgtggatctgtctctatttttttacagctttgactgttcggaggtgtctcagaccacagcttttcgtctattactggtaattagtttgttaacgcttgacgtttctatttacgtgtttacacagtcgaattctctgtggaagacttcagtgcctaaatactaattcaggaggtatatttctatgtccatgtactttgttggaattgatatttccaagtacaagcacgattgctgcattatatctgcagctgatcaaaaagtagtttcaaaattcacttttaaaaatgataaagcaggttttgaagaactacttactgttttaaattctctctccaatcctgaggatataaaaatagggtttgaatcaacagcccattatgccctcaatctcgaactcttccttgaaaatgcccaccacagcttcatggaagttaatccagttcttatcaaggaatacaaaaagtctacgaccttaaggcgaaccaaaaccgactctgttgactgcgaatcgatagctcgctggttaatgactgttgagtacaaaccccattcaaaaggattttaccactcttattctttaaagtcactaactcgtttacgagatcgattaattcgtcaacgttctttttatcttgtaaaaatcaccaatgtcttagaccatactttcccagaatttaagcctttttttaatgaaagactttccaaaacggctttgtatctacttgaaaactatggttctgctgaaaaaatggcacgcatgaattctgcttcttatgacaagttacgttgcatttccagaggaaagttttctattcagcagtttctccgcttaaaggagcttgttgccaatacagttggtgtcaacaattctatctttgacattgaattgatcagtttattaaccctctacaaatcgctggtcaaagaaatcgatactttggaatctgagattcataaacttattgaagaagtacatcctcattatctgaccattccaggaatcggtccaatttcagccgctgttatttatgctgaatatggtgatatttctaacttttctaatcccggtcagatgcttgcatttgccggaattgagcccggaataaatgattctggaacagaatctcacggcggcagaatggtgaaacatggttcatcacagctccgatacgtacttcttaatgcttgccttcctctaattcgttttgatttgacctttgcaacctattacgcaaagaaacgtgcagaaggcaaaaaacatcgagtagccattacacatgtagcaaagaaactgatcagagtcatctatgcattggagaggcaagatatagactttaacactcagaaacttcgctaaaatctgctctacatatatttgtctgttccatctgaaatacgatgtactcagatggtctattaaagttacctttttttaccatttaatatttttattaaaaaggtcttgactatttatagtttgaca

SEQ ID NO: 6898 - DNA, 1494 bp, unidentified
  source 1..1494: mol_type = unassigned DNA; note = element_ab4a71a
  misc_feature 1..3: note = core
  misc_feature 4..234: note = LE
  misc_feature 235..1440: note = CDS
  misc_feature 1441..1494: note = RE
  misc_feature 1..229: note = bridgeRNA
cccgttaccttctagacggccccgatcttggggctcccggccttctggcccggcatgactatgtccccctgtcgaccatgacccggggggtggtgtcaccgggccgggaggcaccggttgatcgctgataggggcaggagcgccggtccgctggcaacgctcttcgtaacgtggttgccggctgctggtgccgcgccttggccgggtagacaagaccctcatcggaggatgtacgtgatcgacacccgcgacgtggccgtcttcctcggcctggacgtcggcaagggcgaacaccacgccaccggcctcacgccggacggcaagcaggtcatcgacaagccgctgcccaacagcgagccgaagatgcgggccatgctggacaagctcgccaagaagtacggcaccgtcctcgtggtggtcgaccagccggcctcgatcggcgccctgccgctggccgtcgcccgggacgcgggctgcgaggtcgcctatctgcccgggctgacgatgcggcggatcgccgacctctaccccggcgagggcaagaccgacgcgagggacgcggcgatcatcgcggacgccgcccgcaccatgccgcacacactccgctcgatcgagctgacggacgagaccgtcgccgagctccacatgatcgtgggcttcgacgacgacctcgcgggcgaagtcacccgggtcgccaaccgactgcggggactgctcacgcagatccacccgcacttggagcgggtgctcggcccgcgcatccagcaccccgcggtgctggccctgctggagcggttcggctcgccgaaggcgatccgcaaggccggccgccgacgcctggtcaccctcctgcggcccaaggccccgcgcatggccgagcggctggtcgaggacatcttcaccgcgctggacgagcagaccgtcgtggtccccgggaccgaggcggccgcggtcatcgtccccaagcttgcggcgaacctgacctcgctgctggaccagcgcaaggaactcgcctcgacgatcgaagccctgctggagtcgcaccctctttccgagctcctgacgtcgatgccggggataggcgtcaggaccggagccaggatcctcatcgacgtcggcgacggcaccgccttcccgaccgccgggcacctcgccgcctacgccggactcgccccggtgacccgaagatccgggtcctcgatccgcggtgagagcccgtcccgccggggcaacaagcacctcaaacgggcgttcttcctggccgcgttcgcgtcgctgtccgatccggcctcccgggcctactacgagcgcaagaaggccgagggcaagcggcacaagcaggccctgatgtgtctcgcccgccgccgcgtcgacgtgctcttcgcgatgctccgcgacggcaccttcttcgagtcccacaccgtcccccaagccgcttgaccagacccatccgaacgagcccctaccgcttgacgaaagagataggggcacccc

SEQ ID NO: 6899 - DNA, 1619 bp, unidentified
  source 1..1619: mol_type = unassigned DNA; note = element_ab4bc21
  misc_feature 1: note = core
  misc_feature 2..245: note = LE
  misc_feature 246..1484: note = CDS
  misc_feature 1485..1619: note = RE
  misc_feature 6..220: note = bridgeRNA
tcgtaatataaggtcagccagttttttctggttgaccttttttcatgaggtcttatgatagcggtagtcggggtagaacgcagcgcccgtgggacttgatcccgtcagcaaaactgttcgccccctacttgtataaacatgttttaggctggttgggacatagatcccgtttaacaagcgaacctatggcattacaagaagcttaggggttaccgactaattcatttcaaggaggagattgatagatgaatccagtgattggtctggatgtttcaaaaggagaaagtcaggttcaagcctttttagataaaggaaaaccttatcgtaaaagctttagtgttaagcatactttggatggtttagatagcttattagttttcttagaggaggttacgaaagcatcagatggaatgaaaccttcggttatcttggagtcaactggtccttatcattcccctgttgtccagtttttagatgaacaagactatgtgtatattatggtgaaccctctagtgtctcatcgctcacgtagtaccaatcttagaaaggtaaagacagaccctgtagatgcgtaccaactttgcgagctattctacaaggaagagttagaacctcatagaaaaagaggaattcagttattaaatctgagaaacctcaccagacaacaggaagcaatagtaagtgtctcatctcaaacaaaattacaattacaaactctattagatcaagtatttcctgaatatcgaggtgtgtttggagatctatattccagagtctctttaaatgtccttaatacatttcctacatcagagtctgtattaaaaataccaaagtcagagttaatcaatatcatttcatccctgtgtaagagtcgatcaaatcagtgggctgaagagaaagtagagaaacttattgaggcggcagatagaaatccatttcagcataatatgtacgacagtcacatctttaatctaaagatattaattaatatcgttcttcaatacgaagagcacctatcaaagttagcagctgaaatagatgccctcgctgaagaaatggaagaatataagattatccaatctatccccggtatcggagaaaaaattgcggcaacaatcatctcagaaattggagagatagaaaggtttaatcaccctaaaaagttagttgcatttgccggaatagaccctagtgtttactcttctggtcgatttacagctactcaaaacaaaattactaaacgaggctctagccgattaaggcgatctctatatatggctgtaaggtgcggtattcgtgataccagaaagcaaaagacaacagatgagatcattgcaagaaacaagaaattacgagagttctatgacaaaaaacgcgatgaaggtaaaccctttagggttgccgttattgcttgtgtgaataagctcttacactggatctatgccttattaaaaagcaaaacagccttccaagatatagcttaagtactatatctaactataaaatgaaaaaccttccaaatatgtaaattaggaaggttatttgtcatggacattattagtatatcacgagaaaatatagttttttactgaaaaatgttgacaaactattagctggtt

SEQ ID NO: 6900 - DNA, 1394 bp, unidentified
  source 1..1394: mol_type = unassigned DNA; note = element_ab579c7
  misc_feature 1: note = core
  misc_feature 2..87: note = LE
  misc_feature 88..1116: note = CDS
  misc_feature 1117..1394: note = RE
  misc_feature 1162..1386: note = bridgeRNA
taatgggatggtcgcccctcccagaaacggcatcaaagtgccaaagtggcgatagcaatatcccactgagcgagaggagcgaccgagatgaacattacgacagttggcatcgatttggcaatacaggtctttcaggttcatggtgttgatgagcggggaaaggcggtgctcaagaaacaactgaagcgcgatcaggtgttgccgtttttcgccaattttcagtgctgcctgatcggtatggaggcctgtggcagtgcgcatttctgggcgaggaaactggaggcattggggcatacggtcaagctgatggcaccccagtttgtaaagccgtatgtgaagaccaacaagaacgacgcagccgatgccgaagcgatttgcgaagcggtcagtcggccaaccatgcgtttcgttccaatcaagacggcagcgcagcaggcgattcttgccttgcatcgtgcccgccagggctttgttaaggcacgaaccgcgcaagccaatcagattcgcgggctactggctgagtacggactggccattccccagggcatcagccacattgccaagcgcctgcctgaaatccttgaagatggagaaaatggcttgccaggcatctttcgccagctgattgaccgactgggaatgcacctcaaggaactagatcggcaagtcgatgaactggaagcgcagattcatatctggcacaaggaaagcacagccagcaggaagttggcggcaatcccagggattggaccgatcacggctagcgccatggtggcctcggtgggcgatgcgaagaacttcgagaatggccggcagttggccgcttggctcggccttgttcctcggcaacattccagtggtggtaagcaaactttgcttggtatcagcaagcgaggcgatagctatttacgaaccctgctgattcatggtgctcgggcggtgattcgcgtctccgagcacaaaaccaatcagggccgtggctggctggcagatgtaattgggcgacggaacaagaatgtggcggccgttgccttggcgaacaagaacgctcgtacgatctgggcgctgctcgcttatgaaagaaattacgagtcgaattacgggatcaccgcctaatcgcaacctcgaagtacatcagaagcagacttaacgggaggagtctcgacgattgcacaggcaatcatgacgtgatggcaagacaggtcagaccgtggtcggataaacctgatttcaacagagcacctcgagtgcgtgattctgtagaggattcgaccagcatattccatcagggacaagaggcttcggcctcaatcaatagtccggatctatggctgcaatctccacctgcaaaccatcattgattgaaagcttggcaaaccaggggcgaccatcta

SEQ ID NO: 6901 - DNA, 1436 bp, unidentified
  source 1..1436: mol_type = unassigned DNA; note = element_ab58fc2
  misc_feature 1..2: note = core
  misc_feature 3..84: note = LE
  misc_feature 85..1185: note = CDS
  misc_feature 1186..1436: note = RE
  misc_feature 1255..1375: note = bridgeRNA
taattcgatggactcgcccaagccgaggcgtctgtagcgccacggtggcattcttaagaagccaacgacagcgagggcgagtccatgaaaaagcatacgaccaaaaccgatctgtctccaaccgatgtgtcggcctgttcgaccgtggcggtggatcttgccaagaatatcttccagatcgcgggggaaaatcccctcggccaggtgatttacgagcaacggatcaagacacgggatagctttcaggcgtttctgctcacgctgccggccggcgtaacagttctgatggaaaccggtccgggcgcacaggcctgggcgcggttgctgcaggcgcgtggcaatccggtacgcatccttcccgcgcagcgtgtggctgaacatcgcagtggggcgaagaatgatcgtaatgacgtgctggccatattgcgcgcaggtcgagacctgaaaatcctggcggtgccgatcaaaagcaccgcgcagctggcgatgcaggccctgcaccgtgcacgacagggctatgtgcgtcggcgcacggcaatgggtaaccagatgcgcggcttactcctcgagcatggcattgccttggcgcagggtgaggtcagcctgagccgaaatgtgccagggatactggaggatgccacgcaccccctgccagaattgctgcgtgagctgattgccgaactgctgggcgaatggagtcagttgggtgaacgcatcaccgtgctgacggggcggctggaagccgcggcccgtgaggatgagacggcgaagcggctgatgacgatacgcggtatcggtccgatcatcgccacggcgctgctggccaaacaaaccgagcccgaacgcttcgccaacgcgcgccagtttgcggcctacttcggcacggtccccgaccagcacagcagcgggcagaaggttcgactgggcaagatgtgcaagcgcggcgatgcctatttgcgcagcttggcgattcagggtgcgcacgcggtattgaggcaattacggcctgactccgagcatccggatgactgtcgtctgcggcgctggttgagccgtcacggtcaaaaaggggcggccgtgcgactggccaaccgaaatttgcgaatcgtctgggtgctgctgcaaaacgaccagaattatcgccgccaaccaggcaatggccaggaggcggcgatgagtcattgattttaccgagtactgccaccgggcgctgagtcgcctcaacccatgctgaagaacattgaccctaggtcagaccgtcgcggatcgatgcctgcgctcctaccggcccttgaggcctcactgtaatcggcataccgcgagctcaaccaatttcggccagaagccaaagatgcttcctcgaacaggccttatacatagatgcaaccgggtatcggtgttcaaaaacgggttgaaagtgggggcgagtccataca

SEQ ID NO: 6902 - DNA, 1514 bp, unidentified
  source 1..1514: mol_type = unassigned DNA; note = element_ab5a351
  misc_feature 1..2: note = core
  misc_feature 3..545: note = LE
  misc_feature 546..1493: note = CDS
  misc_feature 1494..1514: note = RE
  misc_feature 7..251: note = bridgeRNA
ctaatgggggtggatcggcttcctgttagaggggatgctggtcgtgtgagccttcccggtcggtgaccactgccaggccctgaaacggtgtcggatttctacacgaagaccgtggcccggccgggcaaggatcacccgctggaacgcttctgggatgtcgtgccccctgaaccttgagggtgagcactgatccattaggccgcgtcagggtgatcacccaaaggttcacaccagatcgtcgagacgaccgaagacgaggtgaacgagtgtcatgatctttgtgggcaacgactgggcatcagatcatcacgacgtgtgcgtgatggatgaacacggcaccaccctggccacccgccgaatacccgagaacgctgccggcgccaccaccatgcatgaactgatcgcccggtatgcccaagagcctggcgaggtagtgatcgggatcgaaaccgatcacggcatgtgggtcaccgccctggtcgccgcgggctatcaggtgtacgcgatcaacccgttgtcggtgtcgcggtaccgcgaccgccaccatgtcgggggggggcaccaaatccgataaggctgacgcgaaaacgctggctgatctggtgcgtaccgaccggcacaaccatcggctcgtcgccgccgataccgtcgccgcggacgcgatcacggtgatggcccgcacgcaccagaacctggtgtgggcgcgttcggcgcaacagaatgtgttgcgcgcccaactgggcgcctactacccggccgcggtcgatgccttcggcggcgacctcgcccacaaagactgtctggcggtgttgcgtcgcgctcccaccccacgacagggtgcggcactatcggtcgcggcgatccgctcggctctgaaaaagggcggccgccaacgcaatatcgacacccgtgcccgcgacatccagcacgccctacgcggtggcggccatctgggtgcacccgaggcgctcaccgccgcctacgcggcgaccgtgacagcgaccgtggaaatgctggccgctctcaacacccagatcatccaactggaaaccactatggcccagtcttttagagcgcatccggacgccgagatctacctgtccatgcccggagtcggtgacatcaccggcgcccggatgctcggcgagttcggggatgaccccgaacgctatgccaccgccaagtctcgcagaaactatgccggcacctcaccacgcaccatcgcgtccggcaaagggcacgtcgtgttggcccgccatatccgcaacacccgactcaacgatgccgcccttcggatggcgcaaagcgctctgaccggcagtcccggcgcccgcgcctactacgacactctccgcgaccagagaaagtcccacagccaagcattgcgtgcggtcgccaaccggctcgtcggcatcctccacggctgcctggcccaccgcacccactacaacgaacacaccgcctggaaccaccgcaccaacctcgccgcttgacaccctgcacccctgggatgt

SEQ ID NO: 6903 - DNA, 1399 bp, unidentified
  source 1..1399: mol_type = unassigned DNA; note = element_ab635a9
  misc_feature 1: note = core
  misc_feature 2..87: note = LE
  misc_feature 88..1116: note = CDS
  misc_feature 1117..1399: note = RE
  misc_feature 1168..1391: note = bridgeRNA
taatgggatggtcgcccctactctaaccggcatcaaagtgccaaagtggtgaatgtgagttcccactaaacgagagaggcgaccgagatgaatattacaacagcaggcatcgatttggcgaagaacgtgttccaggtacatggtgttgatgaacgaggcaaaacggttgttcgcaaacggttgaggcgcaatcaggtagtggctttttttgttcggcgcccaccgtgcctggttggcatggaagcttgtggcggtgcgcattattgggcgagaaagctgcagacacaggggcacacggttaaactcatgtcaccacagttcgttaaaccgtatgtgaaggcgaacaagacggatgcggcggatgcggaagccatctgtgaggctgtgagtcgacccaatatgcggtttgtagcgatcaaaaatgctgaacagcaagccatactgtcactgcaccgagctcgacagggctttgtcagggcgagaacggcgcaagtcaatcaaattcgcggactactgaccgagtacggcatcacgctaccgcaaggcattagccatgttgcgaaccgcctaccggaaatcatcgaagatgcggcgaacgaacttcccagcctattccgagatttgctgcagcgcttgttggttcacttacgcgaactgaaccaccaagtgcaagaactggaagagcggattgatgcttggcatcgagccaacgaagccagtcagaaactggcgaagattccgggtatcggggcgctgacagcgagtgcgttgactgcctcgatcggcaatgcaaaaagcttcaagaatggtcgtgagttggctgcctggctggggttagtacccaggcagcactccagcggcgggaaaccgctgcggctggggattagcaagcgtggtgatgcctatttaagaacgttgatgatccacggtgcccgttcggcggtacgagtggccgagcgcaaatcgacgcctacggaccgttggtcgactgaaatgttagatagacgtcacatgaatgtagctgcggtggctcgggcgaacaagaacgcaagaatcgtctgggcgctgttggtacacggacgtgactacaaagcggattacaaattggcgggataacaaaccgccggacttaggcaaaccgacaattcacgaatacataaggaaccttccacgattgctcaggcaaacatgacgtgatggcaagacaggtcagaccggggcgggtcaaacctatttcacacagagagcgaaaagctcgtgaggctgttaaggcgcctgccagcgaattccatcagggacagaggctgtagcctcgatcaaaagtccggatctatggctgcaatctttacctgcttaccgtcatcaattgaatgcttggcaaaccgggggcgaccatcta

SEQ ID NO: 6904 - DNA, 1350 bp, unidentified
  source 1..1350: mol_type = unassigned DNA; note = element_ab6804b
  misc_feature 1..3: note = core
  misc_feature 4..82: note = LE
  misc_feature 83..1105: note = CDS
  misc_feature 1106..1350: note = RE
  misc_feature 1083..1339: note = bridgeRNA
tgatgatgtggacgcccctgcatcgacgggcagtcgctatgctgcttgtcggtcacccgaagcaggaagaggagcgtttacgatggcgatcacgacgattggactggacctggcgaagagcgtgtttcaggcgcacggcgtcgatgagaacggcgtcacggtgttggtgaagcggctgcatcgcaagcagatgctgccctttttctcgaagctatcaccatgcctgatcggcgtggaggcctgcggaacggcgcactactgggcacgcacgctcgccgcgatggggcacgaagttcggctgatcccgccatcctacgtgaaggcctatgtgaagcgcggcaaaagtgacgcgctcgatgccgaagcgatctgcgaagccgtccagcgtccgacgatgcggttcgtgccggtcaagacggtggagcaacagggcattctcatgacccatcgcgcccggtcgctgctggtgcgccagcgcactatgctcgccaatgccttgcgcgcgcatttggcggaacttggcttcgtcgcgaaccccggtatcgccaatctcgcgaagctggccgagcaggcgcttgccgacaagaacgccttgccagcctatgcccggacggcgctggagatattcgtccgccaggtcatgtcgatcagcggcgagatcgccatgctcgaccagcaactgatcgcctggcatgccgagagcgaggccagtcgcaggctcgccgcgatcccgggcctcggcattgtcacggcaacggctatcgccgccaccgtcaccgatcccgaccagttccgctccggccggcagttcgccgcctggctcggtctgacaccccagcagcattccaccggcggcaagacccggcttggcggcatctcgaagcaaggagaccgatacctgcgccggctgctcgttgtcggcgccactgccgtcatgcggcacatcaaggacaagcccacgcccatggccgactggatcagaaagctcgcggagaagaagcccttccggctcgtctccgtcgcgctcgctaacaagcttgcccggatcgcatgggtcgtgctgacccggaaagaagcctatcggccataccagctggcggcttgacgcaagacagttcacccaaattggcagtggcagtcgatgatgagtaacgatcgagccaatggtgaggaaaacccgtctgattcaatgcgcttcaaccgcgcgccagcttgatcagggacctcaccggcggatttccatcagggccagcggtcatcacaatgccgcacaaacaggccggacatatgaaagcaaccgatcaaaatcatcccgacaagaaagcccttgccatagggggcgtccacata

SEQ ID NO: 6905 - DNA, 1149 bp, unidentified
  source 1..1149: mol_type = unassigned DNA; note = element_ab69cfd
  misc_feature 1..2: note = core
  misc_feature 3..218: note = LE
  misc_feature 219..1142: note = CDS
  misc_feature 1143..1149: note = RE
  misc_feature 11..188: note = bridgeRNA
cttgtgtcttattaggctctatcgttgtaggtgagagcggagtgcggcaggccgtttagccgcagtgccaaacgagcacgagtaggagtcagtgccgccgcactccgtttctcctgccttctaagcccgaacagttgcccgagccgcgaactcgaacctcacaagcgtgggcattggcaggagagctctcgtccctgagtctactgcggagaatgtctatgcgtcgctttgtcgggatcgatgtatccaaggccgaactggtcattcatgtcctgccggaccaagtggcctggacccagtccaacacgccgcaagggcggcatgagctagtccagcgcctgtccacgctggcctgcgaacggatcgtgctggaagccagcggcggctatgagacggcggtactgcgggctctgcgccaggccgacctgccggcggtgcgcatgtctgcccagcgcccgcgtgcgttggccaacgcactgggcctgcacgccaagaccgacgccctggacgcgcggctgctggccatcgcggccgaacacatcccgaccacacccacgaccgtgttgccggagcacctgcagcagctacgcgaatggctcgacctgcgcaccaccctggtcggccagcgcgccgcccaccggcgccgcctggatcacatcaccagctcccacgtgcgccaccagtgcgagcaggtcatcgcactgctgaatgaacagatccgggcgctggaccggcaggtcacgcaacagaccaaaacatgttcgaccctgcccaaggtccctggggtcggagcgatcctgcgcgccaccttggccgcacggctgccggaactgggaacgctgccgccgcgcaagctcgccgccctggtcgggctggccccgttcaatcgcgacagcggcggctggaaaggtcaacgccgcatcaccggcgggcgcgccgacgtgcgacgggtcctgtacatggccacatgggcttccatccgcgcaggttcgcccctggccaacacctacgcgcgcctgaaagctgcaggcaagccgtccaaggtcgctatcgttgcctgcatgcacaagttcctgcgctggctcaatgccatcgcacgcgatcagacctcttacgcgcccccagtcatcgctgctgcatgacagttga

SEQ ID NO: 6906 - DNA, 1200 bp, unidentified
  source 1..1200: mol_type = unassigned DNA; note = element_ab6f453
  misc_feature 1..2: note = core
  misc_feature 3..222: note = LE
  misc_feature 223..1185: note = CDS
  misc_feature 1186..1200: note = RE
  misc_feature 28..198: note = bridgeRNA
cttgtatgttcctcccggctcctacgaggtatgtaggagccagggtggagggaccgtcaacatgttatctgcggataccagccgacagacgagtcgagcgatccccatcccgcaccttaacgtcgataaaggatctagcggcctttgaggaccgccgatgtaggcaagccaacgtggtgcggtaccaccccagcccctcaacaatagctgggagttgcgcagatgtcagatcgttacgctgttggtatcgatgccgattcacgaaccctggtggtggcgcgccacggcaccaagggcagcatccgaattgccaattcagcctcggccatcaacaaatggttgtcccgccagcctgcgaagtcccgtattggcgttgaggcaaccaatcgctaccacgagcttgtcgttcacgctgcccagaaggccggtcacgccgtcttcgtgctcaatccgcgcgatatcaagcactacgccaagggcgtggcctgccgcggcaagaccgactctggcgatgcccaggtcattgcgcgttatatcgccaaggaggccgacaatctgcacgagcatgtcgctcgctcgcccgagcaggagcggctgcacgtgctcctgcagcagcgtgacagtctggtccggagcaaggcgaagttgaatctctcgctgggcgtgggggcgtcggagtccgccctcttcgggggcatcttcagtggcctgaaagaggccattgccatgctggatcagcagattcagcagctgtgccgcagcggccaacagcgcgatctatatcgacggatcatgaccatcccgggaatcgggccgacggtggctgccttcgtcacccatcacatcacccgctggccgctggccaactcagacgcttgggttgcctgcaccggtctggatccgcgacccaacgaatccggcgcacggatcggtcgacgccgattgtccaaacgaggcaatgccagcctgcgccagatcctctatatggctgccatgggcctgacccggtcaaagggcggcaagcccctctacctcgccatccgcgagcgcggacacagcagcaccgccagcttcaacatcctggccagaaagctggccaagatcgcttggggcgtcttcaagagtggccgggatttcgatccggccatgctgaaggtgggtcaagcctgcttccagcaggcttgaccacgaacataggat

SEQ ID NO: 6907 - DNA, 1418 bp, unidentified
  source 1..1418: mol_type = unassigned DNA; note = element_ab77126
  misc_feature 1: note = core
  misc_feature 2..89: note = LE
  misc_feature 90..1127: note = CDS
  misc_feature 1128..1418: note = RE
  misc_feature 1179..1410: note = bridgeRNA
caatgggatggacccctcctcacctaagcggcatctaggtgccagactggtagttccgaccaccagtcaacggtaaagaggagtccaccatgaagagtattcgagttggcgtcgatttggcaaagctagtgtttcaggtgcatggggtcaaccgtgaggagaagcccgtgttacggcgcaggctagcccgtgacacctggatagatgagctgatcgaacaggtcgaacctggttgtgtgatcgggatggagtcatgtgccggtgcacatcattgggcgcgcctgctgcaatcccgtggttttacggtgaaattaatggcaccacagtttgtgaagccatatgtgaagagcaataagaacgacgccaacgacgcggaagccatatgcgaagccatgtcacgcaacagtatgcgcttcgttgcggtgaagcgtattgagcagcaggacatccaagcggtacatcgcgtgcgctcagagctcattgagcagcgtaccgccaaggcgaatcagattcgcgggctcgttgccgaatatggtttggtggcgccgaaagagatgacgcagctacgccgggcggtcccgatctggctggaagatgcagataacgggctgacgtatcggtttcggcgattgctgaggggcttgtggggcgatgtgctggtgcttgatagtcgagtcaaggaactggatcaagagatcgaattgattgcacagagccatcccttggccaagctgctgatgcagttgcgcggagttgggccgatcgtcgcgactgcgctgattgccgcagttggagatggagcacagttcaagaacggccgccagatgtcggcagcaatcggtatcacgcctcgtcaacatagctctggcggcaaagagcgattactgggcatcagcaagcggggagattcctatttgcgcgcgatgctgattcatggcgcgcggtccgtaatacggatggctaaggccaaagacaaaacggatcgcttgagccagtgggtcatgtcccttgcgcagcgccgccaccccaatgtggccgccgtggctttggcgaacaagactgtgcgcattgcctgggcgatgctgcggacgggaaaggattatcaaccggcccttgccatgggctgacgcccacgccaagggccggtcttgagtaacagcggcacaacgtaggaccagatcaaccacgattgcgaagcaagccgaacgatggcaaacaggtcgaaccggcgccggaaaagcccttgttggacgtagtgcggaaaagcacgtgtaagcgattgggaactggcgcgcgaatagcccatcatggcccggcatcgagatgcttgatgctgctgtaagaggccggatatacgtgagcagtcgatcctaccaaccaaagtatggcgtgcttgcaaccgaggaggggtccatata

SEQ ID NO: 6908 - DNA, 1407 bp, unidentified
  source 1..1407: mol_type = unassigned DNA; note = element_ab82e50
  misc_feature 1: note = core
  misc_feature 2..304: note = LE
  misc_feature 305..1354: note = CDS
  misc_feature 1355..1407: note = RE
  misc_feature 116..270: note = bridgeRNA
ctttaactttgcagctgaataccaagagtcttaagaactcttaaatataaaacgttaaatactacaattatagatgctaagaatatcagttttgcttacctttgttgtagaaaggaaggattaactgccagaggtcaacctgtctctttcgcgaggccatgagcctatgagtcgtgcaaggccctctggattctagctgcaaatgccaaataggaagatagactcgaagtctaattaaagtgatagccactcacagctttcttacagttaatcgcttccataattttaaaaccagtacaaaggtatgaaaaaaattattatcggcatcgacatttcgaaagaaaagatcgacgcaagtgcgattgatgtgagaaacagccacttaggtgtgctaaaacttgactatcaggcattcgagaatcgccctatgggcttccgtcgtatgttagtgtgggcaaggcatcttatcaagggcatcgttctggaggaggtcatgttctgttgtgagacgacgggcggctacgaccgcagtctctgtgactatctcttcgccaagggtcttgacatctggcgggaaagctcactgcagatcaagaagagctgcggccttcgcaagggcaaggatgacaaaacagactcgctgattatcgcagagtatgcaatgcgtcacatggacaaggctgtctattacgtgtctcccagtgagacggtccgtgaactgaaggcccttttgctttaccgtcgcaagctagagcaggaaaagacctcaaagaaggtgcgtgtggcagaacttaaggctaccgcagccaagagtaaatccatcagcttcatcctccgtgatgcccagaaaagcatccgaattctggagaagagcattagagactgcgagaagcagattctggccttgtatgacggtgatgaggatctcaagaagagctatgaccatctgacctccattagaggaatcggtatcgtcaatgcatcggctatgattgcttatacgaacaacttcaagaacatcactacatccaggaaactatcctcctactatggtatcgctcctttcagggaacagtctggcaccagtgtcaacaagaaggctatggtgaaatgctactcgaactcaatgctcagggcctatcttactcaagctgctgagaataccatcagggaacacggaatctaccataactactataggaggctgagcgagagaggcaaatgccatggcgtagccctcaataatgtcaagaacaagctgcttcacctctctgtatcactgatagcgaatgatatggactatgaggaaaaccatgaggccctaagaacgttaagaaagtcgcaatctacataattctcaatatatataatttttaacttaataaatttggtaaatatcataggaag

SEQ ID NO: 6909 - DNA, 1520 bp, unidentified
  source 1..1520: mol_type = unassigned DNA; note = element_ab8cf9e
  misc_feature 1..4: note = core
  misc_feature 5..253: note = LE
  misc_feature 254..1510: note = CDS
  misc_feature 1511..1520: note = RE
ctcactggtgcaccattgtcttgtcggcagtcgaagaccgccgatgcaccccaggtgccaccggatcaccgccctgctcgctcgacctggaggtccagactgagttccgcgggatccggcggtcacccgggacgcgctgaccgtcgacagggctgagcgccgccgagcgccgaacagtgagctcactggctgccgcgtcccggcaccgaaaaaaagggtgcctccccactgggctagcagcgaggaggctgtcatgcagtatgcccccgccacatccctgcccgccaacgcccccaacggggtgaccgcaggcgtcgactgggccagcgccgatcacgtcgcctgcgtggtcgatgcggccggcaaagtgaccacccgtttcaccgtcgcccacaccgacgccggactcaacgacctcacccgaggcctcatacaagccggagcggccgaggtcgccatcgaacgcggtgacggccccgtggtcgaggccctgctcgccgccggcctgaccgtggtggtgatcagcccgaaccaggtcaagaacctgcgctcccgctacggtgcggccggcaacaaagacgaccgcttcgacgcgttcgtcttggccgacaccctgcgcaccgatcgggcccggctccgccgactgacccccgatgacccggccaccgccacgctgcgggccaccgtgcgtgcccgccgtgacctggtcgcccaccgggtggccctgggcaaccagctacgcgcccacctgcagaaggctctgcccggcgccgtcggcctgttcgccagcctggacagcccgatcagcctggctttcctggcccgcttcgactgccaggaccgcgccgactggctgtcgcagcgccgcctggccgcctggttgggcagtgtcggctactgcggccggcagagcccggccgcgctgctggcccatctcaaaagcgcgccccgcggcgcgagcggcgatgacggcgccgcccgcgcgcataccactcgtgccctgctggccgtgctggctgcgctggtcgagcagatcaaggccctggaggcgcagatcgccgagcaactcgcggtgcacgccgacgcgcacatcttcacctcgctgccccgttcgggcaccgtgcgcgccgcccggctactggctgagatcggcgactgccgcgcccgattccccgatccggccgcgctggcgtgcctggccggggtggcgccctcgacccgccagtccggcaagcacaagagcgtcggtttccgttgggcggtcaacaagcagttgcgggatgcggtctgcgactttgctgccgactcccgcagggccaatgtctgggcggccaagttgtatgccgatgcggtcgcccgaggcaaggaccatccccatgccacccgcattctcgcgcgggcctggctgtatgtgatctggcactgctggcaggacggcgtcgcctacgatccggccgagcatggggccctccagaccctgctcaggcaagatcaatcagcagcagcttgacacagggcta

SEQ ID NO: 6910 - DNA, 1383 bp, unidentified
  source 1..1383: mol_type = unassigned DNA; note = element_ab8eb82
  misc_feature 1: note = core
  misc_feature 2..256: note = LE
  misc_feature 257..1357: note = CDS
  misc_feature 1358..1383: note = RE
  misc_feature 1..249: note = bridgeRNA
ctgtgaataccatgagaggatggttgcgggtggcgccctccggattggtctgacccacatttgccgaggccagcgtgccttcaatttgacccgtcggcccctctcgtcggggcgccgcccgcagccgtcggacaggggcgcaggcgtggcctaataggagcacgttcctcatcacggggagctcgtcacagtatcgtccgccttcccgccgccgtgcagcgcaggtaacgttaccggtgaaaggagtggtggagcggtgttaagaacccagcaagaagctgagacgggggtgggtgtcgtcctgggagtggacacgcacctcgatgcccatgtggcggtcgccctcgaccagctgggaagacgcctagatgccgtgagcgtcccggccgacgcgcgaggttacgaggcgctggtggggtgggccgaggggctcggacccgtggtgtgcgccggaatcgaggggaccagcagctacgaggccgggctcgcccgccacctgagcaggactggcataaaggtggtggaggtcgagagaccgaaacgccgccacctcgggcgcaacggcaagtccgaccccaaagacgccgaagccgccgcgcgggcggtcctggccggcgacgtggcaggtgtgcccaagagcggcgacggactggtggagatgatccgtgccctcagggcggcccggcgttcggcggtgaaggccagaagccaggccgccaaccagctccgcagcctgcgggttacggcccccgacgggctcagagaacgtctgcgcgggctctctacgaagcgtctcgtcgccgcggccgtccggttccgtcccggcgccctcccggaaaccccggaagaagcgacaaaggtcgccctacgctcggttgctcgtcgccaccgcgtcctctccgaagagatcgccgaactggacgcgcagctcgatcggttggtggcggaggccgctcccggcatgctcgcccttctgggcgtgggcacggaccatgcggcgacgctcctggtcgcggcgggggacaacccccagaggctgcagagcgaggcctccttcgcgagcctctgcggcgcgtcgcccatagaggcctcgtccggcaaggtcatgcgccatcgcctgaacaggggcggcaacagggacgccaaccgcgccctgcacctgatctgcgtggtgcgcatgagatacgaccggcgtacgaagctgtacgtcgcccggcgcacggccgaaggcaagagcaagcgcgagatcatccgttgcctaaaacgctacgtcgcccgggagatctaccgcgtactggtgtcgggcaccgcgcctccaccgatcgggtcaccgaccatggcagcgacgtcgatgtgaccggcgtcgcttgactataggagcgt

SEQ ID NO: 6911 - DNA, 1378 bp, unidentified
  source 1..1378: mol_type = unassigned DNA; note = element_ab93afe
  misc_feature 1..2: note = core
  misc_feature 3..85: note = LE
  misc_feature 86..1120: note = CDS
  misc_feature 1121..1378: note = RE
  misc_feature 1147..1366: note = bridgeRNA
tgatgcagtggacggctcccacccgccggcatcggaatgtgccaaagtgtggttgtcataaaccacagggaaataggagccgtccatgactgaagttatcacaattggcgttgatcttgcgaagaacgtttttcaggtccacggtgttgacgttgagggggccgtggtcgtctctcgacagttaaggcgatctcaggtgctgccctttttcaagaaacagccactctgtttgattggcatggaggcctgcgcaacagcccatcattgggctcggcaactgattgaacttggtcatgaagtgaagttgatgccgccgcactatgtgaagccctatgtgaagcggaacaagaatgatgctgctgacgcagcagccatctgcgaggcggtcacgcgaccaaccatgcgtttcgtctccgtgaagagtatggagcagcaaagcgtgttgatgctgcatcggacgcggaacttgctgattcgtcaacgtaccatgctgatcaacgcgatccgtgcccacatggccgaattcggcattgttgctccaactggcgtgccgcagcttaagaagctgctcaacatcattgccgataccgatgacggacggctgccgacggttgcgcgtacatgcctggaaagtttagccaaacagtttttgtcacttcacgaggaaatataccgtgccgagcagcacattctcgcctggcatcgatcaaatgaggtcagtagacgactggagaccatccctggtatcggcccgattatcgccagcgccctggcggcgtccatcaccgatcctgaagtcttcaaaaatggccgcgaattggccgcttggatcgggctggttccccgtcaaaactctacaggcggaaagcaacggcttggaaagatctcaaagcagggcgatcagtatctgcgctggctactcgtcgctggagccatgtcagtgatcctgcatgcgaaacggcgtggcgcgacaaacctgccgtggctcgccaatattgttgcccgcaagccagccaaggttgctgcggtggcactggccaataagaacgcccggattgtctgggctctgcttaggcaaggcggaacatatcaaaagcccgcgactgtgtcggcaacttgaagcccgtatggggcataaggagttcatgagtttggcagagtgaaagtgatgtaatgcaaaatcggtcgaaccgaggattggcaaaacccggagtggacacggcgcttcaagcgcgtgttagtgattgggacccaatccagcggatcgcattagggccagcggccatgtgtgccgcattaacaggccggacacatgtcagcacccgaccaatttgcaagaacgtcattttacacttgccaaaagggagccgtccacaca

SEQ ID NO: 6912 - DNA, 1540 bp, unidentified
  source 1..1540: mol_type = unassigned DNA; note = element_ab948b9
  misc_feature 1..2: note = core
  misc_feature 3..241: note = LE
  misc_feature 242..1420: note = CDS
  misc_feature 1421..1540: note = RE
  misc_feature 3..218: note = bridgeRNA
cttgtattatagagtagtagttattaaagcccctctccaagggctatgctacactgtaagggatgctgtggattggtttgaagctcctaccacaagatggttcacgaaaggttccaaccacagccccttacaattttgttgatcagttaaataccgccagacggtttatgtggaacaaggctacaaaagtaaggtgcactgtggatacagcatcacatatttatcgttggaggtatctgttatggtgatttctgttggcattgacgtctcgaaagataagcacgattgcttcattgtcagttccgagggtgaagtcctggcggatgcgtttacaattcccaatacgttggatgggttccactgcctgttgcagcgaatccaggattgtaccgcaccgcaggacaaaataaaagtagggcttgaggctactggacattacagctacaatctgctcgggtttcttcttgacaatggtctggccacctatgtcctgaaccccttgcgcacaaacctctacaggaaaagtctcagcctcagaaagaccaagaccgaccgggtggatgcgcgaacgattgcttctatgctgttatccgatgtgggcctcaaaccctacacaaatacagcataccacaacgaggagctaaagtcactgaccagatatcgttttgacaaggtaagagagcgtgccaagctgaaaagctctatcgcccggctggtttgcatcctatttccagagctggaaacgctggttccttctctgcatatcgcctctgtttacgccctgctggatgagtttcccggtgccaaacagattggtgctgcccatttgacgaggctgaaagcactgcttgaaaccgcctcgaaaggccgctacaagcgagatatggctgtgaccatccgggacgctgccagaaattcaattggctctcgaatgcctgccaagtccctggaattgcagcacaccatccacctcatccgtgaactggatactgaaatccacgagattgaagctgagattgagaccatcatgaacgagatccagtctcccattacgaccattcccggtattggctgccgcatgggcgccatgattctggccgaagccggtgatctctcgcgtttcgactcaccagacaaactgctggcttatgccggtatgtcgccatccacttaccagtcggggcaactcaaaaactgttacccgcacatggaaaagcgcggctcccgatacttacgctacgcactttacaacgcaaccaagtatgtctgtcactgggatccaacttttgccgattatctcgccaagaagcgtgcggagggaaaacactacaatattgccatctctcacgctgctaaaaagttggttcgtctgatatttgccatggagaaatccaggcagccatattgcccagctacttaagtgcagctacctgaatagccagcaggggtctgacaagacctcagctttgctataccttttttgagccatcgctttttcatcaccaccattcattttcggggttgacttttaatagttaat

SEQ ID NO: 6913 - DNA, 1358 bp, unidentified
  source 1..1358: mol_type = unassigned DNA; note = element_ab9cc8b
  misc_feature 1..2: note = core
  misc_feature 3..74: note = LE
  misc_feature 75..1103: note = CDS
  misc_feature 1104..1358: note = RE
  misc_feature 1099..1341: note = bridgeRNA
tgatgatgtggacacccccaccccaaccgtcgaatctggtttcaacggttccctggaagaaggagtggttggatatgtccggaatgatcattggcctcgatctcgcgaagagcgttttccaggttcacgctgtcgacgcagaaggaaaagtcgtcatcacgcgaaaggtgcggcgctcccagatgctcgagttctttacgaggctggaaccgtgcctggttggcatggaggcgtgcccttccgcgcaccactgggcgcgggagctttctgccttgggccacgaagtacggttgatggtcgcgtcctacgtgaagccctatgtcaagcgccagaagaacgacatggttgacgcagaagccatctgcgaggctgtgaccaggccgaccatgcggttcgtcccgatcaaatctgaatcgcagcaggctattctcatggtccacaagacccgcgctctcttggtccgccaaagaacaatgcttgtgaacgccctgcgcggccatctcaccgagatgggcgtcgtagcgccaaaggggatcagacggcatgccgatctcgtcgagcgggtgcttgcacacggcgcagacgagatcgacctgccgccgctcgtgcgtgacattgtgttttcctctgcccggcagatcggctccttgaatgccgagataaaggagctcgagaggaaaatcctggaatggcaccgcacgagcgaagccagccaacggctggcgacgatccctggcgtcggcgtaatcaccgcatccgcaatggcggccactgtcgtggatcctgctgccttcagatcgggacgagaccttgccgcatggctcggcctgacgccgcgatccaactcatctggtggcaaggaacggttgggacggatcacgaaagctggaaaccgatatttgagaaccttgcttgtcatcggggcgacagctgtcgtcggtttctcgagacgaacaaccgaggggccattaatgaactgggtcagaaagctcctccaggcgaaatctgcacgcctgacaacggtggccttggccaacaagatggcacggatctgctgggcggtaatggcacacaagaccgtcttcggagaagccgccgcataagtcacgacgcactagcgtcacaacagttcggagggtctgcccaagaagcgtgatgactaccggttttgccggggatcaggaaaacccgttcgcgaggcagcgctgaaaagcgcgatgttttgatagggaccatgatccgcggatatcatcagggcccgcggccatccggccgcactacgaggccggacatatgcaagcacccaaccggattcgacacgcattgaggaaagacttgacgaagggggtgtccacata

SEQ ID NO: 6914 - DNA, 1351 bp, unidentified
  source 1..1351: mol_type = unassigned DNA; note = element_abae11a
  misc_feature 1..4: note = core
  misc_feature 5..77: note = LE
  misc_feature 78..1130: note = CDS
  misc_feature 1131..1351: note = RE
  misc_feature 1120..1330: note = bridgeRNA
atgatggggtggacgcgccgccgacggcatcgatgtgccagagtgtaggtgttgagcaccacttaagggaggcgtccgtgtcagaggttatcataatcggtctggatatcgccaagcatgtttttcacgctcacggagcagatgagcagggtcgagcaatattcagtaagcggatcaggcgaggaaaactgctggatttgttcgcagcccagccgagttgcacggtagcgctggaagcatgtggtggagcacatcactgggcccgtcagctcacccagcttggccatgaagttcggctcatcccgcccgcctatgtaaaaccgttcgtgaagcggcaaaaaaacgacgcgatcgatgccgaggcgatctgcgaagcagcgcagcggccgagcatgcggttcgtggccgtgaagagcgaacagcaacaggcggcgggtctggtgtttcggacccgtgacctgttagtgcggcagcgaacccagctcatcaacgcgattcggggacacctcactgaatatggttgggtcgcgcccaaggggccgtcgcatgtggcaatgcttgccgacctgatcgaggaagaagagatggccagctcgcttcccgaagcggcccacgccatgttccgattgatgttagacctgctcgccagcctcaatggcaagatcgcggatctcgacaaggagatcgctcgacgtgctcgcgaggacgaaatatcgcgcaggctgatgaccgttcccggcatcggcccaatctccgccaccgcgatcgccgctctagcaccgccggccgagacctttgccaagggccgcgactttgccgcttggctgggtctcacgcctcttcaaagatcgacagctcggtgcgacatccaaaatgggcgaacgcacgctcaggcgcctactcatcatcggcagcagcgcggtcgtgcttcaggcgaccaaacgcggcgcgccaaagggttcgcggctccaacaaatgctggctcgcaaaccgcgcatgctggtgaccgttgcgctcgccaacaagatggcgcggatcgtctgggcgctacttgtaaagcaggaaaactacagagctccggtcgcagccaaggcgtgagcctggcaggcctgaggtcgtcgcacgtgtagtcggtcgaaggagggtatggcacaacagtcggcgagacggggccggaagaaccagatgtactcatcgtgcctggagcacgcatttatgatttggtttcggtccgcgaactcccatacgggcccgcagctccatcgctgcatcagaggccggacagatggcagcatccgactacgtgccaatcttcttcaaataccgcttgcatctggcggggcgtccacag

SEQ ID NO: 6915 - DNA, 1402 bp, unidentified
  source 1..1402: mol_type = unassigned DNA; note = element_abae59b
  misc_feature 1..2: note = core
  misc_feature 3..79: note = LE
  misc_feature 80..1117: note = CDS
  misc_feature 1118..1402: note = RE
  misc_feature 1115..1389: note = bridgeRNA
tgttggggtggacggcccccgacggcatcgattgtgccagaatgaggtcgttgcagatctcaaacaaaggggaccgtccgtggaacagattagccgaattggcatggacacgtcgaaacattttttccagtttcatggggtgaacgccgccgagaaggtggttttgcgtaagaagctgcggcgcaaggagatggtggccttcttcaaggcgcttgcgccgacggtgatcgggatcgaggcctgcggcgcatcgcaccattgggcgcggattttgcggtcgttcggccatgaggtgaaactaatcgcgcctcagttggtcaagccgtatgtgaagcgcggcaagaacgacaccgccgacgccgaggcactttgcgaggcgatgagtcgaccgacgatgcgcttcgtaccggtgaagactgccgaacaacaagcggccctgatgatggtcggcttgcgcgatcggctgatccgcaatcgcacgcagctgtcgaacgccatccgcggctatgcggccgagttcggctttaccgccgccagggggatggcgcacatcgatccgctgctcgatcgcattcaagctgatgagagcgtgcccgtcctggctcgcgagctgttcgcggcccaagctgaagaatatgcgcagctgcaggcgcaaatcgccgaagccgacgccaagctcatggcctggcacaaggccgatgaatgcagccgacgcctcgccaatatccccggcatcggtccgatcggcgccactctgctgctgatgaaaactccggcacccgagatgtttcgatcggggcggcagttcgcggcctggatcggcttgacgccgaaggatcattcaacggccggcaaggtcaggctcggcgtcatcacaagggccggcgacgaagccttgcgcagcgtgttagtggttggggcgaccgccgtcatccaacatgtccgacgcggcgggcgcgggtcgccctggatcgtcgacctcctcaagcgcaaaccgccgaagttggccgccgtggcgttggccaacaaaatggcccgcatcgcctggaagctgatggtcacaggcaacagctatgccgcgaaatccgcgcccgccgccttgatgggcgccgcgtagagatcagccagacacggggagcaactcaactgcaaccgtgctgagccgatgccagaacttgcaaggcaaccagcagatgggtgtgatcgatcgatccaagacgcgagacactccgtgctttccactggccgccaaaggtcgcttgggtgtttggaactcgcatcgcggaaaccatcttggccagcgttcatgtgcgagcgcgaaaacaggccggacatatggacgcaagcgatctgatcagagcactgcccaaattaaccttgcgaggaggcggccgtccacata

SEQ ID NO: 6916 - DNA, 1365 bp, unidentified
  source 1..1365: mol_type = unassigned DNA; note = element_abafa88
  misc_feature 1..2: note = core
  misc_feature 3..79: note = LE
  misc_feature 80..1114: note = CDS
  misc_feature 1115..1365: note = RE
  misc_feature 1157..1360: note = bridgeRNA
tgatgtgatggacgcacctcccttctagcaccgttgtaccaaactaatggtgcaaccagtaagagcaggagtaatcattatgtctattaaagttgtcggtatcgatatagccaaaaacctcttccaagtatgcatgttgagttctgatggacaaatattgtcaaaccgaaaggtaaagcgtgacaagcttcttgatacagtccgtcaattaccagagaaaacggatattgcgatggaatcatgcgcaacttcgcatcattggggcagagtatttcaagagcttggacatagcgtagctctcatcccagctcagcacgtaaagccatttgttgggcgacaaaagaacgatgctaatgatgcgagagcaatttgcgaagcattttctaggcctgatattcattttgttcctgttaagtctgttgagcaacaagacctcaaagcaatgcgcagtgtccgtaaacgcttggtggagaacagaactgccttgtcgaatcagatcagaggactcgctgctgaatacggagtggttttccctgtatctattaaagctttgcgaagtcatttaccgatagctcttgaagatgcagagaatgctctttccccagtaatgaggaacttactgcaaactttatactgtgactttgtcagccttagcgaagagatagatgaaatgacccaacgtgtcaccatgttgagtcagcaagatccaaggtatgaggctcttcggaacattcctggttttggtccgattttgacagcggcactgattagtgaggtaggtgctggacaccaattccaaaatgggcgccagttctcagcatggtgtggcctggttccaaaacaaaatagtacaggtggaaaaagttgtctcggctctctatcgaagaatggtaatcgtgaattaagagcattacttattcacggtgctcgtgcagtggttcggtgtggagctaacaaagcggatcctatgggaacatggttgagaggactcattgcacgccgaagcaaagcaaaagcgattgtcgctcttgcaaacaagctcggtcgggtagcatggcacatcttggtgaaaaatagtgaatacgacattaatcaggcctttaaacctgtttgattaaaaatagtaagttctaaggagatctcttagagaagcaactgagtttgcaatagctgatgaataaacggtgaaccatccttactacactctgataacgcaacatggttattgaaaccgaggctttgaaaagacagtgaggggcggattacatcatggcgcaggtttattatcgacctagaaagacgtcggatatatgttagcgaccgtatcattcaattagccattgcatccagaggtgcgtccatata

SEQ ID NO: 6917 - DNA, 1332 bp, unidentified
  source 1..1332: mol_type = unassigned DNA; note = element_abd6fde
  misc_feature 1..3: note = core
  misc_feature 4..217: note = LE
  misc_feature 218..1183: note = CDS
  misc_feature 1184..1332: note = RE
  misc_feature 39..199: note = bridgeRNA
cattgtatattcaatattaattattatatttgcactcgttaacaacatcaaggatgtggaataaggccgtcctttcattcgtcataagacagtaaaatatgttccgcccccactccttaacatccgaatccggacagttcactgggcattgaccccgcatttgcaatgatggctccaagatgtttcgatgttgcatattatttaaaatgttattgttatgacttacattggtattgacgtcagcaaggactctttcgtcgtcgcttactctccagacaagaacagcaagacgaagacattcaagaacaccactaaggggattcatgagttcatcaggactatctccaaggaggagcaccattgcgtcatggaagcgacaggaaattacagtgctctgcttgtctatctgctttcagaggcaggtataacgacaagtttggagaatccgctcaaagtgaagaactttgctcgtgcaatgctatctaccgtcaaaacggatgagatagatgcccgtctgattgctctctatggagagaaaatgcaacctgcgccatacaagctccgcagtgatgccattctcaccttaaagcagaagcgtacagtcatccgccagctcaagaaacaactcattgccacaaggaacctcaaaggctccatggaggtgctgccgttctttgatgccaagtgcaagaagtctattgacaagaccattgctttccttgagaagcagatcaaagacctagaagaagatcttacatctcttgccaaatctgaatacaagaagcagatggatttactcacctctgtaaaaggcataggtataacgcttgcagctgcactcatcatggccactggcggcttcacttactttgataatgccaagcaactcacccgtcatttgggattgtcgccgacttatcagcagtccggtacttcagtcaatttcaaaggtcacatcaaccgcaacggggactcttctttaaggagtcagctctatgtggcagcattcgcatctctgagatgcaacactgaatgcagagcctgttatgaccgtttgcggtctaatggcaagcctggaaaagtcgctgtcatagctgtggctaacaaactcatccgtcaggcttttgccattgtcactcaggagaaaccctatgttgatggttacatatcttcaaaaaagtaactcctgcatttttccaaagtgtatcaggttggaaaatctaatacctgaaaacaccgaggggtgtgggggcgagaagcccccatgagagggtacgaatcagcactaagtgctaattatcgttaactatattcattttctttattacagtt

SEQ ID NO: 6918 - DNA, 1573 bp, unidentified
  source 1..1573: mol_type = unassigned DNA; note = element_abe0608
  misc_feature 1: note = core
  misc_feature 2..267: note = LE
  misc_feature 268..1314: note = CDS
  misc_feature 1315..1573: note = RE
  misc_feature 53..277: note = bridgeRNA
cagggagactgtggatagtgcttccggccctgcttgcgcggttttgcggtgatgcgggcgtagggtcggtggcctgggtcccggcctgacctccgattcggctgacgccgcttcggctgtccttcgaaacgatctgccggccgggtcccaggtttttgtggcacccaccggcgtgccggtctgatctgcccgtcctgtgcaagaggccggggttcacaggtccggcggccagcgggtgcgtgccaccccttcaaccagagaaaagggatggcattgaccatcgtagaagacacgcgcgccgtcaccggcggcgtggacacccacgccgacatgcatgtcgccgccgcgctggatcccgtcgggggattgctcggcgtcggggaattcccggctacggcggccggctatgcccgcctgctgggctggctgggcgggttcgggactgtctgcctggccgggatcgagggaaccggcagttacggcgctggcctggcccgccacgtcactgcggccggcatccgggtcgtcgaggtggaccgctccgaccgccaggaccgccgccggcagggcaagtccgatccgctggatgcggtcagcgcggcccgggcggcccagtcgggccgggcccgtggcgcgcccaagggccgggacggtgccgtggaggcgatccgggcgctgatggtcgccaagcgcagcgcccgctctgagcggacccagacgatcaaccaggccagggccctgatcgtgaccgggcctgatgacctgcgtgcccggttcgcccggcacacagccgccgggctggtcagcgagctggcggcgctgcgtccccgtcccggcgccaccgtcggctatgccacccggatcgcgctgcgggagctaggacggcgcgcggaattcctcgatggccagctcgggcgcctcgacgagctcatcgtccccctggtgaccgcccgcgccccggccctgctcgccttgcacggcgtcggcccggacaccgccgccctgctgctgatcgcggccggggaccacccgcaccggctgcggtccgaggcggcctgggcgcacctgtgcgcggtcgccccgatcccggcatcctccggcaagcggacccgccaccgcctcaaccccggcggcaaccgcgaggccagccgcgccctgtggcggatcgtgatcacccggatgagctcccatgccccgacccgcgcctacgtcgaacggcgcaccaaagagggcctgtcgaagaaggagatcatccgctgcctgaagcgttacgccgcccgccaggtctaccgccacctgcgccccgccggctaacgccccagaccccgggggcggcccgacccgctattcggctgccgcatccatgctggcctgctaacgattcgtcggccgcccccggacccctgcccttacctgctgaccgcgtgacctcataagagcctgccctccaccccgcagcggcccctccctgtcttgtccgcacccagcagacccggtcgaagaattcatcgcagacccccggaatgacccgctacgccaatcataaagaggccttgacatgacataggagcat

SEQ ID NO: 6919 - DNA, 1419 bp, unidentified
  source 1..1419: mol_type = unassigned DNA; note = element_abe0f0b
  misc_feature 1: note = core
  misc_feature 2..63: note = LE
  misc_feature 64..1098: note = CDS
  misc_feature 1099..1419: note = RE
  misc_feature 1186..1410: note = bridgeRNA
taatgagatggtccgccgccgagtggcataactcggcagttcacattatggaggatcatcgcaatgcacatcgcatctatcggcatcgatctgggcaagaccacctttcacctgattgcactgggagaacgtagcaaggtcctagtccgcaagaagttctcacgtacccagctgttggcctataccgctaacctgccatcctcgctgatcggtctggaagcctgtgcgggggcgcacttcctgggggcggcactacgagcacaagggcacgaagtgcgactcattcctggccagttcatcaagccctaccgtaagtccaacaagaacgacttcctcgatggcgaagcgatcgccgaagccgtgagcaaagagaacatgcgcttcgtaccgatcaagacccaggagcagctcgatgtgcaagccctgcaccgggttcgggatcgactggtgcaacgtcgcacggcgctgatcaaccagatccgcggcttcctgttggaacgcggcatcacctttgcggccaagcccatccacctgcgccaaaacctgcccgccgtgatggaagacgccgagcagaacctgaccccgcgcctgcgctggctgctccagcgcctgtggcaggagtggaaacagctggagatcgacatccaggcgatcacggacgagattgagcgcattagcaacgaagatggactctgccggcgtctacgccagatccctggcttcggccctctggtctcgaccgcgactgtggccgccatcggcaacggggctgggtttcgccggggacgcgacttcgcggcctgggtgggcctggtaccacggcagtactccaccggaggcaagcccaagctgtttggcatcagcaagcgtggcaacgtctatctgcgtcgcatgctgatccacggagcacgcgcggtgctgcttcgtgtcaagtacgatagcggagggttcgggcagtgggtccaccgcttagcggcacgggcaccgcgcaacaaagtcatcgttgccatcgccaacaagttggcccgcatcgcctgggcggtgttgtccaagggcaaagactatcgacatcagccgctgcaaccggcggcagcttgatggccgtggaaaagatgctgcgcttggaaagcaccaaacgctttccacttttccaccgccaccacgacgaatctttgaaatagatttttccaccaaggtctgctgaggagagaaggagacgaaaaaacagtccaacggcgtgtcggaaaacctggtgttgtgaatgcgtccctagtgaccgagcgatttattaggaccgacacgtgcggatcatcatcaagtgcccggagagcgattctccactaagaggccggatacatttacgcggactgtcccttcgcccaacttcaaacctcttgcagtccggcggcggaccataca

SEQ ID NO: 6920 - DNA, 1430 bp, unidentified
  source 1..1430: mol_type = unassigned DNA; note = element_abe8330
  misc_feature 1..2: note = core
  misc_feature 3..82: note = LE
  misc_feature 83..1156: note = CDS
  misc_feature 1157..1430: note = RE
  misc_feature 1164..1416: note = bridgeRNA
tgatggggtggacggcgccccaacggcatcaagcgtgccaagatggtcgttgtcacgaaccccatctgaagggaagccgtccatgggcaaagctaccgagaatttggcgcgagtcacgcggatcgggctcgatctggcgaagactgtttttcaggtacacggcgtcggcgcggaaggcgaggtcgtcatcgctcgcaagcttcggcgcgcgacgatcttggagtttttcggccggctcgccccttgcgtggtggcgatggaggcttgcggttcggcgcatcattggggccgccagctcgtggcgctaggtcacgaggtgaaactgatcccaccggcgcatgtgaagccgtacgtaaggcgcaacaagacggatgcggccgacgcagcggcgatctgcgaggcggcgatgcgccccggtcagcggttcgtcgccttgcgttcgatcgacaaccaggccgcggtgatgcgccatcgtgttcgcgagcagctcgtcggtcagcgcacggcgctcctcaatgcgctgcgcgggcatctgagcgagatcggagtcgtggcggcccagggtgcccagcacgcctatcgattgaagcggatgctgacagacggcgcggacgaaaacggtgagatcgtggttcccgagcgcgttcgggttgcgcttgcgccgttggcggctcagatcgacgcgttggatcaggcgatcgcggcgattgacgacaagctcatcgagacggtcaaggccgacgagaaggctcgccggttgatgacgataccgggcgtcggcccggtgatcgcgaccgccgtcgtcgcgacggttggcgaggtcgcgtccttcgcgagcgcacgcgagttcgccgcctttctcggcctaacgccgtgccagcattcgagcggcggcaaggagcgcctcgggcgcatcaccaaaatgggtgaccgatatctgcgcaagcttcttgtggtcgctgcgaccacggtgctgcatcacgcaacaggccacaatgactcgctgcgccgttgggctcggcagatgctcgagcgcaagggcgggcgagcgagcttcaaactggtggcggtggcactcggcaacaagctggcgcgcatcgtgtttgcgatcctacgctcgggcgaagtctacgacgaccgcccggtcgtggcctgaacgagaaggtctcggcaaaaagaggtttcgctgcaaggcgaaaagaggttgagggtgaccagagggtgatgtgagcgaacggacaggttccgaagcccgcttttcgcacggcgccgataagagcgcgtgaggctgatggggcgaggaaccaaagcggattctcatcagggccagcggagtgatctttccgcgccaacaggccgaagacatgtccgcacccgaaacgatcgcagcacactcaaggaatcccttgacacggggcgccgtccagaca

SEQ ID NO: 6921 - DNA, 1571 bp, unidentified
  source 1..1571: mol_type = unassigned DNA; note = element_abec547
  misc_feature 1..2: note = core
  misc_feature 3..250: note = LE
  misc_feature 251..1426: note = CDS
  misc_feature 1427..1571: note = RE
  misc_feature 3..226: note = bridgeRNA
ctcgtataatataatcatagcttagattgcttttaattaaaatttaagctatgctgttttagatactgtggattagttactttctcctaccacaagatggttaaaaaaaggctctaaccacagtctctttgttaatttgttaatcagttagataccgcatgacggtttatgttgaacgaggttacaatcgcaaggagtaccccgtggttctaaaacagtatcaattctatttttaaagaggtgttcttccatgattttagttggtattgatgttgcaaaggataagcatgactgctttatcattaattcagatagtgaaattttagctaaagctttctcatttcctaacaacaaagaaggttttaactttctttatgaaaaaattcgtgctgtttccaacgcttcagacaaaataaaagtaggacttgaagctaccggacattacagctataaccttcttggtttcctactagataaaggtctacccacctttgtcattaatccattacataccaatctctacagaaaaagtctatctctacgaaagactaaaacggataaagtagattccagaaccatagccatgatgttattgtccgagataagcttaaagccctactcggatacatcttaccacaacgaagagctaaagtcactatctcgttacagatttactaaagttcaggaacgtgcaaagcttaaaacttctgtatcacgtttagttcagattcttttcccagaacttgaaaaactcgttccaactctgcatatggcttccgtatacagacttttagaagaataccctagtgcttctcatattgcatcagctcatcttaccaagttgaataatatgcttcaagaagcatctaaaggacgttacggcaaagaaaaagctattgagataagagatgctgcacgtaattctataggctctgttatgcccgctaaatcgttggaattaaaacataccattaagctgatccatgaacttaacttggaaataatggaaatagattctgaaattaagaagatgatggatgagattgcttcacctattactacaatccctggaattggctgtaatatgggtgccatgattatctccgagataggtgatttcagtcgtttttcctctccagataaaatattggcttactcaggtttttctccgtctatttatcagtcaggcaagttagataactgctatgcacatatggaaaaacgaggttctcgttacttgcgatacgctctttttaatgctgctcagaaagcttgcatttgggacaagacactcgcgcaatacctagctaaaaaacgtgctgaaggtaagcattattttgtcgctttatctcacgttgtaaagaaacttgtacgtgtaatttttcatttagaaagaactggacagccttatttaatggctgcataaatagaataatttaatactgtttttagagcacctgcaacgatgctctatttgtcatgcgttttttgactacctatactaagtaaaccaagatattcatatccattaaaattatttatgattatccccttgactatatatagttagt

SEQ ID NO: 6922 - DNA, 1550 bp, unidentified
  source 1..1550: mol_type = unassigned DNA; note = element_abfbfcd
  misc_feature 1: note = core
  misc_feature 2..479: note = LE
  misc_feature 480..1442: note = CDS
  misc_feature 1443..1550: note = RE
  misc_feature 15..268: note = bridgeRNA
cattacagtaaaaaacagctagttcggcggttggagcaatcaatcgcaaaacggactgcgattgacgcaagtcccgagggactgccgatcgggcgcccgcggacggccttccgcccctgccccaagagggcccggggggtgttgccgacgcgggcgccgctgtttccgacgactgataggaaactgccgggccttccgccaagatgagccacggccatgtaatgtgggtgtcgcgggaagcagcattccgatcgaccgacgattggaaggataccaccatgccatccgcaatatccccgcccaaggccgttttgggcatcgacgtcggcaagtcgtcgcactgggcatgactcgtcacgcgcgagggagaggtcgcgctcaacaggcgcgtccgcaactcggaaggcgatctcgacgtcctgttttcccaggtcgcatgcgatacgatcgtcgtcgtcgaccaatgtcgcaacatcggcttgctggcaatctcgcgcgcgaggctggcggggctgggcgtcgcgtacctgcccgggctcgccgcgcaccaggccgccaggctgttcgcgggcgacgccaagaccgacgagcgcgacgccctcgtcatcgcgaagacggcgctgggcatccccgacgcgctgctgccggtccccgagcccgacgaggccctcgaggcggccaggtcgctcgcagcccagagaagccacatggtcacctgcgccaccagggacaagaaccgcctccgcagcatattgctggaatcgcgccccgcgttcgaggcgcttgccgacctgggcgaccggcattggctaaacatgctcgaggagctgggaggcccgtggggctgcattgacgccgggaagccggcgttcggcgccgtcacgaagggcgcgaaccgggcgaggatggatgcggcctggaacgccgccatggcatcaaccagacccccaaagcgacgggtcgacgcggagaacccgcaggtcaggatgcttgcaaggaggataagggaggcgctggaggaagcggacgggatcgaccgggagatcaccgcgcttctggcgggggacggaacgtacgaatgcctcgtcaccatccccggcatcgggccgaggaccgcgtctgagctggtcataggcataaacatcgaggatttcccggatcacgaccaccttgcctcctattgcggcatcgccccgcgcaaccgccagtcgggcacctcgatatcgtcggtctccgcatcaaggcagggcaacaggaggcttaagaacctgctcatattctcatgcaactccctggtcaggagcgagaaccgcttcggcgagtactaccgcgcctgcaggggacgcggcatgtgccacggagaggcgctcaaagccgtcgcgcgcaaaaggctgaaggtgatctacgcgattatgcgggacaaggtcccgtactcggcctagcgagccgatcgaaaaagggaaggcgcaggccccttacggggcccgcggcagcgttgtcctcatcgagcgaaattcgccaacaaatcagttgacaaaactataggaaca

SEQ ID NO: 6923 - DNA, 1403 bp, unidentified
  source 1..1403: mol_type = unassigned DNA; note = element_abff0de
  misc_feature 1: note = core
  misc_feature 2..225: note = LE
  misc_feature 226..1389: note = CDS
  misc_feature 1390..1403: note = RE
  misc_feature 12..237: note = bridgeRNA
ctacttaagactggtggtagggcctgatcccggccaggatctggtccaggtgcccggtgggatgctctctcatcggttgtccgccagtgtcattggtgtgactctctaatggcttgtgtcccagcgggtgccgtgcagggaatggctgaagaggggtctgcccagctcgaagtagcggtgctttcccgcacgaaccacacgtgtcgacctgggaaggatgtgccggtgacggtcatcatcggaatggacccgcacaaacgctcggccaccatcgaggccatcgacagcaccggaacaatactgtccaccggccggtacggcacggacacggctggttacacagcaatgttggctgctgccaagcgattcgacgagcgcgtctgggcgatcgaaggctgcaacggcgtgggccgccacctcgcgcaccgcttggtccacgacggggaaatcgtggttgacgtgccggcgaaactatcggcgcaggtgcgagtattcgctaccggcaacggccgcaagaccgatccggtcgacgcgcattcggtcgcgctggcggcgttgcggtcgccgaatctgcaccgggtgcacgccgatccgcagttgatcgcactgggaatgctcgctgatcgacgtgatgagctgggccgggcccgtaccgacacggtcaaccggttacatcggctgctgctggaattgctgcccggcggggcgaagaagtttctgtcggccatgcaggcgcggaaactggtcgcgacggtgaagcctcgtgatccggcgggcaaggtccgtcgccgcctggcggtggagttgatcgaggatctggaacgcatcgactgcacgatcaagactttggacaaagaactgcgcgagctggtcggcgagcgcggcccgattctgagcgggctcaacggcatcgggccatccggtgcggcgcggttactcgccgatgtcggtgatattcaccggttctgcgatcgtggccggttcgcgtcctggaacggcaccgcaccattggacgcgtcctcaggtgaacagaaacggcatcggctctcccgcgcggggaaccggaagatcaaccgggtgctgcacaccatggccatcgtccaactacgaaatccgactgcgggacgggtctattacgacggcaagaaggccgcggggaagacgtcgatggaagcgatgcgggcgttgaagcggcgattgtcgaacgtggtctacgcagccatgctggctgatcagcgcaatcgtgaaacggcaagcccgggagggcaatcgggggcgtctactgactcctgcgcgaccggcctgaccccggaaaccggttcttcggacaagccacaacccggacctaccatcacccaccatagccccgacctccacgccacgccttgacaagagaggggagc

SEQ ID NO: 6924 - DNA, 1388 bp, unidentified
  source 1..1388: mol_type = unassigned DNA; note = element_ac03b22
  misc_feature 1: note = core
  misc_feature 2..88: note = LE
  misc_feature 89..1114: note = CDS
  misc_feature 1115..1388: note = RE
  misc_feature 1152..1380: note = bridgeRNA
caatgggatggactcctcctccccctgagggcacataagtgccaaactggagtttccacacaaccggtttggaaagaaggagtccaccatgaagcttattcgcgttggggtcgatttggcaaagaacgtgtatcaggtgcacggcgtggaccggtctgagaaagcggtctggcggagcaagttggtccgcgctgactgggtcaaggcactgctcgcccagatcgagccgggctgtgaaatcggtatggaagcgtgcagcggcgcgcatcactgggcccgagtactgcaggcgcagggttacaaagtcaagctgatcgccccgcagttcgttaagccgtacgtcaagagcaacaagaacgatgccaacgatgctgaagcgatctgcgaagcgatgagtcggcccaacatgcggttcgtaacgatcaagacggtcgagcaacaggatatccaggctgtacatcgggtacgctccagcctggtcgatcaacgcaaggccacagccaaccagatccgtggcctgacatcggaatatggattggtcgcacaaaaagagttggttcacttgcgcgccgcaatccctcgctggctggaagacttcgataacggactgagcgagcggtttcgccgtctgttgcgtgggctttgggaagacatgctggcattggatcgacgtgttgccgagctcgagcgggaaatcgaacagattgcgcggcacgatccggtagcggttcggctgcagcagttacgcggcattggtcctatcactgccacagctttggtggcgacagtaggcgacgccagccagtttgcaagcggtcgacaaatggcggcttcactcggactgacacccaagcagaacagttcaggaggaaaggagcgtttgctgggcattagcaaaagaggtgacacgtacctgcgctgcttgctggtacatggagcacgagcggttcttcggacggctcaggctaaaacggaccgattaagcacctgggtgacgcgcattgcaattacgcggcacccaaacatcgccgcggtcgcgttggcgaacaagacggcgcgtatcgcgtgggcgctgatgagtaagggaaccgattatcaccctgagccagcatgagctcggcaacaagactttttacacgacgtaggagtgtccgaaccacgattgcatgacaagccgcatgatggccaacaggtcgaaccggcgctggcagaacccgagaatgtccgaggctttcaagcccgtagaagcgatagggagccggcgcgcgaatagcccatcagggtccagcatctgactcaggtgcagcagtacgagaccggatatacgtgagcagtcgtacctcacggcctgaagacggattgtttgcaaacgaggaggagtccatata

SEQ ID NO: 6925 - DNA, 1364 bp, unidentified
  source 1..1364: mol_type = unassigned DNA; note = element_ac11e32
  misc_feature 1..2: note = core
  misc_feature 3..78: note = LE
  misc_feature 79..1104: note = CDS
  misc_feature 1105..1364: note = RE
  misc_feature 1080..1351: note = bridgeRNA
tgatggggtagacgcccccccagcggccttgatgtgccagagtggaggtgttgattgcaccactcaagggaggcgtccatgggagaagttagcacgattggtctggatctggcgaaaagcgtgttccaggctcacggagccgatgcatcgggagcggttctgttccgcaagaagctgcggcggcaccaggtcctcgcgttcttctcgtcccagccaccctgcacggtggcgatggaggcctgcgccagctcgcaccactgggcgcgcgagatcagccggctcgggcatgccgtccggctgatcccacccgcttacgtgaagcctttcgtcaagcggcagaagaatgatgcggcggatgccgaggcgatctgcgaggccgcccagcgtccgaccatgcgtttcgtggcgcccaagagtgacggggctcaagcctcagccctcgtgttccgcgcccgcgatctcttggtcaagcagcgcacccagatcatcaatgccctacgggggcacttggccgagttcgggatcgtggtcgccaaaggaccagctcacgtttcgaaactcgcgcaggctgtcgagaactcggacgaaccggtcccggagctcgcccgaccgatcctccagatgctgatcgagacgctccatcggctggacgagcagatcgcccggttggatcgtgaggtcgcccagcgggccaaggaggatgagacggcgcggcggctgatgacgatcccgggtgtcggcccggtcaccgccgtggctctggcggcgctggcccctccggctgagacattcaaacgcggccgggactttgccgcctgggtcgggctcacaccgctgcagcattcgactggtggcaagcagaagctgggggcgacctcgaagatgggcgaacgcacgctgcgccgcctgctcatcatcggggccaacagcgtcttgcttggagccgcccgcaacggagttcccgctgggtcgtggctctcgcgcatgctggcgcgcaagccaccgatgctggtgcgtgtggcgctcgccaacaagatggcccggattgtatgggctctgctggcaagaggtgaggtgtatcgggctccggctgtgggtgcgtgagcattcgcaggtgtgaggctgttggggcgtaggaaggtcgaaggagaggaatggcgcaacggtcaacgagacgggatcagacaaaccagcttaggcacaagcgcttcgagcgcgtagatctgattggggcctgatccgcgtactcccattcgggcccgcggcatgtgagccgcatcaaaggccgcacacatgtccgcatccgacccgcgcgctgcaccaaacccgaagattcttcttgcgttaccaggggcgtctacaca

SEQ ID NO: 6926 - DNA, 1431 bp, unidentified
  source 1..1431: mol_type = unassigned DNA; note = element_ac1557f
  misc_feature 1: note = core
  misc_feature 2..310: note = LE
  misc_feature 311..1132: note = CDS
  misc_feature 1133..1431: note = RE
  misc_feature 1199..1426: note = bridgeRNA
taatggaatggacgcccactattcagaacggcatcgaagtgccaaagtagtggtgtagtaaagcccactgaacaagagaggagcgtccgacatgaaaattacaacgataggtattgatttagcgaaagaagtgtttcagattcacggggtagatatgcacggtaaggcggtgctgcgcaagcaactacgccgcagtgagatggcgaagttttttgccaatttagactcttgcctgattggtatggaagcctgtggtagttcacattactgagcaagaaagctgggcgagtatggacatactgtccggcttatgtccccccagtttgttaaaccctacgtgaagaccaacaagcatgacatggcagatgccgaagctatttgcgaagcggttagccggcctaatatgcgttttgtaccgatcaaaaacgtcgagcaacaagcgatcctgtcgattcaccgtgccaggcagggatttgttaaagccagaactgcgcaggcaaaccagatacgaggtttgctctctgagtttggtatcgtgctgcccttggggatccagtcaatcaacaaacgtatgccggatatcctggaagatgctgaaaatggcttgccaggtatcctgcgcaagttgttggaaagactgaacgatcatctcaaggaattggatcatcaggtggaagaactagagttacaaatcaagtggtggcataagaagaacgaagccagccagaaactggaagccattcccggcataggaccgattacggcaagcgctatcgtagcaacagtaggagaggcaaaagaattcaagaatggcaggcaactgtcggcatggatcgggttggtgccaaagcaatgttccagcggtggcaagcagatattacttggtatcagcaaacgtggcgacacttacctgcgtactttacttatccacggagcacgagcggttattcgctttgcagagaacaaacctaaaccggagaactggttgagcaaactgatcatgcggcgtaacaggaatatcgctgcggttgcgctggcgaacaagaacgtacgtatcatctgggcactgcttgccaaaggctcaaccttccgccctgatcctgcatcagccgcatgcgcagctgcttcatgatcgaagcggatgaattaaaaccgtattgatatgctgtatcgacaacaaaattaaggagaaaaactttcactgattgcacaggcaattaagacatgatggcaagacaggtaagaccgtgagtagctgaacctgaattgaacccagtgcattgcaagcacgttgacgtaataaggcgctactcagcggattccatcagggacagaggcaaacgtctcgtataaagtccggatgtatggctgcaatttataccttcttaaaatcattgattgaatgcttggcagaatatgggcgtccatgta

SEQ ID NO: 6927 - DNA, 1389 bp, unidentified
  source 1..1389: mol_type = unassigned DNA; note = element_ac16591
  misc_feature 1: note = core
  misc_feature 2..86: note = LE
  misc_feature 87..1106: note = CDS
  misc_feature 1107..1389: note = RE
  misc_feature 1154..1383: note = bridgeRNA
gaataagatggactccccctacatatgcggcatctatgtgccaaagtgtaggtgagttacaaacacttgatagtggagagtccatcatgaatttaattaaaacacttggtatcgatttagccaaaaattcttttagccttgttggcatggataaatacgggaaagtgatttttagaaagacattatctcgtaagaaactacttccgtttattgctcaacttcatccctgtctcattgccatggaggcttgcagtggcgcacattattgggcgcgggaattcaaatctatcggtcaccaagtcgcgattatcgccgctaagttcatcgaaccttttcgtaaaggcggcaaaaacgataataacgatgctgaagctatatgtgaagccgcaacccgtcctaatatctggcatgtcccggttaaaaccgcggagcagcaagccatcatgactttacaccgcgttcgacaaggcctcatcaaagaaagaaccgctatgattaaccaaattcgaggattatcagccgagtttggtatcactatccctcagggccgctacagtctccaagacaaaattcagagtatcctagaggacgctgacaataaactacctaccttcgcccgacagatgataaatgatttatggcaacgcattaaacaagccaacgaacaaattctcagttatgaccgtgcgttggctcagcaagtccgggaagacaccgtagcacagcgcctcatgaccattcctggcgtcggtgaacaaatcgctaccgccatgtcggccaatgtacccgacccaagactttttagaagtagccgacagttctgtgcttggcttgggttagtaccaaggcaatacacaacaggcggcaagatacgactgggccgcatcaccaaacgtggtgataaatacatgcgtatgtgtcttattcatggggcccgcgctgtcatggccaatcttggcgacaaacaagacaaagtaagctgttggataagagaacttattgagcgacgcggttatttaagagctgccgtcgcccttgccgctcgaaacgcccggttaatatggacactgatgatcaaacaagaagactataaagtcgtggcttaacaacaacgccagtgaattcactggcattgtaaataggtttttaaagaggtaccaacccgagtcctgcgaaggcattgatgacaattagaacagaccgaggaaactctagcctgtttaattggggtaagctgaaataagcttgtctaacgaataaggcacgtttccaaagcgaatactcatctaggtccgagtttaatactcattaaatagaccgaatgtagaggtgcagtcttatttctaaatgtcagaagtgaattcgttgacaatcgggggagtccatgta

SEQ ID NO: 6928 - DNA, 1358 bp, unidentified
  source 1..1358: mol_type = unassigned DNA; note = element_ac27aa2
  misc_feature 1..2: note = core
  misc_feature 3..224: note = LE
  misc_feature 225..1106: note = CDS
  misc_feature 1107..1358: note = RE
  misc_feature 1108..1348: note = bridgeRNA
ttatgaaatggcccgccccttttccccggcatcggatatgatgagggcaccttaaaggagaaaggaacggaccgatgtctattgtgatacttggaattgatctgggcaagaatgtttgcagcctggtgggcgttgatgcggccggcgcggtgatcgtgcgaaggtcgatgcggcgccagacgttgatcgactatgtcgccaagcttccgacgtgaatggttgcgatggaggcgtgttgcggcgcccatcatctggggcgcctgtttgccgcgcacggacatgagatccggctgatgtcgccggaatacgtgcgcccgtatgttaaagcgcaaaagaatgatgatcgcgatgccgagggaatcgccgaggcggcctcgcgtccgacgatgcgcttcgtcgggctcaagacccaggagcagctggacatccagactctccaccgggtccgctcgcgcctcgtggccgagcgcaggagcctgatcaaccagttgcgggcgatcctgctggagcgcgggacaatcttcccggtcgggcgccgtaaactggaactgggtatcgatgggatgctggccgatgagaatacgacattgtcaccgcgcctgcggcaactggtaagcgaactgcccgccgaatggcgggaacttgacgcaaggatcaaggcgttgaatggcgagttcgtcgagctggcgcgcaacgatgcggcggcacgaaggctgacttcaatccccggcatcggggtgttgaacgcagccgcgctgattgcggcggtgggcgatgcaagcagcttcaccaacgcccgggatcttggggcagggcttggcctggtcccccgacaacataccactggcggcaagccacgactattcggcatctcaaagcgcggcaacacctatttgcgcaccctgctcatacatggcgcgcgagcagccttgccctcgctgtcgcaaagcgaccccccgttggggcgctggctgaaagccatgatcgagcgcggcgtccaccgcaatgcggtggtggtcgcactggccaacaagctggcgcggatcgcttgggcagccctgcgaaaggacgcaacttttgaacgtggctaccctgtcgcggcgtaaccagatcgcccgcacgcacaacagcgtgtaggccaacgaagtttgcaggaaggatcgaggagatggcctgacagtcgatcggcgtttggaaagcccggtcaaaaaaatggcacgtgctgccgacccctttattgcggctccaaacgtgcggatatccatcttggccgtgggttcacccatgagacggtatacgttgacgcagactgatcagatcaactcaaaattcaccttgcaaacggggcgggccatacg

SEQ ID NO: 6929 - DNA, 1608 bp, unidentified
  source 1..1608: mol_type = unassigned DNA; note = element_ac34357
  misc_feature 1..3: note = core
  misc_feature 4..274: note = LE
  misc_feature 275..1483: note = CDS
  misc_feature 1484..1608: note = RE
  misc_feature 13..294: note = bridgeRNA
tctattacaataaatttgggcaggaagccgggcagccagtccggctttcccccatctcgtgcctaagctacaatgagaggagcaactggctgaccatcacccccttgggcttttatgtccgcaggaaagactgtcagccatcctcttgttgcagcgttcgatttgagcaggttgagccaccggataccggggagttcgcgtcacgcaatagattgaatcggcaacgagaaaagatggattccggttgcagattctttgtattggaggaatgtgaatgaactgcgttggcatcgatgtctccaaggggaagagcatgattgcagtcatgcgcccttttggagaggtggtcatctcaccctttgaggtgcttcacaccgacagcgaactgagcaagctggcagggctgctcaaaagcctgaacggtgagacccgtgtggtgatggaatccacaggcaattaccacgcgccagtggcctggctgctccacgacgcggggctttatgtctcggtagtcaatgcaatgctggtgcacgactacgggaacaacagtttaagacgggccaagaccgacaagaaggatgccgtgaagctggccaactacggccttgaccactggctcacactgccgagatatgtcccgcaggaggaaacccggctcatgctgaagacctgctgccgacagtaccggcagtattccaaagtacagaccatcctgaagaacaacctgatctccctgctggatactgcgttcccagacgcaaaccgcctgtttgccagtccgccccgcaccgatggcagtgagaagtgggtggactttgtcgccgccttttggcattgtgagtgcgtctgtggcctgtctaaaaaggcctttaccgccaagtaccagaagtggtgcaaaaaacatggctactatttcagcgaagataaggcgctggacatttatgcctccgcctgtggacacttcagtgtcatgccgaaaacggatacaacaaaactgttggtagaacaggctattttccaactccgggcaacttccaccgctttagctgctctcaagcagaagatgcagtccctggcatcttctctaccggagtatcctgtggtaatgaggatgtttggcgttggcccctccctcggaccccagctcatggccgaaattggcgatgtgcgccgctttcattccaaaaaagcgctggttgcttttgcgggtattgacgccccgccctaccaatccggccaaatgcatatccgcagccgtagtatttccaagcggggatctgcctcgctgcgcaggacgctctttctggtgatgggtgtcatcctgcaatgtgctccaatggatgagccggtctaccagttcatgaacaagaaacgctctgagggcaaaccctaccgtgtctacatgatggctgctgccaacaagttcctgcgcatctactacgcttctgtgaaaacctacctggattctctggcgctcaattgattctcccgctctataccatcttgctggccgccattttaattttgagatgttcagcggcttgattttgtgttgcctttttcgttgctttcaaaatctgaaatttctacttgacttttattagcagg

SEQ ID NO: 6930 - DNA, 1389 bp, unidentified
  source 1..1389: mol_type = unassigned DNA; note = element_ac3ba3f
  misc_feature 1..2: note = core
  misc_feature 3..89: note = LE
  misc_feature 90..1118: note = CDS
  misc_feature 1119..1389: note = RE
  misc_feature 1089..1376: note = bridgeRNA
agatgggatggttgccgccctccccagacggcatcgcaatgtgccaaagatgtggtcgtacacggccactattgagagaggacggcaatatgattgatacaatgatcggtgtggacttggcaaagaatgtctttcagctgcatggggcttcgctgacaggggaggtcaaatttcgaaagaagctttcccggcctcagtttcggaagttcatggaagaccaacctgcaagcatcgtggtttttgaagcttgtggcggcgctcatttctggacacgagagatgcagcaacttggacatcaggcaaagctgatcgccccacaatatgtgaagccgttcgtcaaacggcagaagaatgacgtggctgatgctgaggcgattgtcattgcggcacagcgcccggagatgaggttcgtcgaacccaaaagcaacgcgcaaatcgcgcgaggtgttgtgttccgttcacgcgatcgcctggtgcgccagcgcacggaacagatcaatgcgctgcggtcaattctttatgagcagggccaggtattcccgaccggcgtccgtcagatgaagaagatcgcggaattcctggaacgggccgataacggcttgattgctttggttctggaggaatgcgaggaactgctcgcttccatttacgatctcacaacccggattgacgcgaagacgttaaagctcaaaaagctgtcgcagcagtctgagatgtcccgaaggctccagacgatacccggcgttggcccactcaccgccatggcaattgaagccttcgcaccgcccatggaaatttttcgatgcggccgagactttgccgcttggattgggcttgtgcccaagcaacattcatcgggaggcaaggcgcggctgggtaagatctccaaggaaggtcaggtcgacattcgccgcctgcttatcattggcgcaatgacacgcattgcatgggtcgggcgaaaacctatccaggccggttcttggctggaccgcatgttgaaacgcaaacctaagatgcttgtcgcaatcgcgctggccaacaaaatggcccgcaccatttgggccgtgctgacgaagcaagaagactatcgagatccggtgaagactgcggctgcctaagaagtaacaggcgacctaatctgaaatcggaaactgggggcaagaagacgatgacctgaatgggcaaaatgatcgaatagatctggattgggaaaaccagttttgggctccgagccgcgagctcgcctgagagatttggacccaacccgctgatcaccataccggcccgcggcttctgaaaatgccgcacaatgaggcctgacagaagaccgcactcgatcaccctcccagacagccagaaacttcttgcatcacgggcggcaaccacaga

SEQ ID NO: 6931 - DNA, 1499 bp, unidentified
  source 1..1499: mol_type = unassigned DNA; note = element_ac434de
  misc_feature 1..2: note = core
  misc_feature 3..243: note = LE
  misc_feature 244..1479: note = CDS
  misc_feature 1480..1499: note = RE
ctaatgagagttagcgggttcgctgcggcagactcgttgagtggtggccgccggcgggtgagcactcatcccaactgggccttggagctcttagccaagaccgtgcccccgccggtgtccgggagagttgatcgctactgggatgtcgtgcccgccggtgcggcgtgagcactgttcattagtctgctgatggttctcccgctggctgctgacggtactgggcgtggtgtgcgggagggtgcgatgcggctgtgcgtgggtgatgactgggcggaggaccatcacgacatcgaggtgatggacgaggctggcacggtgctggccgccgggcggctgccggagggggttgccgggatcgggcagctgcacgagctgatcggccggttcgtgcccgccgccggtggtgatgcggaggtgcaggtcgggatcgagaccgaccgcggcccgtgggtggcggcgctgatcgccgccgggtatgtggtgttcgctgtgaacccgctgcaggcgtcccggtaccggggccggcgcggcgtgtccggggccaagagcgacggcggcgacgcgcacatgctggccgatgtggtgcgcaccgatgcgcatcagctgcgcccggcggccggcgacagcccgcaggccgagggcatcaaggtgctggcccgcacgcacaagacgctgatctggcagcggtccgcggtggtgctgcggctgcgggctcagctgctggagtacttcccggccgcggtggcggcgtttgaggacctggacgccccggacgtgctggagctgctgggcaaggcgccggacccggcccgcgcggcgaagctgacccgcgcccaggtctcggcggtcctcaagcgcgccggccgccgcaagatcacagagcgggccggcgcgatcctggccgcgctgcgcagcccgcagctggcccggccgcccgccctgaccgccgcctatgccgctaccgtgcggtccctgaccgcggtgatcgccaccttgaacgagcaggtcgccagcttgcaagggcaggtggaggcacattttggccagcacccggacgctgagatctacctgtcccagcccggcctgggcgcgatcaccggcgcccgggtgctcggcgagttcggcgacgacccgcaccgctacgccaccgccaagaaccgcaggaactacgccggcacctccccgatcacccgcgcctccggcaagaagaagatcgtccaggcccggtacgtgcgcaacgaccggctcaccgacgcgctgatgctccaggccttcgccgcgctcagggtctcacccggtgcccgcgccttctacgaccagcagcgcgccagcggacgccagcacaacgaggccctgcgaagactggccagccgcctggccggcatcctgcacggctgcctcaagacccgcacctgctacgacgaggccaccgcctggggccaccgggaaaacacccctcaatctgacgccgccgcttgacatcccaactcctgggatgt

SEQ ID NO: 6932 - DNA, 1503 bp, unidentified
  source 1..1503: mol_type = unassigned DNA; note = element_ac4bf21
  misc_feature 1..2: note = core
  misc_feature 3..244: note = LE
  misc_feature 245..1483: note = CDS
  misc_feature 1484..1503: note = RE
  misc_feature 6..237: note = bridgeRNA
ctaatggggcgtaccgggcttgcttctggcaggttcggggctggtagcggccggtgggtcagcactctcctgcgctggaacgtggtctggattcctaggctcagatcgtgcgcccaccagtcgtgagggggcgtgaccgctgatgggatgacgtgccccggcccggtccggtgagcacttgaccattagcccgcggctggtcccctccacgctgccgtccgaccggtgcgagtgggaggcgcggatgttgtttgttggcgatgactgggccgaggaccaccacgacgtcgaggtcgaggacgccgagggcaggcggctggcgcgggccaggctgccggagggaatcgccgggctgacccggctgcacgagctgatcgccgagcacctgaccgacgacgacgtcgatcccgagaccgggttcgtcgcgcagagcgtggcgatcggaatcgagacggatcggggtgtgtgggtatcggcgctggtggcggccggctatcaggtgttcccgatcaatccgatgtcggtggcgcgctaccgggagcggcacgccaccggcggggcgaagtccgaccggggcgacgcccacgtgctggccgagatcgttcgcctggaccgggcgcaccaccggccgatcgccggcgacagtgccgaggtggagggcttgaaactggttgcccgatcgcatcaggcgttcatctgggaccgcacccgccatctgctgcggctgcgtggtgcgctgcgcgagttcttccccgccgccctggaggcctttcccgagctcaccagccccgaggcgctggagctgctcgagcgtgcccccgatccggctcgggcggcccggctgtcccggtcgaagatcagcgccgctctgacccgcgcgcaccggcgcgacccggaggtcaaggccgccgagatccagactgtgctgcgcgccccggcactacggcaggccccgcccatcgaagcggcctacgcggtcatcgtggccagcgccgcgcggctgatcgcgcagctcaacacccagatcgcggagctgcaggcggtggtggccgagggttttggccggcacccggacgctgagatcctgaccagccagcccgggctgggaccggtcctgggcgcccgggtgctcgccgagttcggtgacgaccccgaccgctacgtcgacgccaaggcgcgaaaaaactacgccggcacctcaccgatcacccgtgcctccggcacccgccgggtcgtgctggcccgctacgcccgcaacaaacacctcgccgacgccacccaccagtgggccttctgtgcgctgacggcctcacccggcgcccgccgctactacgacgacatccgcgctcgcggcgtctcccaccacgccgcccttaggcagctggccaaccgcctggtcggcatcctgcacggctgcctcaagaccagagccctctaccgggaagacaccgcctggcccgaccgcaccgccctcgcggcttgacgccgcagaccatgggatgt

SEQ ID NO: 6933 - DNA, 1584 bp, unidentified
  source 1..1584: mol_type = unassigned DNA; note = element_ac674f2
  misc_feature 1..3: note = core
  misc_feature 4..264: note = LE
  misc_feature 265..1461: note = CDS
  misc_feature 1462..1584: note = RE
  misc_feature 26..284: note = bridgeRNA
tttggtactataaaagtgtaattgttgtatcaataatacattggtaacacagttgcacttattttgtataatagagggagtaattggtcagacggggcgtattttggattaaccacatccgttacaaaaactgtctgccatccccttattatacgcattcgattaagcaggttgagacccctagaggctttcgtgtaacgaaccaaaatgagtggtaataagtgcagatggaaacaattacaataattcatctggaggttacatatgataagtgtcgggattgatgtttcgaaaggtaagagcactgtgtgcattctgaagccctgtggtgagattgtcagttctccgtttgatgttgaacacactgacagttctctttctgaactggctaatatgattttacggttggaggatgaagtaaaagttgtgatggaagccacaggcgcttatcacgtgcccgttcttacgttcttgactgataaaaagatttttgtttctgtaataaatcctttagtcatgaaagaataccgatgtaaggggcttagaaaagcaaaaacagatcgtttggactcgaaaatgattgcgaattatggtttagataactggtttcaccttagagaatatagtccagttacagaaacttaccaagcactgaaactccttggacgccagtatgctcattacatgagaatgcggatagaaagtatgcaggtgctaaccaacatgctcgattatacaatgccaggcatcaaaacgttattgaaaggctacagcgaagcgacaaagaaaaataaactgtctgactttgtagagcactattggcattacgataacatcactaagaaatcagaaacccagttcgtaaaaagttatatagcctgggcaaaaaagaaaggataccatcaaagtcaggcaaaagcaattaaaatatacgccttggccaaagacggtatcccaaccctgccttccagttccccatcgaccaaaatgttagttctggaggcggtcagggtcttgcgtgagcttgaaacaaccctcgaaactattctatcacagatgcaggatttggcaagagatttgcctgaataccccgttgttcgggcgatgggcggtgttggaaatacaatcgcagtcagattgattgctgagattggcgatactcgccgcttttataatggaaaggccttagtagcttatgccggcatagactcccctccctatcaatcagggcagtttaatggcagcaatcggcacataaccaaacgtggatctgcaaatctaagaaaaataggctttgaaatcatgctatgcttaaaatcactgaaaccagtagaagatcccgtctattggttcatgataaaaaaagaagcagaagggaaagctcacaaagttgcaaaaatggcagcacttaataagttcttgaggatttactatgccagagtgatggaagtctacgcataactcccaaaacagaacataactattaaataaatcagtgataacactggtctaattaaagtctgtcatttttagagattatgcttataaataaatttgatttaactattgatttttgttagcagg

SEQ ID NO: 6934 - DNA, 1424 bp, unidentified
  source 1..1424: mol_type = unassigned DNA; note = element_ac79cda
  misc_feature 1..4: note = core
  misc_feature 5..207: note = LE
  misc_feature 208..1410: note = CDS
  misc_feature 1411..1424: note = RE
  misc_feature 1..194: note = bridgeRNA
ctccgtaagttgttgggtggcccgggagggccgggtgtggcttatggcttcttgccttcagtggcttccgaggagtggccgcccggttctccggggcgccctggctgctgattgagatgtgcgcgcttcgtgcggtcgctgattacggagatgacagcggggtgttcctcgggccgatggcaagccgtgcggaacgaggaggggcgagtgagcgagcgacaggcccgggtatgggccggtgtcgatgccggtaaaggccaccactgggctgcggtggtcgatgagaccggcgcgaccttgtggtcgaagaagatcgagaacgatgagacggcgatcctgaccgccatgggcgagatcctggacctggccgacgaggtgtcctgggcggtggacatctccggcacggcctccgcgctgctgctggccctgctcgcagcccacggccagcgggccgtctacgtgcccggccgcacggtcaaccggatgtccggcgcctaccggggcgaggccaagacagacgcccgcgacgcttacgtgatcgccgagaccgcccgccaccgtcgggacttcgccgccatcgacgtgcctgcccagctggccgccgacctggccctgctgaccgcccaccgctccgatctggtggctgaccgggtgaggatgatcaaccggctccgcgacgtgctcaccggggtcttccccgcactggagcgggctttcgactactcggcgcacaagggtgcgctggtgttgctgacgggctaccagaccccggcggcgatccggcgccgcggacgagcgaggctgacggcctggctcgccaaccgcagtgtccggggcgctgattcggttgccgcgaccgcgctggaggctgcccgggcccagcagaccgcgctgcctggcgaggatgtcgccgcgcagatcgtcgcagacctggcggtccagatcctggccctggacgaccgactgaagcggatcgaccaacagatccgcgacacgttccgcgcccacccacaggccgagatcatcgagtccctgcccggcatgggtccgatactcggggcggagttcgtagttgccgccggcgacctgtcggcctacgcggacgccggccacctcgcctctgcggccgggctcgtgccggtcccgcgcgactccggccgccgcaccggcaacctgcacaggcccaagcgctacagccgccgcctgcgacgggtgctctacatgtccgcgcagaccagcatgatgcgcgagggtccgaaccgggacttctacctcaaaaagcgcggtgagggctgcaagcacgtccaagccgtcatcgccctggcccggcgacgggcgagcgtgctgtgggccctgctgcgtgacggacgggtcttcacctccgccccgccggtcacgcaagcggcttgacttcatcattgaga

SEQ ID NO: 6935 - DNA, 1466 bp, unidentified
  source 1..1466: mol_type = unassigned DNA; note = element_ac7f657
  misc_feature 1..2: note = core
  misc_feature 3..128: note = LE
  misc_feature 129..1169: note = CDS
  misc_feature 1170..1466: note = RE
  misc_feature 1212..1411: note = bridgeRNA
agatggggtattcggcttgagcctcatcttttggcggtgatgccattaaggtgctgcgcttcgagctgatgataaaacgtggtcggttccctggaacagccacaagcatcaggaaggagaagcgcagcatgaaacattatgtaggattggacgtctcggtgaaagagaccgcaatttgcatcgtcgaggaaacaggcacggtgtgccgcgaggtgaaggtgccgagccatcccgaggatcttgcgcgggtgctcaaggatcccgcctggcggttggaacgcgtcgggcttgaagccggacctttgtcgcaatggctgttcgaaggccttgccaaagccggcctgccgatgatctgcattgagacacgtcacaccaaggcattcttgaaggcgcaggtgaacaagaccgaccgcaatgatgcgcgcgggatcgcgcagatgatgcgggtcaatctgttccgcccggtgcatgtcaagaccctgacgagccagaagcgccgggcgctgctgacggcgcgcaagctcttaaaggacaaggcgattgctatcgagaacgacatccgcgggctgttgcgcaacttcggtctcaaggttggcaaggtcggtgcggtcaagtttgaggagcggatccgcgagctcaccgaagtcatgcccgatctggttgagatcgtcgaaccgttgctcgacgcgcgccgcaagctgcgccaaaattatgccgccctgcaccgcaagcttctggcgatcgtccgggacgatgaggtttgccgccagctgttgtcgatccccggtgtcggccccgtcgtgtcgctggcctacaccgcgacgatcgatatccccgcccgcttccgcaactctaaggcggtcggtccgattttgggcctgacgccggcgctccatgaatcgggcgaaagccgccgggtgggcgggatctcgttatgcggcgacggcatgatgcgaacgttgctctacgaggccgcgcagaccctgctgacgcgggtgacgaaatggtcatggctgaaggcctgggcgatggacgtcgccaagcggcgcggccagcagaaagccatcgttgcgctcgcccgccggctggcggtgatcatgcatcgcatctggagcgacggcacacagttccgctggaccaggacggaaatcatgccggtcgccggctgaacaatcgataaacatcgcccccccgatagacggggacgacaccagtttccacctaccggtggaaagctgtccttcgcgggacgaggatgaggtgagttcgccgactggcttgcctggattgcccatcatcggcaatcaaggcgctcgacagattgttccaacccattcttctgaatccccataaagggtagggccagcgcgccgatcccggagagaagcaaggcccgcgaaagacgtccaatgccggtgaagtggaaagagctagaaggcgcttgacttcaaaccgccgaatagaga

SEQ ID NO: 6936 - DNA, 1610 bp, unidentified
  source 1..1610: mol_type = unassigned DNA; note = element_ac84b7d
  misc_feature 1: note = core
  misc_feature 2..236: note = LE
  misc_feature 237..1595: note = CDS
  misc_feature 1596..1610: note = RE
  misc_feature 16..239: note = bridgeRNA
ctacttatgtcttttcgaggctgctcgggtcggagagactcgggtgaggtgctcggccggacgctcttattgcggctgccctcccggttgttgggtgtggctcttccatggcgtgcgtcctggtcgggtgccgtggcgaggcgtggctcaagaagggtctgctcagctcgaagtagcgttgcccgtcctcgcagacaggcaggttctcgggttcggggaagcgaggagggtgggtgatggaccgggtgctggaccgggtgttgatcggggtggatccgcacaaggagtcggtgacgatcgaggcccgcgatagccgggaggtcctgcgggcgcgcggccggttcgaaacgagcagcgtcggctaccggggtttgatgcggttcaccaggcagtggccggagcgggtgtgggcggtggagggtgccaatgggatcggtcggccgttcgccctacggttggtggccgatggtgaacgggtgctggacgtgccggccaagctggccgcccgggcgcgggtgttcgataccgggcagggccgcaagaccgatgccaccgacgcgcatgcgatcgtgttggtggcgctgcgggacaagagcctgcgtgagctgagtgttgatcccgacctgcaggtgctgcggctgctgtgtgatcgtcgcgatgagttgtcgcgggctcatgctcagggcctgaaccggatgcaccggctgttcttggagttgatgccgggtggggcgccggtgaagcagtcggtcgaccagtacaagaggctgttggcgacggtcagaccgcgtgaccaggtggggaaagcccggcgccggatggccgctgaggaactggccgacctggtcaggctcgacgccaagctgaagctgatgaagggcgagctgagggccgcggtcgaagcgatcgggtcgcatctgatggacatcaacggcatcgggccggcgggtgcggcacgcatcctggccgacgtgggtgatgtggccaggttccccgaccgcaaccacttcgcctcctggaccggcaccgcacccatcgatgcctcctccggtgaacacgtgcgccaccggctgtcccgggccgggaaccgcaggctcaaccatgtgctctacatggcccagctggtccagttgcgcaacgacaccgagggccgggcctactaccggcgcaagctcagccaaggcaagacctcgatggaagcgatgcgctgcctgcgacggcggctgtccgacgtcgtctaccgccaactcgtcgccgacgccaaagctcgcaccttgtcagacagggccgagttagccagagccgcgtcagacagggcggatccgggagggcactcggggacgactctgcaatccagcgtgaccgacctgaccccggacatcggctcttcggacaagccacttcccggacccgcacccgtgaggctacccgtcccgaagccggccgagaaccaccgcgatccgggggcagccgcacacccgcgccggcgcgccggaggcgtcaacgtggagcgccccaccggacgaacgacgttgacgccgaccagcgccggcgcaccatcgaaggctccccggacaaagcccttgacaacctgagcaacagaagggagc

SEQ ID NO: 6937 - DNA, 1312 bp, unidentified
  source 1..1312: mol_type = unassigned DNA; note = element_ac84f5c
  misc_feature 1: note = core
  misc_feature 2..92: note = LE
  misc_feature 93..1097: note = CDS
  misc_feature 1098..1312: note = RE
  misc_feature 1093..1307: note = bridgeRNA
gaatgaaagggacttcccctgcagctcggtcggcatcgatgtgccagagtgggaatgtcatgtgttccaactcaacggagagaggggaagtcatggatcaggttactaccttggggatcgacctggcaaagcgggtgttcgcgttgcatggagttaattctgccgggaaggtggtcattcgtcgaacggtgcggcgagaggagctggtggaggcagttagcaacttacctgcatgtctgataggcatggaggctggtagcggagctcacgaatgggcgaggcaatttcagcgcttcggccatacggtgcgactgatggcggcgaagttcgtcacaccgtatcggcgtaaaggcaagaacgatggcaacgatgccgaggcgatctgcgaggcagtaggccgcccggggatgcgctttgtgccaatcaagagcgcagagcagcaggcgctattgacgctacatcgggtacgacagggattcatcgaagagcgaactgccacgatcaatcgcattcgcgggctgctggcagagttcggcgtcgtactgcctttgagaagtgtgacggttcgtcgccatgccttgaaggcggccgagtcgttgccgcacatcgcgcgctgtgcgatagaagatctgtgccgccatcaccgcgaactcgacgagcgcgttgaggagtacgaccggcagctccagcgccaggccaaacaatccgaaccggcgcgccggctcatggcgatccgcggagtcgggcccctcagtgcccttgcgatcgttgccaccatcggcgatgcgcgcgatttccacagcggacgccagtttgcggcctggctcggtctcacgccgaagcagcactcgagcggcggcaagagccggctcggatcaatcacgaagcgcggcgatgcttacctgcgaacgctactgattctcggcgcaagatctgtacttaacacaacgatgcggcacaaggaccagatgtcacgctggatagaggcggtgcgacagcgacgaggacatcatcgaacgctcgtggcgattgcgaacaagaatgctcgaatcgcttgggcgctactgagcaaaggagtcgaatacaaacctgcctaatcgagacggcacacgttgatgtgaatcggtcagaccgatgcccggagaacctgaactaattggaaggcggcagacgatgccgactaacgtgcgaggaccgggcgtgcggctttcatcagggccagagcggaatcgctcacagaacaggccggttatagtgacgcagtccgacctcttcacttcaacttcgttgccgttaagggggagtccttata
